United States Patent Application Publication US 2014/0230087 A1 - sequence listing, part 15

SEQ ID NO: 11202 - DNA, 9909 bp, Vitis vinifera
  Intron number 2 from transcript GSVIVT01023889001 (locus G SVIVG01023889001) derived from phytozome v7.0 (chr-ID chr3 ; pos 2647513 to 2657421)
tttaagcttccaggacgccttcgttgttctctaaggtaaccattctccttcccctctgccttgtttcgaaatcccattttttttgttcttttcttcgccatttggttcatgcatccatgaatgcaaatttgttgcttgtttatgcttcaatgggagattgttggtgataaaattaatttttgttcctgttgatttgacgggaatgagggtgattcttgtttgctttctcccttctttttctggatagtgattttttttaccgctttttctttttccctttgtctttttttgtagtgaattttttattgtatgtagtgattttgacaagtttgtagctatcgtttggatgggtcctgcttatttgttaatcataaactgaacccatgtttctgattttgggaaattgattactttgtgggtagttggagtattctggatttgggttgctctttttgggcattgtagtattgggcccaatcattggttcagagtgaggataagaaggaattgagtaaacttataaattggttataaagttgattaatttctgatacagaagaaggtatgctctagcggttgatgcttttgcgttgcatatccatcacaaactcagagtatcaagcttagtttgcttgctagaattacagaagatgatggtctttgaaacgaaaatgggggtattttttgggtttgtggcaatttggaagtgtgactcaaacttgttcaagttggattttatagctaaggatgggattaaagttgctggctggagcattgcgacttccatattgtcctgttggtagtgtgattgagataagattcaaatgtaaagtgtttgggagaatgctaatgagggacagagttagagagaaaatgatcaacttagttactggtttgagagctcgaacacatatacatatatagctcattacatcggagaaatttctagtgaattctgcaaaaatcttatgtgtacaaatgaatgggtacaactaattctaactaaatccctgaaatatcagcattagagaagttgactattagagccaaagtaagaacaacccgaatggtagtgggcttcacaacaggactaaacatttcaaagttatcaacaccaagagtttgatgaaaccctatagtcaccaattgagctttatacaatttgatactactctcaggcttgtatttcaacctatacaaccacttacattcaatgacattctgaataggacatgaggggaaccaaatccaagtattattcttgataagagccttctactcaagtgtcatagcctatttcaataggaaacgacaaagggatatattgatagaaaaaaaaaaagtacaagagaaggatgagaaatcctcccaccaaagaaaactaaattacaagaatacaaaaacaaaaaagtacatagtaaaaacaaacaaactctctagattagaccaaccctttggaattacacaccactaatcagtcaagttgtaacacattaaggggagtccccttaaaaaccttagaacagaaagcccaaagagaagcaaggaaataaatagaaacccaaagatactttgaattctttactttatcctaaaaaatcatcacgtttctttccaaccacacaacccaaattaaagcgatgctcgcagcttgccacaacactatccctctcttagataaaccaaaaccattataattgatggacaacatgtcaaagatgttccttggggggacctaatccatcttggctaactgaaataatctgtgccacaaccccatcgtcaaagagcaatgtaggaaaagattatctactgattccccatgcttcatgcacagaatacaaatatcaggactaagagctttgtagggtcttctcaattgtagcaagtcattagtatttaccttcttgtgtgccactaaccagacaaaggacttgactttgaaaggtacttgagaattccaaacaaacttagtaggaaaaaccggaggagaactaaaaaattgggataaggctagaaagaaagatttaactgaaaaaagtcctgaggaaagataaaggccaggatctggcatctgaaaccgaaggtgatagatgcaaaccatcaagtgaccgcatgaggccttctaaatcttctatcttagaatctgaaagtttacgacgtaaattaaagttccaagagaaaggactagtagaactgagaattgaagaaataagaatatttttatctgaaactactctaaatagtcttggatattgggatcccaaaggttggtccccccactaatctaaatagtcttggataagtgccatagcctattgctattcagtcgacttaatgacctcacaaaaagaggaaggctcacaaattttggaagaggaaacaaagttgaacaaacacaaatgatgcttaaaaataccacattgtgatatcccacattagttagaagaagaaatttttgacactatacatttttttttgataggtaataaaagggcttgaattagaaacgcataaaagatggcaaaacaagtacacacgaagtatacaaacaacgcccaaaaaaaagctatgcaataaggaaagaaaaaatccttccccttacttgacaaacaaccaatctaccaaatcaattaaagacaacgtgtgatcctctatatacaccttaacccaattcacaaaagtattcatgcgaatagatttaattgcttggttggaacgcttgacatcattgaaagctcttctattcctttccttccaaatagtctacattaagcataagggggcaaccctcaaagttttttgctgatttttacccataaaagatccgtgtcaacataacaaattccttctaactgaggaatgcataacccattgcacaccaaaaagggaatcgatcaagttccacaacattctaacctagtcacaaaacaagagtaggtgatcagtggtttcctcatctttttttgcacaattaacacctattcaggatattccatcccctcattttcagctggtcaagagtcaaaagtctactccaagatgcttcctaggcaaaaaaattagcccaagacctccaaataatactaaacggacaagggtctctagaagtccaagtgtaggagcaataaagagatctaactgaaaatttgccattctttctttctctccaacccaaaatgtcctccatttctcttctaacaactaggggttgtagtttatgaaaaaaagtctccacttctcccatttcccaatcattaagatgttttgaaaagtgagggctctagctacccaaatccccacccttctctcatgcctcttaacacctaaccatctttatttactaccaacaaaaataagttagggaaaacttctttcaaagtttggttcttgcatcacaagtctttttagaacttaacccttctcccgttcccaactataaagtgagatctacttattatatcctcccattcatttctaatggctttccacacccccacccccacaccataacctcctctcactccttttgaacatcaccctccttcctcttctccaaacttcccaatgatgacttgtttgcaaaggagctccctttcttttgcaagtctccaactccacttcccaagcaaggctttgtttagggccacaaggttatgaattccaaggcctccttccttcttatctacataaactgaattcgaattcaccaaataaggctttttctctagggcactgccgcctcataaaaaatccctttgaatcttttcgagtcttgaactcacttttctaggaataaaaaaaaaagacatgaaataaatcgggagacttggtgcttttgatcaaagtaagcctcccgcccttagaaaagtattgtctcttccacattgttaattttttttctgaatctctcttcccttgcatcccacaccatcttggaagatttaaaagaggcaacgaaagaaagactctgttaggatagagcccttaaaagtatgatatgatgtagcaaatttggaatttattattcatttgatgatattccaggttcacttttatctatctttatttcatgctttatactctatgagcattttgacctaatatcttttgcattgtacatgatttggatacattaggagttatacaaaagatccaaatcatgagttctttgcaagtagatgatttgctcgcaaccggtttgtggacttaggcaattcatttgaggttgtagtgcattgcctcctaattggagggatgattagtcttgaccatcgagatgaatttccaatgatgagtgcactagtgtgtatggttacacattggataggacctatgatgaattatgacataaggttattaggtactcataattttaccaagctgtgttgtactgtactgtttctcaaccttgagagaatattaagcttatgtagaagttagtaataacgttgacctatgagtgagattgtaagttgatcatacatttcttatggattaggtcattgttgatggaagtcagtagtaacaagtattctcaataaagacatcatgatatctcatgaactttgagatagtgtatccccttaggtgatcctaaggatgtgtgattataaaatctatgggtccgcagtaattcctttcgtagaatttgacatatactcttagtgaactagaatgtcatttggtcacataataggaggatctgtaactcaaggattgtagaggtactcttgaaagaataatagcttttatgttattagactaataactagttcatagggagactgtatagagtggatagcaagtcacgaactcgaacacttggtgtcttgttgtaacatacatagggtactagagtgtaatagattctttgtagtggaatgttgagtcaacttcaaaattagattatgaggaaaccggtattatcctatgggtcctagtagttcccgcttgaatttatatttcttgatgacacggtttatgagagttagatggattttgagttcacttatatgtataagagcgttttggtaattatgcaaggttgcattgaacgatgtctctgaattggactaattaattaattgaagtcctactaggttaattaatcaattagtaacatttttcacttaaattaagtgacctaagccgttggtggactcaaatcacttaacctcagtaagaagcctataaatacctctcttaggggttagggtttcttatgaagtttagtcttgtcattctctctctgtaatctagagagagaaccctaacttccagccctgagatctccaccatcttagtgcttagacttgaggaggagtcatcgggtgaaagatcatgatgtttatgggatttgctatggtgttggagctttctacaccaacatgaattgatcctagaaacatccaaattacaagaatgacactttctcatgacatatgatatctatattggtttttgaaaccaagttttcccgtgtgctttgatctagagaagcctaggataggatttcatgtaccctatcgattcaaggcttgggaatagagcaatccaaagttttccaacaaacccaagtaggaagtggtagcttccctactttacaccccaacaccgaaacaacattctccactatctcaacctcccttacaagaactacctcacttttatccatatttactattaacccaaagaccacctcaaaccacataaacacccaactcagatatctcagttgatcactgttggtcccgtaaaggattagggtgttgttgacaaacaaaagatgagacacattcatccattttccactgcttcttcctaccttaaacctagagatgaaactaccacttttggctttgaacaagaattggctatgagcctctatggcaaaaaagaatagataaggggatatcgggtcaccttgcctcaagccccaaagctacaaaaaaaggtgtgaaggggtatgagaacggaaaagcttgttgcggaaatacaccagtttatccgcctttgcccaaaccccattttaggcatgactcttaggagaaaatcccaatcgacatgatcataagccttctcaatatccatctttaagaggagatcgggtatggtgccttttaacctagaatcaatagctccactagcaatgagcactgcatccaagatttgtttaccttaaataaatgcatgctgagtatccaaaaccacctcctccattactgtcttaagcctatttgccaaaactttggcaaacaacttatataagctccttaccaaactaattggtctaaagtctttcaaatcttcaactccccattttttttggaatcaataccaggaaagtagaatttaaatttttttgaaaggtgccatgaaggaagaactctttgaagaaagtcataatctctggctcggtaaaatcccaacaaaaatgccaaaaagccatggtaaaaccatttgggcttggagctttatctccagaaaggctactcaaagcttcaaaaacttcttcctctaaaaatgacacctttaggcttttagacctatcttcccccaacactttgaagtgtaaaccccttatgctcgatctctaatcccatatacaagagaagagtatgataagctctacacaccccatccttgatctcttcattagcaatcaaagtaaccctattgatttccactttagttaacaagttccttatggtgcgaggattgaccatcttttgactctatacatagtggactatttttaagaaagttaatgcattttaaaatcgtgagtatttattgagtctagagcggacaatatttacataagataaagtggatcattataaatagtattagagttaatacttgaccccgatgtgagactttatctgtttggtcccataaggaatgtttgtcaaataagacaaggacgttgtaaaagcattggggggagggtttgattgtgatattccacatcaaataaggagaagaagtttgtgactctctctctctctctctctttatacatatatatatatatatatatatactggttttttttaaatgtataaaaatgctttagagtcatgagaacttattgggttcaaagtgaaaaatatctacatgggaggaagtatgtcattacatactccatcgtgcttaagctacctttcttcatattttgaagttgacaaagttgcattatttgagtcttcgatgcggcagaggagattgtcttgagaacattccaaatctcaaaggtaaaattgagattgatgatttgagacatcacacgtttagttagggacagatagatccaacacatcattagactattttgtcattactagagatgaagattaggattcacaatctcagaactctcaagaaacctcagtggactgggttgtgagctattgatcatctccttgagtccattagcgatcacaatgttgagcatgagtaagccatatgagataattcgagcgatcaaagcctgatggtgaatgcttgattcaaggatgggataattgaagcaatgacttgagcatttgagcttgaaacagggccgcttgaacttgaaccagcaccattgcagtgaatatgagcaagagtggaagacaatgaacctttggatgccttggaagcagagctttaaggatcaactgctttggtaccaagataagattcagagaaaatgtaaagcgtctgagagaatgctagagagggacagaattagagagaaaatgagcaactgagttactgatctaagagcctaaaatatatatatattgctcatgacagcagaaaatttgctagcgaattctagacaaatctgacatgtacaattgaaatggttgcaactaattctaactaagtcccttaaatatcagcacaagagaaggcgactgttagagctaagactgacactgttataggttatagcaatttattacacttaccaaattggactgcatgataaactcaagcatttccttctaaatattgttttggcttaacagccaagttggcctgtcaaatagatcttgtttttagtttttatttttttcgtgtttggtaaaaatattttgaagacgtagtcataaaggaaaaaaaaagaagtgcatttagtaaagtggcttacatgtgggacttttatggaagataacagtgctgttaaaagaataataaacagctggaaagcccataagcctttaggggtaagcatgtctgccactaaaagtcgcttttctttatacttttaaagattagagaaccttaaaaaatgataaaagtgccattagaagcttatggaagtgatcactatgttgctaaaagtcccttatctaaactgcattttcctgaagtcttctttttttttttttttttttttcttttaaactacatcttcaagttgcagtttttagctgagccagagaatttttctttcaaaacaattctgcttgacaagcaaggcaatattaagagatctgacatgcagatgtcataccagatgcagtatttgtccctacttaatattaattgcttttatatttttttgaaaatcatagtgcttggaagagaaggtaaccttgagaaactaggaaactcaaagatttatccacttgaaaatctggccctcctatatatctttttgagaatgtttgtattatccttctcgtcttttttttgataagtaaaggcaattgtattaaaagaaaaagtatacacgatgtatacaaagcaatcaaggtgcgaatacacaaaaaacaagcaactgcaccctaagaagaacttaatcaatccacagattctagcaaggatataggaccatccccaatgtacaatctaacctaatcccaaaataaataccaaaaggagcttttaaaagtttggtctaaactttcgcaattctcaaaggctctcctatttctctcccttcaaatggtctaaaaaatatacaaaggagctactttccaagcctttttccttcttctaccaacaaaggagcctcctcaactcaaaagcaaccctcttaccgaagagttcatcacccgctttacatcaaataaagcaaaaaccagctgccacaaaatgtgagctttcgagcagtgtagaagaatatgattacttgtttcttcgtcttcttctttacacatgtagcatctattaggcatcttccaacccctccttttgagctgatcctgtgtcaaaatctatgtccaagttgcctcccaagcaaagaagcttactctaactagggcccacggattccaaactatcccatgggggaaaggatccactcccctgttgttcaaggaagagtaggatgacttattttaaaagacgccgttctttgtatccacccataccaaaatatcctcaaaattcgaagaggggtaataatcatgtaacctcccaaagaagttatctacttcctctaactcccaatcaatcaactgcctaaagaacctaggattccaactaccactatcccaaatatcaaccacccaagtatccttagaggaagctatagaaaaaagatctgggaaagcttccttcaatggcacatccccacatcatctatccttccagaacttcaccctgttcccaggcaagagactacttgtcttgcataaacaactgccattgacatattgagacatagagtacaggcaaaagactactcatcggatatctgcatttaatgtctgatttatggaactatcatatgttggtaccaatatgagagaaaaatatactgttgcatgcatttttttggtcattcacattgaggaacttgtattcatatcagtaacttcactccttagttgtaggagttattagagtgctattgttttgatctctcatcttgtgccatgcatccccagaatttctggtacttctttc

SEQ ID NO: 11203 - DNA, 7911 bp, Vitis vinifera
  Intron number 2 from transcript GSVIVT01014869001 (locus G SVIVG01014869001) derived from phytozome v7.0 (chr-ID chr1 9; pos 10938592 to 10946502 reverse strand)
catattcataaagctgtaagttcacatcatcgttcatagttttaagattaaacacgttccaagtttttttctttttttggtttagattattaatgataataaatgagatgatacttatggtaggagggatgtaggcatggacttaactgaaagggtgaattttgcaatctgtgctactaaacgatttgataaccttgggggaagatgagagacaggcataagagaacctaggttcagacgggtggagaccaatgggagtgataaataagtgtttagatgacttgggcgtggttctgttcaaccatggcttctaatacagtctatttcaaaaagatcagtatattcaaaagagatttgttgatgtttggtaaaacatttgcaggactgctaggattgataattttgagaaaaagatgaatcaaatattttgtaagtttaaaaaatttataaggttataaatgtttatgtaaaaaaagttcttttcaaatatactagccttccacagctctaacttttactaaaattggttttaagtcttttttttttaactcaaatgacttcttacaagcaatcaaataggggataaaagagattttactgtcaaaaagctcttgaaaaccttgtaagcgctgcacaaaatggggccttatttcttaacaacttttatgagtagtgagaaaaatagagagggaagtgatttcactaaatgggcacaagaagggcattaaggttatatttggtttatggaaaatttgaaggaaagaaaatagacaagaaaagtcgaaggaaaataaaaaaatattaagtgtttatgaccatggtaaagatgctacagtcaatgtgaaatataaatcatgtgaaattgggacaaggggaagttgtatgaaatttttcatcctaatataataatatgctatccattgtcattctaagttactgagttatttaatgaaattgtaaccatggtgtatgatgtctaattgttttagtggtctgcaagtatgataatcatgccttcaatagtactctaattaagcaagctagtaggacgtttgtttgtgtacatgaaaatgttcttatatatttatttaatttcttgtctatgtatttaatttcagatttgatatgcacatgttagtggtcttttcatacccttatcaaaaaataaaatcgcaacataaaaatgaattgatagggaattaacattccctttttctttaaagggatgcaaatgagccaagggtagttaaagattgcactatcaaagcttaaattgataaaactgaatgatgttgaggctttatttttcctccgggggttaggatttagagatgagtatttaactattgggattttctctctctgcttttcttttttttcttttttttctttttttgttatgttttggttatttatttatttatttggagacgtggatttgaaatagcaattgatttgtgaaaggttgttactcttttcaacttaagagtgttggcttttattaggggtagagactaggtcttattcgatttattatgggttcaggtgtattgatgatgttttgtatgggtggtttcatcctataaaaggttttgaaagaagagagttttggtaggagatggggactattatgggcttatgggatgatttatggtgttttgggggggggggggggatgggattttgttgctgcactagaggcataattgctgagggtttattcggaaatgagttagctttattagtttattgaggatttttaatttggtagatattcctacataatggggtattttatattgtttggtggttcatttgcgatctacattttaccattttgatcttagaggagcatttttctaatgtatcattgaacattttgcccggaacagtatctgaactttctcaaattttgcttcatagttgtggtttgggtcttggaatatgttcttttaggtttgaaatattgggttggaggatgatggtttggggagttaatcaagcattggtgggtaaatatattctattctgtttgggttttgttgagtgagttattctatgtctttgaaggaatatcttaaaaagtggaataaataggtcttgataatttatataaagtggaattgtgtttgtgaaatcaagttgtgaggagctctaccgtttagcacattttgaggaaaatatttggtgaaaaaaattgagagccctatagcttaaggaagatgatagggtggccaatactcatagtagaaatcatattggcaaactcaaggtaggtagatggtgtatgtttgttgggggatggggacatatggtgttgggatttaagataaagctcttgtttcgaatagcttctatacagtagttggcagcataattaggaaaagttcaaaaggaataattaatgctttctcaggaagtcccactgttctaggtcctctgcaagatgtctggatgttaccttcttagtttcagtcccaaaacagcagttgaagaatatttaggactttaggccaattttagtatgataattgattttattttgatcaaaatcgttattaatagactagaaaaagtagtttagagggttgtggccaaacatgaaatgtgtctatagagggtagtctaatacttggatcttgacacaatcatagtcactaaaaaaactcaacttgaaattgaggagctttaaggaagggttagtgtgtaaatggtatataagaaaatgtataaacatactaacaacaatgtgttgtcttctttatatgggatggattctaggtaaaagtggatataggagggcaaattttctatattcatggtaaaactttcaattttagtaaatatggtatgatgcaattctttcttagctctgacctattaaaaaaaaaaaaaatctttcttagttctagaaaattggggtaggaaagctagggggtttatgattttgcaattgtcgcctgagaaatggaaactattaatttgtgatgtaattattagttagtttagggtttaatggagagttgcaaggtggaatttgggggttcaatgatttggagcctttggaaatccattagcaaggattgggattcttttacgcaaagtagaactttctttggtattggtagttgatgagggagtgtgggcaattggttattgaaatctaaagtccataaaaagaagttgtgattggggattggaggaggtggggagcttttgttttccctttttttttttcttggtttgttattatgccttcttctttttctttttctttctttatttttaattagaaacaagaagaatgatatctgaaagggaagaattttacgaagaaaagtgtgagacctttcaaaaaagaaggcttacaagccttggattaaaatttcctctaatttcatcgaaatttcagttattgggtaggcctaaacaaaatatgcaaaggatatttgaccaagtggaagagtgtatattttttgttattttctcgcaattttcccaatttcccaatttaattgttgatttattgacatttcatcttgccactttctccattttccaactcaatggccaatttatcgacattttatcgtgccactctctaattgattgagttccatgtcagctagctttcaaaaattgaaatgtgtggtgtggggttggctccaacttggtccctcccacatgattttagtggcccttgccactagggcaatgttacctgtttttagagagcacaatagaatggctttttcttgtttagagtatgcaaacttaaggggcttaaaggctcctgtctcagaggggaaggttttctatgccttgtcttgcttaggtgggtataaagctccgaggccaaatatattcattatggctttttggcagcactattatgactttataaagtatgaggtgatgaacttcttcaaagagttctttgagcaaagttcctttgtgataagcctaaatgctacattcttagttttgaatccaaagaaaggaggagtcgaatacttgaaagtcttcaaacccataagcttggtaggagggttgtataagctattgaagagggtcataggcgatgttgttccaattttcagcttgcatttgtggaggagagacaaattttagacacgacccttattgcaaatgaggtcattgattcaaggttaaagagtactattcttggagtcatttgtaaacttgacatagaggaggcttccaatcatgttaattggagtttgcaattagcagacatggaaaaaatgggctttgagtagaaagtgggttggatggatgaagtattgtatgcctttgaccaccttttcgctcgtagtgaatgagactcctactgaagttcgaggggcctaaggtaaggaccctctcaccttatttatttatttatgttggcttaggaggctttcaattacctattaatgaaggcaagggaagaggggtttatttcaagcttcaaggtgggaaagggtggttaagggggagttgaggtgacttatcttttatatgttaatgatgttattattatttatgaagttagtgaagtgttgctgatgtatccaaattggactatcatgcggtttgaggtgatttttgagtggaaagtcaatatgaagaatgagcttattctagttgggaggatagataatattcctattgggaaggtagatgatttggatgcatgtcattattagtgattccaagaagggtaagctttatactcgagaagatctaaaaagattgcttgtgtggaggcaaagctatagagaaaaaacttccgatggtggacgaggctacattgtgcatggctaagataaaaagggggcttggcatcgagaatctttttgttctcaatattgctcttttcaataagtggagttggagatctgtcttggaaagggagttaatgtggaagtgagtgattgctgggaagtttagggaaggttggtgttctaggttgcttagggagggttgctaagttggattatgcaagaaaagtggggtgttcttaaaagcaaagttcactttacaatagaaaatgggaggagagtaaaattttggttggataagtggtatggcgacgctttgctaaaagtctctatcgttgccctatgtgctattactagcttaaaagatttgtgggtggcaaatatgtggaagcaagatgggggcgagggacgctagagtccttacttcttaaaacaatttcatgattgggagtccgaggtggtggatgtcttgctaaaacttcaaaagcaaatagtaaaatggggtataaaggataggatggcttggtcgaactcgaggagcgataagttcttagttaaagctttctactcctttttggcgtcaagggatttagaggtttttgcatatgaagttatttggaattcatggttttgacaagagtgagtttttttacatggaaacaacatagggaaggatattgacattgaaactaattaaaaggggaaggagtgtctttagggaatagatgttatatgtgtaaaagggaagaagaatccattaatgacatgctttttcattgcgcttcaacaagaattttgtgaaaattggtttttttctatgttcaggttatagtaggtgatgcactcttcaattaggccaatattgctaaaatggaataggttctacctagtaaagcagcaaaagagagcttgttggcttcccttttatctcttaaattttttaatatatttatacaaaaaatgaaatattaaaaaaaaagttcagtgaataaattaattttaattatcttatataaaaactaccattttttttatatcattgaacacatccaaactagatagatctattcaatgtgttttcaagttctacatattattgttgaatctcacaaattttatcagacatgtattattttcttcaataaaaacaacttcactgtgtattattgtgtattttatcttttttagggtttttcccaacattttataagttttgatcaatttatgtcccattgctctctccaatattttccaaaatttttgtaaaatccacacaccaatattttaatcattgttccacactatacatcatgtttactaagtttagatattacaagtgatacataacatagcaatcaaattctttgaattttttattagacttggttgtaactttgcttacttttaatgcttcttgtatttttcctacaggatttatgtttcatcatttccaaataaattactcttgttcaatagagagctaattgagagtgccatgtgatttttgtgacacttaggtttcctgtttagggctttacaaagctatgatccttgaatgcaccttattgttggacctttgctgggttgaaatcttgctgaatattggttgattaaatatggaacttccaacctatttgccctacaaccaatttcgagagacattgaaaagtcaattgggagagccttagatcaaggtcaagagaggttgaggttgaggatgaggaagaaagggttcaagagaggtcaaggagctgagaaacagacttggagagatatcaagaggttgaggtcaagggagggtagaagtaaagactaagagaaagagagagattcttgtttagacctacatattctcctactagaactaagctctctctctctctctctctctctctctctctctcccccctccccttccctcctcccctccctccctcctggagtatgcttctttattggtctcattttgtgtttttattgtatacttcccttgtactagggtggtttgcttctttgtgggtctccctcatgggtttatattataattttatttattaaaaataatgaaaatcttgaagttttttttgtttacacgttctctgtaagacctaagagttcacttgtttgattctcttttacttttatttcttttttttattttgtgtgttctttttatatatttctgtatgctaggttccacttccttattggctttgtaacctccttacatatcacaaaaggaaaaaaagaaaagaaaaaaaaaaaactatctcagaggtttttaggtggcattaacatgtaataggttctttgagaggagcagctctctcctgtccttcaactataaacactttaacttgaagagaaatgacgtaccttgagaatgtgagatcactaaatattcttagattgtatagaaggccacatctttgaaatatttatatggggcacaattactgggactttggattgtagaacccataacaaacctagaatttatattggacaaaataatttgtccaaacctggattctgcctgtgtactatgccaagaaacaagttccagttgaatgaggtcattgtatgcaggatgaatgaatcccagctgataagtgtcttctgccagatcagatgatataccttgcaagtggtattggttggatggctgtatgcatgcctatgttcattcattggtaccacatatgatatgtgtctgctgtgaatcatccagttagagctgtgtcaatttttactgctttagtgctgactttcatgtatctatagtcctagtatgggatggttatgctccaatttaggaggccttcctagcaatatgtttttcaatcaccatgcaccaaattctttcacagatttttttttggggattaaggtaagaactgttctttacagtttatactttaaatacatgtgcatagtcttttctgtgttgctgtttctctttagtaattaatcccttgttcaggtccataagttttcatttttttcttatcaaaccttattctagcgtgtgttcagtggttacactgccttattttgagtgtctatatggccaatgatgtactattttccaaaaccattataacaaacatcactcttgtaacagttg

SEQ ID NO: 11204 - DNA, 8315 bp, Vitis vinifera
  Intron number 1 from transcript GSVIVT01022966001 (locus G SVIVG01022966001) derived from phytozome v7.0 (chr-ID chr1 2; pos 17470155 to 17478469 reverse strand)
accatacccattccagccccaccatctccatcaaggtttgtttttctttgcccccagtttaccccctttcgtccatcttcaaattcgtctttgaccctgtttggttgtagagaaaactagggaaatgaaattaattttgggatcttgtgatacaatcatgattcaagggtttgatttgtttttatttttctgcattttttcttggctgccgaaggcagttctgatctggatttttcccttttcatgtgattggagagttttaggaatgtggtgcaataggaaacgcataaattttttttaccttttacaacattgaaaacttcatgaaaggaaaaagtatgaaagaagaggttgttgtaatcttgtttgtgtttgctgttgttttgagaatcttaagtatatttttgcgattcaaggtggattatctgtaataaattagggttttggttttagattggatgctagtcttttgggttcaaacactaaagaatttggaggttggaggttcaaggaggaagaacttctagggttcttaaaatcaaaattaagtggggtagactcacacacgctattgacctaaaaaggtcctcccttatgtctttcttcacaatcattcattacatcagttatgtagactatcaataatcgggtttctatttgcccctattttgattgcttttgtgggtggctttgatgctttaatcaactctctcattttatgagagaaatattattaaaccagcttcagtagccgaaagcaaagcctattggtttggaggaaagtggtaataaaatcacctagtttattaccatctaggtgttttgaaattcttcttcttgttccttcaagattaattttgatgggcaatcaaggtttgctagggataggagccttttgtaggggccatatcgaaatattgcattgctttgtgcagagttacagtgaaatgacaagcttatgacttttacatgggaatttgaaagtgagtgttgagagcagttttggatccaaccgtaatggagggtggcatactccaatatggagtactttattgatccttaaagttagggccttggaaatggcgtagagaacttactatgttttgatcaaggttgcctaggaaaaataattgataaaactataaatatgcccggaggtgtcctcctttgttaagaaccatcaacagtgtctttgatctaggttgcacaaggaaaatgtttgataaaaataagtatattgaattaaggagatggctcctttattatgaagttatatgggatgagagcattgaagtgaggattagatttctctctatatatgctatatcaaaggttagattgtatagtggggctggatccatgtcgtttgatagactttgtagattggataggctctatgtaaagcgcagttgcagttttttgggtcttcacactttttttgattgttgggtctctttgtatacactgtgtatacctttttcctttaatacactctttcttacctatcaaaaaaaaattatttgggtgagggaaattgatgggaggaaaacatacaaaaggaaagtaaagattgttgggatttcccttgtgctaatcactattttgtgaatcttatgtggtatattttacattagcatcaaatctctcttgtggttagtatttgttacagtttggcaaataaggttgtgttgttttccaatgtagtattttattgatcatcaaaagccatgcattggaaatgtttagaattgttgttacttgggttcctcctcaagaatttgcaggcagatttcttcctggaaaagggagcatcataagggaatgttttaatggatctattaggctgttgtagtcggagactttgcatctcttctcttattccatattatcaagcctccctttgttttctgataaattttcaatttttataaggattatatttttcttggctgggttcctccttgagaatatggagtcagatcccttcttccaaatcttcgagcctccctctctttttctaaatttttttgaccttttataaggattagaattcagttacttgggttctttcttgtgaatttggatttagattccttccaagaaaagggagcaataattaggaaaagctacaatgaatctactatgccttcatagttggaagctttttatcttctccttccaaattatcaaacctcccctttttttaatgccattgcttcttcttcttccaaggcatcaagtcatccttttttcaataaaactttcactttttacaaggaaaaaaacattacaatataatgtcatgaaagtcttcttcttcttcttcttcatcttccaaattatcaatcctccctcatttttcgccaaaacatttcactttttagaaggaaacaagcattatggcagaacccaatgaaagtcactctttcttcttctttcaaattatcaagcattcctctttaggtgcaattttcactttttatagggaaaagaacattatactagaaagaaacaccatgaaagtcactatctccttgaagaaacatctgacaagcattggccacctatagaatgaagtttgcaatctacacacaaatttaaaactgtggtcgtgagcctggttctgaaacctaatagtttgctgggttcctcacttgagaagagaagagaaggaaagttcattaaatttcttgttgttgcatgggagaatgtatgtaaatgagaggtgaggcagctaagtaatcagggtttgacccattgggcattgaataaaaggagctgttaggcatttatctggagggctcaatcagcttagcctggcaccaaaagggctagattggattgtggtggagagaatttggtttgggtttctcttgtctctcctgtgagcgcagccatgattgaaggatctggtgctgagggtaagaaatgttgaaccaagcatggagaagtagctttgcttcactaaatggagctggtagtggttgttcagcctcctaaattgtgatcgaagttttctggtttcaaaaggcagcattaaggaaaaagtaagttgtcaaagcatgtccttagtaaggttgagggttttggaaaatcttcggggcttccttttgaagggtttgaagttgcaggcatcaagactgtttaagctattaagattagatggggccatgtgggaaataatatagcgtaagaaaaaggcattttaggttgagctcaagaaagataaggaattacacacgcccacatggttaaccatgatggtaaaggaagctgaggtattattgatagtaaagggatggtgggagaaaaggattggtcaatatttaatatcctccctaagcttagaattatcctatagaatatgagggtcttcaatgacaagaccaaaaagatgggtagtcaaatcttttctttgtgtttcaaatgctaatttggtgtgcttgtgggaaaccaagataagtgttgggatatctattaatgctacggatttatgaatcatctttttttttttttttttttttttttgtgtgtgtgtaactgaaggtagtagaacccttagattcttgtttttgaagcttaatgtaatcaccatgacaactaatgtccgtgttgcctcttttcttgtattagatgaaatatcatacagaaccagggtcttagatttgtttggagtagtctttatccccaaggaaaattacaagttgtttgagtttttaaaagatagttacatgacaatgtaatcttagcaagtatggcagccactccattgggttcttagcaagtattccagccacttcattgggttcttaacaggtgcggcaactactccattggggttactccaagggatgaaaaacacaaatattcttggaacttctctcaaaattaagcactattctgcatcatagtagatttgctattggttctagtttctcgttaaattcgagcaaaaattttcaatacagtaaatcaaatttagtggcagtgtagggttgagaatcatgcttcagatgtaaaaaacagtataatttggaagcttgcaaggaagttcactttaaaatatcatcattggtgctgcttctcccttttattcttcttgcttctgttttcccttttctttcttatactttcatcatttgtgcattttgttcttaatgtttgttcatcctacttcagggtactatacttggtattcaaattgcaccatgaatatatgaaaagcttgtttcttttatcacaaacaacagttattgttaagatttgctaactaatgattgctacatttagctgatccaatgattgctacatttagctgatccaatgattgctacactacttgtagtcaataggtaaaaatttatgattctacaattttttatcgtcacttaaatgaccttgtaaatttatatatattctagatgttagatgcttgttctccgttcctttacatattcacacgttctgagagcttcttttaacagtccgtatgctattcctcgggcctcctagtccttcactttgtcctattgcctatgtgctctagtaactctgtgcctaaatctcatttcagaaactcgttcccttgtttaaatttcttttccactttattaatgcttaaattgctggtgttctaaattgtatagcttgtcggagttcttaattgtacagcttgcaggtgttcttaattttacagcttatttgatctatctcgccctgtgttcaggatccccaacaatgataatttcttcaaggatgtttttttcttcttgttcccaaatttgactatatggctcttagaaacaaaaggttcctttatgcaatttttcttttaaagctttgcattcaatttctatgagtcaaggtgtcaagctacaaattttcctaaaagttaaaaaatgttttaaaaggctaaaggtggtcttgaagtagtttgcctaaatgaggcaagacaaaagcctcaaggttgaatgaggtgtaagcctcaacttaaacaaataactaataaaaaattgtcaaaaaaataaaaaatactctaaaatcacaataaaattgaagaattaaaaaggcataaaattcataataataaaattaatcatttttcattgttaatagttctaatttagttccctttttttacataaaatttagctctctcacatggttttaccaaataatttctacattactattactatcactaggatcgtccaaaaaaatataatcatatccaattgttatatcatcttccccaatggtgttaatctcgactcattcttcttctttgtctaccaattatagtggtatctttttttatctattaataattagattatatatgagatcaaccactaggacaatcaccaattcccttattcttcttaatctctctttttcccttccatttaaaatgttcattgaaagtcaattaagcccttattttgtaaaaggtttaaccaagtagggacccaatacaaaattcataaaatttatatcaaaagtccacaaaagcaatagatgatagaacccattaaaattcattgaatattgagacttgagtctcttataaaatatataccaaaagcctataaaggctgaaaatcctttggatacttgaggcttaggccaaaaaccctttggatgtttgaggcttaggcttcaacaaccttaaggctatagcctcaaagctatatgccccgactaggtgaggcttaagcctcaattaccctaattgaggctatagccttaaggctaatttgcggagccttgccttgaggtaagcctcgatagcctttttttttttttttttttttttttttgataggtaaatttttgtcttcattgggacttaaacttgaaacctcccaaaaaccctccccatcactttaccacttgagccaagcctcaagggtcgatagcctttttaaacatgggactttaaaccattaggtaagccaataatatatatcaagctttatttaatttatttgggtttaggtcatttcatctctcctcatcggcgaccttctttttgggcttgcatgtggacacaataaattagggcaaataaatatgcaatgcagtttcaaatcatgatttcccaacaaatcaggttctgatacatttgagtgcctttagatgttgagatcatgtgcacatatttgttatgcatctatcaatatagtcattaatcattattcctctattttcatgtatttgtttatttactttgataggcaaagagaaaaaatagcaataaatagaaccccaagaaagggcaccatcatagttttaaaaggcacaaggcacacctaaggtgtaaaagtctcctacaacttaagtgcaaggtgcaatataagacgcatgtctaagcgaaataaaatatgacttatgatgcatatcaattttataatatgatttaatgataaaaaaatttataaaatatgatccaaaatataatccaatcaataaaaaaatttatgattccaaacattaaaaaaaaaaaaaagtaatgaaattatataattttcaatatacaattagaaatttcaagaataaaatatttaaaaagaaaaaaatagaatagaatagacaaggtatacctctccaacaaggcacatgccttggcaagcaaggtgatataactatgtagtggttgcacctttggtcaagcgtgctttaagcatgccatttgaactatgggcgccatctaagaaaacagagatatatgttccatacatttttatatgtaaatataaaccaatttttgggttttattcgcacaaaaataatttaattttagtacttaaattggtttatatttggactcaaaataacataatcttgatattcatccaagcatgtaaacaggccagcttgggctgtccttaactaggtccaggcaggtccttggattgggctgggaatttaactcaatttttttttcattattgtgcaagggttcaaatcctatctcaggcataatatttgtggattgtttggggctttaatgcttgggctgagctagggctttaaacaattagtagtctaagcctggccctagatcgattgagctgggcttaggtcaggctttagctcaaaattttcaggtgtgttatggttgggcttttggccaacaagccaaatttacatccctacattcttccaccattttatagataataaattatgttgtatgatcataatttgtatgttgttggtaggaagtattctggtagctactaagatgctatggtggagtggccagtcagttgtttctcctgagaagttcctggtttaaagtttctacaaatacatttcatagttttcttgacatagtgtccctggactgcagcctgattcacaaattcaaatctgggatctgcaatttaagttcaaattcactctatgccatataatgctaatctttgtcctaatccacctcctatttaattggattagtttactaatagtggagctgtctttgaagtgcttgatcctcacttaacttgccccctgacctcttatgttgttcagtgctcctttggctgcatacaaacatattgtttttggttggatatttacttgggctccagatttctgggtttttgaaccatttatctctttcttttttaattattatgagtacactgttattttggagggagatgaatggagaattgttataatataataggcgttggcttgattctatgcttgaattattaagggattgcttgtctttctgtctgaagccttaatttttggatgtttatgtatgtgtaccttttgtttttttaagttaaatcttatttcagatatatttatttttttcctgaatacaagaagtcaacttttaattttttatctgataaataacacttttgcctcatttgctattcagatttaagacaattgccacctatgtgtgcctgaagtcaaccttaggtgtacatgcctcctcttggtttcagtgtcataggagttccactttattcctgtttatgatataggagatggatattagtactgttcctttttcccaggcaagaacattgctggttctccttgagtttcatttgggctgttttaagttgtgggctcttaagaaatgtaggtcagttgagattaagttcctctctatagagtcttgaatttgttttgttagtgggggtgggtacccaaattgcaactaaacatgcttttaattaaatttgtgagacaatatgtacctttgtgttggattggaatggctcaacattgtctcagcttactaaaatagtgctcaatgtgcctcttataggtaacatcaccat

SEQ ID NO: 11205 - DNA, 988 bp, Vitis vinifera
  Intron number 2 from transcript GSVIVT01024244001 (locus G SVIVG01024244001) derived from phytozome v7.0 (chr-ID chr1 6; pos 157868 to 158855)
gttgttgaactgggctctggctgtggtttagttgggtaatcattttcacaatctcattcttcactttcttcggtcccgtatcttaatcttatatttgttacataaaaagaaaaaggaaaaaaagatgggttacttcaaaagaaatgaaagtcctcaatggttatcatttgggactggctttcaatcaggagaaacttataacttgtagaaaccctgatcaagaagaaaccaacttggccttcggtgttggggttggcccatatcagcttgatataaattattagttacattgctgatccactgttatctaacaactgaagcttttgggtcaaattggtgacttagcatggtcacagagcattcttttaccagaggtgaaaagttttgcaagctcaagaaggctgccccctaagctttaagttctattggtaggtgaatacaagtgttcagtgctgatgtagtttggcgtttaattcttttacccctatctgttatagcatagctacatggctaaaataatctaataccccttttttccttgttctatcttaggcccaattaaattgcaaagaatgtctaattttgtgtttctaaggctatgaatgatggaatgataggaattcttcttttttttgttgaacacatctgttggctgcatattttcttgataggcttgttttggaacatatcccacacaacaccccaatccttgccatgggatgtccgacttgggtacttaacatacttgattgtacatctaagatagctctcaggtgatttgggcttatcaagaaggcatgtcaccgatgttcgtgcaccactgtgctacaatacaattttaacatgaaaaattagaaacataatttggaattttctatttgactctattatccagaccaggaagtctccattgctcatattggtagtgggttgttcttattttgtgctcccagctgcattgctgctcttttgggtgctcaagtttttc

SEQ ID NO: 11206 - DNA, 8991 bp, Vitis vinifera
  Intron number 1 from transcript GSVIVT01022703001 (locus G SVIVG01022703001) derived from phytozome v7.0 (chr-ID chr2 ; pos 15297669 to 15306659)
tgtttgggttcaaaggcagctgtagaaaaataaaaaggaagaactatgcttaccctcacgttgattcaagcaaatatattttttaggaattctaattttcatatttcaccccaaacacataataaataaatttattcttcaaatatgtattttaataacaaccaaaatgagaattctatagttatcccttttaaaatctttaatatgacaagtcatcatttgatctatttgatagctctcccactttttttttttctcctcttcatcactttctccatataatgtctttgatatcctttccatatcatgtctttgatatcctaactttgacatttttttatttatatacgctgaagtgaatacactttcatatttcttttcattcttttaatattttcatatttattaacttagtcatttttttgaaacattaacataaaattataatatatgatcaataactaatgagaacaaattaaacataaatataagtatggaatggagagaaaataaaattttatcctacaaataatacataaatagtttaaaatattaattatagtaatatatttgatactttagggtttagattaaaaaattatgttttattttttagaggctaggatataggatttccattaaccaaagattttttgtatgaatcctaaataaaatgtgtatttattttgcaaattcttatcatatataaataaaataaaataaatatatttttatcatattatttttaatttttattattttgtgtcaaaatcatagtcaatgatattggtttttgttatgatattagctcttaaaaggatgttatgatgtaataaatatgaagtttattatttatttaatggtattttgatttcacttttattaatctttatttcattcattttaccttatgagtattctagcctgacatttcttgcactatacataacttgggtgcattaaaaattgcatgaaagatccaagttataggttccttgcaagtgaatgatttgttcacaactgctttgtgaacttaagcaatccatttgatgttgtagttcactatctcttcattagaggaatgattgatcttgactatcgagatagagttctcatggtgagtacactagtatgatgagttatgatgtaaacttgttggatagtcataacttcactaagttgttatattgtattgttttctcaaccttgagagaatattgaacttgtgccaaagtttgtaattatttaacctatgggtgagatcataaagtgattatatattccttacgaattgggacatagtagatagaagtcggtagtaataagtattttcaatagagacatcatgatatctcatggaatttgagatagtgttgggtgataataaggacatgtaatcatgaagtctatggttgcattaattctttaaatgaagtttgatatatgcttttgtgagttagagtatgttagttgatcatataataagagaatatgtaactcaaggatggtataggtaatattgaaaggcaaataactttcaccttattagattataaacaccaattcatggggagactatatgcaatagatagcaggtcatgaagttaagcattttgtgtcttgttgtaatacacatagggcattgaaatgtaattgactttctatagtaagatgttgagccaactttaaaattggattataaaggagccaatactatcttatgggtcttagcagtcctcgctcaagttcatttatctcaatgacatggtttgtgagggttggattgactcatgattcacttatgtgcaaaaaggcattttggcaagtatgcatgaatgcataagagtttgttgggataaaaccttataaatcatgacatgatgtaatagatttagtttcattaataaatatatttatttactattctagttcccttatattatcccattggcattaattggttatcaaagtatttgcgtccatatcacttgcattgtacatgacttaggtgtattaggagttgaacaaaaaatccaagtcatgggttctttgcaaggtgataagtagtttatagtgggttcatggatttaagcaatttagtagagactatagtgtactacctcctaattggaaagatgacttgtcttagtcaccgagatgactttcccatgatgagtgaaacaatgtgtatggttacacattggacatgacctatgatgaattatgacattaattgttgggtagtcatgatttaccatgatactatattgtataaactctcaaccttgagaggatattgagtttgtgctgaaatcaataggaaactttgatctatgggtgagatccttgtgtggtcatgtattccttacaaattgggtcacggttgatgaagattggtggcaacaagtattcttaatagagataccataatatcttatgagattaagacaacgtgtctcttgggtgatcctaaagacatgtgattaagatgactacaaccataacaatcccttagtagaatttgacatatgctctttgtaagctagaatatgtcaattgatcacttaataggaggatttgtaactcaaggattggagagataattttgaaaggttggcatcattaccttgttatattacaaacaccggttcatggggagtctacatgcagtggatagtaggtcatagacctaaactttgccttgttgtaattatatagcatattagagtgtagttgactctctttagtagggtgttaagttaaccttagaattggattcaaagtgagatagtattttcctataggttccaatggtccctgctcaatctggtgtcacatttgtttgagggattttaggtttgtagttaacaagtgtgcataagggggaatttaataaaaatacaaggttggactagatcttgtgaatagactttctagattggcataatttattaattggattctaatagggctaattaattaattaggacctaagtgagctaaaccaggtaacctaagcccaatttgggctcaagtcactaaagttcacaaggaagcttataaataactatttaaagcccattgggttttatgagtaacttaagcttgccttgggtttgggtaacttattataacctaaaaaggttcttaattgagggcttagattaatcaattaacttagtctaaaagtacaattcaccaaatttattggaaactttgaattactccatttcatgacccaggatcatatagggtgcatgcaactatccttacgcttctctagatctaatgcaatggaaaaatatggatataaaatccataaaatgtactagatttatagattagaactcatacctatgatttgaatgtttctaaattaaatccaatccctaaaagacatcaaagatgttttaaaagtcatttattgaacaattttccacccaatctctcctttcacagatagaccctagcataaaagaagggtaggcttatgtcccttcttttttaaggtagctagggtttgctcattcttttagggcatcaaactcttagacttttactttttccattctctcccacgtgtctagagagaatctagtccccactcttctaaatatctaacatttgagttcgtagctttaatgatgagccatcaaatagaaaaccaataggtttgcaagattttcgatgacccctacacatttgataacctccttgactgcaaaaatttgatttgggaatatctagatcttggtaaatacttctaatctatagatttagatctaatttctattttaaaggtgatttttttttcattgctagggtctagataagcctaggaaagtttgcatgcacttaacgagatctagggatagggaacttagtgatctatgctttcttgtagttgtagctttttgcttttaattttaacttgagtgtacttttggctttttcttgcttaagcttttaattttttttgaatgatgtacaatgcatttatttttttagaggaatgtatttatttttcttaatgatgtactttcttttttgaaggatatacttaattttataacaaatgtatttaattttttctaaagaatgcacttatttttctaagggatctagttgtatggcataagatgtcctctcaagcagaggtggaggtactatagattttgtaataggcacaatgattgctaaggtggtatgtgatggagggactagtataaaagcctgaagtaagggtgtgtccaatgatataaatggctcaagtaagtaaagagaaaatggtgtggaaattcaagtagggaagaaagggttggtatggattcatcgggggaaggaaatgtaggttccatgatacagatacctaaagtaagggaatagtagataatgtgtaagccctaagtgggggttgttgatgctaggtcaactgaagatggaatcccttggtcgtggcagcaaaaaggttctgtccaaaagttggagactgggctttcaccttccctgcacaaagatgtctggacacactctccaaaacctaagtcagactttgaagtgggcaggaacccttagagatagagagagagagaagatgagaaagtccttagtattgcgtacctaggttctggttccaagagggtttttatagtgtctaggatggagtcactattgtgctgagttaacatcttgacttttgtcgtcatgatggcagcacagtggatggcagggtaatcatcaccatttaagcggttggcaggggttgctgtgggtatgttatgatggtttgcctgtcacctcaacctattggaggtatgaggcagtgtgtgatagtcgtctgatatgaacgtggagacaaggtaagatcccatcccccatactttttttagaaaaaaatgatttcctgcagcagagagatagagtaaccatccggaatgcgctggcaatttaagggagcctagtactgccggttggtagcatgtatagtccagactaggaccttcgagtctgatgatgatcgtccggacaacattgagatgaacaccacatgggccagtagtggtttgccacatgggggaagatctccacaggggtgacaaggttggaatgaaggtatcatggaagaggaaatatgagtctctgacagctttgacttatttcttaaaatgaagatataaattgtttttaactttaagttacatcattaagttcttttaataaatatactttacttaataactaaaattaagttattaagtcactttaagttattaagttaatttaccaaacgcctactaattttcaaattctaagtttagctttgctttgtagtgaatgcatttaggattatcaaagaggtcatcaagggtttcaaacatattctattgctcaacttctcaaagagggacttcagaagagaagattccataattctagttttgtattcgattgtatgtatcctaccacatggagacgattcctcagcatgctgatttattattaagtgcatgtgaattacgtacggaattccaattgatatgaacataaaattaattgaattatgtgacattttttttacgcataataaaacatatacagttggaagatatctcgagattctgattttatatctggccctcaaaattctatttcactgtcaggttgtggagcatatcccttggcatgctgatatgtcaactattgaaaaatctgcaaccattttctatattcatgagcttttctcctgttcgaattagttttgaagttatctacagacattgattgtggactaactacatgacttgtacaaattgaaaattacttcagtcatgtgtaaaaaataataagagataacattcattaattgtggataaattgtctatatgactttaaagaaaaaaaggtcataaaaaaactgattgccttgtggatacgcctaccagtagatagctgagaacaaggtctaactctcaaccttttgtactgcctctacaaaggaacacaaatttgagagattcaaaggcagctatggtataaatactgtttcataaattacttttcaaatttaatttggtagcaaaaataaaaaatataaaagcttaaaaaatttgtttcattcccaaaatttttgcaaataaaattttaaataaattaagaccttgactcttttcacatcttattctcatttctatcaaagcaatgatagtaataatatcttatgtataaattttaaatgatgtaagatcattgaatttttattttcttttaacttcttgttatgtagttatcaaacatatttttttttaagacaagaaaaaaattagaccaaacaaatatatttgatatttataacaattgaaaacataattcgtatcattttaaaaaataataaaagcaaaggtgtatcaaaacaatacctcatttgcgtaattagttatcacatttcctaagtacaaaagtaggcaagtaaatttttgctcaagttacaatagtgctcaaaatccttacccaagacttagatcctatttcactttttttcttccttagaacaaaaaacaagaaaatgtgtttgacaaccggaaaataaggttgtggaccccgcattttgcttgatgcgttcccactcgatggtgaaactcgttttttttatttatttggtgaaaaatcgatttttagaaaaagacttgaagtcgccacttatttttgttttgtttttaaagagtaaataaaataagaaagaaaaccctaagtgtgactccttattttggaaaagatggtctgtgaaaaaccaaatatgagcttgggggtcaggttacttattgggaaggtacggtaaaaactgtaacacccttctaagtccctaaaaatggatctctactaataaaatgaagcaagtgtggaaaatgattgatcaattgtggataccatacagtaatcgagagtgtgaaagcaagacacgcgtgataacaaataaataaataagcacaatcgggtacaaagcgtaccttaatcgcaagccaagagttatcataagagacaagattagtgcacaaatatgggataatcgcatgcatgtcatagagtgaggcaaaccaatcaaacatagcaatcaatcgatcaatggaaaatctcatgtgttgggccccacgaaagcccgatttatcttagtgtagattaactccgtaaatttcattattcgaaattatagaattattcatgcttattaaaaatgtgaaaattagaaaactattaaaaatcaaggagaatttatgaaaaatgtttaccggaaaaaaatgtggtgaccaattttattaaagaatggaaaatatttaaaatcaagaaaaaaaaaaaagaaaaataaaataaaataaaataaaataaaaaataaaaataaaaataaaaataaaaataaataaatgaataaaataaaagaaaataaaaaataaaaaataaaaaataagaatgaaaataaaaaaataataataataaacaaataaaataaaagatgcatgaccagtggaaagtggtagagattgacttattagaattggatttatttaaaaccatgagagaaaaattgaagaattaaaaccatttgaaaaacaagattttttttttttttgaaaattgatttttgaaggcgtgtattttcctataggagatgagacatgtgtcttaaggatggcctatcaaaggtggccatgcaaggatcttgtgcactggtggtcgaatatgggataccaacaactgagatggcccagatgactactgtgggtccggatggttcagaatgtctctttccttgtgaacccctgcatccctttccagcctaagtcaacccccgaagctatgcaattcagccatttgggtcccaaaatcctccttcttagttctgatgctgacatcaccatcttcttcaacctcaactcttccaacattgggtaaaccatagccatggcagcgacctacggataaacgttacctccccacccatccggcaccagattaaagtctgtagaatgcggcttccccttcagcgccactgaccggagctccgggagccgcctgatcactatcccagggctcacagcgtagtagtcctcgactcctcgatgaagatccgtcatcggctccaccgctccacctcataccacgatttgcacaccacagatatcacgtttcggtccttatcggtatgaatgaaagaaaagacatgctccaaaacctcttccggaaacgagtacgccattgaaaattctttcttggagttccgaattcacaaacaaaccctaaatcgaacttttcgaagtctcaaatccgagatgtcattaacaagctcagttgcagaatacatctttccgttcatttccccactggctttgtccctgaagtatttgtagtccgacagattgtaggggaacctcactgacatattgtgttcggtcttctcactcaccacgacaaggctataaagatagagttgaaacggcgaatcaagaggcagctttaagtgatcgattttacagaaagaacccgcttcctccattccttcattggatgaaattttggataatcattcaccaattctaactttcatcttcaccaagtctcgatgcttcttctttaatgagtgcaacgaatctgcatgtcgggagaccaaattctcacgacgcataagaaaagaatttgcacccgccgttaccgatccttctcctttgataccaactcatccataactatgtcatttaatcacttctccatttgaccatccattccgaacatgcccagaaaatcattgctacttcctgtccaacacttaaaagaaaaatgacgatgccgggtgtggtgttgaatacaggacgaaaatgaggagcacgatggtgaaagtgaccatgcataggggaaaaagtgtggtggagaaatgggaagaatgaaaacaggtagtgagagaaacggtgtaacataatgtgcctatgctgtgttaggttatat

SEQ ID NO: 11207 - DNA, 7295 bp, Vitis vinifera
  Intron number 12 from transcript GSVIVT01030701001 (locus GSVIVG01030701001) derived from phytozome v7.0 (chr-ID chr 14; pos 13922872 to 13930166)
ttgcagaggtgggtaatttatattcttggaacccattatgtcactcatcacatgactcatgcaattttttttgaaaatcttaggttcaaatattattgttgtggtccctaattggcgacacttgttgcatctgtgcaatgtaatgttgatgtaatggtggtgtacttggtgttttcaagattcaaaaaaacaaataaattgggtccatcaattcattggcaatgctataatgtacgttattccaaatacaggtagaaatttacaagcatttaagaaacttaagggaaagatgcaaaactttcaccattttagtaaagccttgcaagagggtaccttttctaacacatgcgtagagattcagatggtacctaaaaaatgtgtcattatctgtggagcaaataatgtttatggaaccataaatcccaatacgaagctccaaatataacatccaaatctaagacacaagccaaaggcaaagggattataaatttctacccccttcagtggctgcaaaaattgagagattgcaaagggattttttatggttaggggttggggaaggtaaaagagatcatcttgttagttgggatgtagtgtgtaagccgaaggcaaaagggtgtttgggatttgggaagatagctctaaggaatgtcgcactcttagggaaatggttgtggaggtaccctaaggagggttcagctctatggcataaggttattttaagcatttacagatcacactctaatggatgggatgccaacactatagtcagatggttacatcgttgtccttggaaggctattgcacaagtctttcaagagttttccaagtttactctgtttgtagtaggagatggggaaagaattcgattctgggaagacttgtggtggggggatcaacctttgggttcccaatatccaagactatttagagtagtcacgaataaaaatattcatatttcttcaattctcggatctactcgtctcttttcatggaactttaattttcattgcaacctatctgatcctgagatagaagatttagaaggccctcatgcggtcacttgattgtctgcatttgtcattttcggttccagatgtaagatcctggtctttatcttcttcagggctttttatagtcaaatctttctttcttgccttatcccagtgttctggttcttctccagttttccctactaagtttgtttggaaatcccaagtccctttcaaggtcaagtcctttgtctggttggtggcacacaagaaggtaaatactaatgacttgctacaactaagaagaccctataaagctcttagttctgatatttgtaagttgtgcatgaggtatggagaatcagctgatcatcttttcctacattgttctttgacaatggggttatgacacagattatttcagttagccaagatggattgggttcccccaaggagcatttccaacatgttgtccatcaattacaatgactttggtttatcgaagagagggatagaattgtggcaagctgtgtgcatcatagttttaaaaggctcaaggcgcaccaaggcgcaaagtagtcctgaagcctgaggcgcaaggcacatctaaggcgcgggctttagtgaagtgaggcgcaccctaatttacatatatatttttatataatataatcaaatttaacaatcatttatttgtcctaaacacataaatcatcaaatatcatccaaaacttcaatttaataaacaaaaaacataaaaataaagaactccaagcataaaaacaaatccaaatccatattgctaattgcctaatacatatccaaatccaaagtttccaaacctaaaggtccaaaacatgaaatttgtccacaattcaaaaacatcattaaaaaacacttaaatcacaaatttgtccacaacaagcaatcatcactcctcctctaaatcaacaaaatcatcatcatcatcatttccatcaccacatttgtagccttccccatcttcttcatctgctgaatcaaccatgtctccatcttcatcttcatctattagtgaataagaaggcaaagttctagaacttgaagctatcccccttgttggtggtattatgcttgagcttgctctagctctagctctagtatcaaacctggcctcctcagctccagcagctctagcaacatcaccccatgtcaaattgtcatcatcaaatacaaaatcatcttgtgcacctccatgagaatcctcatcttccattctccctatcaaccattcattgctattatctatatctttcaaggaaattgggtcaatggtgttacgttcattgtatcttctcttcaaggctcgattatacttgatgtacaccaaatcattcaagcgttgatgatctaacctatttctcctcttgctatgaatctgcaaaaattcataagctcataaatatattttaaaattttaacttttaaattacattcaagactctattagactattacttgtaattattttggatttggtcactcacattctcaaagatgctccaattccgttcacaacctgatgcactgcatgttaagttgaggactttcattgcaaacttttgcaaatttggagctgaagctccatatgcagcccaccattcagctgtagtatagatattaacaatttagtgaaacaattcacctattttagcaaaaatacaatctaatcatttaaataaacaaaactaaataactaacctggtgctctagtctttcttgtcctaacagctaactcattcccgaatagtccttgggcatttgtgaacaaactcacttcggccacaactttttcttgcttagcagggtctcttgttagccttaagatgcatttatacaaatcactcataatgtcggcatcatgctctatttctggcttatcatagaagaattccgggttcaaaaagtaccctgctgcatgcaaaggccgatgaagctgaatctctcacctcttatcaatgatgttgaagatttctttgtacttctcttcatttccattaaaacttctcacaattgcatctttagctctattcatggcctcatagatgtatcccctaggagcttttttttcaccatcaaccaaacgaagcacacgaactaggggacccgaaacctttaagcaaaacacaatagtgttccaaaatgaaggcattagaactatgttggctatagttttccccttctgctcttttgcccatttactatctgaccaatctgagcttgtaaacatcttcctcaaattgtttttttgttcatgcaatcgcgataatgtgatgaaagcagttgcaaaccgagtcttagcaggcctaagcaattccctttgtccagtaaaccgcctcatcatgttgagtagccctgagcgattataaatatacccatttagtgatatagccctctccaatgtcctcttgatgtttggtagctttccaatatcttccaacatcaagtcaaggcaatgtgcagcacatggtgtccaatacaaatgtggacgctttaattctaacaacctccctatatgaaattgtagataataaatttacataagttctcaagataaataattcaaattttaaaagtaaataaaaattcaagaaatagtatttattacctgccatcacataacttgagtgattatctgttataacttgaataacattctcttcaccaacttgctctacccatttgtcaagtaactcaaacatcttttctcccgtcttaatcattgaagaagcatcaatggattgcatgaacatggttccctttgaacaattaaccaaaaagttcaccaaagttctctctttcctatcggtccatccatccgacataattgaacatccatttttcccccattccaccatatgatctttcatcaaatcttttgtgagagccaattctttcttaaggttggtaactcttacctcatgaaaagttggtcccttcatacccacaccatattggccaatagcctcaatcattggttggaaactcggatatgtgactgcattaaatggaatagcagcctcatacatccatcttgtgataagcgtgcaagctctttctcttgcttcctttttgtaggcatcattgatggtagtttgatgcatctttccactcctttgattttgaacaaccatctctgcattaggagtgaaaaaatgatccataggacctttttgtcttagtttttttgaagaaaacgtcctaccaccacttcctcctcggttactacctccactagaaatgttggtgacattcgttctactattaatctcctcaccaatatcttcatcttccaaaccaaacaaatcttcattaacatattcgctccccatattcatttgctctttttgatttttcttggaactcatatactcttccattttttctctaacatgttccggacattttctacactttttagcatttctatatccaccaacaagatgttgtttgtgtctatagatgcctcctttggttactttctcacaaaaaatgcatatgatggtgttcaaatctttttcattaaccaaacgaccatatttccaccccggatctcttcttccacttgcactagagtccacttgagtttcactctcattatccatcttgcaaacaaattatctatactccacaataaaataattataattaaattaagaaaaaaatttgaaaaaaaaatgcatatcacattatcaaatatcacattaacaacaaatatgcatgagtgctttttatttatttatttttattttgtaaaatttccatgtcaaaaactcaaaatataatatttattttttaaaaaaaaaaattaccaatgagagttatgaggtaagaatggaaaaaaatgcagaaaagtgaagaaaaaagaaaaataccgaggtccggaaggtacgtggctatttcccctttatttttctcctattttccccctatttttcttcttctttttcttcttctttttcttcttcttcttcacttctccagcacggaagaggctagggcaaaaaatggcagtggtctcgggttgagaaagaccagaaaagggggctggatggaagaaacaggtcaaaacggcgtcgttttggcctcttttttttttttaaagaacagggtccaaaacggcgtcgttttgggcccagaaattaaaaaaaaaaagctagggcttggggcatctctgcaacccgactgctggaggaagaggaagaagaagaaggagaagaagaagaagaagaagaaggagaaatgttgtacctggtcgggccgtcgaaggcgacttgggcgaccgcctcgcgccttgctggaggcgagcgccttgcgcgcctaagcggcgccttcgtgaaggggcgtcgcctctcttcaggcgaggcgccggagggtggcgtcgcgccgccccgagcctaggcgcgccttaggcgcacctttcagaactatggtgtgcatagctttaatttggattgtgtggcgggaaagaaatgcgaggattttttaggataaagtaaggaattcagagaatctttgggattttattcatttccttgcttctctttgggctttttgttccaaggtttttaaggggactccccttattgtgttacaacttgattggctagcggcgtgtaattcctttgggttggtctagtctagagagtttgttcgttatcacattgtattttcttgttttcgtatttttgtagtttagtattctttggcgggaggatttctcatccttctcttgtacttcttttttctattaatatattactttgtcgtttcctatcaaaaaataaaaaatctaagacacaaaccaaatgcttatggcaagaatcctaaaaataaagccaactttactatcattttaactagagtttttaaggcagcctttatttttatttttttttcttttcccttttttcaatttaagggagctcaaagtcataatatgatgttatgatgattgttgagcatgaataacataattgtttctcaacaataaaatattttcccaagctaaatgtggagtaaatgtctctggattttattttctccagctagggttgtgtttaattgccataggctgtctgcatgtgtgctcttttattgatttagtattatttagttgggtgtggagtgtgctcttcaaccatttctatggtcaagtgcccaaacaccactgtctctcaaaaattaggatcatatttctgacaagtaacgttacccaagttgatcattccacaagaatgactattgttgagcaatcaatttttctaaaagcttaagttgttaggagtttggcatataatgcatatcatattttctaataaccttcctcatttgtggccccaaatctgcagatgaagagatagataggcccattaacaaacaaatcatgaaaagtctcctttgggctggagcaagggctcaagaaattgaggaaataaacatgcagtgtggtgtggtttgagttcaccatctcttgctaaacctggctctaatattataataaataaccaattttccttaaagcttaaactgttagtatttggaaccataaagaatacaatgctttctaacaactatggtatatgtgaatccagttattctgaaatgggtttagtttgagtcttttttatttgtttgttattattttcataagaccaatacatcagggaagtttataacttgctttcttgtgaatctattaaactctgttgtagtgacaagtttctaacttgcaccagaaggtttaaacagctctactgggaaagaataatgaaaatacaataaatgatattttttcttccttgaaatttttttcagttgcctgtttttcttagaatcactgacattagaaggaaacacgagaactgattctaggcatccacttatcccactctataatgttgtcagtgagcattggagttaggcacatcttgaatttggtttgtgtaagttcacatttcattcagtgataaaagtaacttgtctgggaagttgttcaagtgctagctatttaggtttattactttctttccttccttcaactatggtacttctcatttttcatcacacaaattatggctatgatattgattttggcataaggatttttctttgtaatctcctctactagtgaatctccaataaaaccagatattcagtggttggaaatttctattatgctacctgttattctttcaatgtattataagattttccttcataatcagcatggcggtttattgctgtaggtttcatctgttacaa

SEQ ID NO: 11208 - DNA, 4821 bp, Vitis vinifera
  Intron number 3 from transcript GSVIVT01017663001 (locus G SVIVG01017663001) derived from phytozome v7.0 (chr-ID chr5 ; pos 2454060 to 2458880)
gaactttatataatcctgccatttcttcccgtaaggatgctctttgttattttatcttattttatttttaaattttttaacctttttctttgttgcatgattatagaactgtgattgtgtttttaggttaagtgatgtccaagtttatctcaagtcttcttagcatgcaattacttcccagaaaatacagtgccttgtatttgtgtccccaccatcataatttcatcattcatagatttatcaatatctttcctagagtaactaaaaatagatgggccttgttgatgtatttggtatttttttcttgataggcaaaaggattatatatagaaagcaccaaagtaaaagatgcaacaaagtctaacataatgtatacatttgtcaccaaaatgctttaatgtctacatgtgatcctatgtcgtttaaaatttcatcaattggtatcagagctcatacatggatgacatttgagctgtatatttgggttattttgggtttccctttttttggtttggaagccattttttggagcttttttttttgtttagtgttgattctcggttttcaaacctgattgatgttggagtcttgtagaaaatattgtttggagcaaaacccattttttttatgttttttggagctcatttgatgggatttcgaaaattagggcttattttggttcttccttttatgcgttttttgtgtaatttttgggttgagattgaaggattgatgtttgaggatggaaacctaagtgttttggtcggaaaatgcacaaaattttggctaaaaaaaaaaaaatctccagaagaaccaagtcgtgttcagcccggtggagaagatgaacatcataacgtcatatttaaaaataaaaataaaataaaaacttttttttttgtcttaatattcttggaattattatgcatttgttaaatttggttttattgggacaattattattattagtgctctttatggtataattttttatcttataccaataatgttgttttaggccttttttgttaaatatttaaatttattatgacaataaagaacatttgtgtgattgtctatcgcaattccaaatgtgtcaagttgtgcaaattaaatatttgagtttattatgacaatagtgaacatatatgtggttgtctatcgtgatcctatgtgtcaaattgtctttgttgagatattttatctcccacttttggttgttttattattgtgattactaaggtccatacgggtattgtaattgtcctatctatgattataatacttggttggatgcttagattggtgaaggaaattaattatatattatgaatcgtactaattttctattaccctttcggtaataaaattagtgcatcttggttgtgatatttaattagttgtccttaccgttgtagaatttcaaaattccaagctattgctaaattgagaaattctagaaactagcaaatagtttgatattgtagtaacatgcatattgtttaattttgctatcttccagctactagcagtcctggaattactctgcatttatgtgccatcaagcctcttactggaaataactttgaagaatggtatgagtctttcaatgtgcatatgactatacactatttagacttggctttgaaagttgatgagccaagtaagcccactgatgtgagctctgctaatgaaagatccttttatgagagatgggaacactcaaataggagttgtttgataggattatcacccaaaatgattttaaagagaatacagttgaatgacaataaatgaaatgtttaccttgattagtgtcatggaaagtatgcatctgtcaactgtattctctttaaaaccattttgggtgataatcctatcaaacaactcctatttgtgtgctctcatctctcataaaaggatctttcatcaacaaagctcacatcagtgggcttacttggctcatcaactctcaaagctaagtccaaattgtgcagagtcatatgcacattaaaagactcataccattcctcaaagttatttccagtaagaggcttgatgacagataattgcagagtaattccaagattgttagtagttggaaaatagcaaaattaaacaatatgcatgttactaaaatatcatgttatttgctagtttctagaatttagcaataatttggaattttgaaattccacaacggtaaggacaactaattaaatattacaaccaggatgcactaattttattactgaaagggcaatagaaaattagtacggttcataatatacaattaatttccttcaccaatctgagtatcctaccaagtattataatcatcgataggacaattacaatacccatatggaccttagtaatcacaataatatagcaaccaaaagtgggagataaaatatctcaacaaagacaatttgacacatataggatcacgataggcaaccacatatatattcattattgtcatgataaactcaaatatttaatttgcacaacttgacacacttggaattgcgataggcaatcacacaagtgtctttattatcataataaatttaaatatttaacaaaaaatgcctatgacaacattattggtataagataaaaaattatatcataaaataataattgtcccaataaaaccaaatttgacaaatgcataataataccaagacaacccaaaaaaaaaagtttttttttttttatatataacgtcatgatacactgttcatcttccccaccgggctgaacacgacctggtttttctggagaaaaaaaactttcggccaaaattttgtgcatttttcgacaaaaacacctaggtttccatcctcaaacatcaatccttcaatctaaacccaaaaaattacacaaaaaacgcataaaaggaagaaccaagataagccctaattttctaaatcccatcaaatgagctccaaaaaccataaaataaaaaaaaaagggttttgctccaaacaatattttctacaagtctccaacatcaatcgggcttgaaaagcgagaatcaacaccaaacgaaaaaaaaaatggcttccaaaccaaaaaacaggaaacccaaatatgcagctcaaatgtcatccctgcatgctctaataccaattgatgaaattttaaacacataggatcacatgtagacattaaagcatgcattaaatggcaataaatgaaatgttttaatacatgtaatcctatgtcgtttaaaatttcatcaattggtatcagagcatgcatcgatgacatttaagttgcatatttgggtttcccgttttctggtttggaagccatttttttgggcttttttttttcatttggtgttgattctaggttttcaagcccgattgatgttggagacttgtagaaaatattgtttggagcaaaaccctgttttttttttagcccactcaaaaacaaatcccttctcttttctcttgcctgcccattggccttatttgtataccctgtgtatactttgttgtgccttttggcaagtgtttttaacataccttgctcatttacctattaaaataaaataaaataaaaacaaatccctctccttagttagaactaatgcaatctacaaagcctatcatggttaaagaatggtcatctatatcagtctgacccaatccaaaaaaagaattcatgaaagatagcttaattgtttgctctgttatatacatttgagttgcttttgaggatgatgaggtgcaatggaatggcattcgctattttctatgctccaattatgaagttcatattttatatatataaataaagaagattatatattaatcattaaaaaagggcaccaaaagagcaacccaaggtatgcaagataaatacacccacacccccacacaactcaaacaaaaacgaagcggcccaaaaggaggtgcaaaaacatcgccaccctcaacgagggcccaaccaatcaaagaaactaattagtatcagaggaccatcctttacaaactccaattatgaagtccaggtgtagtcaatgtcctatttagcgctaccaatgagtccaaatctgtataaactccccctaaactttccactatcattgagtttcaaatttgtgaaatctcctcctaagcattcattgtgggaaattttccagttattggctggctggtgtgaggagccaccagtgttatacttgattgtcccagcatcataaaccagttctagagataaggaaactgcatctagatgggatcagtgatgattttcttcaccagtgcaattagaggtcagtgtgttttttgttctatttcctgattactcatccaaaatatccttcagatggtcgtgaggacacaggcttgcaaatgtttgaaaacattaattatgtttttgattgacagatataatcttcaagttgtttctccatgcatcaacaattgcaccacttccaaaaatctttcttccattaaaattccattgtttttcttccttattctccttggacaaatttgcaaataatccttacctagataacacgtttataatgttacctgatgtaataatttttgaaggatgcagaaagttgataggtttgagtaaccctatatcagaaaatatatatatagaagaagaaaggaaaatgatttttttttttaaatgtgaatatgtgccatatacaacctgtatcaacaatttaaagtaatctaactgtgatttaaatgcatacaactctgtacttgggctgtttgtatcatggctttcctctcatgttagtcctcttgcctttgacctgcttataatccaggaaaagagctg

SEQ ID NO: 11209 - DNA, 5899 bp, Vitis vinifera
  Intron number 3 from transcript GSVIVT01020139001 (locus G SVIVG01020139001) derived from phytozome v7.0 (chr-ID chr1 ; pos 9915680 to 9921578 reverse strand)
gacccattgtaagtttacttatcctgctgtttacattttctattctataaaattgttctttcaaactaccattgctgtagatttcatctactatcttctaattctgcatcctgtcattttaactttcacataccacaagttgcccttttttattttaatcttttttcttaataggcaaatagaaaataagattaagagcgtctaaccaaaaaggggtgcaattccagtgcattggaagtatatagagagcatgataacaaacaaggaaacacaaaaccagtactaagacaattggaatttcttaatgaaggtccttcaaaaaatgggctttgggaccaagtgggtgggatggatgtggagctgtgtgtcttctgctaaattctctattcttgttaatggagtgccagctgggtttttccctagcactagagggcttcgtcaaggggatcctctatccccttatctctttgttatgggaatggagattctggacgttcttatcaggagagcggtggaggggggatatctttcagggtgcaacattcggggtggtagtagaacttcattgaatatctcccacctattttttgctgatgacacaattgtgttttgtgaggcaaacaaagagcaagtttctcatctaagctggattctcttttggtttgaagcggcttcgggtcttcgaattaatctagccaaaagcgaaatcattccagttggagaagtggaggagattcttgagttggcagctgagctagggtgtagggtggggtctttgccctcccaatatttgggtctccctttaggagtccccaatagggcttcttctatgtgggatggagtggaagagagggtcaggaggagacttgcgctttggaaaagacagtacatctccaagggggggaggatcactcttataaaaagtaccttggctattatgccaatttatcaaatgtctatcttccgtatgcccaagtccgttgctaaaagagtggagaaaacccaaagagatttcctatggggaggtgaaaacttggagggaaaagttcatctagttaaatgggatgtggtctgtacagaaaaactcaatggagggctaggattaaggagaatagccactctgaatagagccttgctgggcaagtggacttggaggtttgcgtgtgaaaaggataacctttggaaacaagtgatttctacgaaatatgggcaagaggaatatggttggaggtctaagaaggctagtggggcggctggagtaggggtctggaaggagattatgaaagaatctgaatggtgttgggaaaatttggcttttctagttgggaagggttccaaaattaaattttggaaagatggttggtgcactgacactccgttgtcccaatgcttcaaccacctttttgttcttgccgtgcatagagacgccatgattgaggagatgtgggaccaacattcgggccaaggagattggaatcttgtttttgtgagggacttcaatgactgggagatggatatggttggtgatttgctccatactttgaggggtcataggccttccctggaggatgactcagttaaatggaggcaaggaagaatggtcttttcaaggttaaagaagcttacaggctgttggacaagcctaatgccacagtgtttcccgcaaggagaatatgggtggatagggtgccaactaaagtctgcttttttgcttgggaggctacatgggggaaggtgctcactctggatagactccagataagagggatgcaactcccaaattgttgttttttgtgtggttgtgaagaagagaatgtaaatcatattcttttacactgtatagtgactagagccctatgggatattatttttgggttgatagatattaagtgggtcctcccagaaactgtaaaggaggctttaatctcctggaggggttcatttgtagggaagaaaaggaaaaagatttggaaatccattccgttgtgtattttttggacggtctggaaggagaggaataggttagcctttagggggggtgcggtgaatattcagagattaaagaattcttttgtttgtaacttatggaattgggccaaagtgtatttaggtgaggagtctttctcccttataggtttcttggagtggatagcttccacttgaggggaggtagttctttttggtcttttttctctttttgaggctgtagccgtcttgtatactccctgtatgctttgtggcgtttaaccttttctaatgcatatcttgtttacttataaaaaaaaaatctatacagcctatcttttacccaagccaacaatgaaatccatcagggagaagttaaacacccaaaggacccaagcccaaaaacaaaaagtgattcaggaataagtccttaaatacttgatctagatgctcctcatccctgataaatctgttgctttgttcgttcctaataaaccaaaacaaacattttggggtgggggcactttccaccacatttttcttcctttttttttttttggtgattcttgtaccatgccatattaagagagtctctttgatagactttgggaacacccatttgtgacctaacaaagccagcataaggttgcaaagcatttgggctttgatacaaaggattagattttgacatgctatttcctccttgatcttacatagacgatgtctatttgcctactaccagcccctcttcataagctaatcaaccatcaatataacaaacaaaaaaacagacccacaaacctttaacaaggccccacaattccaaatctctttggccagaaacttctcggtgatttcagcagaagggaagaataataaagcttggcagaaaagctgtcattctccactcccttccatgccaatctatattcatctgatcctccaatagtcactgcaggcatgtgctaaaagaatttgcttactttctccaactcccaatcatgaaagcccttaggaaaacaaggggtccaaaaaccatccccatccttctccatccaaagatcctttaccctaatcttcctattagaagcaattttggacaaggaggggaagcaatcctttaatagggacgctcattccatctatctaaccagaacttggttttaagcccatttctaacacagatgctagtcctatgctagactcattccacctatgtttaatatctttataaagctccacatcaaaggacttccctacgcctttggaaccccaatcactatcacttttaccacatttgtcaacaataatctatttctaaaagcaattgtgctctgctgcatgcctccaattttccaagaagagctttgttaaggggttgcaagtatttttaaagcatgccctccattattcttttcctgacaatccatgtcccacttcaaaagaagcatctttctctgacagctcacttccttgtaggaagtctctttgaatactttccaatggtttttccactgccttagaaatgatgaacaaagatatctaacaaactgtcacactcaaaagggtgcttgctcttaataaagggtcagcctaccttttctagacaaatgtggcttgttccaagaggttgatctcctattgtttatttatttttttatttttttataggcaataaaaaatttatagataacaacaaaaaaatagtacaccagtgtccaggacatataaaatgacattaaaaggctatgccaataaagaaagaatacaaaacacaactctctctcactctctctctctttctctctctctctctctctctctctctatctctcttgctctctccctctacaagattccaaccaaactacaaaatcaattaaaggcattgagtcttctatgtacaacttaacctataataaaaggttacgtatgttgatcaagagcactgtatccagccgttccatatgcttcatgtccttgtttagtatttgaaggaaagtcagattgggacttgaaaattcaaagggacttcctctaggatggcagggcaatggaggcaaaattgcatttagtaaagtggtcaattgtttgtacagagaagagcaaaggagggatggtgttaggcattagatatttttgtactcttaatagggctcttttgtgcaagtgcagttgacgttatacaattgaaagggaagccttcttgaaattggtcgtaagggggtaatatgggaaatataaaggagggtggagatcttgtgaagtaagagaaggatctatggtcaggttatggaaatcaggcagaaaggattgagacaccttttagagcataatgtgctttgatgtgggaaatgaaaagagggtgaaattttggaaggacaggtagtgtgggaaggagtctttgtgtgtatttctcccattcttgggagttggacaatgtagcggctatcattttcttccccaccaacttatcttgcaatcttgataaaaaagcctctacattgtccaggtcccaaccatttgtgtttatagatataaggattctagtgatccctctcatttatcttgtcccataaatctaccacccaagcttcttttgaatgagactaaggcatacaatgaggaaaagacagaaaaggtttatccccccctgcctatcactaaaaggaaaaaagaaaaaaaccaagggttcatccttgctttccaaggagagcctaattaagcgtagaaagacatcacaaggccagcttagtcttgtccatgcaaacaatctcctattgtttgttattcgtaccgtcagtcaaatttccaggttacagactgcctagaaataaataacataaagtatgtaccaaaagatctctaaatgataatacatttgatgtatacttgctttacagctttgaaataaataatagtttgttgattgataataatgggatttttgttatgaaaagatactgagcatagttcctccaatcaaaattatgccaggatgggtgtaggatttgatttttttatttttttttctatttttaagaaatatcttgaagctattttttcatggggatgatcacagccataggacagcattccttggacacatggacactatgcaaatgtgtcccaaaaaattaatttctatttctgttgtttgcattgtgtgcacaagttaaacatactttagccccaaatgtgtatagcttaaaaaaattaatgcagatgtaaagaaaaaattactatgaagtgtgtccccaaaaaaataatgtacaaacatgcattatccctacatatatatagttttaaaaaattaatgcagctgtgaagaaaaaattactatgaaggagagtcaggagaccaatggtgaggaatttagctgtcatgaacacatgctatttgtctagcttcttccaggtcttactgatgaagtttctacaatttaatctgatgtatatatttgttagatacaataaaattagtcaattcatgtcaaagacatcattgttgtgtcttttgcttgcacagcagaagtatgatttaacagagggcatgaccttgagttgaatggcaatggatggtttatgctgctgctaaaatagttgggatttaaggtttctgtctgtgttgaatcaataaaatatttcttaggtagtgagtgtattctttgtcatttttttgtttgcgtttttcctttgtgtcatccttcccacctgcaattttttcattcttttttaataaaagattctgatcttgtagcattttgttctgttccctaatttagttggtaacttggggcctactttctctggtaccatttcatgtctttaatgttgttgctagtaatttctctcttttggcattgtcatcattttatgtgagattgactaattgctttatttttcttctaaatgctggtgttcagattcttgaa

SEQ ID NO: 11210 - DNA, 2155 bp, Vitis vinifera
  Intron number 5 from transcript GSVIVT01000843001 (locus G SVIVG01000843001) derived from phytozome v7.0 (chr-ID chr1 3_random; pos 2835996 to 2838150)
cagctctcattagtcaaaattgaaatgaaatgtatgatctctaattttttctttcatgacttaaaataatctctcagagaattattattggtttttggatttgcctaaaataagaagtcattgaaaaagtgtagttcaaatttcatattttagataataattaaagttttttttacttatatatattgataaaacttttataaataatactgaacttaaaaaagcaaatagtactaaaaggattgaagtgatgagaaaaagaaaaaaaaaaagtgggtcttagtagatgtttgataaaccaacttaataacttaaaagtgattttataaattaagttattaaataaattaaatatgtttgataaaataatttaatggtatcatttaaagtaaaaaacaactttaagtaataagtaaaaccaattaacttattcttcagtctacatatttaatttactttttttatccttatttgtcttaattgctttcatagtctcctttgctacttcaccacctttactcttactcaacctcctttgcgctaattataatttatggggataaatatttgaatttgataatttaaaatatgttttaagttaattttatctaacaaccttaatagttaaagaaataattaagtaataagtattaagttttatcaaataccctatttgactctgatgattaattatgatttcttgtaaagttctttcaaaaaaattactacaaaatcttaataaaaaatatgttagcattttgttattatattttataatgactataataaataagtgaataattttctattatccatttattacataaaaagtaaaaattaagacatttcgtgggtgtttggtaaaccaacttaataacttaaagtaacttaataatttaatttaagtcactaagtaagttaaatatatttggtaaaataagttaatggtatgataactttaagtaggtagtaaaaataattaaattattcttaagtctacatttttgttttacatttttaccttatttattacaattaccttcatgatctcttttactacttcacgacctccattattactcaacctcttttgttctaattataatttatgaggacaaatatgtcaatttaatgatttataataaattttaaattaattttatcaaataaccttgatacttaaagtaagaattaagtaataagttttaagttaattaacaaattaagtataatttatcttaaaattaacttaaataattaagtaataagtattaaattttgccaaatatctcctcaataatgaaagatttgaaccttatcccttttttttaggttcaaattatatgctatgtttatcgtctcatagaattagggttttgagcaattgtaaatcatgccttaattctttggaattgaatcgaatttggatccccaaatgttctatatatgtttcaaatttaatatttatagaaaataaatgatgggaaaaggtgaaagtatgtaaaatcacaaatactatcattttaagtaaaatattaaattataaaaactagaaaagaaaaaattgtttatggaaaggtgcttttaagcatcatattttcctatctcttatatgaagtttaattttaaattataagttgtttcaatacaatttgtctaattttaattttaaaaaaacaaaaattaggatgaaaatatgtttagatgatattttttttcatttttatccttatcatatatcgagtttcctaatatttaaaatattctataaaatattaataaaacttttctaatatataaaatattatgtatagagaaacttttttaatatataaaacttttcaatattcaatctattataatataaaagaactaatatttaaaagaaaaaaagtttctagcatttatttattgttttttataatggatgagccttccatgtccaagtccttaggattctccatggggatccaaatctcgaagtgatatctgtaataatcaataccaagtaaatcaaggtatttaacttagggtaggattcaaactcacaatcatgcagctctagcacacatcctaacattagtcttacgcagttgggccaccttggtgggctttctagcatttatacctttctactagaattcttgatccaagc

SEQ ID NO: 11211 - DNA, 9257 bp, Vitis vinifera
  Intron number 3 from transcript GSVIVT01016510001 (locus G SVIVG01016510001) derived from phytozome v7.0 (chr-ID chr1 3; pos 3283613 to 3292869 reverse strand)
acggaatcgtagagcgtgggcccttgaagttaacagtggaattaggagatggtgatgttggaaggaacgcaaatctttttccttcagtattcagagattgaagacatggttattgggtcattgtgctgtacatatagaaagccatgaaatgaagggtagggtctgaagaaaaagaagaaaaaaaacccaactatgaatttggagttggattctggatagtatacacaaccctcatgtaccagaataccttctctagtttcatggattgaattaaactacctgcactcctttctttcatcatttccaattagcagttttagctccagtctgttgtcttcaagttcagtcatttttttttcagaaatttataaaatatctatatataataatgattctacagaagtttgcttctcaattctgacatatttaagcttatcttgttggtgggtgtgtgttagtttccaaagcattactttgtcataggcttcaactgcaacagccataatcacaaaatgaagtgcaaattgtcttaggtagatatgtttttgtttcgaatgagagtttgggtcttctgtgtctccatcaatatttatatcttataccatgaaaaagattaattgtagggtgattaacaggtatggcatctagtccaaaggggaattgcttctgttggatatggttgagcagcaacctaggaggatgaggcgtctcttgccttttcaaaagggtaagaaaaactcatattctttgttttcattgtcagctacaaatggttgaaagaattggagtagaaactggcttggtggaagtgcatcatatggactgcaagaattttgaaattctccatcaataatcaaaatcaagggatgatcagatcaacaccattgtgctggttatgaattcatggaacaatgtctttatgatggtgtgtgaatttggttttcagctcaatttagatgctatcctggattaactagcagcagccgagttggggatggcaaaaatacccaaaaagaatttaacccaattcttccttgtggctaggagggaaggatttttatttagctagtcttccttggggaaaggacacaaacaatcgggtcgtttacgttcaactatggcaattctttttaagaggtgagaccaagactacagactttaggatacttctagccctgctgctgtttgtttgccagggaaagactcagcgtatggttcagcattgttgcccaaatagaatacctttcaaattaaacctgtcgccttcactgcctggcatttcgtgtaactccaattattaatttaaatttgaaaggggtctgtccctgggtacttgggttatgagactccccgtctagtctcctctaaaatgaggaatgacgtaggaaaaaggtctactacaatgagaaacgagacaaggaaagggaataaatttacaagaggaatagtgataagattccccttctgcgtcccgtctactctaaaatcaggaatgggacagggaaaggaacccttttccatttggttctgttcatatccctatgccaagtatcataaagtaaaaatggttaaatggtataatcaatctgatttttaagttgatgttttttctaataaacaaacaaactcatcaaacagcggcttgcttctttaatgttcacactgcagagttttgatttgaaaatatcttgaaatgggggttgtttggatggtgggaaatttcgttttcttttctcctgagcagtcaagttaaataaaataaaaaacaaattcgatactgccgaacctttggacctcttcctttgtacaatgatgggatgggcctttgacatccttcaaattccacccaaaccttagacggctttctttaccacaatgagaaatgggtgcttccttttatgactgggtactgctacaaaaccatggattaatgtcttaacagcactcctccattagtaagtaatcaatcaaatactcatcaggagatttttctctattgagctagtttagaaaagaattaaaacttaaacatttgggttgggaccctacgtggagaagaggagacaaggggaccctcatgctggctttgatgtgaatttggggcagtatgcttggattttggatcatctccctacttaataatttgttgtttggcatattgagatgcaactgacaaacaaaaagagccaaaaccccatgtccaaacattgaaaaaagttgggagttgtgctgagaatcagaatccatgtttcccgtgggctttactgttttcttagaattcaaaacccattttaagtgctgacagagccagcactcacacattcaaaacgaacttggtgttttagggtagtcaattttgtgcactaatgatttttgaattcaaagtatgtgttgtttgtgttttcaatttattatcttttgtctttcatttccactaatgggtaatcaaccaatcaatgcccagattttctttttccttctctttttctttttctttttcttttttaatttatttgattcctagtccttcaacttaatgtttggaggaaaaagtcacttaataacccattttccaggttttgactggattctattacagggaaaaggcatgtcttgagaaacatatgctccaagttgaatatttttagctgtctcaactctggatacagctcgactctgaatgtcatcatcccacttaaatttttaatgattaatcaattggttatttttcaatacttagatctaagtttttgggttgatatgtgacagttatcatttagtagatggaacaagggaccaagtcaaacctttctctatatttgcctactaagtactaagttgttttactttaaattccttctatcctcagttgattatttttgtgagtctttataaatttctataagattcaaatcattcatacacaccacaagcattgttggtacacgacaaacaatgtgagtatccgactagcttccgattgagttatacggtggatgcatatgtaaaaaagtgtccagataggtttttcggacacaacccttgaaagcttaaattaggtaaggaaaacttgaataagagatcactaaaaaaatgacaacgtactttctttctagtgattaatgggtatttatccttctacccaaaagtaatgtcttctctattcttttattatgtcattgattgcgtatttaacaccaatgattgttgggtcgtaatggtttataagctttgaagtctagtgtttatacttagtaatagttgtgacatttaatacgtttaatgttttctgtatttaatgtttgacatgcggtgttgaatagtaatcagacagtttttatcatggttttaaaaatcggatgggatcgtcgaccgatcacagtttcggtccgatccaaccaattggatcggaaagagatcgaaccaaaatcaaaccgtttgaaccaataattcaaccgacaaactggacgaaccaagcggttcccttcggacccaacagttcatttttctttccccttccctgtgtggctagtacccccactattgcctggagcgtcgtccgatcggcaacaatacctccattgctgcctggagcatcatctagctgacagaacccccgacgttgggaaccccaccccaaaacattgcaaatcccatcgtcttgtcgacagcacccaacatcacttccccgcctacaaagccccaccccccaccggcgcactagagaaactccccctctccccccacaactagaagtcttgaacttcccaaagagctttcaattttagttttttaaaatttaattttgatgttttatatttaatttatttaatttttttttaaaaaaattattgattataattgtagtgatatgtttaatattttattttttatttttgttttatttattgcacattgaaattattgaaaatattgggttgattgacaagtaaaaaattgtgaaaaaattcaacaaatataatagataatatcaaattttagatagattttttttattttattttaataatatatcaaatatatattaatgacgtcattggttcgaccgctggtccgaccagtgaatcgtgaatcgataatttttctgattcgataatcggtccaattttgaaaacattggtttttatctatctatatcctgatggattgacagacaaggatatttggtagttgaacgatgatatatggcaagtgcaaaacaaagtaataagaaaatatttattattatcattattaattgttttaatatataatcacctatgactcagctcattgactcaatcgttaatatttactcaatcattgatatttgttttgtcgatatctttgaaattaagtaacaaaatataaaatgtcattgatacagaatttaattttactagttagcataacagttacttttttgaaaccttgaatcgggtagacaggacttggtacgaagttttatgattcatagaagtttaaggaagtttgaaatgtctaaacgtgttcaatccataatgtcatcactcttgatattcatatcaacctttaattcttttgctttttattaaaggcattgaaaaagttgactaaacgtttccatgtatgatatgtatgtgacatttcctttcatttcacatttacgctaaaatgaaagtaccaaattaatgggagtttgacatggattgtccattttcacaaccttatcctatttatttaaaataattcttatttttatctcattaaaaaattaaaaaggacaaagtggctatgtaaattccccatacctatcttattgtgtcatatttaaatttttttgaattttttttaaaataaaaattttaaattacaattaaataaatatattttataaataattaaaatattataatgttttataacttattttattaaaaaataattttttattatatatatatatatatatatatatatatatatatatatatatatatatatatatatatataggaaaataaaatttaacttaaattaattttatacataatcaaagaggggcaagggtaagacaaaacaatacttgaactcgtcttaaacctgtcttgagttttaaaaaaaaaatcaaactcacttttaatccatttatttaaatttcaaacctttcctattaggaacgggacgagtataaaaaaaaaactatgttattatcattcttagtaccaaagaaagaagagttaagaaaaatgggaagatttcaaggaaaaagaaagttaattatcttatttgatataatatttaataaatacaaaatgcttttatatatatataatagaaaaatataatattttttatttataagtttttaaatattttaatcatgaatataattaacaaataaatcaaaattactcattaaattataaattatagaatgatttttaaataatattaaatatgaaaaaaaaacttttatatatttttaataacaaacatatgatgccatatattttttattttcaaaaaaatgaaacatttaaatgtaatattttttattttagttttttattctttatatgagctaaatatcatatcatataatatatttcattaaatataatattataagataagatttttattggatatcgtattaaatgatatcagaatattaaaagcatcacctacaattctaaagaccttattaatagactgatttacccctacccactttcatttttttgaacataatgtcatatttcaactaattaataagctcttggtcacttaatggttatttgcttaaaataaatagagtatcacaatcagtccttcccctatcagagaagacttcctaaaacaaatccgtgacaactataacctttctttaatcctaattactcaaaaaataaaataaaaaaaatcaaagggttataggaaaaaccgaataatttcaaacatcaaatcatgatataaacaagttgtgcatcatccctagagttgatttgataacttaatttcatcggttaactgactaaatttattcaataaaataagtttatatcactacttaaatttaaaaatgtatatattatttactcgtgtttagtgacatatatcatatttcaaactattacatgggagacgaaaaccaaggtttgctttatttggtatcaaatgaaagctatgaacaaatagaacacattttagaagtatcaatatcgtcacatgaatcgtaatgcatgaatgtgatgtattaaaaaatttacaattcacaataaaatagacaacaaagctactttactgtcatcggcccgaatcacaattatacttattgttgcactcgatgttaaatattaaatattaaattttaccaaacaacctgataatgtattagcctaatagacatatgacatgtgcaaccaaacagtatcttaaaatccaagtgccctttccaacaatgttagcgttcactgaatagacccatgatgtaaaaaatgtcaaagtcttagtgagtattaaattctatagaaaaaggaaaattgacactgaccattgaactaacatggtatcaaactgattggtacaaatgattgagaaagaaagaaagaaagaaagccgtgtagtgaatcactacgagtcaccctctccatcagtcttcttgatggtgagtccacacccaatccctttgtttttctaatctatgatttctccatctctcatttctttattcaaccctctctcccgttgcaccagaatcaaataaaaaaaacacttttaaaaaacaaaaacaaaggaattgggaatcaaaactaaacttcatgttaaatttatgaagaacttgaaacaaaaaaaaaaaggttatctgagtaccaaatgtttggccacgagccaacagccaaccaccattgatgagtttgaaatttatttgattactgaaaaaccatatatatttatagaatctgctgttccctttctaaatgtgggtgaatcatgtatggtggtggctcggtagaggacatttggttggaccaaatgacttgaccccaacgagtaacagcgacccctcgatgaaggttgcaaaacgtgttgccaatttgttgaaaagtttagccaaattttgtatcctatcgtgatctttcgttttcatgcatgaataattgagattaatggtggggtgaaatgaccttttttatactcgttaatcatattattatttgggtaaaataattttaaaaataaataaaaatattattgtttaaaaagtattataattttaaaactattacaatttaaaattattgatttatttcaatctaaatttaaaaaaaaaaaaatcagttcaatataaaaagtcaacacgtcattttaatgtaaggccaaaataaatgataaaaaaatattattaatcattattttttggtaacatgaaagatttcattgtgctacatatttagtttataattgatgttatttaattttaaaaaaaataaattgagtataaaaagtaaaaaagttgagtttaatataaaaaattattattattatttcaaaatctaataaaagtttataggtgtgaatcaaaatatggaaatatttcattacactatgtatttattttacaatttaaccccttttaaattgagcttaataagttggtattcacttagcgacatgaacactcgtattgaagatttgtatggattactcttgttaaatgtgactcaaaacaattgtattagtactaacatgatatcattcagactcttgagaatatttttaattacaaaccgatatgaatcgaattagtgagaagatgaaagataattgatattggaattttttgaattcaattagatgagataggaagggggtgaaattttattatagatcgtcggaggtgattttgaaagaagaaattagaagaatggggtacaccacaccctaggaaagaatttgtgtttcttggtgtggtcacaaatatgaaaggtgggtataattccttgacatctgtttggtatatattcattgattgatacctaagaattggagtaaagcaagggaaatgaaaataaaaatttgaatttaatttttttttttaaaagtgaagaaaaagaaaaggaaaaaaaagaaaagaaaagagaatcattatgactatatgaaaagataaaataagacaaataacaaaaagaaaacaagtgattacaacttggataactagactgataggaacaaaagagatggcagctgccagggggggcagaggagtcacaattttccttgtttgcggaaagttcaaatccttatttaattatggagtcacaatcacctctacaaatgtgatgcttatcgccatggaatggattttagtggtaggttaatgggtagatggcagatacacctcgcttttcataatactttccattcctctgtcccccagttctaccttccacataccactttcaaaagggacatgtctgcgtgcgcaactattcttcaccgacattggctaaaccccaaaacacactttgggggtttatggtctagtgattacttgattaagtgctcactagtgtggtcgcaccgccacaccactgcccttgtttttcttgccccagagagtggaaagatgatttattcaacactaatagaataagcgtagaaaagagaagtattctaagtaaagttttaatcatgtctttcaaatgctttccaatcgattttttctgtcttacgtttaataaacttttacgtcttagaatgtctttatcacgtctataagatagtgtaagcattttgaaataatattgaatcattaaaatttgttaaaattagaaaatggaatttatgttgtttgctatggtggagataattgaaattattttttattttttttattttttttttgagattttgagtcattgaagtaataaatagacggtgtgtatggcctatgaagaagatgtagacacgtaagcgtatagaatcaaacctatctataaaagtggagcaccagtctccacgacaaggacagagacccacacacatcgatgatcgaacagcggagtctttgagttcccgtccctctgatatttgaaacccaaaagccttgccagactctgttctacatcacacccagttccgcattcattcgcatgggactcttcatctccaccatgctctcttttcttcttcttcttcttctctctcagctcttcctttccttcaccctctgcttagcttcaacgccagctgttatattaccccttaaaacg

SEQ ID NO: 11212 - DNA, 4658 bp, Vitis vinifera
  Intron number 3 from transcript GSVIVT01013682001 (locus G SVIVG01013682001) derived from phytozome v7.0 (chr-ID chr1 8_random; pos 2548848 to 2553505 reverse strand)
agattgtcggtctcttttctattcacaaatcagtaagcctttatttccattcttaatttcatattttattgataaataacattgcattggattttaatgtaggagaaaaagtataagaatgtagatagagttatggatgtagaagaagtttattgtcatgtggatagagttcttgatgtacaaaaagttcttggtcttgagtcacacattgtcctcattgacttgatggttatgggaataaggaccttagattctcttagcaaattttgtttttgaagattgttctatttactctttttgctctacttcttattggtagatgttttgtatttatttgtcattttttgttgtttatactgaggggttgggttgaggttgctccaagtcttagttaaggtcctctttctactttggagtttataattatggtggatgtttcaagctatgtttttgtaatcgaattggttattaaatcgaaaaagttgctaggtcacggtttaatggtcaaacaggtagttaaactgctgttgaataatgacatcattatgacatcataagtatataattgatgaattattgaaattgaaaattattataagaaattaaaatgataaattctagtgaaattttgacaacatctctgtttgttgggttatttcacaaaattttccctaataatcttgaagcgaagtgctaaacacattgggcattttaatgttccttcaattttgaaatcaagaaaattccaccctgcagtaatttgctttctaatatcttatatttttacttttaaaatctcaagatcctaactcatatcaatcccaaagagatagaacaacagtagtggggaacttggaacttgaatgctgatgcaaaaatatagtcatggtttgtctccacaaatgtgattatatctacaaaactaaattatatattaatctgttgcaaaagtgtttcctattatctatagttatcatatagttattatgattcttgttataattaattaaaaggagtcccatttggtggtgcacagaagttgaacaaattttgctttcttgatttttgaccaaatcaatggaaatacttagaaactcatatatgtcatatgccctcttgattcatgacttcttaaatctttcagcagtccattaaatatacatattgtcaataatattgtacattgaaaaagaaaatatacccatgttcttggtttttccatgttttctttcttagagaacatcatttaacactagaaccagcaacaatttttatttttatttttcaatttccgctccctctatttttgaatgagtgaacaactatcctttgcatcctagttctacgtccaactgcgcagttggacttctgaccacatgcttgctgtcaaagcattctatgtgattgaaaattttagtgtctgatgtcattaggtgatggtgaatgtcactgtaaaagatttttttctcattctactcgatgaaactccgtgattctggctcaaccaaaatctcaacttgaaaaaaatgtgaaagcagaacttggagaatagagcaaactgcaacgagttcgttgctatgagcagagagagtttattgatcttccaagtttccaaagagcaaatggtaaagcattagggttcttgtgcaaatattgggattttggggatttggagcatagaacacaaggctggctgcaacagcattgttttattgaaatccttcaaaacagcatcattttggataattaaagcttaaaaataaataaataaataaataaatcaaaggatgtggagggaatgatccttccaaaattgactggttcacattggtcaatggtccaaccgctggttcacacaattcaagccctgttcaactcccaaatgtctcaaaagtggcccaaaccgggtgagggtgctggttgacagtgtgatcagttgaatcggtcactccaatcaggtttctaaatcattggttctgagtggaatgatgatgagagcattagggtagggaggccatatttatttcagttcatggtctcattaaggactttgaggtagggaggaattgcattagggtgcccaacattcatttttgagatgacgccatcttcttttgaggactaaaataaacatggcctctaacatttaaactcatttgggaaataagtcttcaagctagcgttaggccctaaggtcagcatagacaacagtaccttatcaagtatcggggattagtaaggaacttagttgtagacttgccttgtggtggtgatagtttttaggaagggcattgctttttgtttgctcttgtcttgcctatatccccacatactaccttctatttttcaagataaaaaatgatattgcatttaggatagagagatttagcaaaattttctttgatttgattttcaggaagataagagatcaccttatatagattgaagttagatctgtaagcctaagtgtgaaggagggttttggtcttggaggggtctccttgagaaatggaactctagtgggaaggtggctttagatgtttcttctggagagtgggtcattatgaaatccatcattagaagcatctattttccgcactcaaataaatgagaggccaactttgttgttgggtagtcagaaccttgtccctgaaaagctatcttattctcctatatttctgattcactcatttgtttgttgtcctgttggtgatatgttgaagatccaacttcaggaggagctttggggagggggccaaaacctttgctttaaatgtccctgtttctgttttatctcaagggtttgagatttttctatctctcttgtattaggccaatcttgctcaccccattcttggaactttgggttctgatataatttaacagatcgctgcactgttcatgagtcagatgctggatatgttaataacatatattttacatctcatattatccttttcattataagctaatttttggaaggtttgtctgtcatgggttgtgccattttttttttcttgagtttgtatactatcacaagcatagaaaagtaaaatggagcgtgcatttgtacagttctgttgtctttctgtgaaggatttaaaaatccaagcctttagggtgcaagggaggatgaggataaagtggtgtggacaaaatctagaagtggagttttctcagtcaagtcacactattctattctggagcccgaaggttctgctttgttcccttatgataatatttggagagcgtatatgcctcctaaggtagctttcttcgcttgggaagcttcctggggcaaaatcttaactttggagcaactccaaaggagcgggtactctttgccaaataggtgttttctttgcctttctgaagcaaaaacggtggatcaccttttacttcattgtgttaagacgcggacattgtggaatcttcttttctccctctttggtgtggcttgggttctcttggttcagttaaggaaactctccttggatggcatggagcatttgtggggaaaactcgtaaaaaggcgtggcaaactttatgtatattttggtcagtatggaaggaaagaaatttgttggcttttgggaatgaggtgctttcactccaaaggctgaaacattcttttgtatgtaatctttggtcttgggttagggtgtttatagttttgagcccttgttctcttgttagcttttttgagtggctaggctctaagtaagggtaggggttggtgtttctttccccttcctaggttttgagtctatgggctgcttttgtatactccctgtatacctagagggcactagtttggtgtttcctctttctgtttattatatttctctttacctatcaaaaaaaaaaaaaaagttttctatataaaaaaatgcagatcctctttttgcttgttaggctcttggatttagtgtggccttttgctacacctatcacacagtagcagctgtgtgatatctagcttgcttctgtttctatttgcagtagtcaatattttcattattagtaaagaagatttgttacaagaaccatgtaacaaatgtctaatataatacgtcaaaaccaggaactagaaaattagaaataatgtgacctgcactacagaaatgaaactatacaggaagcttacttatgacttgggtagcacaggtaataaaagatgggacgcatgtttccaaattttaggaattatggttgctgagaatgcaagaatgattaacatctgtcacgaatgtgcctgaaatgctttcaaagcattataaatcccactttgaagctcaattccttgggagatgtttcccactttatgaatttaacattttgtgaggacactgacctagatgtaaatgttaagcatgaatacaagttttcaacacaaccatttctaaaacgaaagaatatgcagtatggatcttgatgcttaaaattatgtaacatgatataagttcgtttttcttgatgagctaaaaatattgaaaggaaaaaaaaggaggggaatgcttgcagagcttaggtttctttccagtttaataatttttccaattcaaaccaatcaaccacttataaatatctatacagtaaaaatcagttcttttagatcctttttgcttgaaatttatgtgcaggtatcatttttgtcc

SEQ ID NO: 11213 - DNA, 7435 bp, Vitis vinifera
  Intron number 3 from transcript GSVIVT01024180001 (locus G SVIVG01024180001) derived from phytozome v7.0 (chr-ID chr3 ; pos 548199 to 555633 reverse strand)
tggcagtttgtcataattgtagccttccagggtaagtttgtttctcatgcactacttgcaaaattggaaacatagatattcttctagcttgacttgtaaattgagaacatgtgtattccattcactaatcaaatttacaaaccaaagaatcccctttgcagttggtattgtggtatggtagttctggttggtggtttctgtaaactattgatattctggcatgaagagcacaagattggcacttgctttcagtcctccttatgaggacttaccctacccttcagataatgcttgaattgcaaaccttgcaagaacttctgcctgaacacccacttccatgcgatgtccatacctgcaaccttttggataatcaccatctaggttccagaatttcttaacaaacatgcgtttataaaacgaatctatgaagtggtgggctcaagttttaagaggaggccttcctctgcttctcgctatgaaagggaactttgatagttggaatgctccattagctacaatcattcaagtggaaatgggagaaggagcaggaagtgtgggtgggatttggtttctgagtgcccaggctgttgtaaaggtgaggggacgggaggtggagaggaagaggatgtttacattctcttcacggtgcttgtcttgcttgtttcttcaagggggtggtggcttgggggtgtggtcattggtgaagaagccgtagttgttcgttttcctaggtggtttgttagccctggtcaggtagcagaatgcggactaggttaagtagtttgggagccctctgtttctatgatccttagggcgttgtctttgttttaggttgtggtttgttgtttttttcctttagcctactttttggtgctctttgtatactccatatgtacttggtgtgccttttctttacgcttttaatatatttacgtatttacctataaaaaaaataaaatcaaacgaatctatgattttttgaaaggcaaaatagtgccctgttttcgaatgagaagctgctttactggagaattctgaatttgaaagacatatgtgcctcatttatcatgcttgaatgatagccatggtaaggggggggggggggggaagaggggggagctgctggtttgcagtagactctaagacgtttgaaatctctgtggaggtgtttgggaagaaacaaagggggattattgtggaaagaagcagaggattcacttcgtggatcagatttggggaatctagtttgggctggttgttggagggagtggagtctagttgtaggggtgagggtgggtagaggtttgccaaaaggtgggaggatggaggtaagaagttcagactagaatgccgaacaaatgatgccggtaggtttttattatgttctgtggttgactcggaagcaaagagacattgcttggtgttcccggaaggtaaaggttttttgggaggatgggccttgctggctgaaaaacttcgctcaataggaattttgtcaagagatgagactagggaagcagatatatcccagaagactgagagcaaagttggggtttctaaggggaagaaagagaaatcctacgttgaagtagtgaatacaagagaagctccaagagaaaaaaggctaggggaggcagtgtggattcaattgggagaagaagatgtggtgaaaggaagggagtttttggaccgctgcttggttgggagttggggagagaagggggttacggattctgacttgagtgatatggaaaagtggggaaaacatcactggaaactccaaggagaaatgaggatagcaaggatggggggcttttgctttctgattgtgtttgagttaaaagcagaagcaaataatatgttacaacgaggcttccggcgctttaaggaatcggttatacatctggaaagatgggacccaagtgtgggatgttctcaaaggcgcgaacaagttaaggaagtctgggtgagagtgatgggactaccactgcatctctggagccgggaagtgtttaaaaagattggagactgttgtgggggatttattgcagtggatgaaagtactggtgcaatgaaggagctacaatgggccagaatattggtgaatttggaggggataggagggccaagctctctgcaagtggtaatcggcactacctgttacgctattcaactttggtgggagatgttgccaagggtgactgatgtgattccagctggcagctctgggacggggaagaagatggaggttagggaagaagaaggggggaggacacgcgccggttgtgcggtggaaatggtgcaagcaaaaggacaacctgtaaagatggcagtgccgtttgaagttggagaaagtagcggcatggaggctaattcttctgacatgatacggacaagaggggcagtggcagagaggcagaaggatggtggggagtatttgcaaaaagatgggcctgcaatcaaagctaatggtaggtcgggctgggtcctggattcagaagcggagaggaggcccagtgaggagatcccggtggccattaaagaagttagtgggttggttctcttaagcccaccttcaaaagtgacaaagccaaaagcccagaaggggccaactgaggaggaccgttttgaggtatgtgggccgccccttttaggcccaatacaaaatattcctgcaagagaaatgggccgcccccagttggttccaaataagggctcagctgggatcgggcatcccatatctcattccacagatcccgctggtgttagggctcgcgaggcttgtcgggaggaggcatatgggtggcttgacgggatcttggtcggcgccactcagggctcgtccttctcgggttgtaacttcaaaaagcttaccgacgaagctctaaaggaggaggcagccaggtacacatcttcttgtcctcgggacgttttttcgtttggggagcggggtctctattcttcttcttctcattctgggtgggatgggatgtttgtcgatccagttggggccagtgattttgggggaatagacttggaccctctaaggatgattatggcggatggaagggaggcagaggtcctagggtcgccggggatggctctcgggactattggaaaggaggtagagaaagtggtgggatgggatattacggaagagagaaacgaagcgagtgagcagtgttggcagtccagttgcttagctaggtttagccgatgcctcgggatgccgacggagggctttgaaggagagattctgctcttgctcaaaaaaatgaaagaaagaaaactccagaaggggaagaaggggaacctggttggtaggaaaaagagaaaaatggaatcctccaaatttgaaagggaattgaggaagttggaatggaccgtgaactacattggaggagaaaggggggggggggggggggggcagttcttccaatattaaatgaagatccgaattctttcttggaatgttagaggggcaaataactgtgacaagagaaaggtgattaaagccttgattaagaagaataaggtagatttggtctgtctgcaggaaacaaaaatacaggagatgacaagagggattattcggagtataggggtgggaagattcctagattggggaactgtggactcaaggggttcagcgggcggcatagtggtgttttgggataacaggatgctggagatgatcgagctagaaaagggagaatgttcaatctcttgccattttaaaaattgtgaggatggctttatgtggaccttcacaggggtttatggtctgactaagaggagagaaagggaaagtctctggaatgagctgggggccatccatggcctttggaatgggccatggtgtgttgctggggattttaatgctattctaagtcctgaagagcacagtagaggagggagctataactcagatatgagaagattcgcagatgtaattgaagaattacagttaaaggacttgcctctatttgggggtccgttcacctggagtggaggggcgaacaaccagaccctgtcaagattagatagattcctggtcaatgaggggtgggattgccgttttagccattcaaggcaaaacgttctaccgagaccagtgtcagaccacttcccaattctgttagaaggagggggcttgagaaatggtccatcccctttcagatttgagaacatgtggcttaaggtggaggggtttaaggatctattgaaagcctggtgggagggggataatttcaatggtgctgcaagctttgtcctgactgaaaaactaaaggtggtgaagactaaactgaaggagtggaacagagacgtttttggcagggtggagtataggaaaaatgttgctttggaccagatgcagttctgggatgcaaaggagaagacaaaccgattgacattggaagagatggaggctagaagagaggcgagggaagaatacaaaaaatgggttctcttagaagaggttacttggagacaaaaatctagggaagtgtggttgaaagaaggggacagaaatacgagcttcttccacaggatggccaatgctcataggagaagaaacaacatggaacgaataagaattaatggtgtgtggaagtcggaggagaatgggatgagtgaagggatagtaaatgcctttagaaccctgctgtccaacccgggggaatggcgcccttctttggctggactgcagtgtgaacagctacagaacctagatgctgatgctttagaggtgccgttcacggaagaagaggtacatggtgcgctagtaggctgtagtggggacaaagccccgggtcctgatggatttacaatgtctttttggcagtttgcatgggatattgtgaaggaagatgtgttgagattctttagggagtttcatgaacatggtaaatttgttaagaggctaaacactacttttttggttttaatcccaaaaaaaatgggggctgaggatttgagggatttcaggcccataagtttagtgggaagcctatacaagtggttggctaaggttttagccaatagacttaaaagagcggttggaaaggtggtttctaaggctcaaggggcttttgtggagggaagacaaattctagatgcggtgttaatagctaatgaagccatcgattcgattctaaagaacaatgaaaatgggatcttgtgcaaacttgacatagagaagacatatgacaatgtggattggtcctttattcttacagtaatgaagaaaatgggttttggggagaaatggttagggtggatcaagtggtgcatatccactgcaagcttctctgtgttgatcaatggaacgcctaagggttttttccaaagctccaggggcttaaggcaaggtgatcctctatcgccttatctctttgtgattgccatggaggtcttcagctcgttccttaaaagggctgtggacaatggttacatttcgggctgtcaggtgaagggaaggaatgaaggcgggactcagatttcacacttgttgtttgccgatgacactttggtattttgccaagcctcccaagatcagctgacttacctaagttggctgctaatgtggtttgaggccgcttcgggaatgagaattaatttggacaagagtgaactcattccagtagggagggtaatggatattgacgatcttgccttggattttggatgtaaagtgggtagtctcccgtccacttatttgggtcttcctttgggtgctccgtttaagtcagtggcagtgtgggatggagtggaagagcggttccacaaaagattgactatgtggaagagacaatacttatccaagggaagaagagcaaccttgatccgaagtactttgtcaaaccttcccatttactatatatctgtactgagattaccaagttcagttagaagaagacttgaacaaatccaaagggatttcctttggggcggtggcagtttggagcgaaaaccacatttagtaagatggaaggtggtgtgcctaagcaagaagaaagggggtttagggatcaaatgcctttccattctcaataaggtactcctttctaaatggaattggcgttttgcaaacgagagagaggctttgtggaatcaagtgattagaggaaagtatggggaagatagagggggttggtgcactcgggaagtgagagaggcgcatggcgtggggctctggaaaggtataagaatggactgggacttggtgggtgcgcggatttcttttagtgttggcaatggaaggaggttgagtttttggagggatagatggtgtgggaatgcccctctgtgcgagtcatttccttccctctatgcattatcgactgaaaaggaagcttgggtggcggatgtttgggatcccttggtgcaagggggtagggggggttggaacccttgtttttcaagagccctaaacgactgagaggtggaggaagtggaattatttttggggtgtcttcacgggaagagagtccttggagatgtagatgataaggctgtttggactgaaacaaagagcggcattttctcggctaagtctctataccttgccctagaagcggactgccctagttctttcccatctagctgtatttagaaggtgtgggtacaacccaaaattagcttttttgcgtgggaggctgcatggggtaaggcgcttaccctagatcttgttcagagaagaggatggtcattggcaaatagatgttacatgtgtattgaaaaggaggagaccatagatcatctgcttctccattgctcaaaaacaagggtcttatgggagttgcttttttctttgtttggggtgtcttgggtgttgccgtgttcagtgagagagactttgctcagttggcagacttcttctgtgggcaagaatcataggaaagtgtggaaagcggctcccctgcatattttttggacggtttggaaggcgagaaatcgattagccttcaaggatgatgaaatatcaatacagagattgaaatattcctttttatgctcgctttggtctgaggcaaagctgttcatagtagaatgccctcaaactttggtgaattttatagattggttgggatcattgtaaggttttgggccttttggttggtgggtctcttatttgtctttggcctcttttggtggtgggtgtataggtttgtataccttacataggttgtataccttgagtcgctcttttggcgtctctttataaatgaattttctttacttataaaaaaaaaaaaaattgattaccatctgtctactatgagaatgaagtcttcttgatcttatccctattgaagcaaatttgggtttctaaacttatagaacccgaaattttaatggttttatgttattagtggttgggttttcatcttaatcatgcatccaaatttctgagcaggcacattgcatcaga

SEQ ID NO: 11214 - DNA, 1889 bp, Vitis vinifera
  Intron number 1 from transcript GSVIVT01031146001 (locus G SVIVG01031146001) derived from phytozome v7.0 (chr-ID chr1 4; pos 1742574 to 1744462 reverse strand)
gccactcccgcccaggtacgccctttatccctctcccgtgaatttcaatcacaaaaattgaagaattaagaaaacgaacgtatattttcatttagatgttttttattctgtgtttttctataacacgtaatccatattgtgccaaacccagatgagaattttcccccatgcggacttagatactcagtttttgttagcagtgggttgattttttgttttcgtgtagtttatatttgtttctaataacttggtcggtttaatgttttggcataacccagaattcaaatcgtggccaaacctgtatgggaatttgtgttttcttggacattcaatttgtggttattgctacctacttggattgattttgggttttgatattatgaacatacaacacatacatctgcatatagttttttttttgttgctaagaaacttgggttggttttgattttttctgtaggccataattcatatttcgccagatccagattagaatttgaatgtatgtttgtttagatatagagggttggttttgtgtgattctgtagcccacaattcatatggtgctagaccagatgagaatttgcctttatgtgggtttaggtatttagttcatgtttattgctatcaaattgggttgattttgtatattcatatgttattaaatatcagactatgtgcatatagtttatgttagaattaaagcactctaatcttatttttgaaagcgacaataaacgaatacgaaaaattaaagtacaagaaaacgtgagatttatagtggttcactcttaatgtgagagttacatccacttgcagctgccgtaggatttcactatgatgaaaaagacatattacataaaaatcgcaaatgccttgtcctctaggtttttctctctgcatttttctctctctttcaatagcatacccaacctcaccaagtcggctaccctaaatataacaaaattagggtaaccaaattacatgtgtaaaatccccaaaataccccaacttaaaatacctttacaaaatttcatgcaatctatgtgctgtctttgcgtaggatcaatctattttagggtgaacattgtcataataataattaggctccacacatcttaacagtttatagttattgctagcaagttggattggtctggtgtttttctataactcaaaattcaaattgtggcaacacctgaatgagaatttgtgttttcttagagattcagtttgtggttttgctaccaaattaggctgattttgggtttcaatatcatgaacatgcagcacatatatgtgcatattagtgtctttttcgtagctaagaaattggattggttttgtgtttttatatacccataatttgtgctagacccttcttggtttcctctccctcttatttcaccttttgatgcatgttgtatgcattgtgtgtaccttggtgtgccctctttttgggcattattaatatattttctatttgcctacataaataaataataataataaaaataaaaataaaaattgtgctagatttcagtttacatagactgctacctggattttgtgtgtgtgttttgacatgtgtttcatgagtgttatgctgatttttgttcttataacacttcaattttattgaattcaatggattgatgagaatgtttatggttctcccattcaaaagtgaaggttggacatagaagcagaaataccaactaagttgaactaacacaaacatttatctgattttgattttcttttgttagtgtctttaaaataaaggatataagagtttctgtaactaatcagctacttaatattcatttcttggttatctatttgtttttcctttggtttaaattaggtggaaagatctgtctcgtaca

SEQ ID NO: 11215 - DNA, 9547 bp, Vitis vinifera
  Intron number 4 from transcript GSVIVT01023749001 (locus G SVIVG01023749001) derived from phytozome v7.0 (chr-ID chr1 1; pos 10603698 to 10613244)
gggtaagaaactctattgtactaatcttctactgttatctaccctttcgttccttgttgtcaccgaattgatccaaaagctagtagtatgtacagttgcaattatattaatggccctatggtccatacttggacacaagtactctctctctctctctctctcacacacacacacatatgtgcacgcaattgcacacacacacacgcacatgcgcgcacacatacgtgtgcatttgcgcgcgcacacacacacaagcacacatgcacacacatgaattccaaaaggaaactattgagagatcttttcaaatgaaatatcaaatgaaattggcattacaattatcattaggtaacccaatcccaaaacattttggctaatgcaacttacgttgcaagttgcaacaccaacgtcaaaacatagatcccccactgtcagttaaggcttgggttctaaaggttaagatgtttgaggacataggacttcccaactaattgcaagctgatggggaattccgtaaggcatatagcagctgaggaataccctgatatctgcaacttatttatattcacttcgacttcccataatagatgttgttcctgttttagacacaaatagatgttggttatatcattacaatttacagatttgagagcattgcaacagtttttgttactagacttatagggtgtttggtaaatcaacttaatgacttaatttaagttattaagtagattaagtatgtttggtaaaataatttaatatcacaacttattaatttttgtgtgatagatggaggagcgagaaagacctagagagagagtgtgtgcgagagatggagaagaaagctgggatcagggtgggagcaggatcgcagcgggtttcctccagtcaggggtgcgtagaaggagctttggggtagaatcgaaaatttttgaggtagagacagagagaaaaaaagggaggacgcaaatcttcatagttgaaagaaagggaggtgtctcctcttgggtaaagttgggaccggcgagtctagggccgctcatggaaggcctgaccttctgcatcaaggatacgaggaccggacattgggaaaaattttggcaagagagtgggagaaccttctctttaacgcgcggcgaaaacaaggggggatgcttcctacgcctgggtgtcacggatcgggaaaagaaaagatttaacatctttgtacccaaaggcaaaggaacaaaagggggttgggccctgttggttgaggtgttgcgtgagatggagcctggctcagatggtcagaggaatcaacaagtgaaggagaagtgttggagccccatgttgggaaagtccttcgcggacgtggtgaaacagaatcgtagttgtgaagaggtggtgcgggtaaagatcgtgaataggccatcaggtggaagattggagaaattggctcagtgccttgtcggaagctgggacccgatgctaggaaggggtgatgatctgcgaagctgggggacccaaatgtcaaagttgtggggtttgaagggcaacttaggcttggccaagttggaagacggcaaagccctattggaatttgagttaagagcagaggctgagaaagccctaaaaaatggggtcatatcgatcagtggctgcgatgtgcgactggagaaatggagccaaaggacgggatgcgtgatggaggaagagaagaagaaagaggcttgggtgagaatacttggcctacctatctccttatgggatcgggacaccctctgcaagataggagagggatgtggggaatttttggacattgacgccaaaacggagaggatggaggagttgcagtgggctaggattcgggtaaggatcaaagaagatagaatccctaatatggtggacatatggatggagaacacgtgctattcggtggtcttgtggtgggaaatcaggcccacgctaagaaaattgcaggccgatgacaaaggaagaaccctcgcagctgctagagagggagagggtgagtctcagacacgcgagggcaagcgcgtgatggaggaggaagggggctcaaggctcgagacccagacgcaggtggtggatgggatgtagaggctgacagctggggcggggcaacccatggactgtcatcacgggttgggtgggtcgcacctagggcctcagggtatggagcgtatgcaaggcgggcctttagtgctgggccttttggagagaccatgtgggcctgggggccttacaattcagtcccctttggtggatcatgttgggccaaaagagtgggtggattttagaaggcccagaatttggaagcccaaggaaggtgttggactggtggccgaaggcccatcggtggagaccagtctccattctaatgtggctcagatttgtggcccaagtagctcgaggatcccagcccctgaagatcctttgcttagggagaaggatgacatgcgcaggctaagcggggcagagctcatccaaaatgagagatcgcctactgatttcgccttggctgaggaagcgatgaggtaagataaggtttctgattgcttggtttctgggaccccttctcttctttctcctgttttcggtcggactccagtgggggagtattgcgacttttctggggatgacaaagagcgtgatgagggagaaaatccgatccaaatgatcatgggatcgaagtcccctacgggtgagaatgtcgactgctgggatttggtggaggtaaacaaaaatacaactgtagatggtggaaaggagatggccttagaccaaatagtaccacatgcatctaaggcagagggggagcttagctgggaaaagagtgatctggccaagttcagcaatttcttgggattttcgacagagggtctgaagaaggacattatggatttcttggtcaaaattcgtaagagaagggaaaaagttcatagcaaatccctgttggagaaaacaaaattcgagagagaattgagaagattagagtgctccattaactatgaaggggggaagaaacaaaatggtggtgagcaagcaagggggtgccagattacggaagtctaatgaagctacgaatccttagctggaatgttcgtggagctaatgacagctccaagagaatgattattaaggcagtgatcaggagtcagagggtggatctcttttgtcttcaggagaccaaaattcagtcattatcggagggtctggtgagaagtttgggcgctggcaggtggtctaattgggtggccttggatgcagtgggctctgcaggagggatgttggtgtgttgggataaaaggtcgttggaggtgatggagacggaggtggggaagttttctgtctcgtgtaggtttagaaatgtggaaaatgggctaacctggttttttactggtgtgtacgggcctttttcgaaaggtgatagagaatgcctgtgggaagagctaggggcgattagaggcttgtgggaagatccgtggtgtttagggggtgacttcaatgtcattctgtcccagagggaaaggaatagacagggaaggctgactagtgctatgagaatttttgcccaaactgttgatgaattagagttgatggatctccctatgcaagggggtgctttcacttggagtggggggaggaataaccaagcttgggctaggctagatagatttttggtgacacaacagtggctggagatgttcagtggggtcgcccaatatagactgcagagacccacttctgaccattttcctattttgctgatgggtggtgggttgaggagaggccctactccgttcagatttgagaacatgtggctgaaagtggacgactttaaaggtcttctccgggagtggtggcaggggattgaggtgagaggaagggccagtttcaggttggcctccaagctgaaattattaaagctaaggattaaaacctggaatagggaggtgtttggaaggctggaagttaacaaaaattctgcccttcagcaagtggaatattgggacggagtggagagtgagaggtgtctgtctttagctgaaactgagcagaaaaaggaagccaaggacgcctttcacaaatgggtgttgttggaagaagtccattggaggcagaagtcaagggagctgtggcttaaggaaggggataggaacaccggctatttctatcggatggctaatgcccatcggaggaacaattccctggacaggataatgattaatggtgagtggctgactgaggaccaagaggtgagggaggggattgtgactgccttccagaatttcttatcagaagaaccggggtggagagcggatattgaggggctgcacctaaatcaacttactcctcgggaagctgaagacttggagaagccttttactgaagaggaaatccacggtgccttgatggagatgaggggagataaagctccaggaccggatggattcacaatggctttttggcaagaatgctggccgtttgtgaaggaggagatgatggatctttttaaggaattctttgagtatgggtcgttctccaaatgtctcaacaatacctttctggtccttatcccaaagaaaggaggtgctgaagacttaggggatttcaggcccattagcttgcttggggggttgtataaaatcttggccaaagtcctagcgaataggctaaagaaggtgcttgatagggtcgtttcggcagaccagaatgcttttgtgagagggagacagattctagatgcgtctctagtggctaatgaggtgattgactattggcacaaaaggaaagagaaagggttgatctgcaagttggacattgaaaaagcctatgatagtttaaactgggagtttttgatgaaggtgcttcggaagatgggatttgggtcgcgttggatggattggatgtggtggtgtatctccacagctaaattttccatcttaatcaacggggtgcctgctggtttctttccaaattctaaggggttgaggcaaggagaccccctttctccgtatctcttcatcttgggcatggaagttcttagcacactgtttagacgggctggtgaggggggtttcctttctggttgtaggcttcgggggagagggggtgtggagatgaacgtttcgcaccttctctttgctgatgatacaatcattttttgcaaagcggaaagagagcaagtttccaatctaagctggatcttggcgtggtttgaggcggcttcgggtctcagaattaatcttgctaagagtgccctaattcctgttgggcaggtggaagagttggaggagatggcggctgagctaggatgcagattgggagcattacccactgtctatttggggctgcccctaggagcccatcataaaacttcttcttcttgggatggggtggaagagagaatgagaagaagattagcccaatggaaaaggcaatacatctcgaagggggggagaattactcttatcaaaagcactttggccagcatacccatctactttctatcccttatacgcatccctaaatctgttacaaaaaggattgagaaaatccaaagagatttcctttgggggggaggaaggttggagaggaaagctcatttaattaaatggaaggtggtttgtagccctaaggaggagggaggactaggcatccgaaaaatagatgtattgaacaaagccttgctgggcaaatgggtgtggagatacgcctatgagaaggagaatctatggaaaagggtgataggggtgaaatatggtcaagaggggtgtgggtggaggactaaggacgtttgtgggccttatggagtgggattgtggaaggagatcatgaaggaagctgattggtgctgggagagtattgtgtttaaggtaggcaaggggaccagaattttgttttggatggataagtggtgcggtaatgaggccctttctcaaattttccctcagctgtttaccttggcgggtaataggaatgccaaagtaagtgaagtgtgggactctagcttgggtcaaggaggttggaatctcagattggctagagatttcaatgattgggagctggaacagataggaaatatgctgaatctgctgaaggatttcaggacttcgactgaggaggatgctgtgggatggaaaagggaaagcaatggtgttttcggggctaagggtgcttacaaaattctggttgggtcctcagcttgtgtcttcccgaacagacgcatttggatggataaggtgccaacaaaagtatctttttttgcttgggaagcttcgtgggggaagatcctcaccttggataagcttcaaagaagggggtggcagctccctaaccggtgttttctgtgtggatgtgaagaggaaagtgcgaatcatattatgttacattgtacagtggttaagactctatgggagatcgttctcgccatttttggagtccaatgggtgttcccagaatcagttatagaagtgttacttagttggaggggatcttttgtggggaaaaaaagaaaagacacctggaattccatttcgttgtgcattttttggacggtttggaaggaaaggaataggttagcgtttaggggggggtctttagatatacaaaaattcaagaatttttttgtatgtaatttgtggagttgggctagggtgtacattggtgaggatacctattctcttttaggctttttggagtggcttgcggccacttgagggtgggtgaggttctcccttttttttgttcagttccccttttggggcatttgtgtataccccctgtatacatgcggctttttagccttttctaatatattctgatcgtttatctatcaaaaaaaaatttaatatcacaacttaaaataaaaaataactttaagtattaagttaaaggaattaacttcttctttttttttaataaaaaaaaagtattaattataaaaaaaaagtacaagaaaaggatgagaagtcattcccacaaaatacataataccgatcaaagtaagtctaaaccctcccctatacaaggagaactatacacaaaagtatatgttgcttaaagatacataatatccttaaaataattaatgtatttttaatcttaaatttcttttaccttacttgtccatgtttagtgagtttgtttatttatttatttatttttatcataaacaagatgtattaattacatataaagagttcatgagagggatgaagaatccttcccacaaaaatacaaacttgatttaaacacaaaacctccactatacaaggagatttgtacaaaaagatatatcacaaaagaccatacaagggaaacctctcctaaaaaaagggctaggcttctctcattggtggcccatccctaatggtgtacatattgaaagccaactaagttggatgatgttcaaaggaatgccttcgaaatcatcaatgcaagaggctcacaaagaagtaaagagacgaaataaatctcataatgtctcacatgtcttccatttatccttaaagatcctaacatttctctctccccacaccatccaaatcaaagtgagacaaataatcctccaaagtgtcttgccttgagtggaattattaaaacccatatgagaaatagtcatcatatcacaaaaactcctaggttgaacccgcatcatccatgcttgtatggaaagtctgtgccacaatcctgaagtgaacagacaatgtagaaatgtcactcatctctccactctccctacatagtatacaccaattcggactcagagctttggaaggtcttattaactgaagcatgtcattttggtatttacctttttgtgtgtcactaaccaagcaaagacattgaccttagatgagacttttgatttccaaataaatttggctggatagaaaggaactgaatttgataatttggacaaagtgaggaagaaagattttattgagaataagcttgaaaaggatagtgcctatgctcatgcatctgggatagatgtggacaagtgtacacgggtaagagaagtcattagttcttcaagatcctgaatctccaaatcaattaggtttctaactatgatgactctataaagtctagaaaattgtgaacacaacgattgacaagtcttcctagaaacggattttggtcccatctcccatcacaaagcgagtatgtatagaaaaaaattgtagtatatgtgcaatagtcttccaaaggtatcgatgtgaccatttaactatagtaatggcatcctacccattaggatgtatccatagatattcaaaataatctaatgccaaggggtgtaactttccttatggaacctcaagatccactttcctaatagagcatgattcctcaaagaaatgagtatatttataataatggctttacattcacatctcatcttttatagtaattttttttttttgtaattatcttatgcatctataatactttatgcttaacaaataaatttattgcttaagattaatgaaagtataagtcttaataaaaattaatgaggttaaatatatcaaatttgatgatttagaataaattttattttaattttaccaaacaaccttaacacttaaagtaaaaattaaataataagttttaagtcaatcacataagaataatttaacttaaagttaatttaagtcattaaataataagtattaagttttactgaacacctttttattctcatactagcttaaatgaggttgatgagtcaaatcattaggatgatctagaaatttttggtccatagagattttatttgcccttgtccttgcaccataatcctttgtactcatttttttcatttttatcctacacatgctcttgaatggaagaacttactctcaaaaggaactgtaagaaggtaagaaaaaattatgattaagcccttgcataatttttgtacaaatgatgccaacatgtagttgacttaccaaattccttgtcattgatttcctgcagttctgttaatgtttgaatgaaaaatgttgttcgatattttgtgctagtaaaaaagggccacatgaatgaaaattttatgggccaagtatataaataaagattagcttagtgccattccataattttactcgtatgcacttggcaaaaagttttcttggcattcatttgtgtattgacattattcatttctataatgccaagaatcagaatagggtcagcttaagataactgaatgattttcttggtaatagtattcagtcatgagcatagaataagttcctaacatgtaatcctgtagggatagcatacttcttattctctgattatgttatttagcaaaaatcataggcaatgagatggatagccaatccagtggtggttttcacgggtatgagactgtaaaaagtattgatttgaagctagatataatttgatcataacctatttcagtatgtgtattgtcatcaaccatctgttctatttagaacaaattataaaatgggatcatttttttcatggctcacgcatttggaatgtccttcaggcataactgacttgt

SEQ ID NO: 11216 - DNA, 14151 bp, Vitis vinifera
  Intron number 14 from transcript GSVIVT01008744001 (locus GSVIVG01008744001) derived from phytozome v7.0 (chr-ID chr 18; pos 1644091 to 1658241 reverse strand)
ggaccctttctcggtttagcaaattcattgttcaggtacaattataaatacattattcttccattttatagttgaagctgtgaacttttccatgtatttcttgttcatgaatccttaacatgttgtgtttgaggcagctacgcctctttgttggaactcaagcaaagaaaatgaaattgcaaatggaagaaggatttggtctttttttttctatcttggaaaagctttgaggttgtttaagtggttttagtgttgttaaatgtggagaaaaattgtatttctcatgcacattttaaaaatatacagccctagagttatatacaacaacagaaaagaaaaaataaggaaagaattggaaactaccctattaaagatccctaccaatcagggattatgtacacaaacatacacatgcaaaatgtattacaactataatatacagctgtggaggatatatagttgtgtatacaattgtaataatcttcaatactccccctcaagttggtgaatagatattatccgatcctaacttgataatgattttttgaaactagacactggttaatcctttaacatcaactaattgaccttcagtagacacatatggtgtgtagattaagccactatccaacttctccttaataaaatgtttgtccacttccacatgcttggttgtgtcatgttgtatcgagttatgtgcaatgttgatggtcaacttattgtcgcaataaagtcttatcggtgtttcccacttcatcttcaagtcctttaagataatcttgagccaaagtaactcacagattccgtggtccattgcacaaaactccgcttctacactagatcttgcaacaacgttttgtttcttactcctccaagttatcaagttccctcaaaggaaaatgcaatcttgtagtagaccttcaatcaacaattgatcctgtgtaatctacatcaatataagcctccaatgatagctcattgcttttcttaaacaaaattcctttctctggagttgttttcaagtagtgtaggattttgtatacagcttggagatgaacttcctttgggttatgcataaattgacttactagattgattgcataggctatgtccggttgtgtacgtgagaggtagatcaacttggtaaccaatctctggtacatacccttgtctataactccatcctcgtttacttctctaagcttgtgattcagatcaataggtgtgtcagctagtttacatcatgtttgtcttgtcttttgtaataagtcaagaagacaaaaattcatttttttgagtgaaccacttcaattcccatggaatactttcgtcttccaagctcctttatttcaaactcttttgctaagcattgcttcaatgcttctctttcttcgagatcatttccaatcgctattatatcatcaatataaaccaataggtcagttacttctcttgaggctgagtgtttaacaaataaagtgtggtcaccatggctttgtttgtagtcaacagttattatgattttggcaaatcttccaaaccaagcccgtggagattgttttagcccattcaaagctttcctcaatttacatacctttttccctttcaagtgcatattaaaactaggtggaagatccatataaatttcttatttaagctttccatgtgagaatgcatttttcacatcaaactattataattcctagttaaattaggcaaccaaagagagtaaaactctcatagtattcatcgtggctactagtgcaaaaatcttttggtaatttactacatatgtttgagtatggcctttggtcgagcttggctttgtatctcttgagagaactattcgtcttgtactttactacgaacacccacttgcaccctgttggactcttctctcttggtagctcaaccacatcctaagttcccttctttttaagtgcttccatttcggcccccatgacttgtttccattccttaccatttagtgcctcgaataaggtcttaggtatggctatggtgtttaagctagtgagaaattttctatgagatgatgacaatctttcgtaggatacaaaatgaaaaaatggatataaaggggtgttgagtacatgttcttgtgcattttttaattgcaataggcagatttaaatcactaatattaacagaattaggagaaatcttaggagaaaatggattatttacctcataggaagtggtttgttttgactcttggacttacacaggttcaatgatggttgttcttttttttttttgagtaaaccaaagttgaccttgtagaactaagaacttgtttccctagaggtggacttctaagtttaggacttgtaggttcaggaatttgtgagtgctcaaacataggctcaaacacaaatgattgtgattatgagggtttagacacagatgaaggtaagtcaagtaagaacaaatttcctatatccgtatcttccatgaatgatgtctttctctgaagataaggatgattgaagtagctttcatgtttaacaaaggatatattagaagagacataaaattgttgagtgggtggatgataacatttgtaaccttttcgagtagatgaataccctacataaatgcacttaattgctcttagatctagtttccctttgttatgaacatggacacgaacaaaagaaacacaaccagaaacctttggaacaagaccgatagacgttgtaaagtttgggaagtgttatgaaaaaaagttctattgaacttttgaaccccaaaactctagatggcaaccaatttataagatgagtagcccgatatgatttaagaacatttttttgaacaaaaaaaaaacttttgtaatagcaagaagatgaccgtgttttctttcaacaatcccattttttttgggagtgctaatgcaaaaaggattcatggataataccttcttttaaaaaataaaaagataagacttgattgaactaatcatttgcaatatcatacctaaactgcttgattcccagtccaaattgagtttttactattttgtgaaaattgggaaatgcaatatttacatttgatttttgtttaagcagaaaaatctaagttactcgagtgcaatcatttataaatgagacaaattatctatagcataaaatataaggaattgtggtaaggccccaaatatcactatgaactaacgcaaaaggaattggcactattttgttacttattggaaaagaaacatgatagtgctctgcaagttcacaaacatcacaatgtaatttttctacatcaattcctttgaatagtaaaggaaacataattttaagaacgttaatcgacagatgtcaaaggcgacgatgatgatgaaaccaaatcttatattttgttgtggatggggcttcagaaaggaatggtaaaagtacttggttctcagtcctattttaaccaaatgacaactgaagatagtaaagtatatcattttccttagcatgtccaatcatctttcctgtatcatgttcctaaaatacacaatgagagggataaaaatcaaacaacaatttagttctttggtaagtcaatgaatggaaacaagattggttgaaaacttaggtacatgtagcatatttttcaaaactatgaatttatttaagcgaactttcccttgaccaatcacggtagctaaagagccatcaacagtgactattttcttattactaggacatggactataaatactaaacttttgtaaggaatgagtcatatgatttgtaagtctcgagttgatgatccaagagcctaggaaccacatatccaagacactaaaagtaagagaaggaaaatacttatctgactgaacgagggagtaagcaccttggagattcttcaatttctcaatattttccttattaagctcaacatgttcattgccaccgaaattcactctctcttgtagagagttttcattgatatgagagttggtgaagtgtgtctgagttttttgttatccacctttgaaaccttgttatccacccttgaaaccccaatttttactcaaagtttgaggctttcaatagagtttccagcattagtcccttgtgtgtcttggcttcttgcggtaggcacaccaaatagtgtccttgttcattgttttgaacagatttgctattaatggaggattcacgttgttgaagttgtcaacaatcttagaccaggtgtgtagaattcgaaaataattttagggaaaaatatagtagagtacttttaaaatggaaatgaaggctgttaaactagggtttgaaaaacaaaggaaaaaatgtactacaactcaataatgaagactaaaaagagaaatctcaaggagcctaattcgactttgatactatgtggagaaaagttgtatttctcattcacattttaaaagtatatagccctagagttatatataataacaaaaaaaaaaaaaaaaggaaataattagaaacttccctattaaagatccctacaattagcgattatatacacaaaaatcatcggttggaaaactagagatcgtggttccagaaataaaagaggtttgtgaaggattttctttgctatgaaaatctagttgttgttctattgcagtgaacaaagagggactcttgtgataagaggtttgtgagtagtgtgtggaaggtaaaaaaaaaaaagggtagttttctcaactagtggggcttcgagaggagtgacaatcttttgggatgctttgaggtttaagtgcttagaggttgtttcagggtctttctcaataatagtcaatttagtgtcagaagatgatgggtttttttggttaacttcgatctatggtcctagttcgtcacactttagaaatgatttttgaatggagcttcaagatctttcaagcttaacttttctaaaatggtgtgttgttagggattttaatgtaataagaaaaatttcaaaaagttaagaggctcctggttaagcccaagtatgagggattttgatgatttataagagaatgtgagttatttgatcctccttttaggaatgtgtccttcacatggtcaaatttgcaagaaaaccctatttgtaaaaggtttgatagattcttattttctagtgagtaggagtaaggtttccctcaaagtatcaaagaagcactccccagattgacttcagatcattgtccaattgttgttaaacaccaattcttttagttggacgctgataccaccttttagatttgaaaacatgtggttgattcatttcgattccaaggataatttaggttgttggtggattgagtgtcagtttgaaggatacaaaggtcacaaattcatgaagttacagtttgtcaagtcaaaattgaaagagtggaataaagtgtcttttgtgttggccaataggctgaagaaggtcttaggtaaggtggtctttgtggatcaaaatgcttttgtgaggggcagatagattttggatgcctcgctcatagctaatgaggtgattgatttttggcataaacgtaaagagaaatggttgatttgcaaactggatattgaaaaaacctatgatagcattaattggaatttcctcatgaaggtcttgcacaagatgggctttggatctcgatggatggagtggatttggtggtgcatttcaactgcaaaattttctgttatggtcaacggggtgctaacaagctttttttccaattcaaggggctgcgtcaaggagatcccctttctccttacctttttgtcttgggtatggaagtgctaagtgcacttataagaaaggctgttgacgggggattcatttcaggttgcataatttaaggaagagggggaatggagatgaatgtgtcccatttgctctttgttgatgacacaatcattttttgcgaagcaaggaaagagcatctaacctctctaagttggattttggcttggtttgaagcggcttctggtataagaataaatctagctaaaagcaaattaattaaagttggagaggttgaagatattgaagaaatgacagtgaagttagggtgtagagtggggtctcttcctactgtctatctggggctgccccttagagcccaccacaaggccttgcctatgtgggatggggtggaagaaagaatgaggagaagattagccctttggaaaagacaatatatgtctaagggtgggagaattaccctcgttaaaagtacactggccagcataactatctgccaattgtccctctttcgaatgcccaagttagtagcaaaaaggcttgaaaaattacaaagagactttctttggggaggaggaagcttggaaaggaaaatccacttaatcaattgggatgtggtgtgcactcaaaagaagaaagggtgtctaggcattcggaaaattgatctcctgaacaaggccttgttgggtaaatggatttggagatttgcctttgaaaatgaaatcctttggaagaaggtgatcggggtgaagtatgaccaagagggatttggatggcggactaatgaagctcgcggaacgtttggagtaggggtttggaaggagattctgaaggaggcaaattggtgttgggataacatagggttcaaggtgggtgaagggactaaggtcaagttctggactgatcattggtgtggcaatgcggcgttgtcccaaaattttccccaattatttgccttggcggtctataggaacacaacggtcaatgaagtgtgggactcaagccttggtcaaggaggttggaatcttagatttttcagagattctaatgactgggaactagatttgataggagagttgtttcatatgctgagggacttcaggatttcttcaaaagaggactcagtgttatggaaatgagggggtcatggtacttttcagattagggatgcttataatttgctggctgctcctagtgccatcgccttctcgaaaaagagctgttaaaagagataaaaaggagaaaaatcttaattctcattcatatgttttttacttacaattgagagatatatatatacaaggctaggagtcctaactaccatacatgtgacctatattaacaaggaaagataatatactataaatacattatattcaacactccccctcaagctggagcatatatgtcatatgcaccaagcttgttacaaatatatttaatcctaggacctctgagagatttagtgaagatgtctactagttgatcatttgaattaacaaaacttgtagcaacacatcctgatgcgatcttctctctaatgaaatgacagtcaacttcaatatgcttggtcctttcatgaaagactggattggatgcaatatgtaatgcagcctggttatcacagatgagtttcatctgttcatcctttccaaatctcaactcctgaagaaaatgtctcaaccatatgagttcacatgttgccaaagccatagctcgatactcggcttcagcgctagatctggccactacatcttgtttcttactcttccaagatattagattacctccaataaaaacacagtaccctgaagtggaacgtctatctgtgggtgagctatcccaatctgcatctgtgtaaccaacaacttgagtatgacctctgttctcgtacaatacaccttggcctggtgtacttttgatatatcgaagaatgcggattacgacatcccaatggctatcacatggtgactgtaggaattgactaacaacactcacagggaaagaaatgtctggacgagtaatggtgagatagttcaatttacctacgagctgtcgatatctcccggggtctcctaaaggctccccctgtcctggtacaagtttgacattcggatccataggtgtgtctaccggtttacagtctaacataccggtttcttccaggatgtctaaagcatacttcctttgggaaatgaccacaccagaactggattgagctatctcaattcccaagaaatacttgagtttccccaagtctttgatctgaaagtgggtaaaaagatgttgctttagtttctgaataccatcctgatcactgcttgtaatgacgatgtcgtcagaacggcgtaacctgcacactaaaccagactccccctgagcaacaaaaccaggaggttgctctatataaacttcctcggcaagatcaccatgaaggaagacatttttaatatccaactgataaagaggccaagaacacatagcagccatggagagaagcaagcggacagaagcaatcttggcaacaggggagaatatgtcaccataatcagaaccataaacttgagtatagcctttagcaactaagcgggccttaaggcgatcaacctgaccatcaggaccaaccttaacgacatagacccaacgacaaccaactgtagatttaccagagggtaaaacaacaagatcccaagtgccattagagtgcagagcagccatttcatccaccattgcctgtcgccagcctggatgggaaagagcttcatgggtgctctttggaagagaaacagaggatatagcagaaacaaaagcacaatagggtgaagataagcgatgataactcaaaaaattgtaaataggatgaggattacgagtagagcgagtacttttccgaacagcaatgggtaagtcattaggagaaggcagagccggggcaggtgaagccgaagggataggaagtgagtcagcaggtgcctcaggaaaagggagaggagcaacgacacgagggcgacgatgataaacctgaagtggtcgagggggcatagcatcaggtggggagacaatgggaatgggcaaaacttcagaaacaggaagagactcagaagtggtggaaaagaatggtgagtcctcaaagaaggtgacatcagcggagataaagtatctatgagtctcaagggaataacaacgataacccttctgaagtctggaatatcccaagaagaggcacttcatggctttggcggaaagcttgtcctgtccaggagtgagaatatgaacgaagcaagtacaaccaaagacacgaggaggaaggaaataaagtggttggtcagggaagagaagggagtgaggaatctgatcgtgtaagacagaggagggcatacgattaatcaaataacaagcggtaagaacagcgtccccccaaaaacgaaaaggaacgtgactatggaggaggagagtacgagttgtctcaacaagatgtcgattcttgcgttcagctaccccattttgttgaggagtatgagcacaagaagactgatgaagaattccatgatgagacataaacgaagtaaattgggttgaaaaatattccctggcattgttactgcgtaacatacgaatagaaatattgaactgggtttggatttcagtataaaatttctggaaaatagagaataactcagctcgatttttcattaaaaataaccaagtacatcgaaaatagtcatcaatgaaagtgacaaaatactgaaatcctaaagtagacgcagtccgacaaggaccccaaacatcagtgtggacaagctcaaaaggagactttgcccgattattcaaacgctttgggaacgagacacgagtatgtttcccaagctgacatgactcactcggaagcgacgacaaagtggaaaaacgaggaaccatcttctggaacttggagagactagggtggcccagatgattgtgaatgaggagaggagcattagtggaaatgcaaactgcaggagatgaatttgaggtgaggtgatagaggccttgagactcacgtcctatgccaatcgtcttccccgtactccggtcctgcaaggtcacaaatttatcagaaaaggtaatagagcaattaagattacgagtgattttgctgatggaaataagattaaaaggacattcaggagtataaaggacacaagtgagaggtagagaaggcaaaggaagggccaaaccaatacctttagccacagtttgagaaccattagctaaggtaacagtaggtaaatcagaggtagtagtaatagaggagaaaagatccttattaccagataggtgatcagatgctccagaatctagaatccagggttcaagagaagatgtgtgggtaagacaggcagaggcattaccaggctgggcaacagaggcaatagaagcctgagatgtctgagatgcggaggagctcggaggctgaggcagcggagaatcagaggactgggccatatgggcagtgcgaggaggtcttccatgtaactgatagcaacgatcgcgagtgtggccaagtttattgcaataggtgcaatgaggacgttggcctctatctcgggtaccactgcgtcctcctcgagaggtagtttgagaaactaacacagaagaatctgaagcgctatcagatggcaaagtctgagtggacgagatacggaggaggcgagcaaacacatcatccaaggacggaactgatgaacttccaagaatctgattacgaatagactcaagatccggacggaggccaataagagtaaggaccatgaagaacttgtcaagctgtatttgttgagccccaacatcaggagtaagaggcatcacagtcaagaactcctccttaagagaggcaatctgaccaatataagtagatagatccaagtcctgttggctgagatggacaatagcagaagccaccttataaagacgctggatatcattcgtgtataatcctttggcctgagtccaaaatttaaaacaagttttataggcctgaagatgaagaagaatcctgggatcaaccgattgccataatacactacataactgtgcatctatcttcctccactgtacgcggtcaacctcagggatatctgcctcctaggtaaccaagtgatcctcatatccttgacccataaaccaaagttcaacagaggcagaccaagagcgataattctcactaccaaccaatttctctgaggtaatcataggagatccagagataacagaggtaaagatctgatttttggtggtcatattcacgtatttggatcgaagagagccctaatacggctgcagattgcggcgtggcaccaccgaaaaagggagacggcctcaaatcacgacgtggtaccaccagaagggtagaagaacacttcccaaggcacgtgcagggattggggtggagaaaaagtagccggaacttcgccggaaaggctgtttggaaggctgacggagacaaaaatccccaaaagaggtacgtgcagggctcggatgggagaaccaggtaggtagggatgctggtcggcgtcaggcgaggctggaaaaggaggcgcgtcgccggaaaatgtctcacgcgccctcacgcgccggcgtgtgagattcagtcgctgcccggagaagtgcgcgtggagggttttctggctctgatgcttttgaagaagttggagatctcctccaggcactcctcttggtgtggtcggtgtcggaaaaagacgtcgccggaaagttcgccggaaaaggttgccggcgtggtggagatccgacggcgatgaggttgtccggagtggttcgggaagaaaatgaggggaccggagtgaaacacggtcactggacggttcgccggaattgattacacggctaaaccgaaaaaaaaaaattaggttttctcctttggctctaataccatgttaaaagagagaaaaatgagaaaaatcttaattctcattcatatgttttttacttacaattgagagatatatatatacaaggctagaagtcctaactaccatacatgtgacctatattaacaaggaaagataatatactataaatacattatattcaacaagagcatttgggtggataaggttccaactaaagttgctttttttgcttgggaggccacgtgggagaagatcctcactttggataggctccaaaaacgggggtggcacctccctgatcgttgcttttgtgtggctgtgaagaggaaaatccttgccttgtttggggctcagtgggtgttcccagagacagtcaaagaagtgttatttagttggaggggcccttttgtgggaaaaaagaggaaaaagatttggaactccatcccgttgtgtattttttggatggtatggaaggaaagaaatagattagctttttagggggggctctttagctagacaaaaactcaaaaattcttttgtacgtaatttgtggagttgggctagggtgtatatgggagatgagtcatcttcgcttttaggctttttggagtggctagcggctccttaagggctggtgaggttgattgttcatgtgttttttgtttttaggttgctatgtatactacctgtatgctatgtggcttttcgccctttaatatattttgtgctcatttatcaaaaaaaaaaaaaaaaaaagtgtcttttggagacttaaaagaaaaatatttgtttgggcattgtgggtttggatgagaaggaacaaaaaaggatttttactcttgaactagcagcaaggaagactttaaggaagggagaattggaagaggcgttgctaaaggaagaggtgttttagaggtaaaaaaactagggtcaaatggataagagaagaggattgtaattctaaattttttcataaggtggccaatagtaggtggaataggaagttcattaagtctttggtgtctaaagatggggtagtcttagataacattgaaagcattttaaaggagattaagcattattttgggaagttattctccaagccttcaggtggttcttggaggattgaagatttggattggtctcctatttcagcagatagtgtcgagtggttggatcattttttttcggaagaagagattcacaatgctatgttgcatttaaacaaggaaaagacccttgggctaaatggtttcaccattggattttatcaagagtgttgggagacgattaaagctgatcttttaagagtgttctttgagtttcacaataatgggattattaagcaaagcatgaatgctaccttcattgctctagtgctaaaaaagagtcaaacaagcaggatctcagatccacaactttgttgtagattgtgtggagagagaggaatgctaggattttcaaggacacttggaagacaccaaagatgatgtgggatttgcttcatttctatgtttctttttgggcttaccgtacaaacatttttaatctttatctgttaaatgtaattcaacttagttgacttttaatatgtacacactagggttgggtctatagggtgaggagttgttatacctgtgtaggctttttgtacctttatatagccctccttgtatagtggaggtttacttagatctttttgatgaggtttgtaaatcataggaaggatttctcatccttctcatgttttgtttattctcaattaatacatacatttgtttttgataatatatatatacatacactattatacacacaaaattatgtattacagatgtaatatacagccgtggaggatatacagctgtaatagtcttcaacattaaaacctttcctgaacaagttgttctattttatattgttgttttagggttggtacttttgatcttgaggtagaattcacgcgtttatgaatacatctatagaagaacatggatttacttaagtaggaattaacattggtacatggttctaaggagttataacttctatatcttagaaagaattccatttgttcctaattgatctcaaacatgggtggttttctgttgtcttctccctctgcttcttttcttttcacttttttttttctaaaatatcctctctgtgttattagctattttcaagttaaagacatgaactggatgaagtgagatacatccagtgagatatattattatctggagcctgaactagcactcaactactttcgtctacatcttgcttccagtatatgctatttcaatttgtatcttggcctttctcacataaaagaaaaagagaagctgtagttgaagtttaatcatatattgcagttcatttcttttcatggagttgtttagaactcattttcccatctaaccactgttccataaattgttcatcaaagatcttggaatttgtttcatgccttttcagggtgttggtcatcaaaaaggct

SEQ ID NO: 11217 - DNA, 1702 bp, Vitis vinifera
  Intron number 1 from transcript GSVIVT01031382001 (locus G SVIVG01031382001) derived from phytozome v7.0 (chr-ID chr6 ; pos 19326065 to 19327766)
tggcaggtctgtcttctacaccatgatgtgtgtttaaaagtggaacaatttttgccccattttaatttaaactattcatactctttctgctgtgaccaaatgagcactctctaacttgattaagaatacatttagtcttgttagaatttatttgacaagtgttttcatcaatgcttacggttacatgaatatcttaaaaatgggaaggcgactgaaaaattaaggggtaaatctactgccataactctctcttctggtgtaatgtaacttcactataacatatagaagcttagtggatgtgagaacagaccagattcattgttcctgccattcttcagtcattccatgatcctggatgctaactattaatcaaagggtaggccagtgatgactgtgatggtttggatttcttgttgaatttacagttttcatgtgcttattcatgattgatttccattggactgctgggaaagtgggagaaagaagtggtacagaaaaaggaaaggaagggaagaacaagaatgcagagaagtatatagagagatccatccatcagaagaagaaaaagagaaggaagacaggtggcagaagaagtggcaagatggtgatggtgttgtggcaggtgacaatagtggggtggtagtgtgtggcagtgttgaggacaattgagaagaaaagaacgactctctgtaccattctaaggataactaagaattttgttttctgattttttttctttttaccagtgataatcttgcccagcaccagataaaggaaaatgttttcatcagctgttttggtccttagctatttcaaagggttaaatatcacatggatagactgaggtaggttgattgaaatgtaacgacagtattaccccttaagcaatagaattgcaagagaaatatacttttaagtctggacatgtaaaattgatcatgcccttgaagtgtttctccttaattttgatcagaaggtgagaatatcttttggagcatttggattggaaattaggaccttctagagagatcattttcattactaagatgctatgttgaacttgacgatgagttaatagaagtatttaagtacttctctttggtagaagtatttaagtagttcctggagacacattgtatcagtgattgccaattcccgccctctactgggacctttctttttggttgacagatgcttccaatttttcaagctaggttgtttcaataaatcagaatcattattatttatcaaaaaaaaataaaataaataaataaataaataaataaataaataaatcagaatcattattgcctaccaaaaaaaaatccagaaccattattctttcagcttttaacttaattgtgcttcaacaattttttaacagtttcttcagtttttgtgcaggattagatagatattttttttgataggcaggatgggatagatttatattcctaggagagtgttactgccttgtgaaatgaagcttcatacatgaagtactacacaaatgattatctagagatatgttctaactaattattgacttctgatattttgaagatcctcattcttgcttcccttacttatttaagatgaagtcactccttcatttgtctaccatgctattgattttggttttcatatattcttttaattgcttactttatctgcatgttgtttcagcaactccaaagagttc

SEQ ID NO: 11218 - DNA, 3359 bp, Vitis vinifera
  Intron number 9 from transcript GSVIVT01007755001 (locus G SVIVG01007755001) derived from phytozome v7.0 (chr-ID chr1 7; pos 9409163 to 9412521)
gttgtgggtggtaatacgaaaagttgggtcatatttaatgttgttgcgagttatgtttttttcaagagtttccatattaatattaatattattattacttattagaaaaatacaaaacattttaattaattaaaaaatatcaagaaggatgagataatattaatattattatcatttattagaaaaatatcaaatcatttttattaattaagaaatatcaagaaggatgagacatattgtcttgctgaagcagaaacggtggatcatcttttactccattgtgttatgacgaggacattgtggaatcttcttttttctctctttggtgtggagtgggttctctctggtacagttaaggaaactctcctggggtggcatggagcgtttgtggggaaaatccgtaaaaaggcgtggcaaatggcccccttatgtatattttggtcagtttggaaggaaagaaattcgttggcttttgggaatgaggtgttgtcaatctaaaggttgaaacattcttttgtatgtaatctgtggtcatgggcgaggatgtttatagttttgagcccgcggtctctggttagctttattgagtggctaggcttttgttataggtaggggttttggctcgcttccttggtttagagttgaggggctgcttttgtatactctttgtatacctagaggacactagtttggtgtttcctctttcattttaatatacttctctttacttatcaaaaaaaaaaaatatttgataatatacaagtttaatcaaaacaagagaaaaaaatcctaaaagagaaacaacataagctgcacaactaaggaagattacaaaattctagaagtgaaccaagacaagcactaattacaattcaaggttagtttgatatgatagttaagaggtggtgaaatatgaatgaaaggttttcttagctaatcttttgacttgcatataagtttccaatttaataatataagatttaagggggtgtttgtgagggtttcactagtagaggcccacaaggaggaaattgtatctatgatcctccaaacatcaaactgaggctagtaatactccgtagattctatctcttggatgactctcaaagcctctaaaagaaatggtcaacatctttgctaccttatagggtggggcctagtcaatccttccaaggatgaacgatctatttcatggtctcaaagcaacttagtaatgaaggaaaaaatgatcagttgatttttcactctccttgcacatgatacatgactttagattgagactttggaagacctcctttactttaggaggggctttagatttccaaataaaattcactagatcaaaatagatacaagtgttagaatgagaaagagcttgaaaaatgaattaattctaagactaatgctttacattaggataggaaggcaatatatacacttggaccatggaagacataggaagaactaattcatcaatctcatgatccaaaaggtttccacaagaattaaaattttacaacaaggaaatggaagaggtgacaaaaataatatagataagggaacctcttgttctcttcaacttaaagaggtttaggtatttaagacaaaaaggaaaattattagatcaagtgtcatcttaaagatggatctttataccatcactcatagaaaagtgagtgaaaaaaaagaaaaattaaagaatatttgagcaatagctctctagggatgataatatgatcatttgacaacgatatcgaccttccatccattggaatataacccatgggtacttagaatggccttgtgccaaggtgcattgttttacctagggagcctctgctatcacttccctaagagggctctattcctctgagatatcattcttacacccatgtccttttccctcttaggctttatacaccaagtgccaaccaacaaggtgatatctctttactcttttaactcttgatcaaagaaaatctccttgcaaatactcaatcttagaagccactttgattggaattttgaaaattgaaaattgtcatcttggaattgtaaataagttcacctatgtcatctatgaattgtaaataagttaaccttgttctagatctacccacaaggaagtcctcttggatgccacactcctttgctctcgatatctatgtactcaaaacattatctactatggtgaaaatgaagggagagtgaaatgccttgttctaaaatatgagatttcttaacccatcttttagcacatccatttgttaactttgaaaaattagttgtcgataagctccaatgaatccatgttctccatctctccctaaaaccttttcttaagcatgatttacgaaaccccacttcatgtggtctcacgctttttcaaaatcaattttagggatttttctcttgagcatcttttctcatccaccactttgttggctattaaaactgtatccagaatttgtttgaccttaacaattctccttgggaaagatgaatggtctcatataaacactctttctaatgttgagccagcacttctactatgaccttggaaaggttagtccccaaattgtggtttgaagttagaaattctagtggtttgacacttaggtggtgtttgtctttttggctttttgctaaaaacaatttgtttttagaatttaggttgtttgttttactactttttcatgacttattataaactttttactaaatagaaaaagccaaaatatgtaactttttctaaatagaaaaaataacatattggtttttctttactttttaatacttaatagaaataaaatactgcaaaaacaaacaacctaatatttaacactattaagcattaaggttctatttaaaattaagtaaaaaaacaaacaccaccttaggctctggagcaatggaagtggcattagtgctcttgttaattatcctattgttaaagaatttataaaaactatcaacaattcctccttaatagtgtctcaacagtcctaatatagtgctatagtaaaaccatctaagctaggtgccttctccatgtccatttgaaagattgcttctcaatattccaattttgtaaaggttgctacaaactactagagctatcctcagagataagggcccattctgaaccttcaaaccttcgtgcatcttcatctaatctgctgtaaagtttgctatagaaatcttaaatcttctttgggatgttatcttggttattgagcaatacactattctcgtttatcttggttatgcacaatgtttattttcctttcaatgttatagcatcattttgtcaggataaatattacattgaattaataagagggagttgtgctacagga

SEQ ID NO: 11219 - DNA, 1719 bp, Vitis vinifera
  Intron number 1 from transcript GSVIVT01006613001 (locus G SVIVG01006613001) derived from phytozome v7.0 (chr-ID chrU n; pos 27042563 to 27044281)
atttacttgtgctttagattttttacttaagatgatgttagagacatttttctttcttttttgctaacaatttctttgtaatgtctttttttttttttttttcaatgttgttaagcttatggatatattttaattttggttattatattttggcatgtcttctatgatgttaattaccatggttgtaactaagaaccacattctttacaatcaagttcaagacttgcaaggtagagtccttgtaaggaaatgtgggtgtaggaacatatgctaattgaagccaacaatgcgttgaaaaggaaggtacaaattctcaaatgaacctggtcttttcttttagattgacatcctgtgttataggaagtgggtctggtcagcctagtccaaaggccattaacaggccttctaagtccagcttggttaaaggggatttaggaatttgagttgtattagtagtaacatcgatgaagaaaaacttcatgctagatttctattgcatactaactgtcaaaattgaagaaaattttggcttagttgatcagaatatggatcccagttgcagtagttttcaataagttttccccttgtcagcagcagaaaaactgggatcaaaatccaaaacccaccatatggtggatacaaattggtataacaagtcttactaaatcttgaggaaagttctttagatggtggatttgttactaaatggaacccatttgatgggtcttgacatggtttcttggtggtcattgcaagtcattctttagaattgcattcaaattttacaggtttgagcttctactctctcataatatacctcttgtttttggttttttattgtgacaacaaatttccaagtacattgatgagaactataaaaatttccagaattttctcaacttccatctgataatgtgccggtcggtttcagttgtggttatggttgggcaggtaatcctctctgttttcagaataaggctatttttttttacatctatacttatgcagccatcatacctcttcaaattatgaacttgttgtgttggaaaaatcaacatttgtatactcttgtttcaattccaattcaatcaaaaaacagttccattagaaggtcaagatttggtgtatgcagaattgttatagatgagacgctaggttgcagccagtcggttcctttggatgattgcagctcaaacctgataatcacccatcttggttgggggtgcagctgagctatggttgatcttttggggcattggggtagagatctctctctttgtggatggatatatagtaggatagtctcctacttcatgctaagtaagcaccctctccctctcacaaagatatatagtaggttgtcaaactgcccaaggtaagcctattttctttctttctccttttattatggtgaaattccttcatattcagcatgctagaaaaagttacaaatcttctgtttgttaaatagagaaacaattcttctttccttataaaggcctgcaatatttggaatggttgtggtgtgtatacaggggcttgacacaatggtgggtgaacatggaactcagctatctgggggacagaagcaaagaattgcaattgcaagagccattttgaagaacccacgaatccttcttcttgatgaagcaacaagtgcactggatgctgagtctgaacgcatcgtccaagatgctgagtctgaacgcatcgtccaag

SEQ ID NO: 11220 - DNA, 8026 bp, Vitis vinifera
  Intron number 5 from transcript GSVIVT01027934001 (locus G SVIVG01027934001) derived from phytozome v7.0 (chr-ID chr5 ; pos 9750071 to 9758096)
ctcttgactagtgggttctttctatccataagatgcttagatttattgtggtaattttatagactttgtgatgttatattttgtgcatcttattcttcatcattttgtttgcttaatatgatttgcattcacaagtgtgttaaagttctctgttaggtcctaactattattaacaggatgagttagcaaggtatcaatttatcaggagaggctataaactaatcagtctctttcaataatgcaaaaattaagaaaaaaaaagaaagtagatgaaatgaaagtagggtaattaacaaattgtatatttggtatgatatgtttgggggggcagcacctaggttattttttacctcaaatgttgttaaacgtttgtggaatttatgatttgaagggattgtgggatcctctctgtttgtaaatgaaacactgagtttaactgaggatatgggtgtgcagctgttgggatcctctatggttggtcctattttgtgtgggacctggattatgtgggtcatggtgtggatcactttggtctacagttgaatctaataatggaggtttaacttagataacaatgttttttttttctttctaccttagaatgtagaataaatattattactttctagatggaaaattatgtctaactgttggcaagagcatttatatcaactgctcacaaaacttcacagccttagaattttttcctaataaaattgaagcttatttggtcattagcatttccttgtttgcactaaaacgttttttttccttgttacttgttatagttacaaaaaaattgtatataagttattgtataccttattttgcctcctttccagacacctaaagtgtctaaaataataaggattgctctgcttcgtgatactttaagatatccctgacaccacatctactatggttttgtaagagtctcttttgaggataaatttgattgctctgttcctttgaggaggcaattcaggatgatttgctatcagatgcatctgttgttctggtatgcatcctcctaactcttctccacgtcttaggaaaaaaactaatcatttgtcttgctatctgtttccgataataaggaaaagaaaagaagaaaattatagttctgtgtgttcaacttacaaccccttcaaccttgtaaggccataccttcaaattgaccctctgaaatgatttgctgagtgttcaaacaatttctcaataagcctctctctttgataccatctttgtgcatgtatctccaccatatattcttcacatagattccacttgatgtgtagtgtattctggttgacagattaacattaccagtccctgtgcacatgggttggacccccttttgtttggtgtttttaatagacttttcttgttgcctataaaataactaaataaagaaataagaagaagaagaaaaaaagaaacagaaaatcgttttttcatgtaaacactacattttattgtaagatatatttatgggtaaatttcaaaaatcacccttgtacttcgaatctcaacttagttgatgtttgtttttttaactttttgctaaaagcaatttgctttcagatttcagacgatttgttttttaattttttgttgacttattacttatttcttaaattttttgattgaatataaaaaattaaaatattagactttttcttaatattaaaagtaaatcaccataactaaagtgaaccaatttggtttttcttttacttcttaatacttaatagaaataaaatattacaaaacagataacttaatacttaacactattaagcattatttaattttaaattatatttagaattaagtcaaaaaaacaaacactaccttagttcccaattttatttttttttttgtttttttttttttttttttgaagcaatgtcagccttacattgtgcccaaatgtcaaataggtcattttgttaagattttccataaaaatttgatgaagaaacttatgtaacaagcatatagaaaaactgcacccccaaatatatcagattaaattttatgcaaatgtatatgtaattatcatatgagtttttccatcaaattctaacaaaaaatcttaatacaaggaggcctatataatatttgggcatagtattgcttcaagaaaaagtttgggggccaaaacaaaggtgatttttataatttattctatatttatttatcttattatcataaaacttttaagttcaatgttttttagaaagaaaaagggtaatgtaaaatgatagtacttatggctttgtgaattgtgaatatggtggatacttctcttgcacaatgaatttcttacaaataggacaaaaggtaagtgatctgcaatttttgtttttttgttttggttttttttttttattattattattattattatcaaaaacaaaatatatattgataatagtaaagttcaagggaaggatgagaggtccttcccacaaaatacaaaacctaatcaaattaagactagattcctccactatacaaggaaaactacaaataaaggcatgaacaaaatatcccaggaaccaaaatcaaaatgtctcaacgatattcaccctttttaaattacaaaccaaaatccaactaagttaaataacattaagtggcagtacaagaggcctaaaaggaggagtagaagtgaagaagatcccatagcattcgttttgttttgtatttttcctcaaaaatcctaacatttctctcttgcaacacaatccatggtatagtgaggcaagcgatttgccaaagagtcttgcctctgattgaattccgtaatcctctaaatgagataatcatcatatcaccaatactcttaggaggaacccaatccaaattagctacactgaagagcttatgccaatctcccaatgttattaggcaatgtagaaaaagatggtcaattgattttctactttgcataaaatggccactgaggagtgaggattaagagatttgtaggttcttctcatctgtagcatgtaatgggtatttaccttcttgtgtaccactaaacaagcaaaggtcttgacctttgaaggggcttttgattttcaaacaaaattagctagaaggaacgagattagatttgaggaattggacaagatcatgaaaaaaaaaattattgagaataaaccaaaggaagataaagactaagctcttgaatctgcggtagaaagagacaagtgattgtagtaagtgaagatatgaatcttttaggaagtttaatttatgaattaatgagattgagttggaagttgaaattccaagaagataggtaggaattaccaaggacgaccaagaagaagagatttctcactaaaacaactctatacagtctagaaaattatgaacataaaggttgacctccccaccataaatcttcctagaatcggattctctccccatttcccaccacaatgtagttgtatggggaaaattcttgaaagacttgtgcgataaccttccaaggacatctgtataaccatctagccataatgttggcatctcatccattagaatgggtcccttaaatgctcaaaattacctgatgctaaagaccacaactttccctaggggatctccaaagccacttacctaagagagcacaatttctcagggaaatcttcctaatcccctgacctccaaactcctttggcctacataccatgtcccaattaataagatggtctttcttcccctcctcagtccctaaccaaaggaaatctctttgcaatttctcaatctttaggctactgatggtgggatcttgaaaagagagaggaaatagctaaggaagtgagacaaacatgactaaattaaggttatcttcccccatcccaaaagacaaaaaaacctttttccacctgtccaacctcctcgaaatcctatcaatcattgggtctcaaaatcctattgtctttggattccctcctaaaggatcctaagggaggacccaaataagacagtggtcactttaaaactctacaatcaagtgtcgaggttaacctagataacaacttttggctttacattaatataaaaaaaagtgctcttctctagattgattttcaaccctgataattgcccaaaaatcaaaaggatcagcttaaggttttgtagaattttggagaggctttagagaagaaaatggtgtcatctgcaaattgtaaaagagacactctagtcctatctctaccaactatgaacccctcaaataagccactttcctccgttctagtcatcatcttactgaggacatccatagcaatggtaaaaagaaaaggagaaagaaggtctcattggcttaaacctttagtagccttaacccaacctttagcatttttgtttaactaggacttcaaaacttgttgaagactagcatccccttaactaagatatccattttgtgctaaaacctttcctttcaagcacgtgatccaaaaaaccccgatccacatggtcgtagaccttttcaaaatcaattttgaagaccaccccttcctaactcgacctccttttctcatccaccacttcatacgttgtcaaaactgcatccagaatttgtctcccctcaatgaaggctccttgagataaataaattatttcattgagcactcttcataagcgccctgataaaaccttagctataatcttatataaacctataatcaagctaataggtttgaaatttgaaattttggttgtctaactttttttttggcacaagggcaatgaaagtggcattaatgctttgatttattatcccatcactatggaactctaaaagcacccttaaaaggtcatcttttatcatatcctaacactcttgattcatcgtaatagtaaaaccatcaaggccaagggccttcttcttgtttagttggaaaacaacaaggtgcacctcctctttagaaaatggacgatctagccaagcaacactctctctggatatgggagaccactctaaaccttccatcttccaagaaacacctgagggtttggagtagagctttccaaaacaattcagtatctcctctgaaatattgtcaaagttgtttagaattacctcctcttacaaagtctgggtttacagagttgaaaaaccttttactatccttttgttcttcttggagcctaaccctctaatattccaacttatcatctttatgtaaaccaatgagagccctcctaattattgaatctaatctaataatgggctccagaaaaaggcttattcttccttctaaaataaaccttaactgaaggatgattgtccaatgagaaccccttctcactgcctttgataagtttgattttcatagactccaatactgaatataacattgaccattttactgggtgagggaccctctacatggaaaccttccattgaggaagattctagatctagggaaaaccactaagtaagaaaaaaatgctcacaagggctgcagagtgatgtcccaaaaaaagaacaatcttttagctcttggttattgaccacttcagggaactccacaccatcaacaatggaacaccaacattagggagagatgctaactaggttcattcttttggtttacggcttgaatgactaggcttgactctaaaggattcaacaacaaaggttgacaccgaacagagtgagtagtcaaagcaaaagagaggggaataagatttgaataaaaagccccaactaaggattagccctcgatgaaggttctagagttagaaggatatagctaacttggcaaacaatggtgcaggagcccctcgcctcccatagtctattcggatgctgagaagggaatatgtacaccctagttgaagaccaagagtcttcatccatttattggaattgtttaatatgaaataaccatactagtactactcttcggttcagtgcacttcctcgaatccaaccctcctccacccactaaggtctcctccttaattgaagacttttggatgtttggattgctttttcttgccagcgatgaaactttgaaacacagaggtcaactcctcgcttaaatccttgcattgcttagagttgcccttttgagtaggcaactcttgtgcaccagcaacaagtagaacctccacagagcaaaactttgtgccctagaattttggggacgaaggcttaaaaagggcctccctttaaaaactcacaatagccaattactattgagtcggctttgctaacttatcttgaagaagaaggcccaaagccacaatctctatctaggcttcctccacgtcaggccttaacagaagaaagggctcttagactgtttgctgaggtattagtgggccttgagcttcctccacaacttgggcttctttcacgcaattgggctggcttaccacgtaatataacttacttactagagcagcccaattaatttaaaggcccattaagttgcatccgaaagtcctgatcctttttaccattgttaccagatttgaaatttgaaaactatctggcatggaaaggttggagttggagttggagatgtctaccatcttttcccaacgacccccacgtggcctgaaacgtggcaacatgttagccctatgatcttcctcaagcctcacttggctaacacatccaccaaagactgaaaactcactcttcttcatctccttgctacctgcttgagtgtcggtgacttctctgatgaccattatcgatgctgaaaaggtctattctccatttgatactctcacattcgcagggatccctactctttcctccacctcaaccttaatccaaatcttcatcaaatctactagctttgcagttcgcctgtcgatttcaagaatcttgccccaaccttttgccaagtgaaacaagtgcttctttgaccacaaatgaaagggcaaccccttcatctcaatccaccccttttgaaacatccccgaaatagtagtatctacattcaaggctccatctgtataccttaatttctatttttttctctcaccagaataagcttcttctcacgtaaataatttgctatatcactagactccacaaagaagatcccttggttcttagagaaaggcgtgatggtaatcaccccttcaattcccacaactttagctaacactctgtatattgcaattctgctcacacctgccaccgaggattcacaaaccattgccccagcccaccttctcatagattcaataccttgttttcttgacccttccccaaccaccacactagcgaaactgcattttggagggttcaaaactggcttagccttctcaaattatgctctcttaaaactcctgttccccacaatttgggaaggaaataacatcacaactgctattgcttctcccactgccatccaatccctgctcttctgtccttatggaatgaccacaaatgttgttttccagcctgtcatgaagagattcgaaaacatcttctgctaggatttactaacacctccaacaaatgagctctggtttgtcctctgtattttcggttaaaacccagtgacctttccaagtttgaagccttccgtaaatgatccagcaaccattcaatctcttctttctcaaaacccaccgaaaatgaagctcctcgacttcattcagacaaaaccaaccataatcctccattctccccaatgaaatgcagctgaaaggatttcatttccactaaacaagtcctgatactcatgttcagactgtttagcataaattaattagggtaaatgcactcaaattgtgtacatcttcctaagacaagtttggatggagaggaaaacagattcttcaaaattgttgagtaatcaatcttgatggtgaaaaatcagtttatgaaaagtcttttcttgtgatcaaaacctgtattgttgtatgtgatctggaattgcttagctaatatgaactataggagcctcgactaatgctatatttgttcgattatacagaggagtcaacaggagtattaaaaaaggctgaaagt

SEQ ID NO: 11221 - DNA, 8305 bp, Vitis vinifera
  Intron number 7 from transcript GSVIVT01012228001 (locus G SVIVG01012228001) derived from phytozome v7.0 (chr-ID chr1 ; pos 406059 to 414363 reverse strand)
agtgcctacaacccagctgtaagtttgttgcataagctagggtatgttgttttttcatttaaaatttttgttctttggttttatataacatctcattaagctcacatgcttctatagcaacttgtagcgggtggcaatcatggtccagcagataagattatactgccccttagatcatgtactttgttctccttataaataagtaggtcccttaggtctcagtaatttcaggttcagcacttggaggtcccttgtgctattcctgctataggactgagaatttgaactctatctatctaaatcttgatgagaatagaaggtttttgttttccactcttgtaaatattccttttaattcctcatcatgagtgttgacatgaccaataccctcaagaaaaattatttggaaaatagaggccttctttggccactagcaaagaagaagaccaatacctatgacatcctttaaatttgaaagccttacaaagcctttagacctcatagatgtctatgcatttctggacatcatggactttttttcattgaccccttgcttatgagttgtggtagaggcctttgaggatattactagtctgttgattatctattcaaagggttttagtaggaggaagggggttagatttctatggaggttaatgtgtctttttttattatatgtatataagtaaaagcaattgtattaagaaagccaaaagtacacctgaaattacacatgatgtacgcaaggctaaaaggccaaaaaagagaaggaaaccaccaaaaaccaccacttttcttacaccacaaccaatcaatgaaatcaagtaaagaccacgagctagagtctacattaacccagatccaatccaaaaacttatacagaaaggattgtaaaatagcttgatcagttagttcgatgtcttcaaaggctcttctatttctttccttccataaagtacaaaataaacacaatggggttgcattccatgcttttttccttttcttcctaacaaaagagttgtgccaactaagtaaggagatcttgatagaaaaggacatgacccactgcacaccaaaaagagcaaagatgggttgtcaaatcatggttgccttgggacagtgaagaagtaaatggtttgctgattcctcttcagctttacatagaaagcagctacttggtaaagactaacccctcctttttagttgatctgtagttagaattccctcccaaaaagcttcccgagcaaaaaagctaaccttcttcggtacccaaggattccaaacaatgcttgaagggaactctttagcattgcaaggagttagggaggggtaaaaggacttgacagtgaagaggcctttctttgatatccactaattcatgacatcctcattatcccttctaagcatttgtcttaattttctaaatagagcttctacctctctcatttcctaatcattgttgtgtcttgtgaaaacaagattctaatgacccacttccccttttcccatcccacaattgggtaatccaagcttctctagtggaggctaatgagtacaagcttggaaaatcctctttcaaggaatctctcaagaccacctatccttccagaactacactcttctaccatttcccaccttaaaagccacccttttgctaaactccatccacccatttttgttggccttctgaagacccaccccatgaccttcccttgaagcaccaaaacaccaacctccctcttcctctccatgtttccctacaatcacctgttttcaaaaaggatcgttctcagaagcaaacctctaataccattttccgagaagagtcttatttagtaaggaatgatttctgatgtccaagccttcgtcatttttctctatgcaaacaatagaccaattcatcatatgaggcctattctagagctcgcctccccttcaaagaaagtctctttggatcttctccaacctcaagcacaccttgcggggaatgacaaacaaagtcataaagtagattgggaggttagaaagagtgctttttaccaaagtcaatctcccttcttttgataaatattgtattttccataaagcgagtcacttctgaaatctctcttccactacctcccaaacacaaggggacttgaaagtggctcttaaagggaagcccaaataacaagaggggatagaacccacccactttacaacccaacaccctaaccaattcctcaaaattgggaacctcccctatatgaatcaactcgctgttatgaagattgatctttaacccagaaattgcttcaaaccacatgaaagtccaatttagaaccttcaaatgctcctttcttgtgtcacaaaacgctaaggtattgttaagagagagagagaagaaaaccttgattctcattcattgtgtctacttacaattgagaaaatatatatatacaaggctaggagtcctaactaccatacatgtgacctatattaaaaaggaaagattgtacactataaattcattatatttaacactccccctcaagttggagcatatacgtcatatgcaccaagcttgttacaaatgtatttaatcctaggacctctgagagatttagtgaagatgtctgctagttgatcatttgaattaacaaaacttgtagcaacacatcctgatgcgatcttctctctaatgaagtgacaatcaacttcaatatgtttggtcctttcatgaaagactagattggatgcaatatgtaatgcggtttggttatcacagatgagtttcatctgttcatcctttccaaatctcaactctcgaagaagatgtctcaaccatatgagttcatatgttgccaaaaccatagcttgatactcagcttcagcactagatctggtcactacatcttgtttcttactcttccaagatattagattacctccaataaaaacacagtaccctgaagtggaacgtctatctgtgggtgagccagcccaatctgcatctgtgtaaccaacaacctgagtatgacctctgttctcgtacaacacaccttggcctggtgtacttttgatatatcaaagaatgcggattacgacatcccaatggctatcacatggtgactgtaggaattgactaacaacactcacagaaaaagaaatgtctggacgagtaatggtgagatagttcaatttacctacgagccgtcgatatctcccagggtctcctaaaagctccccttgtcctggtacaagtttgacattcggatccataggtgtgtctatcggtttacagtttaacataccagttttttccaagatgtctaaagcatacttcatttgggaaaggaccacaccggaactggattgagctatctcaattcccaagaaatacttgagtttccccaagtctttggtctgaaagtgggtaaaaagatgttgctttagtttctgaataccatcctgatcactgcctgtaatgactatgtcgtccacataaacaaccagataaatacactgccctaaggagttatgatgatagaaaactgaatggtctgctgtactgcgaagcatgccaaactcttgaacaacaaaactaaaacggctaaaccatgctcgaggagattgtttcaagccatatagagaacggcgtaatccgcacactaaaccagactccccttgagcaacaaaaccaggaggttgctccatataaacttacttaacaagatcaccatgaagaaagacatttttaatatccaattgataaagaggccaagaacacatagcagccatggagagaagcaagcggacaaaagcaatcttggcaacaggggagaatgtgtcaccataatcagaaccataaacctgagtatagcctttagcaactaagcgggccttaaggcgatcaacctgaccatcaggaccaaccttaactgcatagacccaacgacagccaactgtagatttaccagagggtaaaacaacaagatcccaagtgccattagagtgcagagtatccatttcatccaccattgcctgttgccagcctgaaggggaaagagcttcatgggtgctctttagaagagaaacagaggatatagcagaaacaaaagcagaatagggtgaagataatcgatgataactcaaaaaattgtaaataggatgaggattacgagtagagcgagtaccttttcgaatagcaatgggtaaatcatcaggagaaggcagagtcggggcaagagaagccgaagggataggaagtgagtcagcaggtgcctcagcaaaagggagaggaacagcgacacgagggcgacgatgataaacctgaagtggtcgaggaggcacaacatcagatggggagacaatgggaaggggcaagacttcagaaacaggaagagactcagaagtagtggaaaagaatggtaagtcctcaaagaaagtgacatcagcggagataaagtatcgatgagtcttaagggaataacagtgataacccttttgaagtttggaatatcccaagaagaggcacttcatggctttggcggaaagcttgtcctgtctaggaatgagaatatgaacaaaacaagtacaaccaaagacacgaggaggaaggaaataaagtggttggtcagagaagagaaggaaatgaggaatctgatcatgtaaaacagaggaggacatacgattaattaaataacaaacgtttagaacagcgtccccccaaaaacgaaaaggaacattattatggaggaggatagtacgagttgtctcaacaagatgtcgattcttgcgtttagctaccccattttgttgaggagtatgagcacaagaagactgatgaagaatcccattatgagatataaatgaagtaaatggagttgaaaaatattctctggcattattactgcgtaacacacgaatagaaatattgaattgggtctggatttcagcataaaatttctggaaaatagaaaataactcagctctatttttcattaaaaataaccaagtacatcgagaatagtcatcaatgaaagtaacaaaatactgaaatccaaaagtagacgcagtccgacaaggaccccaaacatcagtgtggacaagctcaaaaggagactttgcccgattattcaaacgctttgggaacgagacacgagtatgtttcccaagctgacatgactcacacgaaagcgacgacaaagtggaaaaacgagggaccatcttctggaacttagagagactagggtggcccaaacgactgtgaatgaggagaggaacatcaatggaaatgcaaactgtaggatatgaatccgaggtgaggtgatagaggccttgagactcacgtcctatgccagtcgtcttcctcgtactccggtcctgcaaggtcacaaatttatcagaaaaggtaatagagcaattaagagtacgggtgattttgttgatggaaataagattaaaagaacattcaggagtataaaggacagaagtgagaggtagagaaggcagaggaagggccaaaccaatacctttagctacagtttgagaaccattagctaaggttacagtaggtaaatcagaagtagtagtaatagaggagaaaaaatccttattaccaaataggtgatcagaagcttcagaatctagaatccagggtccaagagaagatgtgtgggtaaggcaagcagaagcattaccaggctgggcaacagaggcaacagaagcctgagatgcatgagatgcggaggagctcggaggctgaggcagttgagaatcagaggactgggccacatgggcagtgcgaggaggccgtccatgtaactgatagcaacgatcgcgagtgtggccaagtttattgcaataggtgcaatgaggacgttggcctctaccttggttaccactgcgtcctcctcgagaggtagtgtgagaaactaacacagaagaatctgaaatgctatcagatggcaaagtctgagtggacgagatacgaaggaggtgaacaaacacatcatccaaggacggaattaatgaactaccaagaatttgatcgcggacaggctcaagatccggacggaggccaataagagtaaggatcatgaagaacttatcaagctgtgtttgttgagccccaacatcaggagtaagaggcatcacagtcaagaactcctccttaagagaggcaatctggccaatataagtagatagatccaagtcctgttagctgatatgaacaatagcagaaaccaccttataaagacgctggatatcattcgtgtataatcctttggcttgagtccaaaatttaaaacaagttttgtaggctcgaagatgaagaaggatcttgggatcaacggattgccataatacactacataactgggcatctatctttctccactgtatgcgctcaacctcagggatatctacctcctgtgtaaccaagtgatcctcatatccttgtcctataaaccaaagttcaacagagacagaccaaaaaagataattttcactgtcaaccaatttctccgaagtaatcataggagatccagatatgacagaggaaaaaatggaaggtttagtagccatatccacttatctggagaatgaagtatatttggatcaaagagagccctaatacggcttcaaatgcagctgaagaaggaaaaaccgaagaatcgcccgtgtgagagaccaaatggaaaagaaaaacaaccgtggcaccaccggaaaggtagaagaacacttcccaaggcacgtgcagggattggggttgagaaaaaatagccggaggacgctggaaaaactgttcggagggccgacggaggcaaaagaaccccaaaagaggcacgtgcagggctcggatggcagaaacaggtatgaagggtggctagttgacgtcaggcgaggctggaggaggaagcgtgtcgccgaaaagtggctcacgcgccctcacgcgccggcgcatgagatgcagtcgccggccagaaaaacacgcgtggccggcgcgtgggtggttttctggctccgatgctttgggaaaaattggagatctcctccaggcgctccttgcggtgtgggaaaaagacgtcgctggaaaagttcgtcggaaaagtcgccggcggtgaatgttttctgacgacgattcgaccgaccggaaagcgttttctgatgacgattcgacagactggaaagctttggggtctgggaaaggtgaccggaatgaaacacggtcacaggaaggtttcccggaattgatgacacggggaaactagaaagaattagggtttctcccttggctctgataccatgttaagagagagagagaagaaaaccttgattttcattcattgtgtctacttacaattgagaaaatatatatatacaaggttaggaatcctaactaccatacatgtgacctatattaaaaaggaaagattgtacactataaattcattatattcaacaggtatcatcaacaaataaaagatgagacacaacaatgctagctaagaagttctctagaaatcatccttgaaaagccctcttcaaaatacaagaaagtgctttcttattatatcttatttacatatcacaaaaaaaaaaagagttttatcgaggtgcatggtctttcttatgatttgggtgttatggttggagtaaaatgcaaggatttgagaagaggattatctgtggaacatttttggatgtaacatgtccactcacattccttttggtgtccatctccatggaatttctctggatcctgttgagctatatctttggattatttaaatgcttgcttgagtatctagagggaaaatgatgtcatttgacttttttatcctgattatttgttagccacaagctgaattttgatggttgtgctttaaggttccctaagtcaagtgctttgggggcttcttagatactccagactgggattatggatgctgtgcttttatccctgcaggaaagtttgaacatgacagttggttttggctgtaactaaccttatttcggaagggaattcctctgttgttttttggcctctgcaggaggcagacttccttggcatctcattcattagatgaggaggatttatcctcttgataaggttttatcagcaattttagagatactccctctacatttattggtgcatagagtggttatgttggacttttggtttttctacttgcttcttgtttcttgaaggagatttcatccttgtggaacgttctctcccataagatcttatgtcttatatatcgtgtgtgaaagtattgtagagctggttgtttaataaagtatctgttggcag

SEQ ID NO: 11222 - DNA, 19193 bp, Vitis vinifera
  Intron number 13 from transcript GSVIVT01026774001 (locus GSVIVG01026774001) derived from phytozome v7.0 (chr-ID chr 15; pos 6920024 to 6939216)
aatctgccaaggaattttctgcattgtttgcacaggtatgtttatgattggatgttgtaatgattgacataattgtattgaattaatgcttatttaaaaatgatgtaattattcactcagttaacatataacaagtaccttctggtcagggttgttgggggtgggttgggttgtcagtaacaagtacctactattgttcctaactgttcatctcattcaagcactggctctgatgtttcatgctgatttgctttttacggaattggaaactaagaagccaaatctcagggtgtttcaaaatgaattgggtagtctaggaagaaagaaaaaagtaagtaaaatgtctcaaggaaatgaggaaaccctttggaagaaataatatattgccactgatctatatcattcaatccgattattgatccattataagaaacagggggaccctctttgaccctttatttttgttttggtcatggacgtccttagtagcttaattgcaaaggctaagcaggaaggtttcattagagacttcaagattaagggtagagtggaagaagggattcaagtctcacgcctcttgttagcagacaatgctcttctttcttgtgaggacaatgtagatcagttgaaatattggaagtggatagtcacttgctttgaaatggtgtcaggtttgaaaatagatttgcacgcatcccaaggcatactgtataatggcatgcatcctggtgcatacggtattgtagcatgcatcctgaggcatacggtataatggcacacatctcgagggggggaggcgacaaatatggattgagtagcttctctttttgggcgtatagtaggaagacttcctaattcttatctcggtttaccccttggggccccttttaagcattgtggcgtgtgggatttgatcaaagagaggtttaaaaggaaattgtctacttggaaaaaatagtacctgtccaaaggaggaagacttgtccttattaagagtgttagatagtgtacagttatttagtttatttacttttccttttctttccttattgtattgtaggtcccactaacatgtatatatatacccaagtccaatgtgtattataaacagtttttcaataacaaaaattagagattctcccttttctctcttttcacatggtatcagagcctagagagaaaaaaatcctaattatttccggtttatccgtgaatcaattctgggaaatctttcagtgaccgtgtttcattccggtcacctttcccatctcctaaagctttccgatcaaccgtatcgccatcagaaaaccctcaccgccggtgacttttccggtgacttttttaggcaaagtccttttccgacaccgaccagaccatcaggtgcgcaaggaggagatcttcaagttttgtcaatgcaccggagggagattctcagccaagcgctggccacgcgcgtttcttcttcggcggcctgaacctcacgcgccgacgccaaacaatctcctcgagcatggtttagccgttttagttccgttgttcaggagtttggcatgttccgcagtacagcagaccattccgttttctatcatcataactctttggggcagtgtatttatctggtagtttatgtggacgacatcgttattacaagcagtggtcagaatggtattcagaaactaaagcaacactttttcacccacttttagactaaagacttggggaagtcaagtatttcttagggattgagatagctcaatccagtttcggtatggttttttcccaaaggaagtatgctttagacatcttggaagaaaccggtatgttagactgtaaaccggtagacactcctatggatccaaatgtcaaacttataccaggacagggggagcttttaggagatcctaggagatattggcgacttgtaggtaaattgaactacctcaccattactcgtctagacattttttttcctataagtgttgttagtcaattcctacagtcaccatgtgatagccattgggatgctgtaatctgcattctttgatatatcaaaagcacaccagaccaaggtgtgttgtacgagaacagagatcatactcaggttgttggttacacagatgcagattgggctgactcacccatagatagacgttccacttccgggtattgtgtttttattggagttaacctaatatcctggaagagtaagaaacaagatgtagtggccagatctagtgctgaagccgagtatcgagctatggctctggcaacatatgaactcgtatggctgaaacatcttcttcgggagttaagatttggaaaggatgaacagatgaagctcatccgtgacaaccaagccgctttgcatattgcatccaatccagtcttctatgaaaggaccaaacacattgaagttgactgtcacttcattagagagaagatcacatcaagatgtgtggtgactagttttgtcaattcaaatgatcaactagcagatatttttactaaatctctcagaggtcctagaattaaatacatttgtaacaaacttggtgcatataacatatatgctccagcttgagggggagtgttagatagtgtacagttatttaggttatttacttttccttttctttccttattgtattgtggttcccactaacatgtatatatatatatacccaagtccaatgtgtattataaacaatttttcaataacaaaaattagggattctcccttttctctcttttcacaaagagcactctatcaaatctccctatctatttcatgtccctctttacaattcctagaaaagtgaggatcagattagacaaaacccaaagagactttttgtgggggatacaagagaaaaagaaagatccatttggtaaattgattagatgtttgtaaggataagaagtattgagggtgggggctaagaagtttggagattttcttttgagcaggagagcttgtggaagaagattattcatggaaaatttggggagatggaggggggatggactactagaggggtgacggagtcttttgagatgagcctttaaaaagacattagaaaaggttgggaagagtttagttttagattaactacccaaattggaaatgttagacatacaagattttggtgggacatgagtgagggagtttaagttaaaagatgcattccctatactttttaaaataacatccttacaaaatgttgcagttgcatatttatgggggagaggagggggagagtggtcatttggaaattcattttaaaagacatttccaagattgggagatagaggaggtgactattttttggagcttatttacccattaaaagtgaaagaaggagaagacactttactttggtaagataataggaggggaaacttcaatgtcaaatcatataacaatccctaagtttttagaataatttagtattcctagccaaagagatttagtgatctcgtgctccacttagaacatgttttttttacttggaaagctgcttagaggaagatcttaattgtagatacattaatgaagggaatgacttatgttcaacaaatgtagcctttgtaaagatggtgaaaaatcaattgatcacatcttgcttcattgtgataagacaagagtgatatggattttttttgttaccagtctttggcttgatttgggtgtttccagcctcagtaagaaatttcctccttgaatggaaacttaaggggctagataagaagagaagaatagtttagcaattggctccaatttgcttatactggtgtacttagaaagagcacaaccgaaggacttttgaaagagctcttagatcaaagattgaaggagttcttcactaaatcacttttagagtagtcccatgattctttggaaatagagaactcttttaatcacttgtggttagctttgccttgtttttgtaggctaaccttatattcgtttggtgcttgctttgggatgttttgtgtatactgcctatatatgtagggtgcgctttttttttttttttttgataggaaatgacaaaggaatatattaatagaaaaaagaagtacaagagaaggatgaggaatcctcccaccaaagaaaactaaactaaaagaaaacgaaaacaagaaaatacaatataatatgaacaggctctctagactagaccaacctaaaggaattacacgccgctagccaatcaagttgtaacgctataaagggagtccccttaaagaccttggaacaaaaagcccaaagagaagcaaggaaatgaataaaatcctaaagattctctagattccttgctttatcctcaaagatcctcgcgtttctttcctgccacacaacccaaattatagctatgcacgcagcttgccacaaaactgcccctctcttagataaaccaaaaccattgtaattgatggacaacatgtcggaaatgcgcctcgggggaacccaatccgtcttggctaactgaaataatctgtgccataaccccatcattaaagaataatgtaggaaaagatgatctgctgattctccatgcctcatgcacaactgacaaatatcagaactaagagggtcttctcaattgtagcaagtcattagtatttaccttcttgtgtgccaccaaccagacaaaggacttgactttgaaagggatttgagaattccaaacgaacttagtagggaaaactggaggagagccagaacattgggatactgcaagaaagaaagatttgactgtaaaaagccctgaagaagataaagaccaggatttcgcacttgaaaccgaagatgacaaatgcaaacaatccattgaccgcatgaagccttccaaatcttctatctcagaattggataggttgcggcaaaaattaaagttccaagataagggacgagtagatcggagaattgaagaaataagaatatttttatccgtgactattctaaatagtcttggatattgggatcccaaaggttggtccccccaccacaagtcttcccagaatctaattcttttcccatctcctaccacaaaccgagtaaacttggaaaactcctaaaagacttgtgcaatagccttccaaggacaacgatgtgaccatctaactatggtgttggcatcccaaccattagagtgtgatccgtaaatgcttaaaataacctgatgccatagagttaaaccctctctaggatacctccacaaccatttccctaagagagcgacattccttagaataatcttttcaaaacccaaacccccttttgccttcgacttacacattacatcccaactaacaagataatctcttttaccttccccaacctctgaccataaaaaatccctttgcaatctctcaatttttgcagccactgatgcaggtatcttaaataaggaaaggaagtagtaagacatgtgggtgaggcaagattggataagagttatcctacctccaaaagataaataagtcttttgccacccatctaatcttcttgagatcctctcaatcactggatcccaaaagccacaagtcttgggattccctcccaaaggaagacccaagtagggtataggccaatcagaagccttgcaatctggcaactcggccaacctagaaagatgattctgttcaagattgatgccataaatattactcttgtcaagagtaaccttaagcccagaaatatgcctaaacactagctctaaacccttgagagtctgcaaatcttcctcactagtgttagaaaagaaaatggtatcatctgcaaattgcaaatggacatctttgtactgttcctacccaccttgaaaccctccaacgaatttctttcctctactctcaataacatcctactcagtacatctgcgactaaagtaaacaaaaagggggacaaagggtcgccttgtcttaagcctctagatgtcttgacccaccctttaacatttccattcactaagattgcaaaagataccgtggacaaacaacctctcatccatttcctccacctaggactaaaccccttcttttccaacacatgatccaaaaaaaccccaactcacatggttgtaagccttttcaaagtcaattttgaatacaactcctttctcccctgaacgtcttttctcatccactatctcattggccatgagaactgcatccaatatttgtctcccttgaacaaatgcgccttgagtagaatgaatagtttcatgtagtacccctcttagacgccctaataacactttggctattatcttgtaaaggctagtgatcaagctaataggtctacagtctgagattttctttgtcatgctttttttgggcaacagaactatgaaggaggcattagtgctttgattgataatcccgctactgtgaaactctgtaaatactctcactaaatcctcctttatcacatcccagcagtcttgaaacactgcaatggtaaagccatcagaacccgaagctttattcttatccaactgaaaaatggccttataaatctcttctttagtaaaaggggagtccaacctggatgcactctcttcagatataggggaccaatctaagccttcaactctccaagactctccagtaggactcgagtagagtttttcaaagtaaagtaaagtctcctctatgatgctctctgaattattcaacactattcctctttcattctccaacaccttgataaatttcctatttcacccgccattagccactttatgaaaaaactttgagttacaatccccttccttaacccatttcaccctagctttttgtctccaatgaatttcttccctcaaaattaattcctttagctccccttttcttaaagctctttgaactaaaagttcaaaagtgagaccccctccttgctcaatgacatcaaagttagctatttcattcaggatgctttttttcctttcatttagcactccaaaagaaaccttattccactatttcaaattggccttgacaaattgtaatttcctcataaacttgtgaccttcccacccagttccttgaaaacctctcgaccaacttttaaagcactccttgaaactaggatgttacaaccacatattctcaaacctaaaaggagttgggccccacttgaacgggttggtttccaaaactattggccaatgatccgatgtccttctaggaagagcttcttgaaggctttgaggaaagtaatgctcccactcatttgagtacataaatcggtccaatcttttacacacgggaaactcttgcatgtttgaccaagtgaatggtgcattccgtaaaggtggatcaaacaattcacattctcttgtaaaaccatcaaagtccttcatgcttgaagttagactatatccacccaatttttctgagcttctccttatgacattaaaatgaccgcttgcacaccataatggaaaagatagaccaaaaatgtctaacaactccacccaaaaatccttcctaagtaagggactgttagggccataaattgcggataaccaaagaggtccataaccatccaaagcaaacttgactgagaccgaaaaggatcctatcaccacctcctcactgcgcaatttattagagtcccaaataatcaaaatcccacctgaaaccctgcacgcttgaagagcaacccattccttatttttgactgaccaaacactacccacaaatcttctatcacactccaccttttttgtttcctagatcatcactacattcagattctctaacctcacaaaatctttaaccacccttcgctttttccttgatcccaaacccctggtattccaactaattattttcatggaaaaacaacacagaccctaaacccccaaccagttccaataggtctcacaaacttgtaaagtgtctgctcttccttctagaatataccttaatatccagagagcttaaaacctcatgcactttagccattttcttgggagacaggccttcaatttggaaatcgcctgatggggagtccacaacatcaccctggctaactgtaaccaggttgggcacctcactgggcaaattgggtttagtcttaatggggttgaaactctcaggtagctggtttgaacaagtagacttggaccccaccacaacatggttaggattgccaacatagttttgacataaagtacccacattgtcttttttggaaaaaatttcagaaaatactcaattttccataggaaattgagactgaatgactgaactagggagatcggtagcagaagggctcagaaatggaagtgccaacctagaagaagtgggaaaagaagacaagggtgactaagaaagtgaggacgagtttacctccaagttttccgctactgacaatccacaattccccaaaaagttgagccctttacctctgatttctggattagaaggcaagaacgtgactgaagaaccacgaagatcggaccccactcggcccaagaatccttctctgtcttcttcacaaaaaggtttgcgcatctgcaggtcatgcccaacctcttcgtctctagatgacgaagccccttccctcgaacatcgaatccttggcgatcggtaaaagaagataggactcgcattgaatcctcattcccacttagctttttccctgaaagcctcctcctttggaagttcttcgctatctgacaaaggtttcctgagcaaaagaggctcgctgtgacttcgagaaccttgtcggcgatcggagcttggaggaaatagggtagtccacaacttctttgaaccaaacttcacttccttcttcacggaacctctcgtctgaacatcatgatcgtttgaaactcctttcccctttccccctacagcggcttcttctcttcgtgatagaacctgcttttcagagggcttcttttctccttctccttggcccaacctcaacgagccttctaagttacaacccatttttgcaacatttagtgggctgaaattggggagagattgggcctctctctcaaaggcctgacccttctcgtctgagaaggcctcgtcctcgccggccgtagctacgcctgccatctctgtcccaatacgcccgaagttcagtttttttgaattcaaactgaaccagttgttccccatagcctgacccctcttagcacgtgtccccactggaagaacatcaggctgacctcctttcttctttcttcttctttctgccaacttccccaacacgaaaactaccgccagccgttgatctaactctctcctcccaccttccaccacctgtccctgagtgagattcaacaaccacccgagtcgactcacccattgctctgcctttcctgacctcttcatctccgaccaccgcgacagaaatagtgaacacccaatccccgtctatcacctcaatcaaagctgggagaactgaccgatccttcattgcaattcttatccttgccttgctaagatcaaacaatttcaacgtttgccaatcaatttcagtcaccttcccccactgctccactattttcttcagatgtacctcagaccagagatgaaatggcacaccccgtagctcaatccaacctcctctgaacttcccctcaacttccgaattttcctttggcaaccaccttcttaactaaattgaattccctccctcaatcttaataaaccttaaatcttggagaaagagagcttcctctatcgtttctataaaaaaactccttttccgcctgagaagggcactattgtagccactcctttcttccctaagcttctcgccacagctcggccaacctcaacccatttaacgctatctgcattgcattcacacaccatggcacgcgcccatctcccaaaaggaacaagtccacctctccttggtccttcatctctgactactttcgcaaaagaccggtacagaggacccacgtgattgtggataaccctttccactctgtattgtcttcttttttcaaatgcattagacggggggaccaccgacattgaagacaatgcgctttttagattctcccatcctctgcccttctcgccctcaggaataaccagaaaaattggttttatgttggtagcgaactccaaaatccttatgaaccttttgtggttgttgaagcatactttcaacaaatggacgcaaacttttcccctgaactttctattgaaccccaagtgactcttcatttcgatggctttcgttaagtattcgatcaaccaccttacttcttccttttcaaatcctaagacataaacaaagcctctgttgtgctctgtgatcgaacaccaatttcctccgtgctcgccttccaacctaaccaagaaggtcttcctctccacagagaccttcaacgtccttaccatactttttctgtggttctctaatgtgaaaatcaaaccaccttgtctcgtgcgctctctttttggtgtttcttaattcatgcttttgttatctatcaaaaaaaaaaaaaaaaaagaaaaagaaaaatgaagcaattttcttggtctaaacaaatatattaaaccttatcatcaacatataaattacataaaaagtttaccgacttcactagaccttattaccattatatatatttaggatacccgaactcttcaacttcaccctaacttcaccgtaccaatacaatatgaaaaggttgtaggtgtgggatccttgttgaacactcttattttgctttgaatattgaatattttgatttttttcccccctttttaataggcaatgaacaaggaaagaaagttttttccctatgaagagtgatattttttgcttctaagtgagtgttttttctttagcatgctatatctaagtaccattcaagatcagtttttaaaagggtctacatctccaaaaatttggtatgttaaggatcaggcacctaaacacatacccttgtccaatgcccatacccaaacccacataacataacatatactacattgctgaaccaaataggtaccagaaaccaaatatgttcagaagataaatggtggtaaaattgacatgtatttcttcattatgaaaatctatattgtctgtcaagtggagaattggtcgttcaatctttaaaaccatcaatattgtcaactgtatcacaatttatctactaaatgcattcattattgttgggttggctctctttgtcctacaatatgcaattggttacttggttggatttaaccctttgtgacacatgatttgctcttatctgctgcttaagtgtgtctcataatcccttatcttgtccttattattcgactaaattctcatgtcaacatgggacactagttttctattgtagacccttagaaactcacatggcatgccattgcattgcaattccttatagaataatttcaatggatcaatggatcaaattacaatcaagataatgtagatcaatcaactgagcattaaataatatatagtccatgaatgctacttgaaaatgacctcttctactcggtagcgaatttgctcccattggaccatcatgcttaggccaaagtgtgttttctgttccgtatcagtgtctctatgtgataaaattgctacttttattaagcatgttggatcaattctttacttggataacacttgtttaaattgtatggtgttaccatgtttttgtgcatgtactctcctgaaaaaataaaagcaagattatttatttattactggagtgttccctgatgacacatgtactttttattttctttttaaatcaaattgttttccagtgcttggtgtataaaatttgtcgatgagtcaatgacattgttctaatgagcaatagagcaacattgaataatgcacctgtggactcgcatttctcacatgcgttcccactcaattggcgagactcgctttttaatggtgaaaaattagttttagaaaagttggagtcgtcacttatttttattatttttttaagggaaaataaaataagaaactaaaaccctaagaaaaatgactccttgaatttggaaaagcaagtcttcgaaaagcccgagtcttgatttaaggatcaggttacctattgggaaggtacctgaaagaggtaacacccctctaaagccctaaataggtctctattagctaagttgaggaaatgtgacaattaatcaattgattatggatacctaggtaggttaaggtaatttcgaaactagcatgctaaataacaaatcaaatcataatcataaaggagagttagggtgtgtaccttgactgctttttaagcgctatcacaagacatcgaagttagttcaggaatattggcacatttttataaaaaataatcaaacaatgcatcatggcaatcaaggacaacatcaatcatagatatagctcaaatgtcctacatattcatggattttggaaaatgggtgatagagaccgtccttgggtggcttgctaaacgcttcaatgggaaacaaggttagctcaataacagttgtaaaacaatctcatgcatcacaaagaggatcaatatcaatcaaatatcaaacaaacagctcacttgaatcaatatcaaaggtgtcatggatgttgggccccccaccaagacctaaattacttctgcatgagttggttcaatgaattccattatttggaaccatgaagtttgttcatgcttgttggaaaaaacgagtaaaccgtgaaaattagttgaaaatagtgaaaatgcatggtggaagggaaatggcagcaaagagtttgttaaaaatctggattttatgcctagaagaagtctaaaagggattttttagagctggaattattcagttgaaaatagatttgaaaaatcaattcaaaacagtaaaatcccaatcaaagaaacaaataaaggaagaagtatgcaccaagatgaccacgatggagtgaggttcggggtaggtaggcatgtacatttctgaatcaagttccttgtgctactgctcattctccaagagcctgtaagtcgcttcatacgtatctccatgcagcaaatgagtgttccagttttctggttttccagctctcaaccctatatgcactccaactcaagattcccctccctgcaccttaatctctatctctgctgaatcccaataacagaaacattcttcacaaaaatgaacctgacggtctcttcttccgagaactcaagtttttgattgtgtctaataatcttccggagcaaatcctcatagctagcatcagttcccgcctttgggatgcaatttgtgtcattgtccttggcaaaacccattgtgaagacgaacaatcttgtagtacggaggcaaatgcaagttcattatccctgattcaccttgagggccaagtataatagagtcatcatctaagagtccacacggcagtggaaatgacagaaagttgctgtcataggattgcctatcctttaatggagcatctcgagcgtatacccgcgaatctgaggagaggaaaaatcccagaaaccatccagtaatacatacagtccccagaaaagggtatctcgagatttaaggtctttatctggtagtagaacgcatcaatcaaaaggtttagaacagaaacatgtgctaggaaacgccactccattggtctcaaaacgatgggttgtctgatagtagagcataaactttgagtggccactttcagagtgtaggatcattatatctctaattgaaacagttcatagttttgctccaacttgattgagatgttccaaatgaagatttggaaaatgtccagtagcttctgtaacctgacaaatcctattaatggattcaacctcacatttgaagtctttttattcccaatttttcgacatcgtctaagatttgttttgacaattcacctggggtttcttgagaatatatatattaattcttcatatcaatcagatattcaatgagtctgcttctgtatccccctcctccgaatcttgtggcctcgattttgggctatccggaatcacccagaacctcctttgcaaccccatttagtggcctttgtagcttgctgcctctaattacattagctttagtttcgatacactagaaaaaggtccaaaatgaatccgcatgtgcacccctgagaggttcaaagatgaccccatctgccacttcaagcctgcagaattctcgtacagtatctgctgcttctcaactgcaatgagaggagatattatcccaagtagacacttccagcttcaaaactgcaattttcttaatcagattctcagcaggcttgggcactaagcttgcgtttttggtatcatcttcataggttctccctgctttttactgtcatataacgatcccatgcttggcttgctctgtatgctccctcccgtttctgttctggggattttttatgtgagtgaaactttgttcaattctgccagaaattcgaatccaaattacaccaatgagcttccatgctttcgtcaaacaatatgtcgctcaactccaaatcactgtggggcatttgtggggtagcagtcatggtgaagatagcaaagtttccttgcaattccaatcacaattttatgcctggctgcccagtgccttttcgttctgattttctcagctaaattcccttttacagaagctcccttaaaaggagtgggggaggatccatttcttcaaagaaagatccagcaggaattattttcttcacattaaatcttactgttgtcaacaatgtgctggccaatgataacatgatcacttgaaagcatggggatatattagcttggctttgacccattaaactatgcttgcggataactccaggagctgtgactctatacgggccattgagtcctatagagttaggaaaaccaaatctgatgccattggaacactacatccagttcctccagttcagggagtagtaggtggaagatcctttttgaaatttatctccaactgtctatcatataactcacgtacaggatctccgaatttctcactggttcctgcagtgagcgggtcacccaaccaggcacacccattgggtcaataagcaattctacctggatgaagaagagaaagtaaagtggcccaatgagagctttgctttgagttgattcgtctcttccaaattttgaagaacttttggacaagcagaagtaacattttcccttggaatagatgttctgccagcatgaaagttccatataaacctagaaacattactcatattcaagataaagtgtggcagaaggcttccccaaaagaacgtctgacatagttgctaggatagtttgtgcagggtgcagtacaattcttcaccagctcacaagatagacctggatcacagttcaatagacaacccaaaactgcttcaactagagaggcattcacattggtagcgcttagagctgaagtgcttaagtcgttgtcatcagaaggttcattaactgaagagttcctaatagatcttggccagaaggaataaattcggtccccaaaagccttcagggccagattaacaacctacagttggctcaatagtaggacttgaaggttctcgtcttaatttttcaatttccaacaccatttcaatgtaggaatcacgaacactagacaacagttctctgttccaagcttcaattaacaaattttcagcatcaggtcatgcctcaactgcagctcctttatcctggcttttaaaaagataacgacctccattgtgacggacaaggacacatccaagaacagtgataggcatgtttatgtcactggacataggaagaggacacaaaatggagtttgagggaaagggattaaacccttctggtagccagtaggactgtgccatcgatcaacatcaggactcaataagattggcgtgacagcaaagcggagtctgaatttggttgcaccaagctacaggacacccacaacaatagatccatctacacacacaaggaattggcctcccagagagattgtcttcaatgctgatctggtgggggaataagctgttagtttcctttctgaagttgcaactaccattctcaggaaactggaaattccaccagcttttctgaatttttatttgcattcgaaaagtaggagcttgttcaatacaaaagttccaagagaacattctggcaatagcttgttttaggatcaatttcaactcgctgctgtttgatggggatgtgcaaagatccagatgcaaaactggatgctgttgttatggcactgaaaacagaacaagtctagttcaatatcctgctgtttcctagagctgacggttgatttatagaatcattttgcttggtatctctcaactgctgaaattgctactgcctctgaacttggcgaggttgaaatggaactggttccaatgaccaaaacacggaggtatcttgacttatttttttttaggagtgcaatctggggatgtgactgttggttttaggtgccttttgcttctattccacattctgagaactttcttccacatcaaatgctgataagacatgaagctgcactgagacttttgatttatgattgacaggggaaggttgcaccacatttgatattggaaaatacggttcatctgggatcgatgaagtggccttcaacttctggtcttccatattgctctgtttcccaaacatcatttgaagttactttgcctgttcttcaatctccagccacgaattgcgctgaacctcaagttgtttgtggagctcccaggaactccattctttcatcagaaactaagccttcatcatagggtaaatgctgttgaagcaattaaattcccccaactaaaatattcagcattctggaactatttggcagtgcatcttccagctgtaggaaacataggtgatcagaggccttattagccataaaaagcagtagactgaccgaaccatcccatgtccatgtgagcagttcaccagaacaggattatagaaatctggccttccaaaacgtctttgccatcattcccgagttctgtgtgcaatagggctgaatggtattgaacaaaaacactttgaagatcatggtgctggaggcagctttttcaatcgattatctctcttacgtactggcattccaataaattcatgtatcagttgtagaacaaggtgaaaattatgattccatcctcttagaaagctgctgatgctcccagaggtatgacttggttgacaggaaatgggagaggagctgaaacatttctacacgtctgtatcctggcaccatgtttcttgaatttgtagcttgtttgtcatcctttggttagcatctttgcctttccattgctccattttcagtgctgaaattttattaaatctaccgtgaacaactgttttggtgaaggacatcttctcaatcaaagcgaaaggctatgagacggtgctaatggcagtgtatgcaaactggaggccaactagaatagctccacatgaactcttccattgcttttgtgatgggagatctttcagggtcttgcagaacacatctttatctacatccccatttatgtaaaacaattcatagccataggaattcaaataggcgacatgatcagtaccgcaaatttttgaccatattcccaagtcagaggcaagggttcttggcaattgcgctaacagcaaagactgaacacaactgcagccattctcaagaagataatgctactaaattccatctttgaaaactaaaatacagtgcaagcatctctagatctgctaagttgcgtagggccaaactaagtcaagagaacaccagaaacatgaaattacgacttcacgagggttcaccaatatagtcaattttgatcaaattgatggagagctacccagatagtaaaagaactgaacgttcaaaagcccactgatatttgagatcaagtatttttgaagtgctctaaacatgctgaattcaatttcttgccaccactgcaatattcaatcaaagtctccaaggcccacagtaccaaattaacagaagagaaacccagataggaaaacaactgaaggttcaaaacttaccaatatttgaataccggcttcaaagtggtttaaacagcgaccgtaccaagaaggatctcttcttgaggagtattgcttcttctagtctgtcatgttctctctcaagcctcccaaaaggattggtgatcgcttcctttttttctctgttgtttattttttttccctctgttgtttttttttttttagatcctccctttttcatgtatatatatcagcctccagaaacccaatatgttgaaagaaaatcctccttcctttcttcctttttgtgtccttctccttttggaaagtttactctctgcctgatgtagaatctcctttttccatatgtatgtagccacattgatccccttttccctccaaaaatattttgcttgccttctttgagtgcacgtgcctttgtgagagttgattagcaaccccaattctcttataagacaataaaaacaaaaataaaaaataataccaagtaaaagagttagagatcttgcaatatataaaaagaataaaataaaataaaatggtcaatcccatgcagtttttctaaaaaaaaaaaagataagcaaatgtgtaaataaataaacaaataaataaatattaagtacatgcaaattatacaaactgtgaaggccatgcgggctatgcaagtcatgtgactatgcgaatcatgcaagaaaagaatgagtctaaaagtgtataagtgacttagggtgaactaagtggaatttgactaaaatgcacctaagaaaagcctaatctaaacttgtagggcggccaaggtcacaacaaggggctagataaactccttaaccaaagtctccaagttggatcaaactaggtaggttgcatgagtaacaatgggctgctagggaaccactgtgaaatactgaaagaccatctaaaggcacgtgctaagagaaaaaatggagggtctacaacacccttcttttttgtgctttaaagttatctaagaatagtattgacagatatgatgctgaatttttttcaactttggtgatcaacttttcttgtcatatgtgatctccttcctcaaagcaatgtgattgaatgttgcttgttttatttttctgattcactatcattattttgctttacagattttgcatattttgt

SEQ ID NO: 11223 - DNA, 4823 bp, Vitis vinifera
  Intron number 4 from transcript GSVIVT01011158001 (locus G SVIVG01011158001) derived from phytozome v7.0 (chr-ID chr8 ; pos 7476911 to 7481733 reverse strand)
agtaaacggctttatcggccttcaacagttagcacgtaagtgttgcttctattcaacaataattacctgttggataagatctgaatacattttattttatttgtgaaaatttattttctaatgaggatactagggcaaacaaatgtgctatgcaagagagttctagtccgaaaactgcttcaattgtatgagtgacatttgaaatgtggtaagcatggttcaacatggtaaagactatctatcagtgatactgaggtgtatcaaccaggaggtgttatcattggtaggttcatatggtagtttgacaaaagagtttttcttttctaagactctttgatgagtcatcttaatttgacaatgataaattgatgtcttacatttcatgttgcttgtgttgttgatgctattatgtatcaactaatgcatagttgatgcatagccggaccaaacagcacagatctgaatgattcctattcagaaatagcaagatttcattactgtcaaataaagtgaggtaaaagaattcaatggtggaatttgggcaagaattacgaaatcaatttcttataatgatcctctatttattcaaatatcatgcaaattggctgaacaaaaaatggtgaaaaaactttggattgtaaaggaagataatgttggatatttaataccccaatcttatgcagtagcattatagattaatttggtcaaacatgtgcaggaccttttgtttaatatattgttatatgcactaagctatataaataatgttgtgctcaaatacatgtttctttattgtttttaattttttatttttgcacgtgctctgtgagaaagtatttgctgatttgctgattttttttgcaaccaaccgtcaggttttaactgaaaggaaaacttgggattgtgatctaacagaaagaaaaatgttaccttgctggtaaataagggtgtagaacaaataaaaatgagaagataaaataaaaagacaattgaacagaagaaagaagtagagatgccagaggaagaactaactgggtgaaggatgaaagtttttgttctatttttgcaaggggtgtttcaaaaatggaaaggaaagaataagaaaatgaaagattgttggtgccgctttactttaagtacaaccattgtcccctgaaacaacaagatgaactgccccctaataagtaaacacaaagggtatctaataatatacaccaagtataaaaatccattttttattagttactattactgtaacttaagaaggaaactattagggatggataaaagtgaatattgttagcaaatgaaaaaggaagcttgtcatgtgaacctgatgctattctatttgcttgggagtggcagattcaaagagtctaaagaaggtactgttgccagtgattcatccaatggtaaggatagcttgaaagtgctagagctctttggtgttcagtagagtatttaagagaatagtttgaggtgctacaaaccttaggtaatggaaagatattaatgtatgtggaaagatgaattcacctgctgacattattgcttcttactgtaattcctttaatagaaaagacatatacatcttagtagagttgtcaaatagggtcatatttgtttataaatggttcaattggttgtaaatatctgagatagtagttattagtaaaacttcttactgaaaaagaaaaaaaaaaaagagaaaaacaagcgaaatgtagaagtaccaaaatgtcctatgaagagtagacaaatgcaccaagcgttacaaaaatctgaggcatggagcccaaggaaatcagaagcacaagcacagataaaaaaacaaaagaaagattctgtcctctttgggactggtgatcctaaaatgtgaaaaaattatctggacaagccttagtggttgattcgctaaaatgtgagatgaaatttactgtctgcatttgaatgctcgtgtttgaaaacttgtttatcaggttccagataagatttgattctgatccatggtcttggcttactgtgaaatgtactcttctgtttgagtttgaacaatcatgtttgaaaggttgttcttgagattttttcctctctttttaggtgcttctatattattatttacttatttggttgttattagaatctgattccaagtcacttgggctgagggtgggatattgaaccaatatgcttcatacaaattggactctggagtacaacaaaccacattagtcaattttcagagcatctttactttttggttggtatcaatttgatgtagtgcaggcaaggattgcctcattttccaaaacctctcttataaaggcgtggggctccttattccaattctcttgcaaaggcatgggccttcacattcatgaattctattgtgcatgtgcaaaagaagttcagaaaacaatcaaaatgtcaacttttttagttgttatgtttgctaggggcaaggatcagaagagaatgcttccatagaaatagacctaggtgactgatgcagagagatgccttcaaaatgatatctgctgtgtgacacattctaatcatacaataggaaagatctttgaacagttagactggttatgtatcatgggtcaatttattaagaactttgatagagccagactaattatgttttatggactttgatagagccagactaattatgctttatggtttgaattgatgggaaacctaagtatgacaccatgtgagacaaacggtgggaactataagatgcaggagtccaaggactggagtggggctagaattttgcactcaagcaaatattagttagtcctctagaaccaaaaaggggaaagaaaaacagagagatactgcaggacttaatgcaggtaggaaaaaatgagattgatgatctaggtagtgttggacctgcacttatcatattcatgattcacctactaaaaaaactggattacaagttagtttcagttatgggtccacggtaagaaagtgacatggaaacgattaaaatttgtttttaatgatacaactctcaataggctggaaaaccagtaggatgaactgcttcccatgtaactgtaacaaagtattgtgggttgtttccatttcttaggagtcacaattaatctcttgttccactggataggctaaaatggacaggaggaagaccaaaaagaaatgtgggtctctaaagatttaattgagggcatagctcccaatatagctaaaaacagttcatgttgctcacttcaagaaattgggctattgactttgttgagtgagtactctcctattgaatttccaattgcactttgatgccccattagctactactggagtttgcattaagcctacaatttttttgagtgattactgaactgtcatgatttgattgatacttccgtttttttttctgttcaatggctagatgtatgagaacgaaaatgcactcctgtctctttttggtagttaaccttgtgagcagttagcagtggcagtcacatcaaacagaaaccaggaaacatatttttccctttgttatactgcagcatgtaggatggcctattattgtttatattcacaagttctaggccataggtagtccaatacttatgctcatgtgcccaagctttcctcctacttgttcccttgacttcctccagaaagtacaatgtgaagccattagtgttcatgagtatcatgatcatcttattccacatcaaaaatactatcaagaacaactgtcttgtgcttttcaccttatattgtccccctcttcttccccttatgaaactcttaggcaatgtttggttaacttatatggtacaggataagataaaaggatgaatattatatatataatttatttcatcactcatcctatgtttacatatgataggataaatgttgggatataatatccactttttttatatcatcttttattaagatgtagaatatgcatatcccatgtttcataaatttatttatttattatttttttatattacttatttttcaaaataaaaactttttattataaaattaaattgtggttaaaaaagaactaaaagaatatttataaatatattataaaataatattaatgtttgtattatttaatacacactatatatatatatatattaaataaaataatataaaaaacttttatttataaagtttaaatatttaattatgaagattattaaaagtaagaaaattttcatttttttaaatagaaaatgttgaaatgtaatataatttttattttaaatattgaaaaataatatatattttatactattttttttttcattcatttcactcattaaatataaaaataacatagcacaatgaatctcattggatatattacgtgtattagatacaatatctaaggatatcaaatcccattgaaaatcatatcctaggatttgtatttcttatccaattgtaggatatatatatatattatattatatcccgtcaatcaaatatagtcttttagagaatccatatgtagttgtggatgtctatgagagtgtttgatgagttgggaagatttgaaaaaatcatcattcttctgaactatttttccattttttttttctttaacaaagaaaaagaatcattagcatcttagttaattatgctctacatgcataatggttctcctaacatatactttgacttccccattcagtgctatacacatttacagaatcggttttggtcaccaagattgagtttcattgagagaatatttaacttcgtggtaaatcacagaaaatatcgggaacacgtgaaggatctatcttgtt

SEQ ID NO: 11224 - DNA, 6353 bp, Vitis vinifera
  Intron number 1 from transcript GSVIVT01032559001 (locus G SVIVG01032559001) derived from phytozome v7.0 (chr-ID chr1 4; pos 28362994 to 28369346)
ttcttattttttattttgaaagagacaataaatttgttcatctcatataatataatttacttcttaaattatataaattttgttgtaaataaagtggtgaatgaccacattgaataaaatattaatataaatattaattgttattcatgaactctatttactcatctttaaaatgagtaatgggagttcatatagtgaaacctataaaaggcttcttataccccgtgtaaggagcatccaaagaaaaagaagtttttttctctttctctcattctctttatcttattctctcaactttttcacttttcttttctggttttttctttcccattatatattattatcaaaataatatatatagttgatttatactactttatttgcattgcatttattctcgttttacaacatgttatcaacacgaattgctctgaaggtaattctcatatcttaaacttgaaattgtttatataaaataaaattttacatatttatattgttattgttaaattcatttaatttgtgttatatattgttaaaagctataaacaaattattttattttgatcataagttataccaagactatcaatttataattgtttctaataataatgttttgttatatatctaaagttatttgacaatgtcgaatatcacaaaactcaaatttgtggcacttgacatttcgggaaagaattatctatattggatctttgatgttgaaaagtgtcttgatacaatgaatattggagctacgatcaaagaaggaaatcaagcatccctacaagatcatgcaaaaacattgattttccttcgtcatcatctctatgaaggtttaaaaaatgagtatcttacgataaaagacccttttactctatggagtaatttgaatgaaagatatgaccaccagaaaactataattccctaaaaacttgatttaattggatgcacttgagattgtaggattttaaaactgttagtgaatataactctgcacttttcaaaatcagttcttaattaaagctatgtgaagaaaaaatcgttcaagaagacatgttagaaaaaacttttactatgtttcatgcctcgaatgtgctcctacaacaacaatatagagagcctaaatttacaaaatactttgaattaatatcatattttcttattgttaaataaaataatgagcttttgataagaaatcatcaatctcgtccaactggatctgagtcattccctgaaatgaatataataccgtcccaaactcgtggacaaggacatggttgtggtcgtggaagaaatccccaatgccatggttattgtggtaataattcctcaacttctcaaaaaaaaaaaaaaaaagtttcattgcaccactagaagtggaataatactaaggcaaaacaagaaaatgtgaagtgtttacaagataaacctcccaaaaaccatgaaaataattgttatagatgtagtatgaaggggcattggtcaacctttaccaatcatcaataaaagcaaaaagaaaagaaatacaaatgaactataccagtggtgatggattggacctaacctactatggcattgatttctttggagatcctagtgaaaaagtcgatcatttaataaatgatgagaatgctaacattaattgatgttactttatatatcaaataatatattattatgttttatatttatatttgattattacattttcttttatattgttatttacattatgtctttttttaatattagttgtatataaaatttacgtgttatttggtctcaagatgaatgaggatgatgtatgtctcgtagattgtgcaaccatacacacaattctttgagataaaagatattttcttgaattgacattgataaaagttaatgtaagtatcatatctagtattacaaacttagttggaggttatggaaaagcaaacataatattatcaaatagaactagattacatataaattatgctttatattctagcaaatctagaaaaaatttgcttagttttaaatatatccacaaaaatggatatcatattgaaattatgaattaagataatgtagaatatttttacatcttccattatatctggccaaaagtttataatggaaaactctcagctttctcctctaggttgcatcatacaactataaagtctattgaatcgtatgttattgtgaaccagaagttcaacgacccaaaagtttttattctttggcatagcaggctaggtcacccaaggtcttcaatgatgcgtcgaataatcgaacactcacatgggcatccactaaagaaccagaagattcttttgtccaatgaatactcttgtactacctgctcacaaggcaaattgacatcttttactaaagtcatatttgagccaccaatctttttagaaagaatgcatggggacatatgtgtgccctatccatccactatatggatcattccattattttatgatcttggtaaatgtctctactaggtggtcacatgtttatttcatttctacacataatgttgcatttgctaaactcattgcacaaataatcagattacaagcacaatttttagattatctaattaaaacaatacgtcttaataatgctagtgaatttacttctcaaacattcattgactattgcatgccagtaagggtaaatattgagcatcctattgctcatactcatacccaaaatggtttaacataatccttcatcaaacctctccaattaatagttcgataattactaatgaaagccaaattatctactttcacctaaggacatgctattatgcatgttgcagctttagtccgtatttgacttacaacttaccatgaatactctccttcacaatttgtgcttggaaaacaaccaaatatctcccacttacgaatctttggttgtacaatatatgtaccaattgcaccaatacaacacactaaaatgggtccccaatgacaacttgggatttatgtaggttttgatttttcatttatcataagatatcttgaacctttgacagatgatgtttttataacccgctttgcggattgtcattttaataagagtgttttctcgtcattaggatgagaaaagtcaattcctgaataatgatgagaaattaattggaagacatctactatgacctatcttgatcctcacacaaatcaatgtgaactagaagttcaaagaatcattcatttgcaaaatcttgcaaatcaattaccagatgcattcattaatacaaaaaaaaaaacaaagtcacatatcctagccacaaatactctagcatggattaatatccatgtaagacagttaacaaatgaatctaagatatctctgaagtataataaacctatcagctcaaatgatgtaactccctagaagaagagaacacaagaaaaatttaacactctagaagagaccatcaaaatgactgattaatctaaaattaataaatctatagccccaaaagaggcacaaataatgcaaaaagcccttgaagaggcatatattgaacaagaagccctaaaaaggcacaggtaactaaaaattgtgagatctcaataagttatgtacataggggaaaaaaataggatcgaaataatattgttattaacaatattttcactttccaagtagtctctgatatcaaaagaaatgatgaaaatctcgaaccatgaaatgtggaagaatgccgacatagaaatgattggccaaaatggaaagaagttatgcaagtagagttaaactcattagcaaaacaaaaagtttttggaccgtagtccaaatacctaaagatgtaaagtttgttgggtacaaatgggtatttgtacgaaaacacaataagaataatgagatcataagatacaaagtgcaattagtagaacaaggtttctcgcagaaacctgatattgactacgaggaaacatactctcccgtcatgaacgcaatcacatgtcgtttcttaattagtttagtagtctcaaaaggactggatatgtgtctcatggatgttattacagtatatttatacgaatccatgaataatgatatatacatgaaaatccctaaatgatttaaattgtctgaagcaaatagtacaaagcctcgtaacatgtgtttaatcaagttataacaatccttgtatgaattaaaacaatctagacccatgtagtacaattgtcttagcaaatgcttgctaaaagaagggtatgtgaataaccttatatgctcatgcatcttcattaagaaatcaaaaatcgaatttgcaattattgcaatgtatgttgatgacttaaatcttattggaactcttgaagagcttacaagaacatcaaattactagaaaaaagaatttgagatgaaaaatcttgaaaaaacaaaattttgtctcgtactacaaatcgagtattttccaaatggagttttagtacatcaatcaacatacattaagaaagttttgaaacttttttatatggataaagcaaatcttttaagttcttcaatgattgtttgatcacttgatatggaaagaacatatttcatctttgcaaaaaatgtgaagaattacttggtcctgaagtatcatatcttagtattattggtgcacttatgtattttgtcaattgtacacgtccaaacattgctttttctgtcaatttattagcaagatacagttccgctccaactcaaagacattgcaatggtatcaaacatatattacgttatcttcgcggaactattaatatgagtctattttactcaagggaaatcaaaacaacaattgtttgaatatgcagatgcatgatacctttcaaattcacataaaagtaagtcacaaatagggtatgtgtttatttgcaatgttactattatttcattaagatatgtcaaacaaacaatgattgtcacatcatcaaatcatttagaaatatttgcaattaataaagcaaatcgtggatgtatatgtctaagatctatgatccaacatattcaggaatcatgtgaactctcttctattaaagataactcgacaatattatttaaagataatgttgtatgcattacacatataatagtgggttatattaaaaaagatagaactaaacacatttcaccaaaaaaattttatacacatgaactccagaagaatggtgaaattgatgtacaacaaatacgtttaattaataatctagtagattgattcatagagccattatcaacttcaacattcaagaaattaatattcaaaattagaatgtgtaaactcaaagatatcacatgagagggaacatgcttgtaaaaagttgttagtatactgtactctttttccctttgtccaagttttgtgagctttactgttaaggtttttaacaaaacaatcctaataaatcaaaatcaacttaaaaaattataagaatattgtactctttttctttgttaggtttttctcataaaatttttttctaataagattttaataagatatattcttttattataatgatcatccaaggaaaaaatattataaataaagtgataaatgaccacattgaatagaacattaatgtaaatattaatgatcatttattaacttcatctactcatgtgaaaaatgagtaaagggaatcattacgatgaaaaagcatgcattcaaagaaaaaataagctttctttatatatcattatcaaaataatatatatagttaatttctactactttatttgtcttttatttattctcattttacaataaatttgaccatttataattaaatttaatttcatgcccatttattttatttgattgcttttggttcaaaaataataataataataaataaataataaaattcaaaaattaatcatttaatattattattactttaaatttatttaatttactttcacttttttatataaaaattaaataatttaaatatatatatatatatatatatatatatataaaattatttaattatatttgattttttatattgtttatacttaaataaacatagaaaatcaatttccttaagaacctaaaaaacaaaaaagaaaacagtaaaaaaaattcagcaacatccattaaaattgaggaaaacaaaataaaaagaaaattgaaaaggaaaaaagcaaagtgaaaaattatgtaataatttgcaattttatattattggcaaaccattttgcattttaaattggtaatatttgaaaacgaatttttctggtattgaaaaatgttggcaaattaaaataaccttatcttctgctcagaaaatatgaattttcttctcatagatttttaaaaatctctgaagtctgac

SEQ ID NO: 11225 - DNA, 1064 bp, Vitis vinifera
  Intron number 1 from transcript GSVIVT01035831001 (locus G SVIVG01035831001) derived from phytozome v7.0 (chr-ID chr4 ; pos 4733441 to 4734504)
aaaaacccctcttcttttacgttaatctcgccaaggtactttctcttctcattttagggttttgctcaaaatggctactaatgggataaggaaaggaaagagaaacgaagatttgttgtttgaattcagttgggttatgagtagattttttattttttatttttggtttgtttttctttggcgttcttaggcagtaagcaatataaaatttatgattcgaggttttggttcttttatttttccattgtttttcagcaaccaattgggggttttatcaacgttttctattttgatttgtgtggttgttgttgttgttgggctttttttttttttttttttttttttttttgtaactgaagatgtgccttttgcacttcatatgtttggttggatggaaaatggagagtttgaaatagccctggaagaatctacattctgtagaccccgtatcaacaaaacattttcagactgaagctagtttcctgattctaaataattgaaattccaaagcctgatccaatttgaagcgacaaataaaaaccgaaaatatataatctctgctgtttattgcaagatgttcatactaatctgttgggagaacctaatccttgagtgctcatatgagttctttcctaatgatcataaaaggaggatgaaatgttctgcattttctggggttgtgaaaacgggtattaagacttaaaacgaaatgcatattattaggaaattcctctgtaaatgatacttggtatccctgattggtagataatcacctataacttagtcacattctagagattcataatgtattaagaaggttcgccatgattcacctagataatctcctagttgagatactcacctgtggtgtgccttgaaccaccatttcgttttaatttagacatgtgaagtttaataaatcaggctttgggtcaaggcttggatataggttgctctgagtattgttagtgttgacaccacattcttaattggttcttattcttaccattattattgttgctccaagtatggttagtgagtattttctgtctttgcagaggttc

SEQ ID NO: 11226 - DNA, 12278 bp, Vitis vinifera
  Intron number 6 from transcript GSVIVT01032210001 (locus G SVIVG01032210001) derived from phytozome v7.0 (chr-ID chr1 3; pos 21513003 to 21525280)
tgaaggcgaaggtagtgatagaggttttttagtttagattttttaataaaatcataatttgttgattagatatttagtaggttgttatctctgttcctatttgttagggtgttgagattctcttggaagagatctttatttgacttgtaatctacagcttattcaataggttggatgatcattttcttcagagctacgactctcagctagggtttcttaatggtcaatacagccatgaccggtgcaactagacccaccaactcaaccaaggaaacgacagaggaagtgtagagtggccctgctgtcttattcaacaattatgaaaattccaacacttttcagataactgttcacagattcaatggcaagaataatgtagagtgggcgcaatcgatgaagctagtgatagatggcaaaggcaaaattggctatctcactggtgaagtgacaaaaccagcagaaagagatcccaaattcaaaccatggaggtccgaaaattctatgatcatagccgggttaataaactcaatggaaaaccatttatgtttcttccaactgccaaagatgtatgggatgcaattcgagaaacatgctcggatttggaaaactcgtctcagatatttgaattgaaaacaaagttgtggcaattgaagcaacgagatcgagatgtgacggagtattacaatgggattttgactctttggcaagaattggatttgtgctatgatgaccaatgggattgtactagtgataagacacgtgaagagaggaaaatgacagagcatatgtttttcttgctggacttaacaaagaatggacgaggtcagggaacgaattcttgggaggaaacccttgccaaatattcatgaagtgttttctaaagttaggcgagaagaagctcaacggagagtgatgctcaaagatgctgatcaaaagcatacaactgaatctgaaagttctactcttgcttctagaagattcgaacatgaaggagaccacggatgaaattttctttatatattgctgatatattgtgtataggagattatggaaacgatattatgtgggaaaatatcatttcgacgaaattttgaggaaaattgtcgaaaatcatcgatatttatcgatatatgcgctacaatgtggtcaaacacgctgcattaccaaccagctacagtgctccctcaaaaatgccttgcaatttgcaatttgcttaccaccggggcaagtttgcttcttgttaaatatattacaccaaacatatatattcaaagtcatcatataaacaaaatattaaaagaatattctagagaacaaattaattataactattttataattaaatgcaaaaatttcttttaattgattatcaaaaatataaaaattatcataataattttcttcatagtgtttttaatatcattaataaattaattaaatattaaaaaattgtatatatattataatttattttatatcatttaatacaattgaattaaatagattataattttaatattaaatatattttaaaattagacatattataattaaatatcacaatattattatgaaataatatttgatgtaatttaataataaatgtacacttataaaattcatatttttttatcgattcattcaatattattatcaaatatgataaatcatattatacatatattaaattatttaataaaacaactttaaaatgtcaattatacttttaattacatttttatgacgtttatatatatcaaatatgtatcggtacttcaattttatagatatatcagatatatcgaggatatattaacagatattttggaatatatatatattcatgattaccaatacttttatccttgaaggatataagcaaaataataagtggttagaaaaaccatggtgtgactactgcaaacgagcctggcacacaaaggagacttgctggaagacacatggcaagccataaaatgtggataaaaaatccagcaatgaagaacgtgcatttcaagttaacagtgatgaccaagggacataaacttccttagaaattttttctctcactaagaaacaactagagcaattctgcaaattccttcgatcccaaataagtttccttcatgttcattggcctagaaaggtaactcttattccactgcacttacttgtgtcaattccagttccccatggatcataaattcaggtgcatcgaattatatgataggttcatcaaaattgttttcgtcttatactccctgtacaggaaatagaaaaataaaaatagccaatggtcctctatcgaccacagcaggaaaagggtcaagaactatttcttcctcattaactcttcacaacatccttcatgttacaaatcttgttttgagaaaacaatcacaacgtacttgttttgagttgatatctatttctcttgacaatgaaatcgtgttatgacattttagattaggtcatcccaacttttagtatttgaaatatttgattccaagtttgtttaagaataaagatccatctttgtttcaatgtgaaatttgtgaattatcaaaacatcattgtgcatcgttcccattacaaccttcaaacccactaaaccattttcaattattcatagtgatgtttgggggcaatttaggattaatactattacgggtaagagatggtttgttacatttaatgatgatctgtggacctgcatttttcatgtgtgttctcactcaatcgacgagactcgttttttattaaataaaaaatttagttttagaaaaagttggagtgccacttattttattttattttaaagggaaaataaaataagaaataaaaccctaaaaaatgactccatagtttttttggaaaaatgtgtttttaaaaaatccgagtctaggtctggagattaggttacttattgggaaggtacctctatgagatagcacctctctaagccttataaaggtctctactgactaagttaaggggaatgtgacaattaattgattaattatggatacctaagtgagctaggtgatttcaaaagaacatttaaggtgcgtacctggaccactttttaagcgctattataaaacatcaatgattagtttgaataatatatcacccaatatgcactttatcagaaataatcaaactatgaaacagatatcaagacatttaagcactatcaaacatagacatagttcacaatgacaatcatatttacagaattcagaaaataggtgttagggagcatacctagatagcatagataactcgtaattcgctttcttagggcatggggggcgaggggttagataataaataataaaataagaaatcctaacacgcttatctgattagtatagaaaaaaaaaatgatcaaagtatattaaatcatcaatcgtcacacacattttgtatacaattcctaaaaaatagatagatatatttacaacaaatagcaaggatggtagcaaaaataagttttgaaaagattttcttatgtaggggtttcaccaattccccaattgatatacacgaatttagcctagaattatcccatttatttgggaccacaagcattgattcatgttttgttcaaaaccaaaattttcattgaaaactgaaaatgatgcaaaccgatcgagatatggttgcatattattttgaaaaaaagagattttgattctaaagactctaaatgaattttctttttaaatagatttttttttaaaggaatcttttgagaaaaagtgttttgttttaaaataaaagaaattaattttaaaaataacaaaacatggaaaacaaaatgccaaccaaaacaaaaggaaacgaaaatcacaaaatgaagatttagacaatcatgccaattaaattggtgagagtaaggtcaaccttcatgggtttccaatggccttcaaaaaaagatttgaccaacaatcattatgacaacaaacttatgacttcctaatcaaacaaacaaacaaaatattatctaagactaacatctagatttcaagaaacacatgaattaagataagaaaaaccaatcaaggattaaagttaacaaatttagcatgtggagataataatgtgggattaattaaggtaaattaacattctaacaaaatatgataaatcaaaaaccaaaatttagcaatcttgaaaatatgaaaacaataacatgcaattaattagattgactatccaaaactcctaaaaaatttgaactaaatattaatagatcaaagccaaaatatgtcatactcaaaatatgaaaaataataacatgtgattgactaaattaattaactgaaactcttaaaacattaaaactggatattgatggatcaaaattaaaatttccatacataagacatgaaaataataacacgtgattaactaaattaattaactaaaattataatcaactacaaaattggatatagatggattagaatcaaaattaacgaaatcagaaacgcataaatacattcaaactaaaacataattaatactagattaaattcgaattaacaaaatcaacatcatttaataagattggctaaactatcaaattgaaattgcaaatatatttaaactagaataattaaataaatcatcaatttaaaactaaactaaaattgaaattaaaaacatgaaatttatctaagaaggttaatcaaacaattgaattaaaatcatgaacgcattaaaattatagaataaattaagatcaaactaaattgaaattaaactctatttaataagattatttaaatcgatgaattaaaattagcaaatacatttaaactaaaatgaattaaaaccaaactaactgaaattaaaaaaacacaaactttatttaaactatcatataagctaaaggattaagatcaacaaacgcatttaaactaaaaatagattaaaaccaaactaactagaattaaaaaaaaacacacacaaactttatttaaactatcatataaactaaagaattaagatcaacagatgcatttaaactaaaaacagattaaaaccaaactaacaagaattaaaaacgcaaactttatttaataaaattgtttaaactaatgaactaaaatcactaacacattcaaactaaaactaaactaatcccgaatttaaaaatatagactttatttcacaagattatttaaactaatgaattaaaaccacaaacacattcaaactaaaaaggtaggttaaaactaaattaattcagaattgaaaaatataatttttatctgacaaaattatttaaagtaatgaattaaaatcacaaatatgtttaaactaacagacaaattaaaaagaaactaattttggattaaaaaaaaaatgaactttatctattaggaatatttaaactaaggaattaacaacacaagcacacttaaattaagagaataaattaaactgaaattaaaaatatgtactttatctaacaggattaataaaactcacaaatcaaaatctcaaatatatccaaataaaaaaataaattaaaactaaactaaaaccgaattaaaagtgaactttatctaacataattaattaagttaatgaagtaaaatcaaaaacacatccaaattcaaaaaataaaattaaaactaaattatatcgaaattttaaaaaacgggaacttacctagctcgtgtcgccgatgcccctctcggatgcatggctcttgtgcgtgttactcaaaaaaatcctcttgataagtcaaagtggcaaccgaatccttgtctgaagtcctctgttgttctcaaaatctgcgcgtgtcctttttttaaaaattgctctcatgtgttgatctccaaaaaaacccaaaattgttcttgtgtgttttctttgccaaaaaaaaaatcctctcaggtgttttctctgccaagaaaaaaatatattccaactttttattctcgtccctctcttatttatatggcaacctatcatttccatggaatactctgtttctttttttaattcccgtggatatatggaaagtgcatatatatggctcacttagagactccctcaaggatgcaaccctgtgtcctatttggtaagtgtccaaatcctagtaatcgcaccatcggccatggattggagtgatcgggttggacattgcagggccttatccaagatcgacgaacaaagattcatcttcttttcccatggtgaatgtctggctatggattcttcttttgccttcggcattggtttcttgaaccaagcagatttcctcagcgcttcgatgctcatcattttattaggattcggatcgagcaactgtgatattatcgatcatgccggcctcgagatccaaggtagaaactggtaatcccgtcgatagattttttggtacattgtcacgagattattatcatcaaacgggagaaatttgaaaagaaagacgaaatgtataactccgtaaggccacgcgtccgcctttgcgtcgtcatggcttttttgataaacgacttccggcgttgtgtactcaggtgtgccacaagcggtgtggagtaagctattcttaagttgatctggaagcgcgaacaacctgaagtcagagaccttgaggttaccgtcttagtctaggggaaggttccgcggctccatgttgcggtgagccacgctgttctgatggcagaacaagagggtgaatactagttgctggaagtaacagcgcgtcgctgcctcagtgagacggttgcggtggtaccgtctgtgatggaaagggcctggtacagcttggcgaagctgcctcggccgagaaggcagctgagtttgtatttgccaaggataaactcggcggggagaggttccatgaaggcaggaggaggaaatgtcggcggtagtcgcaactctcattgaagcagcgttgcccaagctacctgtgataaaatggagaatccttgatagtgttgccatgcgtccaccctttttcattttttcatttttacttttctttaactcctcttgttctttcctccccaatctcctagaatactccaaaacccaaaaatgatggtttcttgtgacgtcaccttgctcatcctataaatgcttgtgtagtacccttccaaaacgcatgtgtctacaacctcttaaagccttctgggaccgaaacatggtggtcacgtgatgctgggacgcacactagagatggatataaattcccaactaatgatttacgaaaatattctacagatggctttctcgaatcctcatcgttgcatgtatgcctttgccttgctcataatctccccgataataaaaaatttcatgcaatttttctcctcatgcaaaacagaataaaataaaattgaaaggaatttaaaagaaaagaaaagaaactaatgaaaattatgtgagttatagtgaaatataagatgattaaaaggaaaaaaaagaaagaaaggagactagattatatagttccatcatttaataagaggccgcaaacatctttaaagtctaaacaattcaagcaaatttctattaaataaataaataaaaataaaaaagataaataataataaaataaataaataaaataaaaataacaataataataagaataagtaaataaacaaaataaatatgatcatcaaatgcatgcaataataataaaaagattatataaaaagttaagcccaatgaagtgtctaagcgggcctaaggtagtgcttaatgggccatgtgtatctacatagacctagagggtgcttaatgagtttagggtggctaggtggacctaactaagtctaatctaaagtgcacctaagtgaaacttaatctaaacttgaaggataaccaaggtctgaatgtggggccagataaacccctcaaccaaagtttctaaagtggctcagaaatggtaagctacacgagtagtaatgagccattaaagaaccattgtagaacattggaagtgaacttaaagatatatgctaaaaggacaaaatgaagggtgtctacagatcacacaagaatttgttgggtacatccattaaaaggcaaatcgaaagtagaataagttttcaaagcctttcataagatgattcaaacacaatttcaaggaaatgttaaggttttcaaaagtgctaatgggaaagagtttttttaaaaaaaattctaggaagatattttcttgaaaacggtttcgtacatcaaagctcttgtaatgatacaccacaacaaaatggagtagttgaaaaaaaaaaaaaaacaaacatcttttaaaagttgatggatcgttattgttttcaacaaaaattcttaagtatttgtggggagaggcaattttggcaacaacttatttgattaataagatgcccacatgagttttgaaatttaaaactccatttgatgttttcaaaacttttttttttcccacatcatgaatttcctctgatttacctctaaaaatctttggttgcactacatttgttcacattcatcaacataattgtgaaaaacttgatccaagggctagaaagtgcgtgtttgttgggtattctcccacacaaaaaggatataagtgttttaacccaatttccataaaaatgtatgttacaatggatgtgaccttttttgaaataagatctttcttccataaggctcattttcagggggagagatcatgtgaagattcggatcctatgagttttctagagttgttagacagtgaagaattagacaatggatctagttgtggtgaaagttccggtttgggtttaggctcgggctatgaggagataggcacgagtggtggaaagaatatgatacatatttctcaagacccaaggcctacattagaaattggtagatcacctctagaaaatattgaacaaccacaaccaagtctggaaattaatatttaggtgctgaaaatattgaacaaccacaaccaagtctagaaattaatattttaggtattgaaagtgagggggaggctactaacatgcaaaaaaatgttcaaaacactagagaaataaatactgatacaaatgcaggtaaagaattgattgtttactcaaggaggaacctgacacaaaaaaatgatgattccactttactggaaggccatgactccaatccgaggacagataatctaaaaagacatgagttagataaaaactcttatttcgaatatgatcttcatacttccattttcccatctgtgtcataacatgatctgagtgttccaattgccaataggaaaggtgttaggtttgtactaaacctcctttgtccaattttgtgtcatataagtggttatctccctcatttgctgcattcacttcacaactttatagtgtacaaatttctaaaagtgtgcaggatgctctaattattcccgaatggaaggaagttgtgcaagtgggtgttcacagttaaatacaactataatgggtcactatagagatataaaactcaacttgttaccaaatgatttactcaaacctatggcatagattactcataaacatttgcaccgatgactaagctaaacatagtaagagtactcctttcaataaccgtgaatttggattggccactacaataattagacaaaaaaaatgtttttctcaacggagatctagaagaagaagtttacatggattatccttcaagttttgaagataaatttggctcaaaggtgtgcaagttaaaagaaaaaaagtccttatatgggctcaaacagtcttcgagaacctagtttgtgaagttcacaaggtcagtaaagaatcaaggttacacttagggccaaattgaccatgctatgttcatgaagttttcaatagagaggaaaagtagcagttttgatagtctacgttgatgacattattctaacaggagatgacgtgatagaaatgaacagattgaagagttgcttggcaatagaatttgaactaaaggacttgggctcaatgaagtattttctcgggatggaagttgcacattctaagaaggcaatggaaatatgtattggatcttttagaagaaacgggaatgagtggttgttgacctattgatactccaatggatcttaacatgaatttgtgggaagaaggcaaagaaacttcagtagatattgttcgatatcagagattggtaggcaagttgatttacttgtcacatagttggttggacatcgcttttgcagtcagtgtggttagtcaatttatgcatgctccttatgaagatcatcttgaagcagtttactgaattctcaggtacttgaaaaatacaccaaggaaaggattattcttttttaaaagcgaacaaagaaatattgaggtgttcacagacgtagattgggctggattagtaacaaatggaagatcaacctttgagtactgtacttttttatgggaaaatttagtgacttggagaagtaagaagcaaagcatggtagctcaaagtagtgttgaagtcgagttttgggtaatgacacatggagtttgtgaactattgtggttaaaaagagtcttggaggagctacaacaagaagcaaaacatccaataaagttatggtgtgataatatgacaacaattagcattgcatataaccctatcaaacatgaccgcaccaaacatgtggaattgatcgacacttcataaaggagaaacttgaagatgacatcatttgcttcctattcgttccttcaacttagcaaactgctggcattttggcaaaggtacttcttcgacctaattttgagcatttaatcaacaagttaggtatgatagatatctatgcttcaacttcagggggagtgtaaaaaagataggttttttagtttagattttttaataatatcagaatctattgattatgttagcccaagggttctcctaatcaggttttgatgataacaaaccgtggttaagtgactaattgctttaaattgttaagaatctcaggtataatctcaaggaccaaacgaatacgggataaagaccatttggaagacttgtgatcataggaaatgaatgtaagatgatagcatgagtgcacttaggatgttcatacattttcatgcatcttagaaaactcggtttattctttaaaacttgattttctttaaaacccgagttttatcaaatataccttaggcaaattgactcaaaattgacatattaactctcctaaagaccttgcctaagtattggaaaagaaagaaataaaaaaggataggttttcagggccaaaaggctcatccggtcgaggctatggccaaccggctcaaccggttggggaaccggtcgaccggtttcccttgtccggtcgaggtccggtcgagggagacacaaaaactttctctctctcccagtagcttcctcttcccggtcgagcctcaccctttgtccggtcgaggtctggtcgaggtccggtcgaagtccggtcgaggcaacgataacctgctatgcattaaatgctccaacggctagtgatccggtcgaccctttgctcgtccggtcgaggctactttctgctgtttttgtctcccgagcttagaaacctataaattgagagctcctattcatttatgactaagagaacaattgcattcaaagcctacctacctgttcttgatcaaaaaagctctcatcatctttcttagtgcattaaaccatcaattgcatattcttagtgcactcttgcaattcatcctagctttctcttgtacttgagccttccttaagctaggttgagagtttcatccttgtgtaaattgagtgtgaaagccttcaagtggttcaaatcttgaagagattgtgtaagagcccattggagccggaatccaagtgtaagacgattgaaagcttgattgtagcttcaagctagtgtaaccctcactcggttaggagattgaggagagtggacgtaggcaagggagtgccgaaccactataaatctgagtttgaattctctacctttatctctttcctttatttattttgtgcatatattgttgtgtggaaaaagattttgaaaaacccaattcacccccccttttgggtattttccttaattattcatagcctttgttttatcagattagatatttagtaggttgttatctttgttcttattttcatgttccagttttttagggtgttgagattctcttagaagaaatctttatttgtaatttgcagcttattcaataggatggatgatcatttttcccctaaaatcttcatagagtgtgacaaggacactgccc

SEQ ID NO: 11227 - DNA, 24390 bp, Vitis vinifera
  Intron number 2 from transcript GSVIVT01001869001 (locus G SVIVG01001869001) derived from phytozome v7.0 (chr-ID chr5 _random; pos 317724 to 342113)
ccttggtgagtagtttgttatgggcttaatctcatggataattctcttgaaatgccttctactataaaaagtatcatttattatttttatagtaaaacaaagtattcaaggttatgcaacttacttgattgatagacatttgtggtatttgtcacttcaacgaaaactttatgttatgcagatagaataaacagtagttcactctagtttttagtaggaagtgttatggtggttttatcatcaaaagtaattatgttttgcaaaataatatttaagatgccaatcaaatttctcatcaatactcttagaaagccatcgcctaagtttgtcttcccttctctcacctagttggattcaatgtttttgagggttctgaaattcattctagttacaagtgaagacttgtgaggatgtggttaaggttaggaaaaaggaaaggaagaaaagaggaaaaaaaaaagtgtaaaagctttgtctaattggactttcttgtaacttctcacctatttgtattactaacgaagattataataatgcctcaaataattatacctaacaaataatcaataactcttaatgaaacaaaacaaaaaaaaaaaaaactcaaatctcttcctctcataaagttggagcctaaaggctaaacacttcaagcttggaatttatgaaagatattacaagctaatgaatttatgagaatgttgcccaactgatcattagattgaaaatgaggagtggcaatttgcattcacatgaacatatctcaaataaaatgacaatgaacttctttatgttgcatttgaattcacagaaaaaaaaaatctcaaataaaatgataattagctttcatatgttgtaatttctattgcatccacaaatctcaaataaaatgacaatcaacttccttatgcttggtagattcatgaaagacgggaatatttgcaataaagatggtaacttgattgtcgcaatgcatcgaaataagagtaggaacatcaaggctcatctttgtaagaatggagcaaacccataatctcattagtagtgtgaaccatagttagatactcggcaaataacataagcaattacaaacacataacaaaataaaatgaactctaattcgtagtatctaataaaataaaacataacaaaaacatttttctccttaggtggacgaataactttaatttagttttttttttttcactttcctagttatttcttttagatgtacaagatctcatcctcaagggcaataaagattgagaaaatgcaaagggattttctttgatcgtgagggaaagagataatatcttattaattagatcaaagtgtgaaagcctaaggggtttaggaacatatctttgaggaataagtcccctttagggcagtggttttagagatttccaatagagagtattgttctttggcacaaggttattttaaacatctataggacacacctaatggttgggatggaaacattttagttaggtggccacatcatttccctaggaaggccattgctaaggttttgcaagatttctctagtcacacctatttttgttgtgggaaatgggacataaattcgtttttggggctaacctttaggttatcagttttctagtctttgtagagttacatcagttaaaaattctcttatttcatttatctttggactcttttcccctttaacttctagttaaacctcactgattcaaagatagaggatcttgaactatgtatgattccttagatcttgagagtttggtcattattgccttccaggttattttcaagcaaatatttcttcttaatcttatgtaatcaatcaactctagctttcttctatctatccaacaaaattcacaaggtaatcaaaagccccatcaaaggtcaaggcatttgcttgcttaatagcccacaagaaggttaattctaataacttgtttcagctaagaaaacctttcaaagcctttagtttggatctttcactttatgtatgatcaaatagatcaccttttctacattgtcatatgactttagagttaggtacaagctattcaaactagctagttggattgggttcctcataaaagtgttaatgacatgttgagaatttcttttaggggtttggggagcattagtagaggtagatttctatggcaaatcgcttgtcttacattaaatgaattacctaatttttttagcacattaaagaataaatattttaattaaattttttttttttttactatttggatgaaaaataataagtaaaaaatagataatataattgaaactatatgtaatttcaacatataaaattgaataaatttgagggagaaaaaaaaaaacttctttatttttctcttattttcaaactgattattgtattaatatttatacatgaatggttgaggctgtctgacttagaaaagaaatctaatccttgatcttaggagataaagtctctcataaaattagaatagaaaatacaactatatcacagttatgcacacagctgtacattctagatatccacactcctcctcaagctgggttataaatgttgatcattcccaacttggatcttaagtcctcaaagttggatttagaaagtgtcttggtaaggatttttgttgtctggagaactattggagtgtaaactaatgaaactaacttttcttctatcttcttcttgataaaatggtgatctttccaaatgctttatccgatcatgatgaaccaggttcttagcaatagttgtagcaacttcattctcatagaacatcttcataaaatcttttactaaaatttttggcttttttaggagtctctttaaccacattccttctcagattctatgtgtcatagctttaaattctactttagcattgctccaaattacaacaaactatttcttacttcaccaagtaaccaaattcccctaaacataggtgcaatatcttgaggttgatctttgatcaattatgaagccaggccagtatgcatctgaaaaaatttcaatgtttctcttttatgttactttgaaatagagtctatttcctagagtcattttaaaatatcttagaatacgatacacaactttcatatgttcctccattggattgttcatgaattggctaaccacattcactaaaaagagaatgtttggccttgtgtgagagaaatagatgagtttccccacaagttttttatacctccctttatccactagagtacatccttcaacagttcctagtttagtagtgtagtccataggtgtgtctgcatgtttataaccaagcttctcgatctcctttagcaagtcaagaacatacttacgttgagagactacaatacccatttgttatctagcaatttccatcccaagaaaatatttgagattacccaggtctttaatttcgaactcataggcaagaaaagtcttgaatttgcctatttcttcctcatgatctccggtcaagggttatgtcattcacataaatgatgctaatagcaattctttacttggctatgtgttttacaaacagaatgtggtcaaattgacattggaagtaacaaaacctctttacagcattggtaaaacaatcaaaccaagctcaaggagatttcttgagaccatatagggattttttttagtttgtagaatttgttaatgtttgtcttagtctcaaaacctaaaggaatttcaatatgcacttcttcttctaagtcaccattaagaaaggcattcttgatgtccaattgatgaaaaggccaatctcagttaacaactaacgacaacagaacacgaattgtgttcaatttgacaattggagcaaatgtttcttggtagtcaattctgtaggattgcataagatcttacttctttccttttaacaattggcaaattgagttcatcatcctctgattcattaggattagaatcaatgttccttgagtgtgtctcgtttaggacataattcagttcagtttcatgtactagctcgagatgtgttcattgctctatatcttcttgagacttttttttttttcccttgagtaaacaataaactcactattattgacaatttgagattagtttaggtgaagaggagtactcggctcagtatccacgaattcagtagtttggagcgggagacttagagtaggaaagataggattagagttgtgaactataacagactcaagtgtttgaggttcggtcatggtttttatttctcaaaactagcattcttgaattctattctctccttgattatcggttttggagtaatagagctgattttcaaagaatgtcatatccatgaaaatgtagaacttttttgtgacaggagagtaacacttataacccttttagtttggagagtattttaggaaaatacacttaatgaccctaggatcaagcttactccgatgttattggggaatgtgaacaaaggtcgagcaaccaaaacacattcaatggaatggaggagataagtcgagccctagggtatgatttgagaaagactttgcatagtgtttggaaactcaagacatgagaaggcattttattcatgagtagattgcaataagtacagtttccccccaaaacttctttgggacatgggagaacataagggtcattgcaacttctaacaagtgtctcttctttctcccaattatctcatttttgttgagtatcaatgcaaaaaccttgatgaactataccttctcttaataagaattcccctatgatagaattgaaataatctctagcattgtcatttttcaacacttgtatattggcatggaactaggtatggatcatgttatagaattttttgaaaatttgacccacttctgattggtctttcattaggaatatctaagaaattccaatattatcatctataaaggacataaaccatttagtccctgttatgttctctatcttagatgaccctcaaacatcaatatatataatggaaaaatgatgagatgatatgtatcgttgaattatatagggcttacaaacatgcttggataattgacaaatttcacactgaaaaacatctgaacttttagtgaataataatggaaagagtttttttagatataagcaactaagatgtcttagatgatagtgctacgatataacatcactatctttattagaattaaaaaacaggaagagactattttttaccaactattggttgacattgtctttcaatataatcaatcactttgaatatatagtcttgaatacacctcaacattgccaatcgtcttccccgaattcaaatcctaaaaaacacaatgatttgggaaaaaattagtaaaaattcttttcctgagcaagtttactaatggacaaaatattgaaatccaagtttagaaccaaaataacagaatcaagagttaggtccttagagatgacaacagaacctgtaccggccaactttgagaaagaactatcagctatatgaatcatataatttctaaaacaacgcatataattttgaaaaattgtgacatctccagtcatgtgatcaaaagctcatgaatgaacaatccaatgactcaaattttccttttttacttttagggcaacaagcaaaatacctttttgagctaaggatcaaaacccaatgatagaattggaggaatttgcctcttgttggaactggtttaacattttttgcaacaagtctaattgctctttgctaaacggaatggaattaggtggtgttggcctatcctcaatggagacatggtgtccttgtctttctttgtcattttaaggatgtgatggactccaatcctctggtttcccatggattttccaacatatgtttctggtgtgacctagttttcagcaatgatcacaccaatgtctcccttttcttgattagttgtcattagaaggatagggaggaccctgagccgctagggttgaacccttggtgatagataggttggttatgacccaacctgactttctttctactttcttctcggttcacttctgaggctacttctcaggtgttgggtaaaggtttagttcccaatattttgtctcaaacttcatccagattttttatcaaccctaataaaaatttgtaggtctatttcttcttaatgatcttcttatatttgattgcattcgttgggcgatcccgtcccatttggtggtttcaaacatgtccaactgttgccaatagtgagttagaaaaccgaaatattgagtgatagactaatcaccttaacataaatcatggaggatcccttctatttcaaatgtttgtgctatgtcttttgtatcgaaataagtctcccttgctgcttcttagatttcttacatcgtttcatagactataaaattttcctctacatcattgttcattgagttaattaaacaagacataaccatattattctcatccttccatcctctaaatttcgggtcttctttcataagttgaggcactacaccaatgaggtaatcgttcttccctttaccgcatatgaacatcttgactatgtgagaccattgaagatagttttggccattcagtttgtgtctagtaatgagaaaaacagcaccatccaatcctccattggtgctcgaaataggagcttcttgagtggaggtgacttctaaggttaagtagtccttcttagtggccattccatatttggtcatggacaaattgaatgattcagaattagctttgataccatgaagaaatttgagggagaaaaaaaaaacttctttatttttctcttattttcaaattgattattgtattgatatttatacatgaatgactgaggccatctaacatagaaaagaaatctaatccttgattttaagagagaaagcctctcgtagaatcaagaaataaaattaaatagaaaatacaactatatcatagctataacacagctcaaacgaaaatgtgacatagctataacacaattgtgacagagctatagctgtaacaaagttgtgcataaagctatacattctagatttccttcggatttccacaaaaattcattaataaaaggaatattttcaaatctaatttcaagattccttaattaaaggaataatttcaaaattaaatattgatgtgtaataaattttattaaaactcaaagatcaaattaaaaattccttaattaaaggaataatttcaaaattaagtgttgatatgtaatatgttttattaaaaatcaacataaatacctaatgctaaaataaatatctaatcaagatcatattaataaattttgtttaatttgagagggagagcagttgtcaatgctgaaataacagtgagaagctaccaaagttgttaagaggggcttgagatgatggtggtggcagcaacatttgtaacagtgaagtattgtggtgacagcaagagtgagggctaaggttttttcaatttctcttctttgatttcacatactctgggatctttcaggttaaagactttcttttttcttttcaaaattttttttcatgccacctcaacaaagagaaatatgcaggggcttcacctcacatagcagtgtgctaaaggcacactggaagtgtgtcttagattagatttaatcctgaaggtgtacaccttttgggagtctcatcactttttctaatgcctcaatgcgttttgccaatgccttaatgcatctttccaatgtcttgtctcaaaaaatcctttttgaaacctttgcaaagcccatgaaattttggtaaaaactcagagaaaacaacaattgaacttttgtgaccccaagaccctagagggaagccagtttattaagtgcgcagcagttaaaactgcctcttccctatatgactttggactatttttctgaaacaatgaggcaagtggcaacaggggtcaattttttcattcaacaatgccattttgttgtagggtatctatgcaagaggactagtgaataatgccctctttttaaaggaatggagatattatttgattgaattactccctctcattatcaaacttgatagttttaatttggaccccaaattggttgctaatcattttctaaaaataagaaacacactgctcacatcagatttgtttttcagaaggaaaactcaagtcactctagaacaatcatcaataaaggactcaaaccaccatgtccttaaaatacttggaattgcgagggcccccaaacattagtatgaattaatgcaaaaggggtagaagactttctattagtcaaaggaaaggacaagtgatggtgtttggccaatttgcaagtcccactgaaaaatgttaacatccaaatgtgaataataaaggaaacatcaaggaagtaaagccctcccattcgctagcatgtccaatcattctccccataatttggtcctgaaaaacacaataagataggaaaattgttacattacaatttcagtctttagttatttgattaattgacaataggttgactgcaagtttaggatgtgatacatattggagtgtgaaagagggtgtgatattaatggttccttgtccagcaatggctgcaggcatgtcatcagcaaccttaattctttagtgtctagggcatgaattgtatgtagtgaaacagatagaggtgtgggtcatgttgtctctggcacctgaattgatgatccaatgcttagtaaacagtcttttgagatgctaagagaatgagaaacaagatacttacatgactgccaaagaacaagaggcccttgacttgtgtttgaagtctttcaatcttgtccttgttaaaagcaccattgttagcagtaatgaagcaacattatcatcaaagtgagccatattagcttgtcctccttgttggccagttcagtttctagtgcctacaattaaggattgaagtttccaaccagtttctttggtgcgtcatggcttcttacagtaattacaccacaggccatctttgttgttgcatggtcgaggcccctcatttgtttccaaaatctacattgctgccattatttttatttggcattacactaaaaggaattattatagccagggttgaacttttagaagttggattatcaagcatcaccatctgtcatccttctttagcttatatgagtgagaagactttggttaggggtggcaaatattccttgccaagaacttggacatgtatttgatcaaattttgctttaaggccaacaagaaattcaaaaattctctcatgtttgaaaaataattgcaataacgtaaaatcttcactacacaatcctaaaattctgatagtagtctaattcaagccataatcttttcatgatataacaatattcaatcacagatgaaataccttgtttggcagttgtaatctatgaatagatcttataaatttgagctacatcatgtattttggaacatgtttgtcgaattgcctcccatatctcccacatagtagtgagtagcacataaggtctgttgatctcttgctgcatagagtgccaagttgaagaataaaaatagaaaagtagtaattttatagagagaattaggcaatcccgtaatcaaagggatttgatgtaattaagttagaaaagttcctaatttaggtactaggtgtttttgtatatatatgtgagtctctgtacaagctaaatatcaaggaagagaattttatatcttatattcctttcatctctcttcttttacatggtatcagagccttaggctcataaatcttgaaagagaagaattttccggccttcattgccaagttgaagaccagagttgaccttcattgtcaacctcgaagttcaagttgaagactagagttgaccttcattgtttacctcaaagtttcctcgtctgaatcaagccattgcaacaaacccaaatcgcaaacgcagagccataacaaccatcatcatcatgcccttgcacccattgtcatgccactgagattgcatcgcaactcaagtctctaccttacatcgccaatgtccttgcgaactcatcgtgaaacctagattgcaccctcggcttcgcattgataccagcttctcgcaagccatgtgctccttgcatatgaactcggtattgctcttgcaagccctagctacctcggctttgtttgtcttctttagcatcgttgatctctcgttttttgagtccttaccaatgctaacagctaagttccattcctctctacatatgtttttttggttgacctaagtgtttaaacctttaatcttagccccttatatacacatacatacatacatacatacataaatatatatacatacatacataaatatatatatatatatatatatatatatatatatatatatatatacatacataaatatatatatatatatatatatatatatatacacttgggctgtatttagtgctttcgagtatgtctagtgaactgcatcctaaatgtctttagcaattgtcaagaacatacatgtatcattgatttcaaacatcattgagttccacaaccatgccataatcattaagtcttaatcatccaaggcatcaaattgagggtctcttctcattggtctagttcttggaagattactaagtttccattttcccttcagaaaggtacggacaagttgtgactattttaagtagttttccccgttaagcttgtatgccacttgaacattttgcaattcttctatgttgtgattggctatcactccttcagatagagcaataacaacaatagtttctgatacctctaaaaaaaaaaaaacaaaaaaggattgcttcaatagatgagtattatcatctatatatagaggggaatgtaattattataaaaatagtggaatgttgagtttttccttccacaacgatagttaggttggaaggcgagcacagaggaaattggtgctcgattacaaagcatagcagaggctctatttatgtcttaggttttgaaaaggaagaagtcgggtggttgatcgaacatttgacgaaagccatcaaaatgaagagtcacttgggtttcaacagaaaagtacaggggaaaattctacgtccatttgatggaagtatgctttaacaacaacagaaggttcataaggatttctgagttcgctaccaacagaaaaccaacttttctggttattcctgagggcgagaagggcagagaatgggagaacctaaaaagtgcgttgtcttcaatgctggtggtccccccttcgaatgcagatgaaaaaggaaaacaatacagagtggaaaggtttatccacaattacgtgggtcctctgtactggttttttgcgaacatagttagagataaaggaccaaggagaggtggacttgttcctgttggaaggtgggtgcgagccatggtgtgtaaatgcaatgcagatagtgttaaatgggttgaggttggccgagttgtggcgagaagcttaggaaagaaaggagtggctacaattgtgcccttctcaggcgaaaaaggagttttttttttgtagaaacgatagaggaagctatctttctctaggatttaaggattcttaaaattgagggagagaatatagtccagttgagaaggtggtcgccaaaggaaaattcagaagttgaggggaagttcaaaggaggttggattgaattacggggtttgccatttcatctctagtctgagttacatctaaagaaaatagtggagcagtgggggacggtgactgaaattgattggcgaacgttaaaattgtttgatcttagcaagacaagggtaagaattgcaatgaaggatcagttggttctcccagctttgatcgagatgatagacggggataggatgtttattatttatgtcgcagtggtcggagttgaagaggttaggagaggcagagtaataggtgagtcgactcgggaggtttttgaatctcacacggggacaagtggtggaaggcgggaggagagaaatagatcaacggctagaggtagttttcgtgttagggaagctggctgaaagaagaagggagaagaaaggagtttggctgaagttcttctagtggggacacgtggtaagagtggtcaggttgtggggaacagctggattagtttgaattcaaaaaaactgaactttggactagatgggacagagatggtaggcgtagctatggccagtgagggcgaggccttctcagatgagaatggccgagcctttgagagaaaggtccagtctcttcccaaatctagcccactaattgttgcaaaagtgggttgtaacttaaaaggcccattaaggttggggcaaggaacaggagaaaagaagccctctgaaaagcagggttcgttacgaagtgaagatgtttctgcagtgggaaaggggaaaggagtataagttggtcctattgttcagacgagaggctccgcgaggaaggaagtgaagtttggttcaaagaagatgtggactaccctatttcctccaagttctgatcgacgacaaggatttcgaagtcgcagtgagcctcttttgctcaggaagccatcgtcagatagcgaagagcttccaaaggaggaggctttcggggtgggagctcaatgggaacgaggattcaatgcgagtcctatcatcttttgccgatcgtcaaggattcgaaagcggtgttcgggggaaggggcttcgttgtctagaggcgaagaggttgtgcgcaaacccttttttgaagaagacagagaaagattttttggccaagtagggtccgatctttgtggttcttcagccacgtttttgccttctaatccagaaatcagaggtaaagggctcagctttatggggaattgtggaatgtcgatagcggaaaacttggaggtaaactcgccctcaccttctcagtcaccctggtcttattttcccatttcttctggtttggcacttccatttctgagtccttctattcctgatctccctagttcagtcattcagtctcaatttcctatggaaaatagaagtaatttctgaaattttttccaaaaaacacgatgatggtactttatgtcaaaattttgttggcaatcctaaccttattatggtggagtcccagtttgcttattcaaaccagttgtccgagagtttcaaccccattaagtctaaaccaaatttgcctattgaggtttccaacctggttacaattagccagggcgatgttatggtctccccattgggcgagttccaaattgaaggcttgtctcctaggaaaatggttaaagtgcgtgatgttttaagctatctggattttaaggtatattccaggaggaagaacagatgttctacaggtttgtgagacttgttggaactagtttggaggtttaaggtatgtgaggtttttccatgaaaataattagttggaataccagaggtttgggattaaggaaaaagcgaagggtggttaaagattttctgaggttagagaatctggatgtagtgatgatccaggaaacaaaaaagatggagtgtgatagaaggtttgtggtaagtgtttggaaggtcaaaaataaggaatgggttgcttttccgacgtgcggggctttaggtgggattttgattatttgggactcttaaaaattgcgcaatgtggaggtggtaataggatccttttcggtgtcagtcaagtttgctttggatggatgcggacctctatggttgtccgtagtttatggcccaaacagtcccttacttaggaaggatttttgggtggagctgttagacatttttggtctatcttttccgttatggtgtgtgggcggtgattttaatgtcataaggagaagttcagaaaaattgggaggttctagtccaacttcaagcatgaaggactttgatggttttataagagaatgtgaattgcttgacccacctttatggagcgcaccattcacttggtcaaacatgcaagagtctcccatgtgtaaaatattggaccgatttctttactcaaatgagtgggagcattcctttcctcaaaaccttcaagaagttcttcctagaaggatatcggattattggccgatagttttggataccaacccatttaaatggggcctaacaccttttaggtttgagaatatgtggttgcaacatcctattttcaaggagtgctttagaagtcggtggagaggttttcatggaactgggtgggaaggtcacaagttcatgaggaaattaaaatttgttcaggccaatttgaaagagtggaacaaggtttcttttggagtgctaaacgaaaggaaaaaaaaacatcctgaatgaaatagctaactttgatgtcattgagcaagtagggggtccacttctaaacttttagttcaaagagctttaagaaaaggggagttagaggaattaattttgagggaagaaattcattggaggcaaaaagttaaggtaaaacgggttaaggaaggggattgtaactcaaagttttttcataaagtggctaaaggcaggcgaaataggaaatttatcaaggtgttggagaatgaaagaggattagtgttgaataattcagagagcatcacagaggagattttactttactttgaaaagctctactcgagtcctactggagagtcttggagagttgaaggcttatattggtctcctatatctgaagagagtgcgtctaggttagactcctcttttattgaagaagagatttctaaggccatttttcaattggatagggataaggcgccgggtcctgatggctttaccattgtggtgtttcaagattgttgggatgtgatcaaagaggatttagtgagactgtttgcagagtttcacagaagcgggattatcaatcaaaacactaatgcctctttcatagttctgttgcccaaaaaaagcatgacaaagaaaatctcagaatttagacctattagccttatcactagtctttataagataatagccaaagtgttatcagggcgtctaagaagggtactacacgaaattatccattctactcaagacacttttgttcaaaagagacaaatattggatgcagttctcatagccaatgaaatagtggatgagaaaagacattcaggggaggaaggagtcgttttcaaaatcaactttgaaaaggcttacgaccatgtgagttgggattttttggatcatgtgttggagagaaagaggtttagtcctagatggaggaaatggatgagaggttgtttgtccacggtatcttttgcagtcttagtgaatggaaacgctaaagggtgggttaaggcatctagaggcttaagacaaggagaccctttatcccattatttgtttactttagtcgcagatgtactgagcaggatgttattgagagcagaggaaagaaattcgttggagggtttcagggtgggtaggaacagtacaagggtgtcccatttgcaatttgcagatgataccattttctttctaacactagtgaggaagatttgcagactctcaagagtttattgctagtgtttgggcatatttttgggcttaagattaaccttgacaagagtaatatttatggcatcaatcttgaacataatcatctttctaggttagccgagttgcttgattgcaaggcttctggttggcctataccctacctgggtcttcctttgggagggaatcctaaggcttgtggcttttgggatccagtgattaagaggatctcgagaagattagatgggtggcaaaaggcttatttatcttttggagataggataactcttatccaatcttgtctcacccacatgtcttgctacttcctttctttatttaagatacctacttcggtggttgcaaaaattgagatattgtaaagggattttttatggttaggggttggggaaggtaaaagagatcttcttgttaattgggatgtagtgtgtaagccgatggcaaaagggggtttgggatttgggaagattgttctaaggaatgtcatttttttagggaaatggttgtggaagtaccctagggagggttcagctctatggcattaggttatttaagcatttacggatcacactttaatggttgggatgcaacactatagtcagatggtcacatcgttgtccttggaaggttattgcacaagtctttcaggagtgtttcaagtttactcggtttgtggtaggagataggaaaataattcagttctaggaagacttgtggtggggggaccaacctttgggatcccaatatccaagactatttagagtagtcacggataaaaatattcttatttctttaattcacggttctactcggtcccttctcttggaactttaattttcgccgcaacctatccgattctgagatagaagatttagaaggcctcatgcgatcacttgattgtctgcatttgtcatcttcagtttcagatgcgagctcctggtctttatcttcttcagggttttttacagtcaaatctttctttcttgccttatcccaatgttctggttctcctccagttttccctactaagttggtttggaattctcaagtccctttcaaagtcaagtcctttgtctagttggtggcacacaagaaggtaaatactaatgacttgctacaattgagaagactctacaaagctcttaatcctgatatttgtaagttgtgcatgaggcatggagaatcaacaaatcatcttttcctacattgttctttgacgatggagttgtggcatagattatttcagttagccaagacggattgggttcccccaaggagcatttctgacatgttgtccattaattataatggttttggtttatctaagagagagatagttttgtggcaagctgcatgcattgctataatttgggttgtctggtgggaaagaaatgctaggatttttgaggattaagtaaagaattcagagaatctttgggattctgttcatttccttgcttctgtttgggctttttattccacagtttttaaagggatttcccttaatgtgttacaacttgattgactagcggcatgtatttcctttgggttagtctagtctagagagtttgttcattattactttgtattttcttgttttcgtattcttgtagtttagttttctttggtgggatcctcatccttctcttgtacttctttttttctctcaatatattcctttgtcgtgtcttatcaaaaaaaaaaaaaaagaactagacaagggagaggagaccctcgatttgatgccttggatgattaagacttaatgattatggcatggttgtggaactcaatggtgtttgaaatcagtgatacatgtatgttcttgacaattgctaaagacatttaggatgcagttcaccagacatactcgaaagcactaaatacaacccaagtgtacaaaataaaagttaggaccagagcggtgaaatagggaaatgatacaataatgaagtatactaatatgttgtaaaatctatggcaagaacttgatcaccatcaatgcattaagacaaaatgtcctaaggatgcaacaatcttgaagaattatatagaaaataatcaagtctatgatttcttagttggtctcaattctgagttaaatcaagttagagttcaaatacttaacaaagagcttccaactttgaataagactatttctattattcgagcaaaaaaaagtaggaggagtgtcatgcttaaacctcataatggctcgactatggtcactagcaaaggcattgatcaaaagaccgacactgttgataacaaaaggaatgatcaatcaagggcttcaaaccgtgataatagggataacttatggagcatttattgccagaaagctaaacatacataggagaaatgccagaaacttcttggtaagccaaccacgtctcacaaagagtagggttacaatggagagcagctgagggataatgggtaagcacacttgtcttctatttagccagttaaagaaaaatccttagaacaaaacagattcaatcaggaggagattgaaaaattgaaatctttgttgggaactcttaagaaacttttaggtacctgctcactggcactttcaagtaagtttcttatcttaaggtctttaatgaaacctttaccaattcttaggttttagattcaggtgtcacaaatcattgactcattcaacacaccaatgtaacaactataacccttgcccaatgattcgtccctaattggtgtactattatcctcagacgggagttatcaacaaaatttataaacctaattcaccatacactagggtagcataactagcatagtatagtggttctaggatcgtccacagggatgggttttcatatcacgcgtgatattagttaaagtactgaaatcgtgttttttcttttatgagttagctttaaaagaaaacataattttggttgaaaaaggttggttttaagttaaccaaaaatagtaaatgagattaattacaaagaaaaggttttttggagttttaggtcactaggttcaggttccttggacaaaagggggagattccagatcttttcctcgcattggggataataacataaagaatggttatcttccgaaccggtgtgtatttagcaatcaagatttgatcccactggtccatgaaagattgcagttgcttcccattactggtttcaaacactaaagacctctcactgtgaatcatctttcaatggctcgtaagagataactaatcacctctcactgtgaaaagcttaccaagtattggccattctaggtaatcctacctttaaaccacctcctagaggctcgtaagagataactaatggatctccagggagaccgaaaagcttaccaagtattggcttaggtgattttaagggattttaagttaaaccttaaaaaataaaaaccattaatgggtaacaactctcctcatttaaagcaaggaaaactcccacctttgtatccggatcccttacctagcttccttcagtccaagaaacgaaaaacctacccactcatccttcgaggcctcagaggatgtttggctagaaagaaaatgaaaagaaaattcgaaggaaaggcagagcaagtgctctgtaaatatatttcttactacgatccctttttttcttttttttcttttacaagatacaagagatatatagagagagatctttttaaccctcctttaaacttcctaaccaagaaatcctatcattggttggttacaaggaaaaaatagggaattacacaaaataaaaatcttgagataaaaatctggagataaaatatctggagataaatatctggagataaaaatctagcggaatcggtgcgcaaatatttggaaattacacagggagatttcgcaggccatgcgagatttcgcatggtgtgcgaaattcatttatggcttggctcttcagcatttggtttcgcaaagcttgcgaaatttcgcacaagttgcaaaattcaattttcttagtcctgctctttgtcctgcagcttttactccttttggcatttcgcatgctatgcgaaagttttgcatagccatgcaaaattgctggttgctagatttcttctctgattctcttccttgcatacttgattggcttggcaaaggctacgaagctctccaaaacttggattcttcatgtgtttgagcttccacttgctttgtcatggattatacaaaattctccctcatccttggttcgttttaatgataaaaaagctataaaaaacaccaaaactagccaaaaacttattagaaacacttgcaagggtctttaatgtgccaattgagttaaaaggtaataaatactactcaaaagtgtttaaaagagtttataacaagctataaaagagcactttttgagtagtaatcacccaagcaataggaaaataaccatagtagatggttcattaaccactgttgtaggtgtaggagatatctaaattagtcctacactcacttaaaaatgtgttcatgttccaaagttgtccattaatcttgtctccatacaaaagcttatacaagatttgggttgcaatgtgactttttatcctactcactatatatttcaggataagacttagggaagatgattggacttgctaaggaatggaacgggttatattaccttgaaaaatcaaatgagtcatttgtatcttttctttctaagcatcacctttttaataaagaaaaaaaatatgacatcatcatcatagacttgaacatttgccatttagaactcttaagatcttctttccttctttatttaggtaattagatgttgatagtttccattgtgatgcatgtgaacttgccaaatacaagcgttcaaccttccccactaataataaaagaagttcagagtcttttcatttaattcttagtgatatttggagcccttcccctatccctaatatatctagtgcacattggtttatgtctttcatcgataattgtactagggtctcttgaattctcttaaacacaaatctaatataagttttgttcttccaaattttcataacatgataaaaaaccaatttggtatcactatcaaaaggtttcagtccaacaataccaaagattatttcaatcaagtcctaactccatactttcaatataagggattaattcataagtgatcatgtatcaacaccccgcaacaaaatggagttgttaagaggaaaaatggtcacctcttcgatacaacatgagcttctctattccaaaaacatgtgcctaaattttattagggggaaagccttcctaatcgccacgcatctcatgaaccgattaccttcttaagtcttaggtttcaaaagtctcatggaaatattcttattgttttatcctaatatgagaaccacaaaccatctcattcctaagatatttgggtatgtgtcctttgtgcatgttcaaagtccaaataggggaaaattagactcaaaagcagtcaaatgtatttttgtgggatattcctcaattcaaaagagatataagtgctactgtccaccatccaaaaaaaaaattatctcagcgaatgttactttcaataagagtgagtcttattttcccactttttatctttagagggagaattctattgaggaagacaagaattaggattcctatttcattgattcctttctcattgaccctcctaaagtctttggcccagtgtctatcccaatatttgtaccctcctttgaacctgaatcgtagtccattgagtttgctcttgagaatcgaatgactagcaaagtatccttaaggaagaaagctatagaccttagacttatacaagtctaagaatttgaaccagcttttgaaaatgaggtaacagtctctcatcctcccatacaaactaagtcagaactttagtttgaaaaacctatagatcataatctatctattgacatcaggaagggaacaaggggacacactaaacgttctttgtttccactttcctataagagttttcttacaaatttaaacaagattcatattcctaccactctatcaaaggccttggagaagaataaaacttgggaattggtagatttgcatgtaggaaaaaggtcagtggaatgtaagtgggtttatactattaaacatagagcaggtggaacattagagaggtacaaggcaagattggtggctgaaggatacactcagacatatgatgtggattatctagagacatttgctccagttaccaaaaggaacacaatcaaaattttgttatcattggcagcaaattataactaagatctacaatagtccaatgtcaaaaatgcatttttgaatggagagatagaagaagagatttatatggaagtccctcttgggtttggcagtgacctagccattaaaaaggtgtgtaaactgaagaaaactctatacaggctcaaacaatctccaagggtgtggtttggaagatttgctaaagtgatgaaaaacttgggatacaaacaaagttaatgagatcatacatttatcatcaaacatctagattcaaggagagttacagctcttttggtatatatagatgacatcatcatgatgggaaatgatgaaaaagggagacaggctatgaggcaatgcttgactaaggaatttgagattaaaaagttaagaaggttgaaataattcctaggaatcaaggctacacattctaagtagggaatttttatttttcaatagaaatatgtaacgaaccttctcaaggaaacaaacaagttggtgtgtaaaccagcaagcacaccaatagatcctaatcataaatttggagagcttgaggaaggtgttgcggtaaatagagagatgtattaacgtttggtaggaaaactcatttatttcgtctcacacaagaccggatatagcatatgttgtgagtgtgattagccagctcatgcacaatcctaaagaggttcatttgcaagttgctaaccaagtgctatagtacgttaaagggtctccaagaaagcatcctatttaaacgaagcacgggattagtacttgaagcaaacacatatgcaaattatgttggatctatggttgataaaagatcaactactcggtattgcacctttcttggtgggaatctagtgatatggagcagtaaaaaacagggtttggtggaagcagaattttgtgtaatggcccaagggactttgtgaactactatggttgaagatcattttggaaggtttgaagattaaatgggatgacccattgagactttactacgacaataaatctataatcgtattgcacataatccaatacaacacgatcgaacaaaacacatagaaatagattgacattttatcaaggagaaactaaatagttgatggatctatattccttatgtatctactaaccaccaacttacagatgtactcacaaaaggttttagcagtataaagtttcaagtaagtgtatccaagttaagaatggaaaacatttattcaccaacttgagagggagtgtggaacaatgaaattagaagattttgtagagagaatcaggcaatcccataataaaagggatttgaagtaattaagttgggaaagttcctaatctaggtgctaggaacttttgtatatatatgtgagtctctatataggctaaagatcaaggaagagaattttataccttgtattccttccatctctcttcttctacatgccaaagccatgatatgatcatagaagttgcctcatcccacacaccaaatctaggatcatatttggcccgatcaagtgacttaatttccctttgcctttgaagaacgtcttcaccaattgcgaccaaaccaaataattttgaccatttaatcaaaataatgtgtgaaggttttgctattctccttatgatgaagattcgatgttgacgtttgaaagactgtagagattacttttgatattttagacatgattggtgagaggaatgggaagagaagaaaaaaatgtggaaacaaaggaaaaggaataattgtcgatgggataaacagaaaaacaaattaatacttgtcggcaaagaaatcatgcgatcttagaaaaatttcagcaacaatgaaagctgaaagttttcctataattctgatactatgataaagaagaataattcatttctttctgaatgaatcaatacatggtatatacagactcctctacactaaaagggaaataattacctagttgtacaattcctaaaattcaaggatcaatctctaagaatcaggatcattcctaactttgcattatgtttagtttccaacacaggttatgcacattaaatagttagaaacctcaagatagattaatttaatttggtgatttatattatatttttgatatggggatttaaataacattggtcaggctaatttattcaaatatagaaacactcttactaacacttatatattaccttaaagaacccacttctactctcagtattctataactgtcacatccatgctgcaagaaaagttatttcccgctgaacaactaaggaattatccatcataagattccaagtttagaatacccttactagtttggattttgggttaagtctatattatttaattataatcaaagaagaccattcaactaaatggaccaatattcctgccatttgagattgccaatgatccttttaacataattaacattttattgtatggaaaatagtcttctatgatgtaacaaaattaaatctaatatttaaaagtcaataaataaatggcaatcgccaatcaaccgcgcatttttatttcaaaaattagcaaattgttgcaactacttaaaagttaaaacatgctatttcaggaaaac

SEQ ID NO: 11228 - DNA, 6757 bp, Vitis vinifera
  Intron number 22 from transcript GSVIVT01024033001 (locus GSVIVG01024033001) derived from phytozome v7.0 (chr-ID chr 3; pos 1632217 to 1638973)
cagtgctgaatccaaagctgactattgtcagaaaggtattgtcctagagttcaatttcattcaaaatagcatatggtggatttatttacttctatagatcagtaaactatctaacatcatgaagatgaggatcctttaggtgcatctgaaggtttcttggtggtgattttttttttttttgaatagataaatacagagaaaatatatattaagaaaaaagggtgcttaagaggcaacccaaagctcgccaaaagacaagaacaaaaagaagcaaaaactcaccagcctccatctagaacccaaccaatcaaaaaagttgattaaaggtaaaggtcctacatctaaacaagacttagaaaaaagacttagagcaagaccaaagattacaaacaaatgaatttttcattctttgaatcgaaatatcctcattaacaaaagctattttgtttctttccttccaaaccatccaaaataaacaaagaggagctgccatccaagcctttctacgcttcttgcccacaaaggaaccatgtcaacctagaagaatgtctctagtcgaaagcggaaggacccacttaacaccaaacatagcaaaaacaagctcccacaaaaccctctcctcaaagcaatggatgagaatgtgattaatcgtctgctcttcagcacaacaaaggaaacatctattagctatgttccaccctttccttttgagttgatctagggttaggaccttcccccacagcttcccaagcaaagaaacccaccttagtaagaacacaaaggctccatatgatgttccacggaaacgggactgcacatctaggttcaagagtactataaagggatttaacaaaaaaattcccgttctttgtctcgttccacaccaccctattctccaaaccaaaaaatagtctttttccttgtagagtcaaaaggaacctctccaccacttccacctcccaattattgaaagatctagagaaacggggattccacccctccttttccccaaggaatcccaacaatccactacccacgcatcttttgaatccgctaagggatacaaagaaggaaaagaatcacaaagggtatcgttcccgcaccatttgtcctttcaaaatctcactcttctaccatcccccatagaaaaagcattatttttaagcatcaagaagccttcctttctaatttccttccaaaaccccaccccatagccctcccttacttcacgggtactccaacctcctccttcctcaccaaacttcctaccaataacaagcttccacaaggactccttttcaactgcaaagcgccaactccatttgcacaaaagggccctattgagaatagaaagacttctaactcccaagccacccttctttttatctgaacaaacaattttgcccactttacaagatgggacctcttctccaaagctcccccaccccaaagaaagtccctttggatttgctctagtctcaatttaacaactcttggcatacgcatcaaacatgagatagattggcatgctaaccaaagtgctctgaatgagaataattctccctctagaaatgaaatgcctcttccacaaggctagcctcttccaaatcctctcctccattccattccaaaccaccatcgatttgtgtagagcacccaacggcaaccccaaataagtggaaggaagagctcccactttgtagccaagttctagggccaacatctctacattctctactcttcccatcgacaaaatttcactcttatccaaattgattctcagccctgatatggcttcaaaccacattaacaatcaactcaaaaaagccatttgctcctgggaagtatcacagaaaaccaatgtatcattagcgaacaataagtgggtaatttgaaacctgtcaccaccccttccccttatcctagagcctgttaagaatcccccccttgttggtctatctatgagacaacttaaggcctccatcccgatcacaaataagtagggagatagagggtctccttgcctctgccccctagtgttgtgaaaaaaacccgttggcaagccattaatcaaaattgaatatgttgcagtaaatatacaccaactaatccaaccggcccatttctccccaaaacccattttttgcatcactagcaatagaaaattccaattaatatgatcgtatgccttctctatattcaacttacacaacacttcattttcattcctcttcagcaaagaatctatggccttattagcgattagcgcaacatcaagaatttgtcttccttcaacaaaggcgttttaggatgaggacaccacctttcccacgatcttctttagcctattagctaagacctttgctagcaacttgtacaatcctctcaccaaactgaggggtctatagtctcttagatcgtctgccccacctttttttggaactaaaaccaggaacgtggtgtttaggcttctgacaaatcttcccctcatgaaattctttgaagaaacccattatctcatctttaatgaattctcaatagaactgctagaaagcaagggggaacccattcggatttggcgccttgtccccattcagctttgaaagggcagagtaaacctctccacaaagaacacctcctccaaagtggctgcctcctcaaccccaattctatcaaaatctaaaccattcaaactagggcgccaaccaccaggatttgatagtagattctggtaggccctaatcacacccctttgaatctcttgctcttctgtcaactagagaccattaattttgatctttgccaaacaattcctcctattagaatttgccatcctatggaagaatcccatgttcttatcacctttcttcaaccacgtttctcttgatttttgtctccaggaaatttcctccattagcgcctgcttcttgaaatcctccctagcctcctttctagcctctaactccagcccggataaagctcttagccgctcttgatcacccccactttgtccaaagctagcctcttgttcacccccactttcccaaacacatccttgttccaaatcttcaaattggtttttaaagcctttaatttttctgtcaggataaagctataggtcccgttgaaattgaaaccttgccaccagccttttagcatctccttaaaccccttctccttcattcacatattttcaaaacgaaaaggaattggtctcctcctcaccccactcccatctaacaaaattggaaaatggtcagacactggccttgggagagtacactgcgtcaccctgctaaaatgagtctcccaatcctccgataccagaaaccgatctagttttgacatggattgaccattcaaccctccactccaagtaaagggccccctcgtaggggaaggtctctcaaagccaactcatcaatcacctccgaaaaccttctcatgtaagcagacattcttccttctctactatgctcactaagaaatatgatctctttaaaatcccttccaatacaccatgggtcagtccacaaccctcgaatagcccctaactcctcccaaaaaaattctctgtatcttttcaaggtaggtccgtagacccccataaaggtccacaagaagccatcctcgcaatttttaaagcgacgcgaaattgagaagagacccacctccatacctactaattccaagattgttaaaatatcttgaattgtagtctctggaaaacacaccaaatccactttttgagacttgttagggccttgattatcttccttttatttttgtcattagcccttctaacattccaagataaaaattttatcttcatctaagggtcgagagtctggccccacttcctctgatcaaattgttccccttgcttgcaccattataattaatggaccactctaattttttcagttcttgatcaaacttagtagtccttgttgtttctctcttattactctactctcttcttctcttggaccttagaagcaaattcaaaatttcaccttcaaagtcttccgttgaaaatcccataaacttgttgaacctcgccaaacaattgtcatcctatcgacaaccttttccctctaaatcctgaagcaacccctcatcctcacccctactccctcctcagccagagacttctccccttcagaggccatctcccatgttctgccattagccaaaataatacttagcgggttatgctcctccctaccattgacggaggccaacctgcctagagacccccctttcactacagtccgaccgaacctagaaggagtagaagaagagagatcccgacccctcacgaagaacgaaggagagttgacgtacctggatgcctctgcaaaccgagcttcattagtaaatgtcactctttccaccacctcaagggcctctagcgacaaagtggctcttgacatcccttcgagaggatcctcgtctcctctttcctctctagccttgccaatcgaagactcctctagtgccctagattttgggactgaagactttggcccttttgaataccctcctcccgctgcatcaacaacttcaggcccaaagcccaaaacattttcctcttcactgcccactaaacacccttttaaggcgtttaaagtgatatgccttaagacatcatcctctcgacccaaaaccacctgaggctccttttcttgtccctgggcctccccaaggcccaaaccagtcggcccacttctgaaaccacccgaccctaaaccatgtccacccaatctatttaaaaatgacttctcaaccccgctctcttgggactctgcaaggaggcttacctactttaatcctctcttcaacctctacgtcagaaaccacagcaggaagagcagttgagttgcctccataggacgacacatcttgtaccccaagctgcaggttcaactgctccgccttctccctttgactcccatagcaatcagcatggatttcacccctcttcttctcctatccctgattcaccctccccgcaatttcttcctgttggcaccacctgcatgaaacaaggtggtgtttcccaccacaaatgaaaggaatagcaccccaaccccatgacaatctgagcagtgttaggcgcaaatccctttctgcaagctccaccaagatcttagctcattgcaactcagtcaaagaagttgtgtcttcatccactgcaataaagcctccacacccatcaccgattcttttaaactcctctcgactgcacatgtgaagcgggagacccaccaccctcacccatgcctctttagcaaaggaatccttgcagagacaccccacctctaggttccatctatccaaaataagaaagttgttcttgatactccttttgcctctcgctagaactcgctcagcctcacttggcgactcaaattcaaacagcaagagtcctctgcctagcacaacactactaaatttcccctttaaaagccaatgttgatgcatccatctccttatgaaatccaactcaggtaatggagctgtattattaccccaccagtgcaccaacccaccagacactgtttcatctgctttaaccttcctcgcacttctctttcccctaactctaaccaaattgaatgacccattcttcccggtttcgactctacaacatctgcgtaggaatatgtctccacccctttctccctccaaagaacctttggaccccccttctccctcaatggaacctttggaactctggtttcctttaagcctccagaagggaccactccaaggcctctcaacttcttggccagagtattccaaccgctagacagccccttcccttatggaaagataatgctgaatttttttgtcttgagatcacagacagagcatagaatgaaccttcctgcctcatttgaacaatgttccagcctatacttcctacccccctcctcccaaccaagaacccaacttctgttatcgatctctctacaacaagcttcaactacgtccagtaagcaatgtaaactaacctccccaaatctaatccatgaggagatacctctgcttctctcccaaatatatcctttcagcttccctcccacatcctcaactgaaatctcgaacgacttagactccaccacaaaccaacttcttccacccttggcagctccaatttctcccatttagagcttcacgccacttctcgaatatgttatgagtatcctatcccaccaaccaaatgtgtttcttggtggtgaatctcaccttatattttgtgagagcatgttttgtgttctatagagtgtagttttaccattttaatatggcgtatttgcatttcaccatcccggatttgccaaacatttccccctcaaaagggttggttctaattttgttatataagaagagataccttttgatagcaaggaagataatatgtaatgttcctcatttattaattataatggatgtgtaactacccccattattactctaaaaatttccaagagtacccttacctatttattgcccctgttctcttagtagatagcaagggagatgatagttgtaatatactgcaatgttattcatgttaaaactaaatttgctcgggcttttctttcattttttttttgaatttttgactatttaacaaatatgaattatcattaaggatcaacatgaacttttgactattcatattcatagaatttatacttgcatatcatggtgcagcattcttcgagcacagtcagcacagcagcca

SEQ ID NO: 11229 - DNA, 5519 bp, Vitis vinifera
  Intron number 7 from transcript GSVIVT01004860001 (locus G SVIVG01004860001) derived from phytozome v7.0 (chr-ID chr7 _random; pos 158624 to 164142 reverse strand)
ttgggagtgatccacaaggtcaagacgagtggcaggtactgaatgattcaaaaatgcattctatggcatgcccttttattaccctaggttgtaatagtaaatggtaaacatctgaaagatattgataattggtagaggatcttttctttcttgtttattttctcaaaaactgaagatccaaatcgacgcatttgttagtctcttcatctgtactacaagattacttaaaggttatctaggattgcaactcaggtgggtcatgttgggttcaccaccaacccaagcccaacctaaatgaacagttacataacttgaacccgaacttctcccaacctttgacctaaggtactcaaaccaagtccaaaccaatcttatttttcaatttcaaattgggttcgagttaggcttagtagataggggtggttagacttgggtggataggttatttgtgttatataggtgaaattcaggttaagtagggttgaactcacccataatgattttttgaactttgtcttttgtaaaattataccaaaattggaatagtaaatgacgcattatttcatgataatcgcaaaaaagaaaaacaaatctattcatacttcttaaataatgaaatagtatgtagtataattaaatttgatttttttttcctttattatttaaaaagcatataaatgaaccatgccctgggtatagatttaagtaggaattacataagctggagtaaaaggatcagctgccaaagagatgtcccttaagtgatccttgaataatcaatcctcatctaggttggattacttcttggtattagaagagtcggagaatcattttagtgacctggtccgatgtgttttgccaaggccagtttttagtcacactcccattttattggacgaaggagggatgaggaggggcaaatcaccctttaggtttgaaaatatgtggtcaaaagaggtagggttcaaggaccttattagaaattggtgggtgagctactatattgagggttcatttagccacatcttggccacccagctaaaagccctgaagctcgatcttaaagcttggaataaagagatatttgataatgttgctagtggctactaataaagttgcaggtctggaaatttgatagctaggaaatactgtttactcttagataggctattatgaaaaaaggggaacaagatgttttccatggaattggagcaggatggatgaagtgtttggagtatagtgtgatcaaatgaattgtaaagatgaaggaaaaaattatacaatggctgtgatgcaggctatgctttatggtaaagggtgttgttttgaaaggagaaaaagtgcaaaaagaaaaagaacagcaaaggaaagaatatgtaaaacacattttgtagccaaaatgagaatattgagatggatgagttgcagaacatgaaagataaagtgaatgatggtttgtcattaccattaaagtctttcaagttagagacttaaaatttataatagttttcagcatccattatggttcctttgagggtgtgattgcttgggaaatgctatgtgggattgcctaggaatcttggtgtggctgctaagtatttctttcttctctcagtcaattttaaccttttcatcttattacataactcacaaaacttctgtgatgctagaaatccaaagatcttacatcatagtggtactgaatttaagttagctatgacccttgatggggttaaattctttgttgagatttaagactttatttagttgcaggaaatgaagaagtaaaaaacacaggagacgagaaggtgtagtaaagaagtagtaaggaaatggtaacagagagggggagaaaaaaaggaaacaaagcttcaaagagcctgatgcctgaattgagaggaaaacaagcaaaaacatccaaatacaatcaaaatctatagcagcaggatggatctgtttgaatgcttcaacacatggcctcccttctgttaattgggtttgtgtttgaattagcaggactaagtgagaatgtactttaaagatgcaaataaaaaaattgtaacatgtggagctatttccatgaaccagtaatggtgttcatactctaaaatcttgtttgtgaatctctcttgattgaagatcatggtcatgtcagcttaaagttcccttgatccccataggatggcaaggaacacacccttactggagttaccctgctggtctggcatttctccattttgattttcaatcatctctaattcccatctaacacagcagagggagggatggacactagacagaggtaaagatactggattgactaataaaatccccacttccctaatagactacttacttccaaggctttcaaggaaaagagatcttttatgactgcaactcctccgtcccacacagcatagactgcaactcccttatgtcattcttgtgatcccattcctgtcctggaagaaagcaacaattgcattttacggttgtgctttaatgatagagcttaaggtgcaatcgccaaagctggctatttggaaagcaaggaggtctttctctgatcctgtatctgctcccggctctgctcaaagccggaagctcatctcaaacaaaagctataggggagaggagagccaaggttggttgtagatcaagagcaggctgattgtaaatccgctttttctccgagagggtctggcatttctccattttgattttcaatcatctctaattcccatctaacacagctttccagagtagttgttcctgcttaagagttttgtttagccgaccactaagatggggggagcaagggcaatggagtactcctttaacacattagataagaagatgacaccaatctccaaatttttaggtagagaaaactaagcaatgtcttgaaactccttttttagctgaagccttaagtgagtctattagggctttgacccatacattgttggcctaccattacttagagcttaagattttgagttaaattgatagccaaacatgatatcagagtttcagttaactagaagtcttgagttcaagttttacttagtgtctttctttgtttactccctcatatgatcttatctgtaatccatgctttttagtttgcctttccatgtgcaggtatggatcttacatctattacctcgcagtttaagcttttgggtctaattggcagcttaacagaggctttaattctaaccctactcaatggatcccaaactgccatgcttatcttaaacaatcctaccattcttgccctccaagaacctagaacagccaaagcttgtagtctcttccataaggtcatttgtccacctcaaaacctggaaacttggatgccaaatactattgtacctgttccatagaaatccatcttaagagagattgcttcaagctgtcttctttccataaccggtcccacacttgtaagtgtttttctagagaggttgaagttaaagctttatatcccatgggagttttagcatgaaaaataaattcccttagaagttaagggattagagggaggtgaaaggaatgaggatttattaaaaagtaacacttagtttttagtactcatatttaagagtctctatgggatgaataaagatctaggcatctataagaagattgggtgtggtagaaactagaaagttggttatgagcaagaatgaggaaaattacaagagtgtaatgatgatatttagggctattgctttgttgtgaatagttagccttgtatatattggtagcttaatatggtgttagagccttggtttatagaagcttgtgagtttgaaccttaccaattatttggtttccttagttattgagccaacatagatgcctaagtaaggttacatatgagatgaagtattaggattttaccttaaatcagtttatctaataatttaaactttaaggtcaaattggtagcttaacatgagttatataagagtgtgaatttgcttgtaagaaaacttgtgtgcttgtatatgtgaggtttatatattctattcatttggcataaaaaaattgtttttctttcttcttgctgagggattgtttaggagattaaatctgttgttttcaaattttttagatgcttaaggtatgggttgagaactgttctataattactggagttcttttcttttctttatttctgcggcttttgtgctccttgtatgtttcctgtgtactgaggttgcaccctcttctgatatgtgcctcctgtatgatatactaacaatgtttgcccatcaaaaaaatagaaaaatgtgctcaaaagatagagttggagaaaatttttccatcttctgatcttatatcatttttttttattcttgctattgttatttaattagaatgattgtctttattttttggtattagtttgaacttgtcatgtctataatttctgcactcgtgatgaaatttgttgagctatataatgttaattagttgaatttttggtgctaacatgtaattccattatgaagtttggaaatgcccacgtggactttccatatttgtcttaacccccttggcttgaacattataattcctagaatattgaacccttttgttatcagaaaacttgaatcccttgatatatctttcttcatgatcatataaggtagtttgagttcaggtttcaaaaatgtgttttcattttggaaaattgattttttgatattttattgaatgaaaaagaaagaaatttagtaaatgtccacttgttgagattttccacaattttatttatgtattttttttttactaccagatgccatgtgtacatcatcttttcatttttttttttcaatcttcaagatgaaaaaccattttcagaaccttaactaaacaggcatgtaatttgaacaatatcatgaattcattggcaagtaatttcttattctttgcaatttgtcttgcttgtcacaggtaatttagagcatctatgcaggttttgaaaatcttttctatttttgaaggaaagataataaaaatgatgcagaataaattgtttggaatatagttgcaaaactgccaaaacatatgctggaattttctctaaaaacagcctgtttctagaaacttctaattatttctgtaatttcacttttaaaaagatttctgtttgtgttttctaatttcacaaaattgtgctctgtaataaggttttttttgtaaacatatcaaaacaggtgattgattttgttgttcttttgttaatatatacttgtaatatatatatacaacatatgtcattgtcaaaggtgaatttattaatttttatatttagatattagttgcatccacagacatttttgaatattttataatccttaatctgttaattttgcatcattatatatagcagtagtatagagactagtttttttttactcaaatgcctttattaattgtatttagtgtaaaatttgcccctgcaaacagacttctgaagggtattctgcacatttatctaagtg

SEQ ID NO: 11230 - DNA, 7167 bp, Vitis vinifera
  Intron number 11 from transcript GSVIVT01015768001 (locus GSVIVG01015768001) derived from phytozome v7.0 (chr-ID chr 3; pos 17186124 to 17193290 reverse strand)
agagacccgagaggctcttgctgcccattcatagagtcacacgccgaggcagagagccttctctgcttgggtgcctcgtgattcaccacctcaggaggccaccacagccattgcttcagttgatcctcaggatgagcctctaacagttgacacagtcacagctacacctgaggatccatcatctccacctgaggcacccactacttgatcataggacatctctttatcttattgtatttacatattatattagtggagattgtttcttattttgatgctttatattctagaattggatgtattacctgatgatatctcatttgtactttctcagattaatatatagacatcatttttaattatacttggcatttttctatttcctctactcattactcttttttttttttactcatgtggtttctcctatatgactcagactccattttactcaggaggtaccacttcctccctttattttcaattacttttgacacattgagggcaatattgatcttggttagagggagagttgaggaaggaagtattgttaataattctaggttaatttgttaatttagttactttttgcttaattttaaagtttttactctactttccatggttattaaggaaaaattctcaaaatgaaataagagaaattgagttcttgtctttttacttgaatcttagagtttgtattatgcttattgaggttgatgaattattgaaactcctattgaattcaaccttatttcttccactttaatcttaccacacactgtgcacattaggttccggttataagatgaaaaactatctcactccctgaacttaggaaaatttcgacttggtacctttgaccttgttttaataatgttgggacaccttataaaaggccaatgagccttcaaaaaaagaaaaaaagaacaaagtgtttcacttgccttgaaacccgagcaaggtccgaggggtatatggcgaaagtctttaaaacccagtgccctaagcctttattggttgggagtcaccgacctcaatgcttgttacaatggtgaataggtggagtttaacatattgtaggtgcttgggtattgaatttcaatctaaaaaatccggggtgaaatctgatgagttagtggtcgaaagatccttaaagcttgatgccctaaaccttgattggttgggagtcatcgatggatccctgttacatggacactttagaaaacaatacctttagcattgcgctcctacaatgaaaaaaaattgtgaaataaaagaggtgcgttcttatcctattggaggttggttagtttgctaaggtttgagaaagaactaggttgaggggagaaaatagtttgacatactataatcggaaactaataagcttaacactgagatttttgtggaagagtaaggattggacctttgggagtggaaattcttttgatgcttaaatttgcataatccctactctttataaattgtgattaagcaaagatatttgatgactcttgttgaaagttgggttttgcctctttgatgttccatgagagagtatgatccgcatcatgccacttgaaaattttttggagtgattagcatgattttgtaaattattttactatctatttttctttatttctcctttattactaagggactagcaatgtgtcggttggggggagtgattactactgaaaaagtgctcttttatagcttgaaattaactcttttaaacagttttgagtagtagttaatactttttttaactcaattagcacattaaggaacctaacaagggttactaatcagtttttgactagttttggtgtttttggtagctttttgatcagtgaaacaagcaaagaatgagggagaattttgtgtaatccatgacaatgcaagttgaagctcaaatacatgaagaatccaagttttggagcatttcatagccctttgccaagtttggcaataggttgccaagctaattagagatgcaaggaagaaaaccagaggaagaaatccaacatgtagcaatttcgcatgtctatgcgaaaattttgcatagcatgcgaaatcaagaggaaaagcagctgcatgattgagtgaaggacaatttcgcataccctacgaaaccacaagatgcagaaaaaaaaaaaagaatttcgcacaccatgcgaaatttcgcatggtctgtgaaatcttcctgtgcaccaactctgttagatttttatctccaaatttttgtgtaaattactattttctccttgtaatcaaccaatgataggatttcttggttaggaactataaagggggggttggaaagacctctctatagaatatctttttgtataatcttttgaaaaagaggacacttgtaattcccgtaggtagaaatatatagagtccttgctctgcctttccttcttttttttttttttttcatttttctttctagctaaacaacctctaagaatgatttctcaagggatgagtggccaagttttatgtttcttggagtgatggaaactaggtgaaagacccggatgcaaatatgagagttttcattgctttaaatgaaggtagttgttaaccattaatagtttttatttcaaggtttagctttaaatcccttagaatcgccttgaatggccaatacttggtaagctttccggattctatggatgcttattgctagatccatggatgttcattggttatcaagtacgagccattggaaggtggttcaaggtgagggtctttagtgtttgaagccattaatgggaagcaactatcatttttcatgaaccctttggatcaaatcttaattgctaaatacaaaaccggttcgggagataaccatcctttatgttattgttcccaatgcgaggaaaagatccgaaatctccccctttgcctaaggaacccgatcgtagtgacctaaagctccaagagacattctttttgtcgttaacttcaattgctatttttgtttaacttaaaatcaactttttcaatcataattccattttctttaaaagctaattttcataaggaaaaacaccatttcattaccttaactaaagtcacatgtacgaagaaaacccatccctgtggatgatcctagagccactatactatagtagtcatgctaccctagcgcaaggtgatttaggttttataaattttgttgataacacctgtctggcgcaaaaatcaaatggcaccgttgctgggaacgaatcaagaggcaaaagaggagcgagatgaggtagcccatacacacatagatgaggtcactaaggaaaaggtgaactcaatgggtaagaggaagcaagactctaagcatcgaaagtgcatgggtctgcatccatttgtagcctcacgagagaaggaggtgaagaatatcctggctgaatgggtcaccaggaaacaaggagtccctcgtgtgatagagtatctagtccgatggaaaggactacctaagaggcaggtaagttgggaaaatgcggattccttgagaaggttttggaaacacatcgagaggtttcaagaagagacaacgacgaggacgtcgatgacataggtgggggagagtgtcacaagatgcttcaaatgaccctccccatgggcttatataggaggaggaaagcttttggagactcctggaaccatttacactaagccattggtgggaagagtgtggaagtttctaaagatgcctagagatgtccacacatctctacactatggtggaaggcatgagaggagtccaaggctttctagagaattctagagatctattgtacatagggttgtacatagaattgtgtagggtattctagaatcttcttaatttgtaaggaaccttccatggttctaaagagttccattggtgcctataaataggtgagagcctcatttggctgaggcaccacccaaatcacttcctaaccaagcaagtaagttcccaaaagcacttgtaaaggcttccttgagtaataacaacttctattctttaagagttgcctaccatgctttctcaagctttcgagtcgtgagcatcttagcctagcaagctaagcattgggagtcaagctgacttagcaagatcaagtgtcttgacttgtctaagtgccgcactagcttaggaaaatactaagtctatgacattagtcatccttgtgcacagggcattgcacccatatgccctgcataggcatgtcaagtttgattcaattgcatgtccagtcaccctattgagccatgtcattgcacccatgtattcttgaaccaattcaatgcataagtctttaggtttcctcgtgctaatgtggggagggtataggtcacaccaagccctatgctattacggccacgaggtgcacaccacacatgttgtggagcccatgtgtgcatgctagtgtgtcgtccatgtgtctttggcacatccaaggttgtgccatggtaccccctcggtgcgaccaaggcttagccttagtgcccccttgagtcatatatccttccatttaaagagcattacattttcagaatgtctaaaggagacatcagacccctttgaggagacataatcgaatatttaaataattaataaatatattacattaataacctcatccttcgtttacattgtcatcatagccctctcaaggtgtgagcccactattagagacgcccaagtgtgcaagatgtgcataaagtgtgtgtgtgggcgggggttggtgcaggtgcaagtgcgggctggtgcgggcaagggcataggctggtgcgggcatagtgcatgcttagtgtgcatgcaaccttagtaatgtgtgctagtctccttacttagcttcttaaggttgaaccaccaaacctccaagttctccttgatttctacctagggtccccaagaatgtaaggattacccatgagactctttttactccatcattgggttaaagggataaggggctaacaattgtttacaataaaaaccttatatactttaatgcactactcatatattaaaatagatgcaacttatctaatatatgtaatgaaatttataataaatattttagtaataaaataaaatgtcaaaaagagtgtctttttggcatataatcctaatagtcttccacttacacttaattaaaactaatttttattatattgtattcctaatccctccacataagacacaaaagatttccatgtgaaggcctttgtgaaaggatatgccatattctaagcttatgcaatcttaaatatgacaatctcacctctctcacaaattctttgatgagatgatactatatgttttctttcttgtgattcattagttcctcgtattgaataactactatattgttaaggtcaagtggatatttagcatcatctaagaggtcttttggaaccttccaaatttaaagaaatctagaagcttaacatttcgtatgaaatcaagacattttgcaccatcacaacactttcacatgagatattcccatttcatacggttgtgtgaaattcttaggtgagtggcaataatacgtttgaaacactttctggaccatttcgcatgattatgtgaaaatttcatgttcatgtgaaatcaatttagacatcctccttagcctacaacacgattttcctcctctagtccaattcgcataatcatacaaaagtttttacatgatcatgtgaacttccaatatatggtttttgagttcttttttgttatttcttctattttcttcttctgactccaagttagctacctccaatcagccccaactctcaatccaaactaattgtattgcttcttcctcatcatccacactattcaacctcttcaattcaatctatctcttttgttacttaatgcatcaaaattacatatcttgagatgactttaaaactttacaaaaatcattaataactcttgcaagggcaacaaatattaattgggcatattagacatagttactactcaaaatatataaaattaatgagaattattatctaaaatatactattttttgagtagtaatcagttgtgaattgactttgattttaaaccttacattttataatgttctctctaaggatttaacatcgaattatgaaactcttcggaacattctttattttataattattttatttatttcattaaatattttaagaaatctttattcatattttatttctatttagttactttagaattttagcttatgcaaaccaatctttttactcttcgaatttataaaaaacaaattctgatgcagaattacctcattccaaatatttaataaaaatatataagattactcatgttaaatagaaatcaaaaccctcattttgaaatccaaaattgtttttagattcttacaattttctctctgaagttacaaataatttaatgaattctcttgaatctttcacaccatattgttttcaagaatatcattttccacctttgtacacttggagacgtaggttccccacaaccactcaaagaatgtggttttatggaaaaatagcaatccccggaaaaagggaaaaaaaaagaaaaaggaaaatcttttgaggctcgttttataattttttatttattattattatttatttattttaatttttagagagggaattttctttatttttttagtttttgtagttttttccactattctccttccaccaactatttgtataaagtataagagacaatgtcaagtatttctatttaggataactattctcaattatacaattattctaaaatatctattacaaaattttttaaatttctcataattttggaaataccactttaaataaaatcgactattcaatttattcctaattagaaataacctattaaatatccataaattttaagctctaaaactttccttttgtgataaatcaacaattaacctaagttttgcacaacattaaaagattctctcatgttcaaaaaattaatcaacctccataaatgaaattacattatttgactccctttcggagcatcaatattccaatcaatcctatgatctaattaatatatattgataaactatgaacatatcttactacagtgtcatgggtgaattccaaaaaatagaacatattagattaagacccaaa

SEQ ID NO: 11231 - DNA, 8722 bp, Vitis vinifera
  Intron number 10 from transcript GSVIVT01009489001 (locus GSVIVG01009489001) derived from phytozome v7.0 (chr-ID chr 18; pos 8799528 to 8808249)
aaatcaattggaacttcaggtttgctgctcccagaattagctattgattttaaattcctgattgtttaccttgttagtcattttggtttattgtccagtgatcaacctgatgatcaagtaacactatttattgtaatctggaaacacttgaaaagaaagttactttgactatccatgcaaaagtctgaccaaaaaagcatcggtatgccgcagaatattggggagtcaacagatggacgctaacagacatggcatagccaaaatgaggagtcattagatgggtaaaaaagcaatcagaaatgtgttgatctgaggtgacctaggaagattaggaatcaactgtgaatttttggtgctactatatccagaattcctgcctacatagggctttaaattggacagaagtagttgaaaatggtaaagtcatcacttgagctgtgtattagcttgcctgcattatgtatgatgaacaggagctatgtccctgggcacctagatagcgtgccccttttcccttagacgcctttaacatacaacctacttgcctggaaaaataattttttttcaaaaaaaaagggtcagaaattgagtaataggaattacattgacaacctaaaatgataagggggtatgttgtgggccttgtggccatagacccctatagcaattaaaaccatctagtatctcggttcaagtaaccgacagaaaaccaaggattttgcagcaatataactccagactgtaggggctggagggtgttctcaccatgacaagttcaggtaagtcattctaggccagaatcctttgcaaagggctggaactttgaggaggcctgctatttgccttccaaaaagcagagagaagtcccaatgttaccagctccacaaagccaaattcccatttatcccaccccttcaaatctctttttgattcctttaaactatttagttccagtcactgctcagccgtatttgacaacccattcagatcctctcttagtcgcaaatccaatttttccaaatgcagtacctgactgaattgtcagcagtcccaactgtgatggaatagggtgtcctattttcaatataacccagtgtattagagtgctacttcccttagaacactgcccggtccccccaagggggctcaattccttgcaaaacaaaaacagccaatagacctaggttccttctcttttgaagggtttctcataggtattacccctaataaaatggaaagagttttgtctgttttggcaatcataaattttaagctagtcaagtattgagagaatgatcttccaatgggttgcaatagtttaaagtagaatgtttaagggggaagtataagctgtgatatccggaagagatgcttaactggggttggcaccatgtttgttgggattttcacttgtggtatgaaaatcataagttggaacattagaagcttagggtctagaaagaaaaagagagtagtaaaggattttcttcaccacggatctccagacattgtgatgttttaggaaacaaagagagacgagtgtgacatgagattcgtgtggacaagcagaaacaagaagtaagccactttaccaacttgtgggtcatcgggaggagtcttaacaatatggaactcaagaaaatattcatgtttagacttagtgctaggatccttcttagtttcaattaatctagttttagttggagaagtagatttttggcttaccttagtgtatgttaccaacatttccattctcataaaagacttttggacaatgatattagatctttttggtttgatcaatctaatttttttttcttttgcatgtttagacttagtgctaggatccttcttagttccaattaagctagatttggttggagaaatagatttttgacttaccttagtgtatgttaccaatatttccattctcataaaagacttttggacaatgatattagatctttttggtttgacctatctaattttttttttcttttacatgtttagacttagtgctaggatccttctcagtttcaattaagctagttttagttggagataccaacatttccattctcataaaagacttttggacaatgatattagatctttttattattatttatttgtgtgtgtgttggcattatgtagttcaagattaaccccttacacgaaagattttgatgaattcattgaagaaagtgagttggtcgatcccccacttaaaaatgctttatttacatggtccaatttacaagaattccttgtttgcaagaggttagatagatttttattttcaaatgaacgggaatagactttacacatagcctctaagaagaccatattcacctctgatcattggccaattgtcttaggcacaaacctgttgaaacagggaccaactccatataggttcgaaaatatgtgattgtttcaccttgactttaaggctagttttaactcttggtggaaagagtttttggttgaaagatgggaaggtcatagattcatgaaaaggctacaatatgtcaagtcaaaattgaaagaatagacacaaacctgttcaaataagaatcaactccatataggtttgaaaacatgtgattgtttcactttgactttaaggctagttttaacttttcatggaaagagtttttggttgaagggtgggaaggtcatagattcatgaaaaagctacaatatttcaaatcaaaaattgaaagaatagacataaatctgttggaccaactccatataggttcgaaaacatgtgattgcttcgccctgactttaagactagttttcactcttggtggaaagagtttatggttgaaggttgggaaggtcatagattcgtgaaaaggctacaatatgtcaaatcaaaattgaaagaatcgagtaaggttgcgtttagatgctgaaaggagaggaaaagaatattctcgaagatattgtcaacattgataccaacaagtagaaagaaaatctctctccggagcttctagctcttagggctttgaagatagtggagatggaagaattgttgttaaaggaagaggttactagaagacaaaaggttatgataagatggatacaaaaatggaattgcaattctaagtttttccataggatggctaatagaagtagaagcaggaagatcatcaagtctttggagaagcaagaagaggctgctttaaacaatttagagagtatctctaaggagatagtgagattcttcaaaaaattatatgctaggccctttggagattcatggtggctagaagacttgaactggcctctagtttagaaaagagtgcaatttgattggattgaccttttttttaagaggaaattcgtaaaaaaaaaatttctattagacatggaaaaaacctaagggtcagatggtttctccatagtagtgtagcaagattgttgggacatggtaaaaaatgatttattaaaagtgttcatggtgttccataatagcaaggtaatcaaacaaagcactaatgccgcttgcattgctctagtgccaaaaaagaattaagtcatcaaaattttagactttaagcccattagtttgatcacaagcttgtctaagattatggttaaagtctttaaagttgcatctaaggagtttttaatgaaaccataaacatttcccatggtgtttttgtggaagggagacaaatctcaaatgtagtattgatagccaacgaaatggtggatgagaaaaggagatgttttcaaaattgattttgaaaaggcctatgaccatgtgggttgggggttttagatatgctcttaacaaaaaagggatttagtattagatggagatcatggatgagggtatgtttgtcctcaacaagttttgtggtcttagtgaatgaaaatgccaaagaatggtttaaggcaactagaggggagatcttatctcccctttccttttcatcattgcaattaacgttttaagcaggatgtaatcaaaagcaaaggaaagagctattcttgaagtttcctagtagggagaagaaagactaaggtgactcatttacagtttgtagatggcattatttattttgttaatgccataatggaagacttacaaaatcttaagcttatcttgttgttttaggtgcattttatgacttaagatcaatcttgacaagagcacattcttaggaattaatatgagctaggatcaaattgtttgattgtcttcattgttagaatgtaaagtttattggcctttaacctatttgggtcttctattagaggggaatcttaaggctagtgttgtttggagcctaatcataaatagaattttaaggatactcgatgtatggaaaaaaacttttttgtccttaggcggaagaataactttgattggatcttgtttatctcacatccgtaattatttcctttcattgtataagattccatccttagtagcaaaattccctttggttgaggtttggggagggaaagagagatcatgttattagttgaattcaagtatgcaagtcaaatggggaaggaaggttaaggctcgagagcacatctttgtgaaataaggccctcataggaaagtggttgtagaaatttcctagggagattactactgtattacacaaggtctcttgagcacctatgtgacacatttaaagggttgggacaccaacattttaattaagtagtcgaattctatttttggttggtgataggacaaaattctgttttttgggaagatttttggtgagggaaacaacctttgacttttcaattcccaagtctttacaaagtcacataagctaaaaattcctttgtttcatctatgcttggactcttttccctttaacttttagctttgaattttaacataacctcactaattcaaagatatagaatcttgaaagtctcgtatctattctcagtcatgttaactatcaccatcttccttagatatgagagcttggttattatctgccttcggcttattttcggtcaaatctttcttcttaactatatctaatcaatgaacttaagttttcttttctcctacaaatttcatatggaaatcaaaaaccctatcaaaggtcaagttatttgtttggttagtggttaacaagaaggttgagactaataacttactttaggcgaaatggcctttcaaaacccttaatttggatgttttcactctttgtattggcaattgagaatcgatggatcatctttttttacattgctaataattttggagttatgacacaaactattcaaactagccaatttggtttgagttcctcttagaaatgttagtgaaatgttgaccatttctttttagggtttggatagaattactacaaacaaagttatatggcaaatcacttgtcttacattgatttggataatatggagagaaagaaatgttaggatctttacggataagtgaggtatattaaaacgatatgtgatctagtttacttctagtcatctttttgggccggactattacaactttcaaggccattcctctcaacataattcaacttgattagatgtcaacatgtagctcaaaagggttaaaatagcaatgttgagtagttttgatgtctattggagagtatttcttttcctttgttttgattaggttttgtaatgtggggaagggttttgcatcctttcttgtattctcatatcaatgaaaatgtttttgtttctaatctccaaaaaaaaaaaagtctagactgaagaatataaataaactatcatcacaacataaagcaatttatgttggtaccactagcaatcttgatcccatttcatcagatactcctttttttatctctcccctttctctacttttcttttttccacaagcataggcatataggttttctctaatgttttaaaagtcaaaccggccaatttgaccaattgaaccatcgaccgatggcctctttggtctggttgactagccacactcaagcccacttgtgtttttagtcattgtttcaaggtattgaaaaataaaatgtaggctacatatttctgatgtgggaatgattatgagggaaaaattttttgcacccaaggggacttgagccatagacctttagttacaaaagcaaaggatttgaccacttagccactcaattactttgttatctattgttgtacaacaacttaaatgataatgtagacacgttgattttttttttttttttttttacattttcatcatatagaaccattaaataaatataaatatttacattcatgttttatttttataataattatataatgataagtatgaaaataatataaaataattaatataataatttttagagtgggatcagaatgtcggtcaaggagactgggatttaaggtttataagggatttcaatgattgggaattggatatggtaggtaacttgcttcatgtcttgagggactataaacctactttagaggaagattcagtctattggaaaggaggaagaaatgggcagtttaaaatcaaggaagcgtacaatttggtggtcaataccattgccaccaactttccgaaaagtaacatttgggtggataaagttccaactaaaatattgttttttcttgggaggccacttgggggaaggtgcttacgttagataggctccagaaaagagggtggcaactcccgaattgttgtttcttgtgtggctgtgaagaggaatctgtaaatcacattctcatacactatatagtggcaaaagtcctgtggaatatggtctttgctttgtttggtgttcagtgggtctttttaaaaactgtaaaggaggtcttattgagctggaggggcccttttgtagggaaaaaaaggaaaaagatatggaagtctatcccgttgtacattttttggatgctttggaatgaaagaaatagactagcatttaggggaggagtgttagcaattcagaacttaaaaaattcttttgtttgtaatttatggcgttgggctagattgtatagtggagagagttcgctatcccttataagcttcttggagtggttaacctccagctaagggttggtggggttttttgctttctttttggttgtgaagcttctggtttgtatacttcttgtatattgtgtggctttttggcctctttttaatatattcagtgcttatctatcaaaaaaaaatttaatataataattttttaaattttaaaataataagatatataaacatctaaaaattaaatattacaattttcctttcatcttaaatatatcttcatacttaaatattatatatattttatttaataaaattttaaatgttaatatatttttatcatttaatttggcatatcaaattaaaaaaatgaaatattatttaaattttcaattatatatatatctatacattcttaatttcttataattctttttaattttatataatatataagttatatatttatgacatcatcggtttgaccatagtttaaccaccggtttgaacattgaactttgaatcattgtcttttctagttcaatgatcagtctggttttaaaaacattggttttttctttaatcctcccaagtatcctctctaaaatggacaatcccatttcaatcaagatgaacaaagaatgcagtgggtgattttggccatctccaaacccaactataaacccttacatgatgatgaattaagcattgacgttaagttagccatgacatttttcaatgtgatgatagaaactgcattgaattccgttggaactagccatgtcccttgtggaccaaaaccttccaaaggctcctctgctgttattacctaaagtttttggaagaaatctgcagggagagatatagtgcatacagtttgggttcaaatttccctaatgtatggatgagtttcttataggttaatagtccactactcgtatggaaatgtcagttagggtaatagttgtaagatccattttgtgtctggtgctacacatttatttaaccaattgttccatattactgtagatgttaaaagttatttcaacccttgcttttgttttttctgcttgccacgtatctgtcagtccccttcatatatagttgtgaaccctggagtccatgggttagtctagttaaagatggtgatgctatttaaaaggatgataacttgatgaatacatgtatatgatatggattaaaagcacatcataatatcttaaatgctcttgtatgggttggtttcattaggtttttccaaaaagtatatgatcattagtctggcaatggtaattttaatgaacatgctccattaaatccttctctagataactgttcaccttggatgctgcattatatgtgatgatttttccataaggaaacaacttgacaacagatgattttactgccattttaaagtagtgggtttgtgcttctatatttctatttttgggacccagtacttataaaattgagctagttggtgtatgttactgtttatcattcggattttttttatgcttcatgtaagttttagcttcatctttctaggttccatagaagggaagaacactgtatttgagtaacaactgtaaattacaatctggccgaaatgtgtatattctgacaaatatgttcctaggactatcaatagtagaggaggctcattattcttgatgcgaattgcaggtacagacgttagatcta

SEQ ID NO: 11232 - DNA, 8293 bp, Vitis vinifera
  Intron number 5 from transcript GSVIVT01020791001 (locus G SVIVG01020791001) derived from phytozome v7.0 (chr-ID chr1 2; pos 1930942 to 1939234 reverse strand)
tactaggcgcgcaactgccaaggatttgtgcataagctgctcaaatcttctttcaaagtctgaacaaattgtattgcatgcttctacttatatatagctacctcctcatccttgcgcgtctgctagtttattggtgcacaaccatcttcagattgtacaagtaaaacagaatgaacaaacgttaaaacaatacttgttttaatttatattatccaaggtatctgcacattgatcccataagggaaaaaaaatgtacgtcttcatcatttaatcagtggtttctaacatagtcatctatgtatcttattctgaaaagagaacaactcacttcacatttcgagacccttaattttgttctctagtatcacaatacatacatactctatttggaagtgttttcaaaaattggaaatttcaatttctattattggactaagaactccaaatcattttcctagtcaatttctcatctaattaaaattgaaatggtaattggttttatcctcaattcaccattccctctccacctttcccaccatccataagaaaaagatgacaagtaggatgtatttgttaccgtccttcaattgaacaaacataattaattacaacaattggagtatgaagatgaatactttacttagttggcaagatgtgcagaagttgtagaggacggccataaaaaagtagccatgagatgaaagaaaaaggtatgagaaatctcaaattcaacattataatagtaaaaaatttgctcattatgtgtatgaaataaaaatactactgataatatggaaagaaaagtcaattctgttgaaaaaaaacaagtcaagaagaacatatttcattgttggcatataaaatataaaggaaaatgaagaaagatgcatggtatcctctcattggtgcaagcaatcatatatgtggcttcaaaaatattttcttaattagaacttgatgaatcgccaaaagtgatcattatcttacttttagatgtatctaaaatttttataaaaggcaaaggtaaaatcttaattaattcaaaaaatgaaagatgtcaatttatttccaatggttattatgtgtctatcgtgaaaaacaatacattaaatttggattaattttttaaaaagagctattatattcaaattttctcaacaaaatatcaatatgtcaacttcatggcaaatgtgctaatgacaagaaatagaatgtttttgtaattaaaacctctaacattttgcgccaatgttctatcttagatttgcaacttaaaatatcgataacttaatttaagaggattgaaattgttgagtaagaaaaaaatggtataaggattgtcatctatgaatcattcaaatcaattatatatgtgaaagatacttatttggaaaataagcctaggaaaattttccatcggctagaactcaaggtttggtaaccactcgaggttgtaatgatatggagctctaaagttaatgaagatattgagaaaatgtgtggaaaagtataaaatgtacataaaagaaattatataaaaatgaaaaaggatgggagtgcatggttatgtcatgggagagtgaaaaaaatatataataataaaaagaagaagaagaagaagaatgtaaagaatgcattgtaccacatgggatggttgtagtcctaaaacttcttagaaaggtgacataataaagataatataatattataataataatggtaagaaaatatatttgtttaaataaaaagaataagttttggagaaattcattttaaacgaattagtaaaagtagcaaattcgaagaaacaaactttggaacaagaattttacataaattggaaattaaaaataataatcaaattgaaacattaataataataataatatgatcatcaaatttaaaattttagttatatatatatatatatatccttttttatatattattttgaaatatgtaaaatgttatttttgtttttgtacataaatcaaatacattttatatgaaaatatatttaatatttttttataatagaaaaatatgaagatattatgttttttgtaagtttgaataaatgaaacaaaagtattaattcaactataatttgtcagaccttagtcaacgagttattattgacctttacattccttgattgggaatgtaattgctttgaaactcagtctctaaaggtttgtgaccacaaatctctattgtaaataaaatactaaaagctaaatacatgataactctagttaagaaaaaccagagataagagttaccacagctttatagtattctaggtggttgtcgtttgaaataaactctaatatgtttattcgtttttagattcaaataattaattatttgctgaaggtaaaaaaaaatacctaattcaaataaatcaaaattaaatatgaaaaaaaaaatcctaaataaacctatttagattacaaaataattattgatttttaattcaattaatcaagagtggggatccataatccaacttcgagcataaaccttcaagcgaaacataggtatatgatttaatagtcttagggtaatcaaaatgtatggtctaacgagatcaacctgagttccacacctcagagttgatccgtgattactactcaaaaagtgctatttgatagcttgtaattaactcttttaaacacttttgagtagtaattattgccctttaacccaattaacatattaaggacctttgcaatcacttctaatcactttgtgtaagttttggtgtttttgttagtaatttgatcaccaaagcaacccaaggtggaggagagttatttggaatccatggtaaagcaatggaaagctcaggaacatgaagaatcagagctttgaagccttaaagtcctttgccataaccaatccggattgcaaggaggagaagtaaagagagaatccaccttgaagcattcttgatgacagtcatttcagccacttttggagtacttcctaaagtccaatttatgcatgctttatgtcgtttcgaagatcgggaagtcaacaatccaatgcttcaaacggttcacaaatcagagttgaaatgaagaagttagagccaatggaagtagatcactccaagctgaaggccaatttcgcagggctgcgaaatcagccttcggctgcgaaatgatttcgcagccattttgtgcgcctgcgaaattctcctgagtgcttccagatatttgcggccaacgttttttgatattttgctttagatatttgttgtctaaatcccaattctctccttgtaatccaccaattagatgattccttagttgttaagcaaggatacaggggtaaacaacctgttatatattgttttgtaattttcattttaaggtcgtcggggaactttccccagggggaccaacttatgtaaattttacacttagctaaatacagagtatcttttgctttctttttctctctactattttctattttcttagtagccaaacatccttggaggatgaaatccccaaggatgagaggctaaaaccttttagtttcttgaagtaatggatgccatgtgaagctcccgtgttaggatggagatttccaagccatgaatgtaagtagctgagcgtcataaatgttttcattcaaagtaaagcttttaatccctctgacttgctttgaatggccaatacttgataaccttttggtctcagtggattcttattgttagatccactgacgttcattagttatctcctacgagccattgtattgcaagtcgaggagatgacctatatcattaaaagagcatttatgaggttcagctaccctttttgtaagttttgaaggactaaaactcagttgttaaacatataccggttcgggaagtaagcatcaccttagttgcttccccaactcgaggtgaaaagttccaaaatctccatttttacacagtgagttaagcatggctatccaaagctttgagaaacttatttttccatcttttaacctatttgcatgttagtttagtttacaacaccttcatctttttatgttttcatcttaacctaatttttattaagaaaagttcactccatcctccgaacttcatcagttaaagtaaaaacccttcccagtgttcgatcctagagccactatgctatagtagctttgctactttagtgtaaggacgttaggtataaattttgttgatacccttacatgccaagctaccaagagtcgggttatcaatccgtatcctaacttttaatattttattccattgaattacctaatagatgaatgaaaatgaaatctaggttttaactctaagatttttaggcttttaccactttgtgtagatttgtgttagggtagataacaatgacaaaacctttcataactagggattaagaattatcaaaaatccctagtattaaggaatataagattataccatttcctaagtcaaactaactttagaaagtattttgatctctatactagtgtcctaacctttcatttatttcattattaatctcatttcattcgttgtttccctttagatctaaccctaggttttcatgtttcatcccaagatggctttttagcctcttatgggcatgttcttacataggtcataaaagaataagaaataaccattcttgatttcaaagaaattaaaaaaataatttattcaataataaagagataaagaatgcctaaaaatgactaaaaataataaaaatatgatttcttatcgtgtgggaccacttagggcggatggagtgcccaagatgcaacaccaaaggtggaggtaaaacatctaagtggtagtgggtgaattcaaaattggggtcatttcgaaataatttcgaaatggtcctacaactcagtgcagttgtcttcatattgccataacttctttgttttaacttcgatttgctcaccgtttgatgcgttggactcttgaattcctaagctttaaaaaatatatatcatgcctaaaaatgacattggaaagtactccaaattttacctcaaagtcaaaatatatgctatggctagattttgagttccaaatttccatgtgaacttgattacatttgcttcaaaacctcctccattattgttgcttgccctctatctcaatccataacattcattattagtatttcatgcctatgagttgctcatcatgtcctcgcttagactcttcatgattcacaagtttgagtctctcagttatgcatgtttaaccccttctacatccttggttgataatgattattgcacttatcatttttttcatctcttaaacctatgattaggctcaaaatagaaattagatccataattagggttttagcattgatttcagttaagttggatgatttgaactttttatattgcataaatcatataatatatgtgctattggaacacatatttttggcaccaatcacccacctatatatgatttttatgacaatgttggtacaatgcacttgtgctctaacccattatctcactctcacatgaagcatgtgggcatcgattttcatttcattcgtgatcaatatcaaaatggtgctttcatgttgctcatgtgtcgtcaaaagattaactatcagatgttttgacaaaaccactataatgtcatcactttctttctctcaagaccaaaattggaatctcctattggagctccattttgagggaacatgttaatgaaagttaatgtttatctttaatttaaatattagtctttatctattatcaattaacttagaatagaagataatgattattagtttgaattaaagtagaaaatagacatgttctcttaattttagatagccgaggtttatcccttctaacattatttgtatagaaatattcatcaatcatcaacaaggaaggaatgtcgtattttctcaatcttcttcttttactatagatatcacatctttttgcatatttttttgttaattcaatacatgtgtgcatgtttgctttaattacttattttttataaatctcttcattaatatcctattttttatctcttcactaataacttgttttgatctctttcaaaacttacataatattcaatttggtagcattatttttagataatacaacattaatttaaaaaatacataatggaattaaattttaagattataaatcgatgtttaagattatagattgatgtccaactagtcgtacacatgatcaattgtgcaaacttttgaacactcgagggttacacatatgaccaaaatcaataagtaattgtaagaaacaaaaattcatatttcttgtagggatataaactgaattttgtgatgaagatatttgatggataaataggcttttatttcaggggtggaagcctacgatgggtcattaaaattcactttgggggaattaattaaaaatctggagattgtgggggatttcccaccacatgtccttttcagaagtcttcctggctccaatgaaggtagacagacttgactctggttggctcgacaccagcagagaggtccatcaaggttaccagcgagtgaatagaatttctctctctatttgaagttgtcggggctacatgatgacagttggaaaattaactcatccccatcgtgaaatgtcgtacgtttttcatgtttgggttatgatagatatttggaataaattgatgtcccctatttttcaaaaaaactaagatctcacctttgcccttcacaaaaattttggacacatcttcaaaagttgcatgactactttcccatattcattaagttctaagaaaatagttctaaaaccacctatagcaatgcatggatgtgagaatattatgtatttttctcctcacttcatattttatatgccaacaataaagtaggtccttgatctttttccaacatcattggtttttctttccattctgttagcaacacttctaaattcatatacataatgacaatttttttttcaattataggattgaatttgagattacttgtatcttctccttttattgtttcttcatttgtgccctcttttgtgtcctcttcaacaatatgaggtttgacatattcctttattgtttgatgaaataaaatcatatcttcctatatttccttgatcatatgttatgactctatgattgttttggttattttcattgttaagattttctttggtttcatttcatgtaagtttgattgaaaaactcttaatgtctacaacaacataatcaaactttgaatataggctaaattatttattcaatcacacatgtatgatttaagattaatttctttgaacatatttatcatagcttaattttggatattaattgtaatattatatgtaaataatttattggatatgagaattacttttataaacagttgagtggattcaattttctatattaatttatcgagaataaaatttacttattatcatgtggtttaataggcatgcgatagaattaactctttaaacaaattaacgtaataatatattattttaacataaataattttttgatggtagaaatattgaaaaaaatatcaataaagacttgataaataaaaaatagtagtcaacgtaaaattatattgactcataaaattaggtcaatatatatacatattgacgataataagaagatgcacatcaacaatgtaacatcaatgttaacctacattgacaactttggaacattaatatatgaccatggagatagcaagtgctcatgacaagaattagaatattttcataatataaaaaaaccctaagattttgggacaatgttccctcttagatttaccacttaagatatagatatcttaatttatgagggttgaaattgttgagcaataaaaaaatggtataagaatttccctctatagatcaattcagctcctttatatatgtgaaggacgcttacttggaaaacaagcccaagaaagttttccaaagcctagaactcaaggtttggtaaccactctaggttgtaatgatttaaatctttaaagttattgaagaaattgagaaaatgtgggggaaaataccaaacttataaaattgtgtggtataatccaggttttaaatggcatgtatacctaaacattgttttttttatatataagtaaaaacaattgtattaagaaagcttgaagtacatctgaaagtatacacgaagtatacaaggcaacaaggccaaagggagaagaaaaaagcaaaaaaataccttacttacaattcaaccaatcaa

SEQ ID NO: 11233 - DNA, 2765 bp, Vitis vinifera
  Intron number 9 from transcript GSVIVT01008079001 (locus G SVIVG01008079001) derived from phytozome v7.0 (chr-ID chr1 7; pos 5992439 to 5995203 reverse strand)
gcagtggaggtaagtttttagaagtttttgccccccaaacaattgttatgtttattttatttttattatttaaatatagcatgtcattgtttactattttgctccattttgtcaaagacatctgacatttgcgctacattttagcgtttctaatgcaattgttgccaagttgaattcatggttgcctagaagggtgcatgttagggctcttcgaactcttctaaggtgattcaaaaatattgtgcttagtcttaaattcaccatgggaaatcagtttacatcatcaacttaagttgcctatgctcttatttggtgaacaaagaaaaatgaaaaaaaaaacaaacctgcatgaactctcctctctaaatcattaatgggtagaatgcctctaagctacattgactttctggtgggaaattacctaaactgaagcactaaactgaagaaaatatgcattgggacatggtgtggccattgccactctcttttctaagcattaatgggtagaatgcctctgaggtgcattaaatttctggtgggtaattaccaaaactgaagctctaagctgaaagtaatatacattgggatatgatggggtgataaccattcaatttgataatgccgtccttatctatattatctcaaacttagttgattcatccttatacaaccagagctcaaattgaaacttgggtaaactatagtatagattgggaagactcaacccctacttcaattgagagtgagattaatttccagtattgggctaatttcgtacctgaactatgcctttgtttgtgtgtgtatttagctattgataaatataaaggattagttctaagtaaggagagaggtttgttttttgcttcttcatttttcctcttgcttgccttttttggcaacaaatgtattcattgtgtgcactttgttgtgccttttactttggcgctttctaaatattatctttttgcctatcaaaaaattatttataaatataaattttttttgatcagttggttttgactttagtttgcgagcaaaagtatgggattccaaccttgttaagttgaacccaatcctttgcatctgttctgagatatgaatgctgcttgtgcgcccagttctgtgcatagagaggaactccctctcaaactctgcctctccatgtcactcaaatttttggttcctttctcactctatgatctttcttgttctttgttaaatcagtggagtattgttacaccattttctattgccaagtagaatctgagatctttctccctctgttcggtttttgcctcatacccattttatttggttttgacggcacaaaaatttctccaaactaacctggcctatcccttttttctgatatgttctggccaacccaacctaagctagtgcaacaagtgtgggttagaggtcatgtagaatctggtttcaggtggaggatctagagctaggggtgagcttaggtttataacatacctcgggttattctgctaacttggaggtctaatttatgctgtctgtttaagctatgcctgtttttccatggactttgatgtttcttgcacctaaaactttcgaacacagagccaaaatagtagactacccaatttaaatctatctaaccccagcctttaggatgagtaaccacttaattcatctggcattagatgatcaatggctgaaattagacaaatgttcttagtgatgaggcctcatttagaattgttgcttggttttggctttaaaggggcaatcttggtattataaagttacattaaacgtgaaataactttcacataattcaaaaaatgtattccacgagaagaagcattgttttttcccattttgacctcctttttttaagccagcagctcttcttataaaatgcaaaaccttttattgggtttagagctttgggattccaaaatgccaatttaaacagggcctaacctgactaccatgccctattaccacacctcttattgggtgacagtgagataacaagtggtcatctgctgtattatcttgttgattaatttgtgccttttcacaaactccttacttcataaaaggggaatatctgactatgtcatttcatttcacatttaaaaattgggtttgtagaagggaggatttcaataattgattctttggttcagtaagaatattttatgctttgctttggagcttctgcagaaatggtgtattcaatgagtcatttatatcacctttattttttgataggcaaagccgtttatatcaccttattggcttacatgtcttgctatttctattttagcatgcctctttttccagtgactaatgcatgcaccgcttattattaccatgattttagcaattttacaaggggctaaagtgctaaagagggcaggttaaagatatgtcttatttcattcattggtgtttcaatgacgggctttgcatcattgtaagccactttctgcatgatgtgttctgattacatagtccattacattggttttaatttggggtgttaaattaatatcatcattgtttctttacatggaaattaacccctccttttctaagaggggccacttgaggatctgatgaatgttaggtttgtggttttggggactggaccaaccagtatccctatatcttaagaagatgtctaaacattataattaggatcctatttgtcaagtatgaaactaatatgatcatggattattttgggttaaaattagttaatcttcatttgggagaca

SEQ ID NO: 11234 - DNA, 14037 bp, Vitis vinifera
  Intron number 50 from transcript GSVIVT01007755001 (locus GSVIVG01007755001) derived from phytozome v7.0 (chr-ID chr 17; pos 9519455 to 9533491)
ggatcatccagttgcacaaggttagttggtataactttataactttgtgctggttctttcttctttactattaacatttcattttgcgacgaagccctatttgatttgttgtccttaaagaagcaaccatatccttaaactgaaggtgatattgatgcaatcttggtgttgactttggggttcgaagaatttgtcttgtataattcaatagaatgacaccaaatatatatacaaattgtaagaggtcagaaatagaaaaagcaaggagcttatttctagcctaggatatctctatttacaaaaaagaatcaatcaactaaactaataaggaaaaaacttaattcaaaaatatttttgagttggaaagtcttcgtacaagttgtgcatattttcgaatactcccccttaaactggtaaataaatgtttatcatccccaacttgcttgtgatgtcatagaataaacgtgttatgaaaatgtagggagtgcaatatattagccaattggttttttgtggaaatgcaaggagtgcaaagtaacccactatccaatttttctttgtcaaaatgtcaatcaacctctttgagtgtggtacaatgacgttgagttggattgtgagttatgctaatggttgactagttatcgcagtagagtctcattggcccctcccaccagaccctaagatcaatggggataattcacatattccatgtgccatggattgaaattctgcttctgcattgatcttgccaccacttactgctttttactccttaccaagttacctcctaagaaagtgcaataactagaggttgatctttgatctataagtcattccttctgccttttgaaattgaatgcctttgcatagtgttgattttaaataacgaagaattctgaatactgcttctatatgtatctccttgggatcgtgcataaactgcctcattacatttactgcataagctatgttcagtctagcatgcgataagtagatcaacttccccactagtcattgatatctctctcgatttatcgacatatcatatttttctccatcaagtttgtgatttgacataactggattgtctgttggtctatatcccaacatccttgtttctttgagaaggtcaagtgtatacttctactgtgaaataaccatctcaatccctgggaaatattttaatctttcaagatttgtaatttcaaactcatttgcaagtttcttctttagtttctccatttcctccaaatcatctcttgttaccacaatgtcatcaacatatactatgagagctattatccttcccttctctgaatctctaatgaaaagagtgtgatccctttagctctaactataacccatgtttttcattgctttagcaaatctcctaaacctagcccttgacaattgtttaagataataaagagcctcatttagtctacgaactttatttctcatggagtcttccataaatcctggtggtagttccacatagacctcttcctccaaatctctatgcaagaaaacattttttacattgaattactacaaggtccaatcaaaattggtagctagagataacaaaatatgaatagtattcatctttgccacaaaaaggcattttttaactcttggtaacctatcccatgagtctgtgtataacccttggctacaagtctcaccttatatctctctaatgtcccatctgctctatgcttggtagtaaacacccatttacaccccacctttctcttgcccttaggaagatcaacaagttcccaagtcttatttttcttcaatgcactcatttcttttttttctttttttttttattggattcaatgcactcatttcttccaacatagctttcttccaattctcatccctaagtgcttcttgaacaatttcatgtatttttatagagctaagtttggtaacaaatgctcaatatgagaatgacaagtgtcaaaggaaacaaagttggttagtggatgttgggtgcattgccttttttcttttctaagggcaataagtgaatcaaggtcattaatgacattcaaggtagatatagtttgattttctatacctttctcaaggttaatggttagagtatatagagattctagagttagttgcatcctcgaatagactttaagtgcgttgaatgatttagcccctctttcctttgaacaataaacttaagcttagctatgtactcaggaggaactgattctagagtattatatggggtaaaggttcagttgaagaactgattttagaaaatggaagggttagattaagaaaaatttccttgtcttctacgaagggtttcccctaaagataaggttaggagaagaaaggttgttgttcgttaaaggtgacatccatagttacaagaaacctctaggaattaggatggtaacatttgtacccctttgttgttggagaataaccaatgaatatacatttaagaccttggggatctagtttagttcgatgataagtctaaatatgaacaaacatcatacacccgaatatttttagggctatttgactaaaaccatctaagtgtggatagaattgagtgagaagatttatggggtctttgaaatcacgtaccttggaaggcaatctattgataagatgagcaacgattaaaataacctctttcaacatgtctttgaaaaattcattgaaaaaatcaaggctctaattacctctaacaaatgtctatttttttgttcagctaccctattttgttgtggtgtattggtataggaagattgatgaaaaattccttccattattggatctctctatttagattttggcatcaagttaggttcgtacattctatgaaaaaacaagaaaaataatgctaaggtaggataaagggatagaatcatacttgttactttcagcttcaagaaagtacaacccttccttctcactagcatgcccaatcatcttccccataagactgtcctgaaaaacacatttagaagatgtaaatatcatcaagcaattaagttctttgataatacgaggaattgataacaaatttgcggataacttgggaacatgtaagacattttttcaagggtgaggatgatgaaatggaaatatttcctcagctaactatactgactaaagttccaccagcaatctttattttttggtttccaggacaaggacaataagtggagaaggatttgaacaaactggtcatacggtttggaaatacttacctatttgagcaaaatgactgaaaccccctggtttttcaagctgtgaattaaactgcttcagcttagttatttcctcctggttgaaaatttctcttgtagcagtattttctagttgttttgcttctatatcagcaacataactttgggacttgtaacctgaattcttcccttgctaccattattttttcctaacaaatttgaaggcttgccatgtagcttccaacggttttccctggtgtgacaatttttgcagcagtgcaccaaatttgagtccttttcacctggttttcgtccctccatctttcctgaatttgcagcattggcagcacccatagtggtggtcatgactccttcattaacatttggaagagatggacaatacagaaccatccacagaattaaaactttacagcattacatttcttcgtccctcttctcctcttacaatagcaaatgcttcattcaatgaaggcaatggatctctcccaagaatttggaccctaacttgatcgaattcaccattcaaactagccaaaaaatcaaagagtctctctttctcaataaactcttggtatattgttgcatctttactgtatttcatcttaaaactttgataatgatccaactcaagcaataatccctatatgacactgtaatactcatgtatagatagggtaccctgtttgggatcatggatttttgttttgagttcataaatctgagcagcatcctgcaccttagagtagtttgatgaattgcaccctaaatttcctttgccatggagagaaacatgcatgtatagattatttctggttgtgttgagaaagagagagaaaggagaaaaaccttattcttattcatatgttttctacttacaattgagagatatatatatatacaaggctaggagtcctaactaccatacatgtgacctatattaacaaggaaagataatatactataaatacattatattcaacactccccctcaagctggagcatatacgtcatatgcaccaagcttgttacaaatatatttaatcctaggacctctgagagatttagtgaagatgtctgctagttgatcatttgaattaacaaaacttgtagcaacacatcctgatgcgatcttctctctaatgaaatgacagtcaacttcaatatgcttagtcctttcatgaaagactggattggatgcaaaatgtaatgcggcctggttatcacagatgagtttcatctgttcatcctttccaaatctcaactcctgaagaagatgtctcaaccatatgagttcacatgttgccaaagccatagctcgatactcggcttcagcgctagatctggccactacatcttgtttcttactcttccaagatattagattacctccaataaaaacacagtaccctgaagtggaacgtctatctgtgggtgagccagcccaatctgcatctgtgtaaccaacaacttgagtatgacctttgttctcgtacaatacaccttggcctagtgtacttttgatatatcgaagaatacggattacggcatcccaatggctatcacatggtgactgtaggaattgactaacaacactcacaggaaaagaaatgtctagacgagtaatggtgagatagttcaatttacctacgagccgtcgatatctcccagggtctcctaaaggctccccctgtcctggtacaagtttgacattcggatccataggtgtgtctaccggtttatagtctaacataccggtttcttccaggatgtctaaagcatacttcctttaggaaaggaccacaccagaactggattgagttatctcaattcccaagaaatacttgagtttccccaagtctttggtctgaaagtgggtaaaaagatgttgctttagtttctgaataccatcctgatcactgcctgtaatgacgatgtcgtccacataaacaaccagataaatacactgccccaaggagttatgatgataaaaaactgaatggtctgctgtactgtgaagcatgccaaactcttgaacaacagaactaaaacggctaaaccatgctcgaggagattgtttcaagccatatagagaacggcgtaacctgcacactaaaccagactccccctgagcaacaaaaccaggaggttgctccatataaacttcctcggcaagatcaccatgaaggaaggcatttttaatatccaactgataaagaggccaagaacacatagcagtcatggagagaagcaagcggacagaagcaatcttggcaacaggggagaatgtgtcaccataatcagaaccataaacttgagtatagcctttagcaactaagcgggccttaaggcgatcaacctgaccatcaggaccaaccttaacggcatagacccaacgacaaccaactgtagatttaccagagggtaaaacaacaagatcccaagtgccattagagtgcagaggagccatttcatccaccattgcctgtcgccagcctggatgggaaagagcttcatgggtgctctttggaagagaaacagaggatatagcagaaacaaaagcagaatagggtgaagataagcgatgataactcaaaaaattgtaaataggatgaggattacgagtagagcaagtacctttccgaacagcaatgggtaagtcattaggagaaggcagagccggggcaggtgaagccgaagggataggaagtgagtcagcaggtgcctcaagaaaagggagaggagcaacgacacgagggcgacgatgataaacctgaagtggtcgaggaggcatagcatcaggtgtggagacaatgggaatgggcaaaacttcagaaacaggaagagactcagaagtggtggaaaagaatggtgagtcctcaaagaaggtgacatcagcggagataaagtatctatgagtctcaagggaataacaacaataacccttctgaagtctggaatatcccaagaagaggcacttcatggctttggcggaaagcttgtcctgtccaggagtgagaatatgaacaaagcaagtacaaccaaagacacgaggaggaaggaaataaagtggttggtcagggaagagaagggagtgaggaatctgatcgtgtaagacagaggagggcatacgattaatcaaataacaagcggtaagaacagcgtccccccaaaaacgaaaaggaacgtgactatggaggaggagagtacgagctgtctcaacaagatgtcgattgttgcgttcagctaccccattttgttgaggagtatgagcacaagaagactgatgaagaattccatgatgagacataaacgaagtaaattgggctgaaaaatattccctggcattgtcactgcgtaacacacgaatagaaatattgaactaggtttggatttcagtataaaatttctggaaaatagagaataactcagctcgatttttcattaaaaataaccaagtacatcgagaatagtcatcaatgaaagtgacaaaatactgaaatcctaaagtagacgcagtccaacaaggaccccaaacatcagtgtggacaagctcaaaaggagactttgcccgattattcaaacgctttgggaacgagacacgagtatgtttcctaagctgacatgactcacacggaagcgacgacaaagtggaaaaacgaggaaccatcttctggaacttggagagactagggtggcccagacgattgtgaatgaggagaggagcatcagtggaaatgcaaactgcaggagatgaatctgaggtgaggtgatagaggccttgagactcatgtcctatgccaatcgtcttccccgtactccggtcctacaaggtcacaaatttatcagaaaaggtaatagagcaattaagagtacgagtgattttgctgatggaaataagattaaaaggacattcaggagtataaaggacagaagtgagaggtagagaaggcagaggaagggccaaaccaatacttttagccacagtttgagaaccattagctaaggtaacagtaggtaaatcagaggtagtagtaatagaggagaaaagatccttattaccagataggtaatcagatgctccagaatctagaatccagggtccaagagaagatgtgtgggtaaggcaggcagaggcattaccaggctgggcaacagaggcaatagaagcctgagatgtctgagatgcggaggagctcggaggctgaggcagcggagaatcagaggactggactgatagcaacgatcgcgagtgtggccaagtttattgcaataggtgcaatgaggacgttggcctctacctcgggtaccactgcgtcctcctcgagaggtagtttgagaaactaacacagaagaatctgaagcgctatcagatggcaaagtctgagtggacgagatacggaggaggcgagcaaacacatcatccaaggacggaactgatgaacttccaagaatctgatcacgaatagactcaagatccggacggaggccaataagagtaaggaccatgaagaacttgtcaagctgtgtttgttgagccccaacatcaggagtaagaggcatcacagtcaagaactcctccttaagagaggcaatctgaccaatataagtagatagatccaagtcctgttggctgagatggacaattagtagaagccaccttataaagacgctggatatcattcgtgtataatcctttggcctgagtccaaaatttaaaacaagttttataggcctgaagatgaagaagaatcctgggatcaaccgattgccataatatactacataactgtccatctatcttcctccactgtacgcggtcaacctcagggatatctgcctcctgggtaaccaagtgatcctcatatccttgacccataaaccaaagttcaacagaggcagaccaggagcgataattctcactgccaaccaatttctctgagctaatcataggagatccagagataacagaggtaaagatctgatttttggtggtcatattcacttatttggatcgaagagagccctaatacggcttcagattgcggcgaggcaccaccgaaaaagggagacggcctcagatcgcgacgtggtaccaccagaagggtagaagaacacttcccaaggcacgtgcagggattggggtggagaaaaagtagtcggaacttcgccggaaaggctgtttggagggctgacggagacaaaaatccccaaaagaggtacgtgcagggctcggatgggagaaccaggtaggtagggatgctggtcggcgttaggcgaggctggaggaggaggcgcgtcgccggaaaatgtctcacgcgccctcacgcgccggcgcgtgagattcagtcgccggccggagaagtgcgcgtggccggcgcgtggagggttttctggctccgatgcttttgaagaagttggagatctcctccaggcgctcctcttggtgtggtcggtgtcggaaaaagacgtcgccggaaaagttcgccggaaagttcgccggaaaaggttgccggcgtggtggagatccgacggcgatgaggttgtccggagtgggtcgggaagaaaatgaggggaccggagtgaaacacggtcactggacggttcgccggaattgattacatggctaaaccgaaaaaaaaaaaaaaaaaaattaggttttctcctttggctctgataccatgttgagagagagagagaaaggagaaaaaccttattctcattcatatgttttctacttacaattgagagatatatatatatacaaggctaggagtcctaactaccatacatgtgacctatattaacaaggaaagataatatactataaatacattatattcaacaggttgcatggagttccataaccaagacatgatctcagaattttcttcatcccaagagacaaattttggatcatccttgttgatcataagaccaagaagatgacttagtttccccttttctttaaaatacgttttcactaaatgagaccactgcagataatttccaccattaagtttgaagaaagtagagacattttgatagtcaccaggagttgtgttctaggttgagaattgattggttatattagtgctaatttcaaacatgtttggggaagaaaaacaattgtattgaagcctattagtatggaagaaagttgagttaccagcaattatggctggtctggaaatacaacaaatagcagcaaaagaaaaacaaaaaggtggtctggaattaaagaagtttctactctataataaaggctgagcaggcttatggctaagcaatgaagacctagctatggtgggaagatggatcttggcaaagttagttttcccgctctaataccatgtttgctttggggttttgagaatttctctcttgtattatttcaatagaattacaccaaatatatacaaattgtaagatgtcagaaatggaaaaaggagcttatttctagtctaggatatctctatttacaaaaaagaatcagtcgactaaattaataaggaaaaaacttaattaaaaagtatttcctatctagaaagtcttcatacaacttgtgcatattttccaacactctgtttctggcagaaggcacataagggccctccaaatgtaatttaaatgtacaaacatgctgaaaatattctttccattgtgtcgccaatttttataagggaatatattagagaagaaatatccttgatgaattggagggtgaaacttatctacctattggaaaagtgcatttgagatgataaagccaataaaactaattgaagtaatgttagttgcttaagtccttgagcaccatattgatattgaagtgaaccatagtgctcctgaccatccataaattagtgagtttgctttgtgcagtagtggtgaatttgatactgagggttgaatgctgtcaataccatgaaaacctccttctctctccctcatgtatggcttaggcatcagaaaatttttcgtggttaattaatgaacatggaatcatagtaacttccactgggtaaatgtgcactcttagttcaaaggttgaagaacctttgaataggatgttttctgatgaaagtgttgaagattattacaactagcagaagatatacaagctataagtggagaaaaattgtatttctttccatatcttggaagtatacaaccaatgaaatatacaaacaacaactaaaaggaaagaaaaaggaagaacataaataataaggaagaattcctacaaattaaggattatatacataaatatacacctatatatgtatatataacagtacacacagttgtacaacttatacaattgtctatcttctgccagctataataatcttcaacactccccttcaagttggtaaatagatattatccattctcagcttgccaataatagattgaaatgcaatactgtttaatcctttagttagcatatctacaagttgaccctcggttgacacaaatggagtacaaattagtctactatccaatttctcttttataaaatgtctgtctatttccacatgattggtgcggtcatgttgcacagggttatgtgtaatatcaattgctgacttgttatcacaatatagcttcataagtcctttccatgcaatctttagatcttccaaaattattttcaaccatagaagctcacaaactcctaatgccatagctctaaacatagcttttatacttggccttgcaactacattctgcttcttgcttctccatgttataaggttacctccaaggaatgtacaatagcctgaagttgatcttctatcatcaattgatccagcataatttgcattcgtgtatgctttcaatgtcaattcattgcctcttttaaacaacactcccattcctggagtacctttaagtattgtagaattcgacgtgttgctcgaagatgtacttattttgggttgtgcataaattgactcaccactcctacaacataggttatgtctggcctggtatgagaaagatagattagtttgccaactaatctctgataggattctctatctaccttcacatcttcctgggcctcacaaagctagtgattatgttcaatgggtgtcgccactagtttacaccctagtttccttgtttcagttaataaatctagcacatacttttgttgggatgtaaagatttcatgtcaagagtgagccacttcaatgccaaggaattattttaacttgccaagttctttaatcttaaattcttgtaataaacacattttcaatgtctgcattccttgcaagtcatctcctgttaccactatgtcatccacataaactaataaagttgtaactccccttgaaacaaaatgtttaaaaaacaatatgcgatcaccctaactttgtttgtaacccaaagctttcattactctagcaaacctgtcaaaccaagccccgggggactattttaagccataaagtgcctttttcaacctgcacaccttattcttctctaactcaaaccctagaggaaccttcatatagatttcttcatcaagatcatcatgttaaaaagcattctttacatcaaactgctgcgaactccatcaacaattagctagtaaagatactaggattattacagtattcatttttgcaacaggagcaaatgtttcaagataatctatcccataagtttgagtgcatccttagccactaatcttgccttatactatttgagtgatccatctgctttatgtttcacagtgaagacccatttacatcccactaacttcttttccagaggtaattccagtaagtctcatattttgtttttctcaaatgttgagataacttctttccactttttaattctcaatgcttcagagacagtttttgggatagcaatagtgttgaggtggataagaaaacttttataaccactagacagcttctcattggacaaagtaagacaatggatatgcaagttgttgacttcatcttaataactgataatgatctaactcttaccataatctttgtaaaatctaagcatattcagtgaccaagcgattatcttgtttggtagatgagatctttgtcttaatctcatagatttgtgcagcatctcggactttggaataggtctgcctacaggattcccaaatttcttttactgttgtcaaaaacatgctagtatagttgacgtttggcatcatcgaattccatatctaggacattaccattgagtcttcttcatcccatgcaacaaactttgaatcatttggctttggtctcatcctaagaaaatgactcagtttgcccttccctttcaagagggttcgaacaaaccgagaacacttcaaataatttttgtcgttgaaacgtaaacctggttaaatattctgtagctctcctaactagggtgttgatgacatcatttgttgatgttggattagggatttgttgattggtagattctgaaacctcaaacatgtttttgggcagaagtggaaggaatcaaataaaaattaaggattgcagcttaggccacaacaagaaaatagagcaaaagttttgccaaaaaaccagcaatgaaggctggaatatcagccctagaggcaatcaaaaactagaagccatgagtccttactaaactaacagaacattaaggaaaggaataaaaacctaaaacaaagactttatatcaactcacagaactgatcgcaagtcactcactcagtgcattattaatcgccaagaagattctatatatatatacacacacagagttgtacaacttatacagctgtatattacaattgtatatctcctgccgactataataatcttcaacagaaaggatagtaactctcatgtgtgatcttagttccccacaatgaggatgttttctgaggatttggactagaattattcacaatatgggaataggttgtgcaagaactcttaaaatttatactttccaatctattttcttataattgtagtgtaaggatgataaagtgttctacacacctggttgaaaaagtaggttcctctgtgcacaggcaagaagccacaaaagggaactcaagaaaaggctgcagtcagagaattatgtattgaggttgtttatattgtcgatattcctatggacatggaagtagaaaaataaaaagttcaagcatcatgtagatatctccagcaataatcaattattttcatggtgtaacgaatatccatcttgctttctgatacacagctttccaagttgtatgttaacatattgcttgatatttcttgatatttcttccatggtgattattatcttgatgaaatgagaggatgcaagtcttgttctaaactaggaataagtctgtgtcacagctatttagctgtcctcaagagcaagttccctgcagtaattgaaggttgcctcattcagaagcctagacatcagtctagaccttttaactctaactttctgtatggatgtcattgtggtctggttccatagcattccacttacaaaaccaaatatccttcaacacatgacagttagcttagcaggcaggaattgataaacaaaagtccaagttttgcatgatgatgtatgatgtaaaactatggaatggaactgtttacaacaatcactatttaatatctggaaatttgataatttttatgctataatttttattttgtttgtttgacaaaatataaatattctgacagttgctgtttggtttttttattacatgtaaaaagttaacctcgcaaattattacctttgagcacgaggg

SEQ ID NO: 11235 - DNA, 13290 bp, Vitis vinifera
  Intron number 6 from transcript GSVIVT01027318001 (locus G SVIVG01027318001) derived from phytozome v7.0 (chr-ID chr1 3; pos 16668105 to 16681394 reverse strand)
atcgtatttcctttctaggctcccaggattctttggtaattaaagtctttagttcttataattctttagtagcatttcaacatatacttttttgagaatacataccttgaaagtactcaaactttgtcaaatttgattgttgcaactaataatatagggcaactattttaggatgaacaataaactggtggaactgatatattaattaacttttcaatgatttagatttagcatcttttctagatttggtacctaagagaattaaatacataaatgtaacatataagaatatatctatagagaaccacccatatctaagaccttaatcaagaggttggtttagagtgaaatttaaagtaatgttatggaagtgatacttttttacatggctttttttataagcaggcctagatgtaagcatcttctaccaaccctagacaagatcatccgatttgtccttacaaattctattcctgctctcacactcaccatgttttcctactcttaatcaccaaatttctatttcttcttggatggtttcaagaaaactactagagaaaggaagtagaggggaaagtaaaaaggaaaaaatgaaggaaaataataaatatgttataaacatatacataaatttatgcatatcataattttccatgttatacctttcatatatatatatatatatatatattcatataactatcacaattattgtgaaagtattcattatagtcattatgattgtaaccttgtagggttcggtagttgaaaatatataacttcagagttcacttttttttttttcaatttctctcttaattattctttttattttcttttcatgtacattatgctatcaacatgattataaggtagggagagttttcttggtttggaattccttactccaagcattgctttctttgaaaaacttatgttgaaaggcatttaataaatattatatattaattagtttcctaattctattgtaatttctaattatttcacactatcataatatgaaatttttatttctcatagccaaaagtatgtagaaaagaatgtgtgtctatctatatatatatatacataaggctttgatatggctaagccaaggcataataatgttattttgtgaccttcaaaaactttaatttaaagaaatgttttggcaacaactattgtgtgtatctctattcatctccctagctaaaaagaatttttaaagaaacaaccagctagtatagtatttggttgtcttcatagggattgttcatctaaaacttaagatttttcattcaagttgatgaaaatatgagattaaattaatttaaagttgaaataatgagctgataaagtatccatgatgaaatgaatatgtagtgactcagaatttgatgaaacatataaaaggtagagaattaccaaatgaatgaagtatcatccaaatagattcatgcctaagactagatctacactttgaatatgatcaattccatgcataaattctattgaactttaaatgactatttggatatatcacctaccatcaaagtataataactagtataaaaaatgatattgaaatgctttgattttccattgcctttattgagatactccttcaacttcatttttcaaaatccatttcaagtacttataattctctaaactttcttttccaaatttgaaccacacattcaaatcactctccaaatcacttttcaaaaatgatattcaagacttatatccccctttaattctcaaattatacctcactcaacactcatatcttctctttttcatctttgcatatacaaactcatcatttcttgcaaaacttcacagaaagtgtcaacaaattttaaaattaacaaaaataaaacaagacaaaggcaagcctattctactaatacacaaaagaccaaccatgcttcttcattcttcatcttaaaggtaggtcaccttttcttaagctcgaagtcttttaaaatcattccttcagactcatcccattaaacttaaaatcatttccaaatctaggattgataatagtgatgaccttagaaggatgcaccaacttcacaacataagacctaatccatttagaccttaactttccaagaaaaatgtgaagctttttatcatatagtaacactttctttttttgaattctctccttagaatctctacatcatgacatttattattctttggactccttgctatattcatatgtctcattcctcaatgcttctaattgcgtcaaaccaagcttaatcttctccctaaattgatcctagtcaaagttgagtcttttaataaccttatatgatttgtgctcaagatactagttagtggcaagccttttcatatacaactcaataagaagacatcctaagattagttcaataagaagacatcctaagattagttcaataagaagacatcctaagattagttttatatgcagttctatcatcttacaaaattaaccaacttaactaaccggtattttctacttatgttgaccaacttcattaggatccccttaatttatctattagcaagctctacttgatcaattacttgaggatgatatggagtaattacttcatcaaatttttttttgggttttaagccttgtatcatgtgcattgataatttctttctttctattgttttgatggacactcagcttcatcatttcacattgtccatagtttgtggatacatagggaacacaattgtgagctcctaataaattgatactattattcacaacaattcatgaacctgggaaaatttagtagtgttatggtatgtcaccaacccatgtaggtaggataacttgtcttagtcatcaaagtgggtctttgagatggcatgtcaatgtctatggttacaaattgaacaacacctatggagaacatgtctatttctgtgtaaatgacatgtattcttctagataccatcttgtagaagttcttaaccttaagaggtattcaggctactatttgggttaacaatcactttgaatcacattcaaatgggactcacatagaagttttacattctcatgatcttaggtggttgttgattcaacatatagtttgtgtgtacctaagatatgcattatgatatgccatgtattaggaatgatatatctcctttcagtaattctaagatgtatgatgaagctaaatccttgatcaagattgtagggaatcccaaacctctctatttcctatcctcggcttaggttaggtgcatgaaaacttcctaaggcttctagatcctatgcaacagaagcatatataacatttttaacattcaaggatctagaaaaaaatcttttagaaaactttacctttgatttggatgttcccaaatcaaatatgtttggagaatatcaaataccaagttgtcggaagcctcataaacccatatttttttgtttgatgactcaacctcaaaccttagcactctaaatggtagggtgtttaggagattggaggctaaaactttctctactctttgatggtgaaagaagactcattagaaaccttaacccttaaagaggtatttatagggttccttactgggtttaagtgacttaagcccacataggcttgggttacttaatctaactcaaaaagggttttaattgattaattaaccaagtaaagttatccaattaatcaattaaaccaatctagaggtaccgctcactaacccctatgcaaccttgtgtaattaccaaatacccttatgcacataaatgaacctaaagcttatctaacccttattaactatgccatcaaggtatatgagctcaaatggggaccattgacaatcataagacaatattggctccctcataatccaattctgaaattgattcaacatctcactacatagaatcaactacactttagtactctatgtaaaaataaaaatatgacaaagctcgaatccgtaacttattattcactgcatgtagactccccataaactgatatctataatataacaaagtagtactatcacttatcaagattaccaatcaaatccttgagttacaagtcctccctattaaatgatcaattgacatactctacctctaaaaattatatgtcaaatttcactaagtgaaatgctatggccatagtcttctaaatcacatgtgctttggatcacctaaggggacataccgttccaataccatgatatctattaagaatatctattgtcactagcctccatcaataatgacctaatccatagggatatatgaccactttagggtctcacccataagtcaaagcctcctattgattttggcataggttcaatatcctctcaaagctgagagtccatgcagtataatagcttagtgaaccaagacaattgatatctttacatcgtgattcaccataaaccctgtcttgtatgcatcacatacactagtgtactcaccatgggaaaaacatctcgatgaccaagacaagtcattcctccaatttgttggaggtagtgcactacaatcttggatggattgcccaaatccatgaaccgactatggattactcatcactttgcaaagaacccatgacttggatcttctatgcaactcttaatgcacccaagttatgtacaacgcaagtgatgtaggcattcatgcttagataaccaattaatgcatacgggataaagggaaaccaagaaacatgtataaataaatttatgaatgaatctcaatttgttacatcattttatgctttctcggtctcaattctaacaagggtaattccatttgattagtggaattgatattttatacttctaggatatagtaacatcaattgatcatggaaaatgtgaatttgtaactcaaaagctaaaaatgtaaggtattggtggataacacataccaaccatattacaaacatcaatacatgaggaacaaatataacgattagtaggttgtgagataactatcaactttatgtagtttgacctaattagtggagtgcaatttgtctactttagtggattgattgattgattgagtataaaattatgttttattaatttcatgggaaccataataagatgttccattagtctctggtttagctaccttcataggtgtaaattttgtatgtgaaattcgagactctatgggacttggagattggatttgttttctaataaaggaggatattttggtattttccaccttagtatataaaggaggccggaaagatcaaatttaaattattcctctcattttcatctctaaatctatcaaaaaacaaaaccaaagagttttctcttagttcaagaacaagttcaattcaaatctctcaaagcatcattgcccactcgatgatacaccgagtagaattgattagaagatcatgtgtattgagctacaattcattctaaaccaaaggcaagattgttggtatttgatctacaattcgagtttgctcaaacctaggtaatgatcttgtttctcccaattgttttgttgcaaaagtgaggttagccacatgttaggcagagaccttttattaccttccttatacatattttgttgtgggagctgagtgacatcttaagatccaataggtttctaaaagtttattgcaaaaatgacttcctccatcataattgagtagcttggcatactaaaccttgagaaaatattatttcttaggagcatgattacaactttatgatcatttgagttgtaaggtataacttccacccacttggatacatagtccacaatcaatatgtatatgtatctaaaggaattaggaatgggcccatgaaatctatgccctaacaatcaaagacttcaactataaggatatcatgaagaggcatagatcacctcttgttaattaggcccatgttttgacatctcttacaactctttatatggtttcatgcatctttcatcatcatattccaatatagactctgtggttcaactaccttggcatttattttcttggtggtgaagtgactaccataagcatcatcataccacattttcaaaatagcttgagttttaccttttggtatgcattttgtgatgatttgatttaagcaatacttataaaaatatggattatcccatatataatacttcaccttcaagagaaagaaatcttttagctccaatatttcattcaagtggcattttaccaatggcaaggtacttgacaatgtgagtgtaacaatgaagatttcccacaaccattaaaacatcatatggaaaagcattaatgattggttcttctttcttgtttcttaactttaataataactcttaacaaacagtcaactactatatcatagatgtaccgacgagtaagatcttaactcgttcaaagcataaactactactagatgttcttttctattaagttataattcctttatgcatcattcatcatttttcttgcatagtaaaccacgtaagatttaacatttttttctttgtccaaaaatagatccaagagctatgccactagtgtcacacatcaactcaaatggtaaattctagttcgatggtctcaccagtggtgaagagtttagtttttctctcaacacatcaaattcactttaacattgagcactaaaattaaatttggcttctttcaacaataagacacctaatagttgagctatcttagaaaagtccttattagatcttctgtagaaacccttatgaccaaggaattgctttactctttaactgaagagggacttggtagcttcaagattagcttcactttagttgagtccatttcaatccccttatcaaatataatatggcttaggataatccctttactggccataaaatgacatttttcataatttaacaccatctattttttatgcatctttgcaaaactagatacaaattccccaaacatgattcaaataaattcccatggatagttatgttgtctatgagtacctctattatactctacaaactaggatggaaaaatgttgtccatatacatcgaaaatgtagtcaacaattacataatctaaatgaaatccttctataagcataggtgcttaaagaacatgtaaagttcatcttctattatcctctgatgttgtagcaatctaaaagtagcctaagtacctatccaaaaaaaaaaaaaaaatagaaaggatagctagaaactctctctaaggtctaatccaagaatggtatagaaaagtgaccctttctctacaatatcaagcatttgttaatttatatgaactctctaaccaataattagtttagttggtataaatttccctttctcattagttaccacaatgaatccactttttttttctttttttctttttttgcacaacttgggttagactcacctaagccccattggatttgggtaaattattttagcattcagcaacttgataactttagcttagccatcccttttacatgaggattaaacctcttttatggttcacaaactgatttggccccttcctaaaagacatgatgagtacaaattaatagactgattctctttagatcttcaacagatcgacttataaccatcttatatcccctcaccactttcatcaatttttcttgttgatcatatgtgagagaagcaaaaataatcactatttttccttcattagcctccaagaatgcataattaaggccttttgtaagtggcttcctttatgtattttcatctttgttacttatagcctcttttttagtacttttagaaatgaatatatcatcctcttctttccacaactccttaacatcatcatctacctgataatgactcttccatatcttgcaactcaactaaaaggttattcaattcatctttcaacacccattaacatgcttttggataattgagtcaagaagaaacatcttttcatcatttgcctctttaattttagttagttatctactcatatgaaatatgttggtctatagagttgcaaaactctatttctacaattaattagtgcatttgttgcagttaacaatggcctttctagaataattggcacaacatttacctatctttagatcgattcaatgtccaagactacaaagtccacatgatagtagaatttgtctatttgcacaagcacatcctccaccattcctttaggaaatttgattaacccatttgccaaagatagtgatgtgtgttttttttttttcaattcctcaaactttgatattttatagagtgaacatggtaagagtttacactagttcccaagtccattggagctttctccacaaaagattctctaattgaaattgagatagttgcatagccaggatcttgatatttgatcaaggtcttggattctatgatagcacagacatgatcaattaaaaaggtcttcttatcaattgaaatttcctcttgacaatacacaagttcttcaagaattttgcacaaacttgaacttgtttcatcatgtcaaggaaaggaatgttgaccttaacttgctttaaaatttctaacacctaatatttgttatctatcttcttcctttttgaagtagctagaaatggagcaactatcatttgatttctcctttccactttttctggttcctcatgcttttgttcgtccttcttgttgtttaaattttttaaataagaaactatagaactctaattccctttaatagtaacattcttctcaatttcatcctattattattattttttttattaaagtcaatacccttccactgctcaaggttactataaccttaacctcctcatgactagaattgccagcattaccttctcctaacttgcatacaactctagggttttgttgaggttgagctagaaacttcctcctttcaatgtttccttcaatatttagcttattcaaggttgtttggattttgtgtaatcacttgagaagcttaagcattaaacttaattttcttctctcacataaaatttaagcattaagttagggctactgagcttgttcctattgattttccttactcccttgattcattccttgacctttaagataggtttgcgtggttcctccaaccagaattcctttgctgcctaaacatcttccaattgataccaatactcatcctaatggcatttgcttgctcattgaagatttctttaatgatgggaatagtgggacgcatttgtagtatgctccattgattcataaattgcacatgcttgacatcttattccaacttcatgaacaacacttttttctcttttgattttggctcctctaatcttctagctaagaatgtattctagcttgaactttcaagcaaagaagtctccaccaaatattgttttaactaactgcttcatttgaggtatcatcccatcatagagttgtcaaaatcatggtgtgaacatgcaccaatagcctccttaaacctatcccagctaacaaaaaaattttccccttcttatccatgaaattcaagatttctcttttgagactattggttctataagcacaaaagaatttgtgaaggaaggcagcctgcaacccaatcaaattttgaaccttcttagccttaagagtgatgagccaaggcttggcatggtcattaagtgtcaagggaaagagtttcatcctcttgagatcaatgcgaccattagcatcttgaaatattaagcaaatcttttcctaatggtgtgcataagcattttcactttctcctcctctaaaaatgggcaagggcggtgccaactaagggtggattgcaatgtgcttagtaattagcacaaaaagggatgaagaatccatcctaagaggggtaagatgatcacttatatacccaaattgttgaaaaggttcttaaaccgacatattatgactgtgttggttgtgtggttgatctttcatgattttattgttaattagcttctaaaatccattgtaatcttccaaaatgtgttccttctctaaaaaatgtgcatacaacaacatctgctttcacatgactagaacaaaagcaaacaaaacacaatctacaaaacttgtgctagatccacaaagtctatagtagtgtatcacccaaagaaaattttctagaagttccatagatctataccttagattgaccaaatccttgacaatgatgctaacatttggttttgctttgtcattgagtgagatcgatgcaacaattaaaggtcaattttaggttcattaatgattatttcatattattattgtttagttaatgtttaatttctttgaaatctcttttaaaataagttcacaattaagttttagatttgactctgatcttgaattgatcatagtctatagttcccaaaaccaaaaatgaatttaataaaaaagagttaactatagcagctaggttgtctccacaaggacttttttagttaattataagacctttgaatgaaaatttactagaaacttaagatcaaaatcttgtgaaaattgaagaacataaaattttagtaccatgagaagatatttgagtgcattgacttataaaacaaaataaaaatgaatgaatttgatgtggaagtccctctagatggatttgtgtctttggataagatcttagccttaagtaggattcattctcaagacaaactaactcggaatctttagaattctggatctctagaatttggagctcattcatcctatgatccatcaaaagtttggtcataagtaatccaagagaaaatcattgaatcttatatcttaaacaagcattcacattatctacaaaagatcaactatgccttttcaagagggattttcagagaattcttatttaagatgaagaaatccaaaactctaacctatgaaacacacactttctagctttgatctttaccttggagccctcctttgaatgtgtaagagttcagccactaagcatagataaattggcctttattctccttatttggcaccaaaggaaatgatagaaaatgatcgaaaatagagagaatgtgaagggagaattcaaattcaaaaattgaaaattaatctaattggaactagaatgttccaaaaggctctccaattactaacagcctaacctatttatagaatcaaatcatccaatgggaagatctcattattccatatcatcaaatggtaacccaaagcctatatattcaaacttactaaagaaagttacagcaaaacctcatcagtttgaatgaaaaataggcaacaaaaatattctggtattgaaatgctttgatactacaatacatacttcaatacaccttgacaaacaactccaaaatccgggcaagccttccatcattgaacaatttgacacctgaactcaatgcatttataatgttattgattctttcttgattccatatcaaagcacttgtgtccatgtattaaaacctagagctaaaatcctccacccctctaccaagagtcaggttcaagattttggtgttgatgtggcttcaataaaatcagcactttgttgaaatcaacatccagcttcctgaagtatgctatgatgctttgtcgaatctggtatcaaaatagagagcatatttcaacgcatgctaaaaaaatcctttctccaactctgctcaaaattttttctctatttctgatttttgtcattctctctaagttcaaaatattaagtttcctttaattttttttctatacaaactgttggatttcttcattagtaaccaattcggaactagcaagaagatttataatttattttattataaaatctaaaatttagggcacagaaaaccccatgatttgagaacaatatggttctttccgtgtatttcagatatatgacatttaggtttttcaatgacatacttgcttacataaatacagttcaatttgcttttagcttttcaatatggttcaattcaattcctttctcttatttttctgtgttccatcaatttccaccacggtttttaagtgtgttatcataaccatacgtggctgagtctttggtctggaggagtaggaaggaaggttgaaggttcagatgaggaatagtagaaaaagggggtaaactttctctatgctttattttttcttgagttggtaatcactaaataagtggaaattctctatgcaattcatccttgattgaaatataaggggtgctcattgtaggtcctttgatgcttgtgaataacttgatcattggcaacctagtgtgatccattgttattgaaattttaggagactttgcaagatgaatgagaggccaggccaacctcaaccttgtgtttagtcaggcaaatggatgtgccttttctttcatagaaaggactttcaagaatgttcttgaaagatcagatgcatagttttttcagtcttcaaatgttaggtctttatagctagaaggatacagaaagtaggctttttgaaattaaatttatcaagaagtcctcaaaaatacgtaaaaatggttttaaaaacaataggaacaaactaacatttgaatgcttagtaggggatgttctaacattaggtagatgtttgaatatctcttagagggcatttgaacattcatcaggatgatatttgaattctctctactagcgtttgaatgtttacctatgatttttcaaattttctttcatattttgatattttctctgaatttctatcttctttacataccatagccatatgcactaatacaaccaacacatatgtaccttgaaaatatgaatcaaggagcttgaggtcatttataaccgataaaactcctagaatgtatgatgtatgagattcactgcaacgatagaataatatcatcaacctatcacatcaacataaaccttacccatccctctattcactccctataatgctttttgaagtcatagtgacaacaagtaataagatgatttactattaattttagctagaatgtgatagattcgaaaacaagaggaggcgatcatttattaaactcaaaccccaagactggcttacacaaaaacaaaactacttaaactaccttaatattggtaatagtcaaaataattcttatgtcatctaatcttttaaaaggttcttgtaagtttttagaaattattcttttcccatatcaaaactctaaatcacatgtttatacgagtcaatcaactcatgaggtttcatctcattctcatttatttgtgttaattggtgtgaaggagaatatttagggcttactggtgcacagctcaat

SEQ ID NO: 11236 - DNA, 17530 bp, Vitis vinifera
  Intron number 4 from transcript GSVIVT01038740001 (locus G SVIVG01038740001) derived from phytozome v7.0 (chr-ID chr1 2_random; pos 269133 to 286662 reverse strand)
tgaaggtaccttctctcctagtttccaaaaaatatcctctttttggctagcttgatggtcaattacttctcctttgaatttgtaatacttggaaatgctatttttcatgaatcctccatcttgaatcctcatcgactaacatttgaaaaagattttgaaatcagatgcagaatgattgtcattttgctttaaaacagaaataacattttaaagctattgtgtttgctttgaaatagatataaaagtgattatcatgccatttttcttggagataagaaacaagcattttattcccatgaaataataaattaaataaacgatgagaaatctttaccccataacaatctgctacacaaatctgatcaaaagaaggaaaaattgtctcttctagaaagcaaaggtaattgcccaaatgtatgactccctattcatcaaggtagaagtcctctaaaaaagagatcaaatgtatggctccctactttgctaagtgttagaatatgtggttgacttaacagatctgattatatttgtcctttattttctttgatttgattatattctatactttaggcaaatattagatttgggagtgattttagaaattgtatactttaggatcaaacttgatttagtttcttatttatttatttatttatttacaatttgtttttatattaccttgtaatccctttgatttagagaatacaaaattattcaaaaacttcatattcatttttggcaatttactctcctctgaagaaaaaaaatcttcattcttggccttcattgccaatattaaatttcttgtttttggccttcattgccactagtttttcatacctttttcgctttttctttcttcaccatgtcaaaaatctttgaaaatacccctattgatgtctcttcatctcatactaactctatcactcatttaaacaatctcgtgttcattttcatttcatggtatgagaggtggaaaataaattttggcaatttgctctcttttgaagaaaaaaaataaaattcgttcttagccttcattgcctagattaaatttcttatttttggacttcattgccataaacttttttattcctttttttgtcttgtcttccttgaccatgtcaaaagtctttgaaaatatcccttttgatgtctcttcatctcaaactaaatttgtcactctaaacaatccggcattgtagattacaatagaaaaattgaatggagaaaatttctttgagtgttcacaattagcaaaatattttctcacaagtaaaggaaaaacgaagtatttatggggtcccattaaggaactaaagaggtttgatttatgttatgaatcataggaagtaagaattctatgattatgtcatggttattgaattctatgctactacaaattggaaaaccattcttgtatctctcctcaactaatgaaatttgggatgctatctcggaaacctattcaatgctatgtgaatttatgagttgaagaatatgatccaaaatacaaagcaaaaagatctcactataacaactgttagatagtgtacagttatttaggttatttacttttcctttttccttttctttccttattgtattgtgggtcccactaacatgtatatatatacccaagtccaatgtgtattataaacagtttttcaataacaagaattagggattctcccttttctctattttcacatggtatcagagcctagggagaaaaaaaaccctaattattttcagtttatccgtgaatccattatgggaaatctttcattgactgtgtttcattccggtcacctttcccatctcctaaagctttccgatcaaccatatcgccgtcataaaaccctcaccaccggcgacttttccagtgacctttttttggcgacgtccttttccggcatcgaccagaccaccaggtgcgcaaggaggagatcttcaagttttctcaaagcaccggagggagattctcagccacgcgccggccacgcgcgtttcttctctgacagcttgaacctcacacgccgacgcgtgagggcgcgtggagcactttccggccacgcgtttccacctctagcctcgcctgacgctgtctagccaccctccatctgtgcttgtgccatccgagccttgaaagtgcattttttggggtttttttgtctccgtcggccctttaaacagccttttcggcgaccttcagtgacttcctctccaccctgagccctgcacatgtcttaggaagtgttcttctacccttccaatagtgccacatttatttttctttactatttggtctctcacagtcgcggatcctcggtttttcttctttcagccgcgatctgaagccgtattagggctctcttcaatccaaacatatttcattctccagataagtagatatgactactaaaagttccactttttcctctgtcatatctggatctcctatgactacttcggagaaattggttggcagtgaaaattatttgtcctggtctgcctctgtggagctttggtttatgggtcaaggttatgaggatcaccttgttacgcaggaggcagatatccctgaggttgatagagtacaatggaggaagatagatgcacagttatgtagtgtgttatggcaatcaattgatcctaaaattctgcttcatcttcgggcttacaaaacatgctttaagttttggaatcaggtgaaagggctatacacgaatgatatccaacgtctttataaggtggcttcttctattgtcaatgtcagccaacaagacatgaatttatcagcttatattggccagattacctctcttaaggatgaattcttgaccatgatgcctcttactactgatgttggggatcaacgaatacagattgacaagttcttcatggttcttacacttattagcctccgtccagatctcgagaccgtccgcgatgagattcttggcagttcctccattccatccttggatgatgtgtttgctcgcctccttcatatctcctccactcagactttgtcgtctgataacacttcagattcttctgtgttagtttctcaaactaactctcgaggaggacgcaatggtaaccgaggtagaggccaatgtcctcattgcacctattgcaataagcttggccacactcgtgatcggtgttatcagttacatgggaggccgccccgcactgcccacgtggcccaatcatctgatcctcagtcgcctcagcctcccagttcctccacgtctcagggtatatccctcactgacagtgagtatgatgactatctccgccatcaggccaccaagtcagcttctgttgcttttgttgcccagactggtaatgcttctgcttgtcttacccacacatcttctcttggaccttggattctagattctagcgcttctgatcacatatctggtaataaggatcttttctcttctattactactacctctgccttacctattgttactttagctagtggttcccaaactatggctaaaggttttggtttcgctcatcctttcccttccctacctctccattctgtccttcatgcccctgagtgtccttttaatcttatttccatcagcaaaataactcgtactcttaactgttctatcactttctccgataaatttgtgaccttgtaggaccggagtacggggaagacgattggcataggacgtgagtctcaaggcctctatcacctcacctcaccttcaactcctgcagtttgcatttccactaatgctcccctcctcatccacagtcgccttggccaccctagtctatccaagttctagaaaatggtccctcgtttttcatctttgtcgtcgcttgcgtgtgagtcccttcagcttgggaaacatactcgtgtctcgttcccaaagcgtttgaataattggacaaagtcgccttttgaacttgtccacattgatgtttagggtccttgtaggattgcgtctactttaggatttcagtattttgtcactttcattgatgactattctcgatgtacttggttatttttaatgaaaaatcgagctgagttattctcaattttctagaaattttatgttgaaatccaaacccagttcaatatttctattcgtgtgttgcatagtgacaatgccagggaatatttttccgcaccatttacttcatttatgtcccaacatgggatcattcatcagtttttttgtgctcatacttctcaacaaaatagggtagctgaacgtaagaatcgacatcttgttgagacagctcgtactctccttctccatagtaatgttccttttcgtttttggggggatgctgttcttacagcatgttatttgattaatcgtatgccctcatctgtattacacgatcaaattcctcattcccttcttttccctgaccaatcactttatttccttccttcttgtgtttttggttgtacttgctttgttcatattctcactcctggacaagacaaactttctgttaaagccacaaaatgcatcttcttgggatattccaaacttcaaaagggttatcgttgttattcctctgagactcatcgctactttctctccgctgatgtcaccttctctgaggactcaccgttcttctccacctctgagtctcttcctgtttctaaagtcttaccccttcctattatctccccacctgatgcagtgccttctcgcccacttcaggtttatcatcgccgtcatcgtgtcgttgttcctcctttggccgaggtacctgctgactcacttcctatcccttcggcttctcctgcctcggctctgcctccttctgctgacttacctattgctcttcggaaaggtaatcgatctactcgtaatcctcatcccatttacaattttttgagttaccatcgattatcttcaccctattctgtatttgtttctgctatatctcctgtttctcttcccaagagcacccctgaggctctttcccatccaggctggcgacagacaatggtagatgaaatgactgctttacactccaatgacacttgggatcttgttgttttatcctctggtaaatctacagttggttgtcgttgggtttacatagttaaggttggccctgatggtcaggttgatcgccttaaggcccgcttagttgctaaaggctatactcaggtttatggttctgattatggtgacactttctctcccgttgccaagatagcttctgttcgtctattgctctccatgactgctgtgcattcttggcctctttatcagttagatattaaaaatgttttccttcatggggatcttgctgagaaagtttatatggagcaaccacctggttttgttgctcagggggagtctggtttagtgtgcaggttacgtcgttctctatatggtttgaaacaatctcctcgagcatggtttagttgttttagttctgttgtttaggagtttggcatgttccgcagtacagcagaccattccgttttctatcatcataactcttcggggcagtgtatttatttggtagtttatgtggacgacatcgtcattacaggcagtgatcagaatggtattaagaaactaaagcaacaccttttcacccactttcagactaaagacttggggaaactcaagtatttcttaaggattgagatagctcaatccagatccggtgtggttctttcccaaaggaagtatgctttagacatcttggaagaaaccggtatgttagactgtaaaccggtagacactcctatggatccaaatgtcaaacttataccaggacagggggagagcctttaggagatcttgggagatatcggcgacttgtaggtaaactgaactacctcaccattactcgtccagacatttcttttcctgtaagtgttgttagtcaattcctacagtcaccatgtgatagccattgggatgctgtgatccgcattcttcgatatatcaaaagcacaccaggccaaggtgtgttgtacgagaatagagatcatatccaggttgttggttacacagatgcaaattgggctgactcacccatagatagacgttccacttccgggtattgtgtttttattggaggtaacctaatttcctggaagagtaagaaacaagatgtagtggccagatctagtgttgaagccgagtattgagttatggctctggcaacatgtgaactcatatggctgaaacatcttcttcgggagttgagatttggagaggatgaacagatgaagctcatctgtgacaaccaagccgctttacatattgcatccaatccagtcttccatgaaagcaccaaacacattgaagttgactgtcacttcattagagagaagatcgtatcaggatgtgtggcgattagttttgtcaattcaaatgatcaactagcagatatttttactaaatctctcagaggtcctagaattaaatacatttgtaacaagcttggtgcatataacatatatgctccagcttgaggaggagtgttagatagtgtacagttatttaggttatttacttttccttttttttttctttccttattgtattgtgggtcccactaacatgtatataaatacctaagtccaatgtgtattataaacagtttttcaataacaagaattagggattctcccttttctctcttttcacaacaacctcctacaataccctaaaaattttgtggcaagagttggatcttcatcaacaaattaaagatggtgataagagaagtcgtggctatgtttcaaaatgcttttgtggagaggagacaaattttggatgcaactctcatagtgaaggaggcaatcaattccatgttgaaggacgacactagtggtataatttgtaaattggatattaaaaaagcttacaaccttgtcaattaggctttcttgctggtaattcttatgaaaatgggattcgatcaaaaaaaggattgtttggattcacttgtgcatatttattacaaagttttcaatgtttgtcaattagacttttttttttttctagatctcgagggggctgagacaagaggaccctcttttgccttatttatttgttttggctatgaaggtgttgcattgccttctagagagggctaggaagggggaagtggagatggtgtggaggtgtctcaccttttgtgtgcatgtgatactttagtttcttgttaagattctcatgatcaaatggttcacttaagttggttgctcatgtggtttaaagtaatttcaaagcttaaaattaaccttgaaaaaagtgaatttataccattaggttggttgcaaatgtagaagatttgatgatgatgttttgttgtaaggtaagggagattccatatacttaggtttgtcactaggtgcccctttcatatcaatttgtagtatgggatgtagtgaaaaagaggtttcataaaaggctattcaatgagcaaaagacaatatatttccaaaaggggtagacttaacgttgattagaagcacattgttcagcttactaatccattatgtgtccttgttagtagtccatcgaagggtcggggtaaggttagagaagatacaaagagattttctttggggaggtggaactttagagaataagccttatttcgtttcgtaagatggcctattgtttgcttggataggaggaagaagggaataggcattagaagtctctctcttttgaattgagctctccttggtaagtggtgttggagatttgttttgaaggggaagtatttgagaagcagattatagaggagaagtacaagaaggaggaagtgggttgccactcctgcaaagcaagagatggttacaatgttaaaagagtatggaaagctataaggaaagggtgagatcttttctttagtagagcctcctttgatgtaggtaatagtaggagtgttgagttttggaaggactgatggtgtggtgaggagctcttatgtgtttccttcccctccttgtatgatgactttgtctaagcaggcttgggtaacaaatttattggaggatttaggagtagcggatcaatggaatttgtgcttctatcagcactttcatgattgggagctagacattgttgagactcttttctctagactattagtgattttggttaggagggaagagaatgatagggtgataggaaggatgctaagaagggtgtgtttttagttaaatctttctatttggttttggagcctaggagattactcccctttccaacgaacatcatttgaatctatggtcctattcaaagtgagttttttttcttaggaagttagatagggaaaagttttaacttcaaattagttctaaaatagaaggtggcctcttaatgaatagatgttttcttcgtaaacttgagggggaatctattgagtaaggattctatgacatatgttgttctttttattcggtgtagtttgggtgatcccctttatggtgaaagaaactttgttaagcatggttcctttatagggagggaaagaaaggcgtggagagcctctcctctgaaattttttagacaatttgatgggaatgaagttgaagagtatttgaaaatggggaaagactaccaaaagttaaatctttcattcctctacaacctttaagcttgggttagcatgtacataagggaaggttcaatgcctttgtttgattttatagactgggtggggtctctttgagagtttttgtgacttctctttcaaggcctttcttttaggttcctcgtgtatacttcatgtgtacttcactatacttttctttgcctatcaaaaagtaaaaaataaagcaaacaaccaaacacattagaagggatatgaagacaagttggaataaggtgtatttggacaaggattggacaggggtccaaaactgaaggaattttcttttggaatctacggtccatgaagtaaacatttattcttttgtccaggaacctttaattgtttcctaatggtaaaactacttagatttttctttttttctttctttttttttgtttgttttgtaattgaactatttggatttttgataatgtatggaatattctttgctgaaacactttatatcatccaccaatttgattagaaaggtttaaatgttgagacaactgcagtgttgcttaatgtctaaatcatttgaagcagccaaagtactttaggtctccctgcagaataagctaggttgtctgaaacaatgttgtgccacagtgcattgctgctttagattatatcttttttttaatgctaatttatttaagaaattcatttttattttaaagaaattcaagaaaataatttctcaacagctgggaacttgcatttttttgtggataacactaataaatagttttgagtcattgtaattgattttgggcagttctacaaagggagaaacttagccatttttgtgatggtgatggtaatcttttagctgcttttcaaccacattgtgttgtcattgtgtttactatccctattttaggggatcttcccaatttccttttattctctctccagttttctttagtctaactattactaggctgactcatgctttgcatatgaactttcatatgttataaaagtatacaatattagacaaatagtatcaatatttatgtttgaaatattaattctgcactacagattctaaaaactatatgcaggttaatattttgttgtatcaaacaatttgatagcttttgtgtttatcttacacaatactatgaagtgattcaagcttattaatatctaaaaaaaaagttggaagataatattgggtcatgcgattgccgattagctatttgctttagaaagtatttcagttttcctaagtgaaaatcttcgaccaattggtttttgagatatagtggtttgataaaatgttaagtatctcaacttttgttttcaccttgattaaatctttccttgttcttatttttatgtaaaatctaaacgcctaaccatcattaaagttttgttcaagtttttaacatttgttaaggctttagcctaagttggcttatatacatagttggccttgtatctaacaaaaacttcagcttttaggttaaattggtagcttaatgtggaattaaagccttagcttagggagctcatgaatttgagtctcaccaatgtttattttccctatttattgagcccatgtaaaggctcaaagaaggctccctgtgagcagggtgttagggctttagcccaagttggcttgaaatctatttttggcccttcaccaaataacttgaacttttggtttaatctagtcgcttaacaatatccttcaaggagttgagaaaatccaaaaaggtttctcctggccactttaggcaagtgtatatcatccaattggttggttaaatttaggtatatagattgaagtgagaggggaatttggtctaaaggtatccttacaaggaatagagctcccactaaaaagtggtcatggtgttttgcctccacttctccaattggtctccaagaagtaaagtccatcttttagcttaccatgcccaatcgtcttccccaaatgatcttgaaaataacaacctgattgagccatggaacatgaacctgaatttgatgaggggtttgcattagaatcctcgaattggttcaacaattgttttagcttctcaatatcagatttgttgaatcccaactatgctgatttttcttcaacaatagctgtgtgattgtcttgtcccaatctagtaggctgatttcttcctttgttgccaatttgtttcaggttttgaggctttccatgtagcttccaacacatgactcttgtgtgtcttggtttgttgcaatagtcacaccacattttatccttgtccattggtttcttgttgtcacttgcattttgattttgtttggttactgctagagcagaattttctgttgtaagacttccacaattttcagttttgttgcccatcaattcttttcgactttcctccttacgaatgtgtgaaaaagcttcatcaagatcaggaaaaaggtcttttcctagtattctttcacatgctttgatcaaattcaggattaagtcccaacaaaaattgaaagactcgttccatttctatcatgtccttccatcttctttgaatcagcagtagattccatctccatgttttggtagagatctaactccatcaataaccctttgagagagttatagtattccgtgacacttgaaatcccttgcatggtattcctaatctgtcgcttgatctgaaaaacttgggcggtgaaaccaacctttgaataagtcttattaacagcctcccaaatgtctttagtcgtgggaagaagtagatgtcttactgatcgcaggttgcatggagtgtagtagccaagacattaccattgagttttctacctcccaaatctcatacttaggatcactttcaagtagtggtcttgctgtcctaataatgtatttgaatttccctttgcttctcagagaattttttacagattgggaccactccataaagttccttccatttagttttgatgtggtgatttgaagggtaggattttcagggtgtatggatgcttgggcgctgaaagaagctactgcagaagtggtgttggtgggcttaggtgctttaaacatggttgaaggagaatatgatagtaggaactgaatgagaaggagattttcttaggtggtgacaaaaaaataaaaaataaataacagcaatgaaggctatgaattgagaaataagtggaaaggataatgacaatgaaggttgtgaagtaggacacaaaatggtggcaattaactccacctaaacaaaacaacaatgaaggctacgtgtaaacccaagagcctaaatggctctgataccatgtagacttgtgaaagagtgataaaaaaaactgatttgttacctataaaaaaatatttcaagatatatagaatacactagttgacttatagagctctaaacaaggaaaaaaaatcctaacatcctatacatagcagaactcatcaatgggaataatatagctgtaaatatacaactaatttatagaaaaaatgtctattgcaacaaattattgcctattctaacattgccttggccattgaaattgtcaatcaattcatgcatgcaccaaatgaagtacatatgaatgcaatggtgagaaattttagatatctcaaaggagcacttaggaaaagatttctattttcaaaaaacaacaacccaaaggtagaggcataaactgatgctaattgggtaggcagtattaattaaaaacaatttatttataggtactgtacatttgttaaaggcaatttggtgacacagagaagcaaaaaacaatcagttgtgacaagatttagtgaaaaagttgggtttatatcaatgaccttaggaatttgtgaactcctatggttaaaatctcttctaaaggaactaaagaccacgaatgtcagttcatggggggactaatgcaatggatagcaaatcccggatctgagcactttgcgtcttgttatcatttacatagggtattggagtgcaattgattatctatagtgggatgttgaattaactttaaaattgaattctaagagagctagttgtcacgggcctagagttccaacgcaacggcacgacctgtgttgtgaccccgtgggcaagaatcaaaggggctcaacctgcacaccgtgcatttcaatgtcattatgctaactagtttcgttctgccatggactcattaggggaacgactctagctcctgaccagtttgtgtaggagatggccaagctcctcttcattgtcaaatccttgactagtgacaagcttctcaaacttaatcgggtcggcttgcttgaactctgaagaaacatccaacattacatacacggtctttccctggagcaatttccattacatttacctcaaaccaatcaacatactaatcttgatcagctccttgcctacggtcatagacaccaaacaaacaatccatgacgctcccccactcaatctcttgcacgccctcatgtaaggctttatgtcttcaccaaatgatgccttcgaatgctgctgctccccatgagccattaatcaccagaggttcgttgctgaaacccactgggcggctgggccaaaggggacgtccacacctcggacacgacatccattggtcgtgttaacccgataacaccccagaagtgtgcacctaaacactaacttccacccctagtaggcgacagtcatgtgcactactagaacagccagcgacacctcgtgatccagaggcacccatactctttcacgggtcctcataagtgtagcttcgattcatgccacagggcccaccttcgcactgtcgctacgttaggcttcataggctacttgtattgccatcgggagagataactcgtcggccatagactgtcaaaagggaacaccgccatgcttgacctcctgccttgctttgataccacttttcacgggcctagagttccaacataatggcacgacccatgcagcgaccccgtgggcaagaatcaaaggggctcagcttgcatgctatgcatttcaatgccactatgctgattagtttcgtcctaccatggactcattaggggaatgggttcagctctcgaccagtttgtgtaggagatggtcaagctcctcttcactgccaagtccttgactagtgacaagctccccaaatttaaccgggtcggcctacctgaactctgaataagcatccgacatcacatacacagcctgtccctagagcaattcccattacattcagctcaaaccaatcaacatactaatcttaatcagcacctctgctatgctcacatacaccaaacaaacaatatgtgacacaatactgtcttatgactctcagtggtcctcatttgagttcaaataccttgttgacacaatttatgagagttagatcgacttttggttcacttatgtgtataagggcgttttggttagtacacaaggttgcaccagggttagtgaacaacatctctgaattgggctaattgattaattggatggtcttgtggggttaattcattaattaggacccaatttgaactagattaggtgacctaagcccatatgggctccagtcaattaagcctagttaggaactctataaatactccctagaggctagggttttcacttttgtcttccaccatctagagagaagagagagtcctagcctctagcctctagcctcccaaactacccatcatttgtgtaccaaagaatgaggttcagtcattgaatgaaagattgtgggtttatgagacttccgaggacatcgatttaattcttcaacacttgaaatttagtttgtgtggataagaagaagggaggcttaggaatttgcaatatagcgaccctaaataaagccttgcttggtaagtggaattggagatttgcaaaagaaagggagcttctttggaaacaagtcatcatcgggaagtttgaagtagaaggagggtgatgttcaaaaggaatgaggggagtttatggtgtgggggtgtggaaagccattagaaatgattgagaaggcataaggtgtagatctcgctttatggtagggaatgggagaggggttaagttttggaaagacttgtagtgtgaggaccaatccttgaaagaagctttccttaacttatttcttttggttgtaaataaagacgattaagtgttagaagcttgagaggaaggtggggatttaggttgttggaatccctgcttttcaagacacctaaatgactgagagatggatgaagtggagtctttgttcagcaaacaacaacccttggcagtgagaagaggagtggaggacattttgagttggagagaaagaatggaaaattttcaattaggtccctctattgctcctacacgagggtctctaaagttccttttccgtgggatatgatttggaggtcttgggctgcaatgagggtaagcattttagagtagaattttctcttgatcagttgaaaaaagggggtggactatcccgaataggtgttacttgggtaaagaagaggggaaaaccaccaacgacttacttttgttttgtggcaaggctagaatgttgtggagtttgatctacccctttttcggcgtgcagtgggttttgcattcctcagttatgaggaatttattaggttgacatggtccttttctgggtaaaaaaaggaagaatgtgtggagggctgcctctttatgtttaatgtggacattatggaaggaaagaaatggaagagctttcaacaacgttgagcagtctgaccaatcgattaagtctttatttatgtatacttttgtgaattgagtaagggtttatatagaagatcacactgtatctatgattgattttatagattggttgctcttaaagtaaggggaagttgtctccttactatttcgatttttggggcattatttgtatactttgtgtgtattgcttttgccacttctaggcgtttctaatgcaagtttttttacctaaaaaaaaaaaaaaagaggtttgggaacacccaaacctatagattagtattttaaccccaaagatcaattttaaaaaaaattggtattacttctattgcatagatctaagatgcgaacaaaattaactacattccattgccctatgtaaatagcaacgagatactaagtgctcggtctgtgacttgttatccattgcattcaattcccccatgaactagtgtccatagtttaacgaggtgaaaactatcagtctctcaaaactacctctactatcattgagttacaaattctcctattatgtgatcatttgacatatcttagctcacaaagagattatgtcaaattccacttaaggaaccattatggccatagtttacatgaacacacctccttatgatcacgcaagagcacattttgtctcaatcctatgagatattatggtgcctctattgagaatacctagtgctaccagcttccattaatagtgacctaatccataaggaaatatataatcattttaggacctcacctatatgtcaaagccatttctaattttgacacaagctcgatattctcccaaggttgaaaaacaacacaatgaagcaatttggtgaagtcatgactacttgattaccttatgttatgtcttattgtaagtcctatccaatatgtaactatacacactagtgcactcaccatgagaaaccgatcccgatagccaagaccaaccctccctctaattaggaggtagtgcactataacctttaatgggttacccaagcccataaccgattgtgaattaatcatatacttgcaaggaatccatgatttggatctttcgtgcaacttctaaatgcacccaaatcacatacaaggcaagagatgtgggcgaaaatgttcacaaagtataatgcatggaatgagggtagataaaagtgaaatagaaactttattaatagataataagtttcaaagtttattacattatgtcatgcttttaagggttctatcctagcactggttgcatcgagttccaaaaccaagacattatcattgaaacatcctcatcccatgcagcaactttgggacttttgggcttggtaccagtctaaatgaatggcttagcttcccctttcctttaaggaatgactgagttgatgacaaaccaaataattccagccaacaagtctgaatgacggttgaagattttggtatgcaccgatagaagagtgggttactgtttgatcaaaattttgggtggagggagatagttagacattagtagatatttcaaacatattgagaaagcaaataaaagtagaggaagggattagaagtaaagagaacatgggagaaccaacaatgaaggttgtttttctctaggtcgatttcagcaatgaaggctaagaatcattaaaactgcagcaaagaagactgctcttggttatgacaacgaaagtcaaagaacaaagaaggaattttaaccaaaaccttgctttgacaccatgtgaacaagcatagaattgtatttcttgtattgatggtggaatttacaaggaatatatatagagtatacagggaaaacaataaaggaaaataatcttagaattcattgaatgcaaacaccattaatcaactatacaaacgaggaaagaatccctaatttattgtcctaattttatcactgatttacaactctaatctacatcttgtataagttgtaaatttcaatcaatcacagtcaatcaagccatgaatcaatcataatcagtcaagacaatccatgttgcattgagatatttattttgatgccataactatatttagtggcaaaatggattatgattttcctggattgtgtagttcatcagctagtcattatcttatggtaatgatatcaaacatgcagatatctcacgcaagaaattatttattacaggtagtgg

SEQ ID NO: 11237 - DNA, 5122 bp, Vitis vinifera
  Intron number 4 from transcript GSVIVT01021720001 (locus G SVIVG01021720001) derived from phytozome v7.0 (chr-ID chr1 0; pos 10003870 to 10008991 reverse strand)
gacttgagtagtgttcttttcacatccccatcaataagcttgtatttctagtctaggatgatgatacatatgtgatcggtacgtactagagataatgaggcccatctccttaaatatgtatattgatcttttaagtgtgataaagtaataatgtaatggtttttattttttattttttatttttctttccctctccctttcctctgttttgcttaaatgtcatcaatattatctcatgcaaacatcagcgccaaggcatctccaccagctacacttatcacattcacaccactgtcatggtttctatatattaacggatccaactttatgccctgccggaccattcaatataactggcatgtccagtaatgacactggggaaacaaaggatcaatcagaaagtgataaggagatccagtgtcaaatcttgggaagaggaaaagaaaaaaaatttatgggtttttctatattatcagatgtgacaacagtatgaaaatagtggtttcatttcttgatatttaagtcctttctttaaccttagtctccttaagttatccccactaactcccaattttcttttttaacttcactcaacaattcaaatttatacactgtaaagttaattttccaagcatccaaaagcgaagtcttagtgtttggtaaattaatcaacttaatgatttaatataacttaatgatttaatataatttaataatttaattaagtcactaaatagcttaaacatatttgataaaataacttaatattacaacttaaagttatttttaattttaaatattaaatcaaattgattaacttattcttaatctccaatcttttttctttgatttacccacaataataaaagtatattttaaaattatccatgatttattttttataataaatattttattgttatcttatatatgtaccatactttaaatatacattcataataaatttacaatttaaaattaatgaaaataaataagttaaaattaataaaaataaatatgtgaatttcacgatatagaataaaatttaagttagctttatcaaacaattttaatatttaaagaataattgataaatttaagttaacaacttaagaacaatttaatttaaaatcaattaaattattaaataataaatattaagttttatcaaataccctaatggttttagcaaatttgactaataccttaaaggtaaaaggatcaaaatcttagggagataatcttggagataggaaggagaaattaattatagagggaaagtaattaagttggaatatgttattaaaaataattttaagagagctagggtgggtttctaaaggaagaaacatggatagatcaatagcttggaagtgagagatgatgaatgaagaatctttcaaagaaaattaatgaaacatcagatagagttgttgttggcatttaatcaaagcaattgtagtgaaggcgaccaccgaccatgagaagcaaccacatcatcagagacatttgaaaaagctgtggcaatggaaatgaaaatagaaaaagagcttccaaaagaacccaatccttttatgtcatgggtccatagacaaggactatggaaacatatatagaatacttaataaagagagttgttgcattgcacatgggttaagtgtttaattagtatcctgagagtaggaatgatgttgatgttacaatgaacctccccacaagctataatatatgtggggtagcaaccattcaagatccaattttgaaaggttggtaattctgtgaagggtgaggttcatcaataaagtttctttgcatccaaacaaagcatcccacacctctctcttcttgatcaataaagagaaaatatttggtatagtgattaattgatttgagttatgtgaatcacatgattaagaaaataattaaatttgttggttccttgaaattgattcttgtatttgattgaatgaccctttgtgatgtggtagtgcaatatgaattagatgtttttgaaaaagccatatgagagaaacaagttccattcttgtcatagaattttgaggacattaacattttggccctatttaaatctacaaaaacatttacccaacatcctaccaccacaaaaaaaaataaaaataaaaataaaataaaatcccaaaaagaaaattcttttttttttcatttttaatttttccataaattcttttcttcttccattctttccttctattttttttttatttgaacttttccttcaattttctctcattttttaaaaatattttttattttcacggatgcttatcatctatttgataatgtttttgttagctgttttttttttttaaatttaatagaaaaaatttggaaagtgcagttacaaacttttttgttatttttaatgaaaatttaaatgaaaagaaaaaaagtcaatgtccaaaattcactctcacctccttaaaaaagaatgcaccttattaattttaacaattacacaaatgattggctatgctttcttatatttattttttaaaattgtttttaactaaaagaacatttttttttagtattttctaaaaataaaggaatttggtaagttttgtttttaaatacacttttttaaaatacaaaaaacaaaaagtttgtatggataaattgtttttaaaaattaaaaacagaaaactattttaaaattatacaactaaacatgctcttatctttttaattgtcacaatttctaaaagaattaatttacatttgatgacaaatgcttttaagaaaatattcaatttcaatttaaataacataattgatacatggtagaatatttaaataaatggcaagagagtttgggcataataaatgtttcttacaaaatttaaaaaaaaaaaaatccttgttttagctcaaaattgcaagtagaaatgtttgtagtatgactgcaacttgagtcggttggacagattagaagacaaacccgtgccatacccaactagatgttgggttgctaattaccggttcacatcaagaccatgcacaattcgggttcccacacgcttcttgtaggttattaggtaaaataattattttaaagtttatgaagcataaaccatattacaaaataaaagttaaatatgtctcaaagtcttaaaatatgtacattagctaatgatttaacataaataacagcctacaaactcaaattttaatattttaaaatattctaaaaattaaacaaaaataataaacctattaatataagataattaaaaaaaattaacttcaagataatttaaaagtgagaaatgttggattttattatttatcttttttatactataaatataattttaaaataataaaagaaaatatatgggtttggtttcgaccaaacgtcgaacttaatcttaatatttttgaggtgatatttttcaatcctaaccctgcccttgacccatttaatctttgctcacttgagcaaaccaaaacctcatattgagcaggcatattgccttagtttgtagattccatctaaatattaatatataaaattcctttaattgtagatttaacaacaagagaggtacaaaatagatcatgcttacatctgggtttcttcaatggtattacaagtatagaagtatagttttgcgcaaaagtgaatcattctaaaccatttttagttcatggcattttattagtgattttaatttattttttttcaaattaatagacttgagaagaaatacatcaagtcttgttttatttgaagtctatttatttagtaaaaagattgaaaaaaatattgttatatgcatgaaaaaaaatacaacatagtcattttaaaccaatttttatatatataaatttatggtattaattgattttatacttgagttttaaactattttttaaaatttctaagttcattaataaattcaatgcattaaatattgtttgatttagagtttttttcttagtagaaaatttcagagaaatataattatacataaacaaaacattagtaagtcatccaaagtatagtctgtaatttttttaatattaatcgaactaacttagtgttctatgactttttagaataaatttcattatttttagtttcaaattatttttaacaagtagtaaataaagtgtcatttgatttggaacctatttgcttaatgaataaagaaaaaaaaaccaaagaatttagaaaaaatatttggttaggagaaaaattacatataaaaactttttgtattggcttgtgacgagaaaacaaaatagtcatgttctgtttagtttgattttatgatttttttttttaattatttgtttaaaaaatcatatcttattttaatttgtttttaaaaattgtttttagaaattttataaatgtttaaaaatagtcaaatatactatgatgataagagtataatataattgatacatggtacaatattttttataaatgcaaagatattctggggcataaatgtgtcttagaaaattggaaaaataaaataaaataaaatcccgtattttagtcaagaattccaagtataaatgtttgaaacaacaagagaggtagatcatgcttgtgggtttccgtacattctggaaacaacttaaatttctctatttgaattaccattaaatattaatttatttactccaattgtagattagaaaatactcaagtaaaatttaagtttctttatatatatatatatatatatattatatgcaaaaatcattcaatcatttattattgttatacgagtgaaagttttaatgcaaacaatattagtttaagaatatgacactacaatacactacaatgatttagaatctcgtatagttacaacctcaacatttcattatctttttctctcatcaactaaaatatttataaagatatttctaataatttttcttataaaaatattataatgatatgaataccgatattctttacaaaaaatcaaatctctgttaattaggaatgtgagacacttttcaacgtttgtaaatgcagctatggaaggcatgatgattgatgatagcataaaatctattgtatacttcagttgaccctaaggaaactagttgttcaaca

SEQ ID NO: 11238 - DNA, 2778 bp, Vitis vinifera
  Intron number 1 from transcript GSVIVT01035954001 (locus G SVIVG01035954001) derived from phytozome v7.0 (chr-ID chr4 ; pos 6421488 to 6424265 reverse strand)
ggtcacctccgcagaagtcacccaggtctgttttttctttttgtttcctttcctcagagcgttttgcccatttggtttgttggtttctgttgttgattcatagtgatgcgttttgtttgtgtttggttggtgagaaatctgtggggaataaatgaaaggaacgttttgaatcttgtttcttaatggtattttggtttgtgaaaaaaaaataaaaatctgaaaactccctcaaaagtaaggagagttgtagtgggctcagttgagtcggtccaagcatcgtgaaatttatgaattgaagctgtggcttcgtttcttttccttcattttctatacaaccgaacagagggcaagttcatcggagaacttcatggttttggtgttttggattttgtaatggttgaaatttgatttaggtggtgtttgtttttttggctttttaattaaaaagtaatttgttttcagaatttagatagcttgtttttctactttttcatgatttattataaactttttactaaatagaaaaaaccaaaatatttaattttttctaaatagaaaaaataacatattagtttttctttactttttaatacttgatagaaataaaataccataaaaacaaacaacctaatatttaacactattaaacattaaagttctatttagaattaagtaaaaaaacaaacaccaccttagactcgtgcccatttgtttaaattaacatgtactttatcaatatccctttggtgctttgagaaattagagtttgaaactgtgggttttattttgaagttgcacaaaaaaactgaacttctcttttataacctacatggtgtggttgtgggatttggaggaaacaaaaggaaaattgaaagcttaatattatctcaacattttggtttccaggaaaatgagagaagaatggatgaactctttgtaattacttggctgagttgagtttttcatttattaatgaactaagcaacacaaaatgcaagactccaaatttcttttccttagttttctatgaaaccttggggaagcttactatacccactgataaaaattgaaaagtgtttctttgtaaatgaattttcccaacaccaactgactactatatatatatatatatatattttttttttttcccttttttgtgtgataaatgtgtatccaattgtatttgagaagaacttgatttgttttgtaacacaagaatgcaaatgtcatgacttatatgaatttggtttacacttggggcaaatgtcaggcttatatgaatttggtttacacttaggccatgtctggaatgttggaatagagaatgggaatgagaaatcaattccatttccattcattaatttgtttggattgtttttttaaaataagaatatgaataaaaaaattcattgccactcttagtaggattttgattcctctcttctacatagtcttatgattcacctctatttgcatcttgttttcattcttattcccactgaatagtggcacctagactattaatcctttttgtgtttttaacctagcttgaatcacatgtctaattcctctgtttgagtattgaacaacatgaatatggaagtctggatggagcgaaattagagttcacttaaaaggcagaaggctaagaagatatatgatttgagttcaccatgcctctcactcagattttaccatacctagagttatgcagtttggagtcctacccataaacttctttcatcttagggttttgtattgtaataatgtgcatgtgtgtgaggctgtgggattttttttccctgttgacaaatttgtgttctgataaatgtatgcactcggcgtgggcatgcgcattgcttcatgcatgtgttgccttttaagcgtccaaatatagaaacatcaagtttagttttgtagcttgcttataattcaaaatagaagagtctaccatgtaccctgggaggaccagataccctttgagtcgatcacataaaaacgaagaaaaaaatgcttcaaagatgaaaatttggatttgctctctatcatgactgatgattttcttacattttcctctcatgttcttcaactgctctggaaatattggggtttgtagaaattgtgttttttcatggcttccatataacatgtcctcacccccctccttccaaatgattttctgattatttgttagttttcttgaagcatcgctgagagatttgaatccatgtataaaacctgttggaagtgtgatgctttaagaacttttaatgaaattcaacagggttttcatttcaggcagtgctccttttgttaccacttgcctaaaagcttaagcttaagcttgtagggaacaggcttacaatttatatcgggctaattccctccttcaagtgtagtcccaacctgcaggtgggaagacaaataaccaaatagacaaaaatggttcaaacccaagacatccaagaatcagagctttgataccatgttaaagctaaactagcacttaccgcaaaagcttaagcttgtagaaaatgtgctaacaatatatatcagcctatctccttttttttagttctccattctgagcatgtccatatatttatctatgagttttaatattcaatccatctgtttgtcgatttttttctaatataatttttgtgcttatgcataattccttctttgttgacttaaagaagtgcttaaaccagatatcaactgactagtatctgctgaacagggtatatttattgactataagcagccattcgcggt

SEQ ID NO: 11239 - DNA, 3609 bp, Vitis vinifera
  Intron number 4 from transcript GSVIVT01012762001 (locus G SVIVG01012762001) derived from phytozome v7.0 (chr-ID chr1 8; pos 23686915 to 23690523)
tcatatctctctattacatctttgtggaccttttggtaagcgccttctttttcttctctcattaagttcataatgattgaagcaactgaaattggttgaggtgtttttatttcttatttaattttttctttttaatgttttaggcagggatttttcataagaatataacctttgattctgctgaaacttgtttcttgagcctatgtaaatctctgataattagaattttgtttagcactggatgaatcttgtgagttgttttgattaaaaaggccatgcaaagatgttgttgggtgttaaatgcaagttgtttgatgaaatgcccagcaacaaaacatctttagattacaggctaccttaaggtatagtatctcctatttaaaacaaacaggctagtgaatctgttcaaacagatttgaggatatcttgccaatacggataaagcagaaacacccatttgaaaatctcaagactcctctcaccatggaggttgaaattgtaagtaatactccccaaaaccacctatacactgaccttggttgtcaagagagatcaaatctaatccaatcttatttagttctgttgtgtatgtgtgtgtatgtattcaacaagaatcatgttgaaatgagtaaatacaggaactgctctgcttttgatccattggttagtgctaacaagcatataaattggaattaggcatttgtgatagtgactaaggaacccttcattctggctgactaacgaatatgtcaagaagtgaaacatgctaccccctccccctcctacacacacaccctgtataaaaaccaagttatatgctaccattttctagcacttcaaatctttcttaaattggattcagtgggcatttactttttggagtgaatgatttttgtgcattataaccttcagtttttggtagtaataattttaaattgaatatcaaagaatgaattgaatttcaaagtctaagatgatatggccattgtttttggttcgaatggatttaatattgtggatcgcttgtagtgtatcattttaagtctgaatgaatttgatattgttttggttgtgcttgagtgaacaagctggggatatgattgttttatattggttctttaaatggttatgagcattagaggagcctctatgccatttttattttcttggaagtcttaagggacgaaaaatagggaagaaagcaaagcaggaaattttagaaactcacatttgtgtcataagttatggcctttgtacactttgtttaagatgagtttgaaaatcagttgaaaatgtaacttttataaatttatttgggtggaattatgaattaagttctgtgaccagctgccatctctattgcacagaatacaatcagaatttgcatgaaatgatttaatgtggtgcttaaacacatgtgagaaacttgttagattcttgcaattctgagttcaggatccataaatcattggaattagtttaatgtatataaacacataccactatataaattttccagctgaaaaaccatatggaatgtgttgtttgtgcaatgataataccatgtttatgaatctttgcagttctcatggcttgtagactgttggaataaaatttcgctcttctaaatttatttatttgtttaggaaaatgatttgaatggttctcttttaattctgttggaattgctttcagtccagcaatcgctattttctctgtgcaaatatttgtggtcaaaatatagcaggcaaaatttataatctaatttagagtgaagagctacatgtattccatccattaagtttccatctgtaatccattgcatgttttgctcttcatcagtgcttgtaattattttcccaaatatttggtcccatgcttttgataattgggtttctatgcggtttgtttcataaattgctattaaattaggttttaaatcaaacccaagtggcatgtgctttggttcctcgaatccattgtgagttctgctttttatgggtgtttggattatttgattttcttttaatgcctttgataattggtttctggtgtagtttgtatgtacttacctatggaagtaggttctaaagaaagccaaaatttgtttgtctttaggttcttgaagttctaatttgactggtagttcatagtgaacaatttaaatgttttttggaatccattggtgattttttcagattcataagtcatttcattttgagaatgaataggtttccaattgtcatccactttgtatttccactataggaaaaatacaacaatatcaataaataggatcggataaatgactcttagaagattttggataatttggtccatacttattgttatgaactcctaagaaaaccctttaatataaagatacgggactataagagtcctttgtatctttctaccctccacgatcaaaggcacaaaatgactgcttgaaaaaactctgatagggaattgctctagagcttaattattcacactttggatggattatagttcacaccaatggtggctttatttatagaatgtaatatggcataagataaagacaggtttgaatttaaatcgagatatatagaactctctaactatatgaattaaagaaaacattttgaattcaattgaaacaacatggacagtgaatatagaccaagcccgaaatcaatctagaatctattctctcactcatttgcattggatatcttgataacagggataagccaaaaacacacatgtgaaaaatccaagacttatctcacaatagaggttgaaattgtaagcaatcctcccaaaatcacacctatacactgaccttggttgtcaagagaggccaaaaataatccaagctcatttagctctttttttttttttttttctttttcttcttgttccaaaaggaaatcaaccatcattgttcaattatttttcaactagaatcatgttgaaatgagtaactaaaactcaagttacatgacccattttctagcacttaaaatcttgtttcaaatatgataacatggatatttacgtttttgagtatgaatgatatttttgcattataacattcgatttttaatacctatagtttttatattgactaggaaagaatgacttaaatttcaaagttagtgctaagctaatttttttggccattgtttttggtttgaatgaatttgatgttgtggataatttttggtttggataaatttgatgttgttttggttgtgtttgaactaacaagttggagatatgcatgatttgttttaaattggtttttgaaatggttatgagcattagaaaagtctttatgctttgtttgattcttggggaacaaaagaaatgagaaagcaaagcagagaatttttcgaaactcacatttgtgtggcatgttttgtagatctactcaggtgaaatctataggaatttttgctaacatttatagtattgtcataagagatggccttttacactttgtttaagatgagtttgataatcagttcaaattgtaagttccagaaatttctatagatagaaattgtaagaaccttattttatgttctatgacaagctgttctctccattgcacaggccaga

SEQ ID NO: 11240 - DNA, 10922 bp, Vitis vinifera
  Intron number 3 from transcript GSVIVT01032726001 (locus G SVIVG01032726001) derived from phytozome v7.0 (chr-ID chr1 3; pos 1229732 to 1240653 reverse strand)
tcagctgccaatttcacctttgcctcgtgaaggtgtgagtcagatcaggtccggctcaagttctccacttgggaacagtgccagcccattgaaaatcatagctgcctctccaagttcaagcagagcttcaaagggatattacagtcccgaaaggaatctacccgtggtggaggaagagtctcctgcaggaggtaaggatgaaattatgataccacctgttccatcattgatacgaagagaagcaaattagcagaaaaagaaaaaacgtttgatacctttcggtgtggactagttcgtgtaattactttatttttgagtgtcacaaatacatatcataccatgttttccataccttactgaaggcatctagtttccatatgatatttgcattgtgtttcttaattaactccatagttgaagaaatactttaccttaattaggcagttattttgtagaagataatctacctaaatggcagtaatttctgtgatcatcaagcatgagatctgtacttctgctgctttcctgtcttcctatttttctgttttatgtggaatgctctctcccatgggttgatttatctttgtttcaggttgaattcttcaataaactcagactggtactttgaggtttttgttcataggttgttttgcctccaccttgagactaaataattagaatgcggttttagtaatactataattagaaatgtgggagtagttaggattattgacataaagataccttcaggagggggaacctaagtcctgtgttggaaatagaatttaagagagcctaaaatatattatttaatttctttcctttcatccatgaccagaaagtacttttaccatatcatgcatttccttaacaagttttcttaggcagtttaatgagaaataaaaagctttcatagaacatagacacatgaggtggaggaaaaacataatagcaaccgataacggtcgtaccctctgtacatgtgtgtgcacttaccttcatgtttgctttgcatgacttctttactgggttgattaatttatgtatggatgatcatttcttctctttattgctttcgggtggcttatggagagcaggattgaggatctgaactccctctagagttgcaggcctcaaatatagtactagtgtatttggtcatctcggccattctcaaggtttctctctttaggcccttttgatgagttggtgtgaactcaagcttgtaaaaggagaatgaagggcaaaaagggcattgatacaatgggatgatgttgcaaacacccagttattgacataggggttttagaagatgatggttctgatcatatgttaagtatgcagtaggatgaaagttgtatactgtggttgttcccagtgcaatgcccactatagaagtttccctacgacgatgactgtctttataaaagctcttgctcctcttctttattcatattagacatattgcagagagtgcctgaacctcggccttttgcttttgccctcacaagctgcaagcacagccacacattatttgtcactaatctgttggttgagaagccactcatcgctgttgtattacattgcataatgacgtggctgatctgtgttagtcgtcatgatttttataattagcaacaactcatatggtagtgctggtgtttgtttaggtatcaatagacgacattttctgattcatatacaccactatcacacacagaaaaccttctttcccatcatccaaacagcaagccatgtggtatctggaatttaggatttctccattaacatcattcttagtattactattctcattttggtgattattatgattataactcaaagatgttttatatcatctacccaacatttagcattctgtgaagtggtttgatcacgttggagacctattgggtttatggaggttgtgctaatgaactttaataccatcatgaaaacttttaaaatttaaatttggtaggagcatttggggaagtagtagaagaaaaataatagagaaagatgggaaaaaacaaatgaattggccatggtgattcaacaaccctcttggttttatagaattagcgccattagttgatagtcatacagattaaagagtgattttatgtttgaatgagatatcatgatcaactttcggttctcttcgcttgtccctcaatgagtggaaaatgaaacttgcttcaagcctttatgatcatggtgattcccacccgatgtgcttttggcttcttttccctgtcctcatctcttcttaagaaaattctcaactttttggtcatgttttctactttatgaatggcctttggtaataggttctgatctcaatttaaaaattctcaatgatcatgggaatgaggtgagccaagctggtgtcatactagttttaagaataggtgatatagacaggtgaagattttatcattataccaacgagaaaaacaataatagttcaattttataatgtgttatgcggaaaactggcagaaaagcctctgcaagaaagacaagtgtggaattggaatatccatggcccatgccttgaaaagaacttgtacgcgtaaatcacgtatgatagtttgttattttaaacgatgaggctttggattaatgaatgaattatgagtcaagacaagtgtggaattggaacatccatggcttatgccttgaaaagaacttgtacgcgtaaatcacgtaggatagtttgttattttaaatgatgaggctagtgattaatgaatgaattatgagtcatgacaagtgttgaattggaacatccatggctcatgctttgaaaagaacttgtacgcgtaaatcacgtaggatagtttgtcattctaaacgatgaggctagtgattaatgaaggaattatgaatcaagacaaatgtggaattggaaattccatgactcatgccttgaaaagaacgtgtacgcgtaaatcacgtaggataggtagttatttaaacaatgaagcttgtgattaaagaatgaattatgagcgactctttggtattcaattaccttttggtaccataccaaatgttcttgtctaattttacttgggcatgtgtaagaatgagatcaaggtgacatgtctaagctaagaacacgaccaaatagaaacaatgtcatcttagaagtgattaaggcctgggtgggatagttttttgttttttgttttaatttgaagctgaagttcaagttaccataataatttttaaagggtaattttggtattattcaaattcttttaatgcataagtaaactagagtttcatcatatcaggcagttccttaacaagttttcttagccaatttaatgaggaaaaaaaaaattattgcgaacaacataaacacgtgaggttgaggaaaaacataatagcaacccagactgggcataccttcatgtttgctttgcatacttctttactgggttcatcaatttatgtggggatgataaagtcttctctttattgctttggggtggctcatggagtgcaggattaaagatctgaactcccttttgagttgcaggccttgaatattattagtgtttttggtaatctaagtcattctcaaggtttctctctttaggcctttttgacgagtcagtgtgaattgaagcttgtaaaaggagaacaaggctgaaaaaggcattggtacaatgggatgacgttaaagtattgatgttgcatacaccccgtggttgaaatttctgatcatatgttaagtctgcgttagaggataaaaatagtagactctggatgttcccagtgcaatgcctactactgtaagtttccctatgatgacgaatttgtctttataaaaactcttgctcttctttattcgtattagattgtattgtagagagtgtctgaacctctaccttttgctttccccctcccaagctgaaagcacagccacacattgttttcactaatgggttagttgagaagccactcattctgttatattatgttgcataatgacatggctgatatgtgttagtgatcgtgatttttatattagcagcaacttatatggcactggtgtttgtttaggtatctatagatgacattctctgattcatatatgtcactatcacacacagaaaaccttcgttcccgtcatcattcaaacagcgagcactatgatctatggaatttaggatttctccaatatcatcgttgttacttcttactaccattctcattttggtgattatcatgcaaatgaactcattgaatcgaattctacgcaagatgcaatagaactagaacgatttcagatcttcatttgcatgcaacattcccatatgaaacctctcttccttttagataaaactgctctgtttcaactcaaagaaactttcatcatatacccaacatttagcattctgtgaagtggacgattaacgtctaattacgattagaacctatcgggtttatggaggttgtggtaatgaacttgaatactatcatgaaaacttaaaaaatgcaatggggtaggagtatctggggtaggaaaaaaacaaaggaattggctgtgtaacagccatatagattaaagaatgattttaagtttgaatgaggtatcgtactcaaactttcggttcttattgcttgtccctcaatgagtggaaaatgacactttcggttatggtgattcccacctcatgtccctgtcctcatcttaggtttttctcgagaaaattctcaactttttggtcgtgttttctactttatgaatggccattggtaataggttatgatctcaattttaaaactctcagagatcgtgggagtgaggccagccaagctggtgtcatactggtcttgagtatggacgatacagacgggtgaacattttatcatcatgccaaaatgggaaaagaaaaaacaaactataataataataataattcaaattttataatgtgttacgcggagaactggcggaaaagcctctgcaagaaagacaacatatggaattagaaaatgcatggctcatgccttgaaaagaacttgtacgcgtaaatcacgtatgatagtttgttgttttaaaccatgaagctagtgattaatgattgaattataagtcccttcttggtattcaattattcgattatagaagattatttataaaatattttttaaaaacattataagctatttgtcagattttttaaaatatttcataaattttgttaaacatctctttttttaaaaaaaaaaatattttttaagttaaaaatactttctaaaatcacccgtcaagctatgattactctatggattgaaagcatctaataaaagaatttaatagggaacaacccctacacataatgcatatagcaaccggcgaaaaaaataaaaagcaaaaaataagaaggatcggtaggaagtaattaataaaattttaaaaattcaaaaaaatggaaaaaaagctttttagtcggtcacctaatcttttaaaaagttagacggtagggttgaatttgttccaattgtagcaggtgagattttatgggggtactgaatgtacttggctgacattttcaaaacaacccaaaatctgaattgatttaaaaaagaaaatctaaaatgaaatgaaaaatccctcctaagcttgcttcctatggagggatttgccatttcgtcttaaaaaagcaccaaatccaatatcataagtcatcctgggcttactttacggaaaggtattgctcatagaacaccaattttcaaaccgacccaaagcttactccgaaggattaactccaaatcccaatcatactaaattcaccaattttttttgcgctttttctatgtgaggctgttggatataggtggaaatgagataagcttttttagctccgtctcattcctaaaatgatgagtttaggataaaaataaatgggtatgagatgaatttaaatattttttattgggttggagtcgagataagtttagttatgacttttatcccatccatatccctttaaatttccgtctttttttaggaattaaaataaatataaataaatggaacaagtcatgatgtatcaacccatcttatatctattctattgtcatccctatggatactcaagatagtgaggtgtctgagtaaacaacttatcctaagctacatattcaagtagtgagttgtatttctctcgtttaaccataattgtttaggcaatcaatcacagtaaatggatttgttacacaccatcaatgggtcaatcgttatatgtgttatcaacaagatacattatgaaattaaatgtaagaagtaaaaatgggtcataacggcccacgggaaattacaagattcactttatataaaatatagaggaataagaatccaagatgcataaaactcttcccaaaaattcattttaaaaaccttaaagttaacttaggcattagagatgtctatccggaacacatttggatgcaactttttgcataatcaagtgaacgagacattagaagagtcgcccattggatccatcataatataaaaccaacaattcctactcttgaaagacttactatcttactctaatgttaaaaccaaggcattaatcattcaaatcaaatacttcatacctagactatgataagtgctaaaaaggttgatgtaagacttaaggaggatctataatttgactcactaattaaaccaaagatattcaccatttgggtaaaatacaaaagtttggtcataggcttgtgaggatataatttctattttttgttttatttttattgtaattataattaaatattttagaattagaaattacaattagttctattttaagcattaaaattaaactaaatcgatctagtccattttaaggcattaagaactctaactaattgaatttaaaaaaatgatttatttgattgggttcaattgaataataataatcaatggaagtcaatttagttcactttagttagatttggttccaatgagtgacaaaaattatttttaaaatttgagccaaaacaaaaatatcttatgattagggactaaaaggttgaaatcatactattagaagaagttgcctttaggctcaattaaatcacatcatacaccctattccaaatcacgctattataatccaacgacataattgcaaactatcgttctcgtgaatagaaaatatatgcatcaaattaaaagttcgtttaggattacttgaagtattttcaatgaaagtgttttttagacaagaaaaatcatttatataatgtctcttcagaaaatactataatcgattgtttaatcttataattgatttttcaaaattttaaaagtgtttcttaaattttgttaaacattttatgagtatttggtaaataaacttaataacttaaagtgacttaataacttaatttaagttattaaataaattaaatatttttagtaaaataattaaattgtatgactcaaaatcaaaaacaattttaagtaataggtaaaagtaattaacttattcttaaatctatatatttattttacctttttacccttatttgccctaaataccccctataatattttttgttactccaggatcttcactgttactcaactattttttatctagttataatttataaggataaatatatcaatttgatgatttagaattatgttttaagttatttttatcataaaacctttatacttaaaataaaaattaagtaataagttttcagtgatttaacttaaaataaaattaagtcattaagtaaaaaatattaagttttaccaaacaatctttaatgtttttttaaaaacacttttttaagttaaaaacgttttcaataatcactaccaaattaattctaataatgcaacaagtaattattatacgcttatatttgaattgaacttgttcaattttacatttataagagtcaatccacttttcgatataattaattttttgaataccctcgtaataaatttgtaaattttaagtaaaatatttttaagagaagattgtaaaatgaaactatgacacccaattcgtagtcaaaacctagttgcaaaggccaaaaccaacaaacatcaaataaaataagaagaaaaatatcttaatccactttcaactacaagtaactagtgcctgtcttcatcagcttggattttgagcttcaactcgctaatctattcaactttcaccctgtattttcccatagtaatttttcacaattattttctgaaagaggtggaccacccctaaaggacaacagcttggagccatcatatctgaatgatgtggcaaagatgggccaacctggcacaccaaatgctctgtcaccagtctagctcctcactgtgattcattgtacactttttttggggtccatcgatgaagacagaatcaaagttggccacatattcaagagtggacccttgcttttttcttaatcatgactgtccaatatgtgacatccacctatttacagtaagggatttttgtcactcacctttcgtctttacctttttcttttcaatacaatttttttcgtctctgttcgagtcttaaaaatgcatgttattttacattttggttggagtatagaaaattcatgacaaataaaaataaaagttgcatttaagaattaagaaaaacaatctttcataatagtttttaaaaattattttataatattttataaaataaagatctatttaaatcgtttttgttgaggcctcgcgtatctggtgatccacgtagttaccaaatggatggacgcacgatctcaaccaatatagattcttgattcagtcgttccacctgcaaaaggcgtccggacgggatgtccggacgcaccctcctatggttttgtcagtcatggttcaaagagagagataaatcagttggccttttactaggtatagcaaccttaccttcccctttgtgtgaaggttcatatatatagtctcagaagctttgtttctctctttaatggcaaggagatattttgtgttatcatgatgacactaggtggtggcagggccatcatcaccctacgggcggctgacagagatagtgatagttgctgcgattgtcagaaattgtgggaagtgatcgtaggaagtaacttgttgtcacttcattcttgtcctttcaccctataggtggtggagcgtgggccatggcaggctgttgtgataacgtgtaagacttgcttattttagtcaatgatctggacaaacgtatccggatgacctattttggtcgtccgaatgcatttgtggaagtcgttcggatgttctgtttatgagtgtcgtgtgcctcctcttgaggtaatccgaataggagaagcgtgtcacgtgtacttttggggaaatccggatgagaatgtgtgtcacgcatcatcaggagatgtgtgccacgtgtggggaggggtccttacagtttttaatatattttaaatatatttttaatttatttattttttgcagtggttttataagccatttttaagaaattaaaactcaatttcataactatttttaaaaataataatgaaaaatagtttttttataatggtttttaaaatttattttataatattttggaaaatagaattttgtttaaatgtttttaaatgtttttaaattattttaaatatttataaatatattttaaaataatttttatattcattattttattttaaatcattttatattttttttataattattttttaaacaatccttgaaaataagtgaaaaaaattaaaatatatattttttaaatatcatttttttaattattaaacatatttttctatttttttattttaaagaagtaaaaaatagttatcaaatactaaatttcttttcaagtttaataagatcttttgtgcttaatttgttcaaaagacttataatttcaaaaaaaaaatgtttaatattaaagttaaaaaaaaatattatttcttataaacgtttattttatttttataaattttttacgtttaatataatttttacaataccaatatatatatatttttaattatgaatttggtttcaatttcaatttttaattaaagctaaaaatacaaaattatttcaaatgaagccttaattatattttaattattaaataaaaaatcaaataatatctttcttgttttttaatgtgtaacaaggaaaatagaatgatataaaataagaataataataaaagaaaaaagaaagagaatatgagaaaagtaagaaataatttaaattcaaacacgtaccggatgtgggtcctaatgttttcatagatgaggtcgacccagctttttagtgacagatacacaaatttttccctagaaggctacaatcagacagaaaagaagtaaataactaaataagtgaggatagtagatagtcaaatagtatacaagccggcccatcctcgtgtcgaccatttcaaacgtgtggggtcaaaaaagttggcttgacttttcattggtcccaatgggccccacatcttgtcccacaccacaacaaaagtaggctgactggtccttttcgacttgccactcccaagccgccacgtgacaccatggtctccagacgttgattagttatattcccaaaatccccatttcttttcacaaaattcccaatcatccacgtcttattgttcggtgcagtttatggaaaaagagatagaaacagaggatcccaacctttcctcatccactcgcctatataaggcccgcaacctcctcgcttgaatccttaccgagtctctcagagctttctctttcttccatttctctctcctgaaattactctctctctagtaattagctcgccggagtctctaccagaactggctaactcaccggaaattctggaggaggtt

SEQ ID NO: 11241 - DNA, 953 bp, Vitis vinifera
  Intron number 2 from transcript GSVIVT01033518001 (locus G SVIVG01033518001) derived from phytozome v7.0 (chr-ID chr8 ; pos 20065107 to 20066059 reverse strand)
aacatctactaacgcaactattagctttgcttggggtgggttgtttttcttttctctttttgtagtagccaaaacaacaagaggctgaaaattttgtgttgtttttcctttttcttcctcagttttctcagcaaacaaacagagggttgttgatttgggtttttcgtctctgttattgttaaaagtgaagttaacttggatttggatttggtgttgtattttttaataaatatagattttgtttgctgtttcgctatgatttcactcatatgggtgttgtctagatgatcgaaagctctctataaagaagatgatttaagttgtgatttttccccctttattcgattttcttcccatgaattttctgttcacgcgtttcttttagtttctaatgcgtgtttgtgttttgctacggattagaccagtgctctgtttgttgctgagattcttcataatttgaacccaaaaaaacaaaatcctctattcaattgatcctgatacatctattcaatttaatttaggtgagcttatcatttgtattgaatccaaaacatcataaaacattcaatcattttcaaaagaaaaaaaaaaactgttgcctcagttttctcagcaaccaaatgaatggtggatcaagatttgtacctttttgcagggtaggggaagttttcaattttgtttgtattcgttgttgttttggattagttttaggttgttgtcctattccttaaagttggtgcttttggttcagattattaacccccagtgatttcattttttgtacttttgttggattattttgattatgtaatatgtatttcttcaaatataatctttgtagttcacaaggtgtttggaatccgatgaattatgtaatgttgattttgggctctgaacttgaacttcttttgtttgcagaaatcttctttagttgtttgagtttttctttgacg

SEQ ID NO: 11242 - DNA, 1094 bp, Vitis vinifera
  Intron number 13 from transcript GSVIVT01021997001 (locus GSVIVG01021997001) derived from phytozome v7.0 (chr-ID chr 14; pos 4532255 to 4533348 reverse strand)
gaagtgctagtggcgttgaggtaagaagactcaaggtttttccgatttgtcttctacacaactaccaataaagaagatatattacattgtctttgcaatttatcataatgaaagccttgattttcttccaagttgtgaaagtgctaattcttgttaattcaaggaaatggatttaactccacattcatcaccttactctttttgctagattttagtattagtaaatttttttaactcaaaatgaaaataatttgttttattgaagacttgactttactattaaagacagaaaatatggctatcaattgaaatgtctacaagtaagatcctttaaaatggattatattattctgatcatttgcaattagattttcattgttgtgttttggaccgaattccatgtcatggcatatgtgtagacaagaagggaagcaaaacatttttacttgtattagcgcataaaactaacactcaaaaccctagattaaacatctttttttttttcttttttcttttttttgtttggcagagtttgcctttccctatcaaaaaaaaaaaaaaaaaaagaaggggggaagcaaaatattttttcttgtatttggccataaaactaacacttgaaaccctagattaaacaacaatttttttttttttggctgagtttgcctctttggtatgttatgtttgctcttcaattaaaaataaccctccatattgtttggtgaaatgagagagtttaactagtctgtggaagaaccgtcctgatatgctcaaaattatctagtgcttcattgcatttacaaatgatgcttgttccaagagggcagggggaaaaaagagataaatagtgtaacctatcaagaaaagacagacgtatgtttgaattgttcttagttgttatgattgtggcatcccaaatattgctttagatgagctacactgtagttgtagcatagtgttgcttgttgcactggattgcctattgaggcctccttctgcctggactatgttctgatctatgaggacctcataacaggccattaaaacactattaagtttctattatttcacaggttgaaggggtccaagggatc

SEQ ID NO: 11243 - DNA, 6977 bp, Vitis vinifera
  Intron number 1 from transcript GSVIVT01025392001 (locus G SVIVG01025392001) derived from phytozome v7.0 (chr-ID chr6 ; pos 1131395 to 1138371)
cacgtcttagctcggtatagtcatcatcttgattgacttacaacatatcaggtagtaaaagtgtgattcatttcttatacttgtttctctaaacaaattctaaatcacttattatatctaacatttctttggtacagattatatggcaaccttatgttgatgacatgaatgttggtcttcctgattattgtactgctgggaaatatatatagtgcactatctcacctttgatatgtttccacataattgaatggtatagacctgatcgagtattgctgcagtttggatttcatcaaaggattcctcagccatgtaataatgagtcaatcttacacaaatgtgatttgagaggtatacatgatgttgattagactacttgatacggagactacattcaatgttggatctctaggcgtgagcatattgctagaggcgaaatggttttaggttcattggggtatcatgatccatacatggtgtggtatcgctccattactattcgatttcttactcgaactaggtccttccatgaggtactggtaattttcatgttttatatttttattaaagtttattttatttttataagaatttaatttatctcctatttgacttacagactaccagcatacaccagatatatgatattgcacctctagatgatttccacattcgcagactatgtatgtattagaggccatacatgaaatggatcacttagatgctccatttaatgttgatgctactacacagctccaacctcgatcaggagatgtacgacctacacgacaagggcctcgtacaagggagattaggcatacaccggttgttacctgagtgcaaccattgaatgacattagtccaccacctcatcagcagccaatatcatccattactcaatcaagaagtgtatgaactagaagggaatgggctcacatgagaggtagtctaccacctcatcagcagccgatatcatccattactcgatcaggaggtgtatgaactagaaaaggagcagctcatacgagaaggactacgcatacatttgttcttggagatgcatcatcgactgacattagcccgccacctgttgaggagacccttattacacctatggaggtgccatccacaccacccatagtattacttgttgcgtcatcaccacaaccgatagaggctacattggttaatgaggagttagttcatatagcaaatgatgataagtgaggataaaagaatgatcgtggtcgaggacgtggtaggagacgtggtcgtggagttcatgaagggatacatgttagccccatagagccaatagtggaacatgcatatcatggacgtccacaacgaacaataaaggctcattcatgcagtacacattgaggacgttactacatatgacttgtattttggatactattagtattttgcatatcattattttggacaaatacttaagatgtatatttatacttgttatattttggattaactaactttttattaacgcaagttctattgtattctatctattttggacttattttacacaaaatagtattgttactattttggaaaggtgctgatttaattgacatttggtttacttgttttcattggttttggattgaatgtcaaaatattgaatataatgtatacaggtgataaactttaaacatttggttatatatatagaaggtaatattgattaaaagatagatttttttttcttttgtggaaggtgtctcttcaagagatacattcggcataaattcgaaattttccactatgtgtggaaattgtagtaagtgtctcttgaagagacacttacagtataaacctaatttttaaaaaattatggaaggtgtctattcaagagacacctttagtataattccatttttttggaaatgtggaaggtatctcttgaagagacaccttcagtataaattcgaaattttccctatgtatggaaattgtgaaaagagtctcttgaaaagacgctttcaatataaacccaatttttttaaaattatggaaggtgtctcttcaagaaacacctttagcataaattcaaaattttcaactatgtatggaaattgtagaaaagagacactttcaatataaacccaatttttttaaaattatggaagatgtctcttcaaaagacttctttagtataaatccattttttagggaattatttcgaaaatttcaactatgtatggaaattgtggaaagtgtctcttgaagaaacactttcagtataaacccaatattttttttttttaaattatggatttagtataaatccaattttttggggattgtaggtgtctttcaaaagacatctttaatataaaatcaatacaagttaaaatttgtgaaattgtggaatcaaaaggcacttttagtatatattggaatttatggaattgtggaaagtgtctcttgaagaaacacctttagaataaatccaattttgtgggaatggtagaaggtgtcttttgaaaatacaccttcaatataaaatcaaatttaagagacacatagtagtataaattaaaatttatgaaattatggaagagacaccttcaatataaatccaattttttgggaatagtataatgtttctttttaagagactcatttagtatatattagattttgtggaattgtagaaggtgtcacttgaagacatgctttcagtataaatccaattttttttgaattgtaaaatgtatcttttgaagattcaatataaaatcaaatttaagagacacatgatataaattaaaatttgtgaaatagtgaaaagtgtctcttgaaaaaacacttttagtatatattgaaatttatagaattgtggaaagtgtctcttcaagacacacctttagtataaattcaaattttttggaatcgtaaaaggtgtctccaaacacctttaatacatattggattttgtggaattgtggaaagtgtattttcaagagacacctaaaattcaattttctaaaattatagaagtcaagagatacatttaggttaaattcaattcttttaaatatgtatcatgattttgaaaattttggaaggtgtttcttcaaaagacaccttccacgtggcaaaaaactgtcgtagatctatcaatattttttcaactaccattttttaaaattgctgcaaaagttaaaaaagcccgtatagaagtagtgttattaagtatcaaactttaaagtaaacaattctaaaagcattttttaaatattttatgggatactattttttaaaaataatattaattaaataaaaaatcctaacactaaaacccaatacatgtatgtataggcatccgttgccaagctgattttttaaggaaaggaattgaatattaaggagaattgtgttttggagtcaattgagcccaaaaattaagacttgacccatgaaagttacataattgatgagaatgatataaaatatgaaaagactaatatacccttcaaaactattttaagtattttctaccacaatgtttgacaaatttttttattttaatttttttaataattattctaaaaatttattatttttagaaactaattttttttaaaaatataattctaaaaacatatcattttaaaaaaataattttgacatatttttagttattttttacctacataattttaaatatatatatttttcaagatgtttgatttttaaataataataataataataataataataatttatttttagttttttttaaaaggggcattttttttccaaatcactgaattaaattaaaatttattgaggtttacaaaagaaataaaatttaaattaatatttttctacttttttttcatcttcaataaatgttatttttggaaaaataaaaaatctatatccttcatctcaatttccatacttctttttagtcttgggcttaaatagtgaatttatatggactaaaacttaatttttaaactcaattaggtctaaaacacaattatacctaaatattaattctcatatggtctctctctcctcctctctctctcatattctttgaagaatctataatctatagagttgacttttttaatgcccatgagcagctgatttttgaaggaaagtgattgaatattaatggttgtgagacccattctcatatgttctctcttcctctccccctttctctctcatattctatgatagaatccatagtcaatagggttgatttttttttttttaatgcccaagagcagctgatttttgaaggaaagtgattgaatattaagttgtgagacccactctcatatgttctctctatctccccctctctctcatattgtattatagaatctataatctatagggttgatttttctttttttaacgcccatgagcagctgatttttgaaggaaggtggttgaatcttaatgggttgtgagacccattaatatagagaggaactcaaaatcctaataaaaatgtatttcaattaataatggatttttaattcatatgctcatttttaataattaattcaaataaaataacaaattaaaagtaaaattgattttttaatttcattttttatttcaatgtctcaaatatatacaaaaaatatgatgattattttcaaggtttataaaacaattctacaaaaatagatttttaaaaaatatttaaaaataaggtgtttgataaatcaacttaattacttaatttaaataattaaataaattagatatattttttaaaataatttaatattaaaattatttttaatttttaatattaaattaaactaattaatttatattttatttcaaaacctttttacctcattttcccataccaatgcaaaataattaacatatataccaaaccttggctcacgagtttcaatggtaaaatgacaattttatccagtaggatgaagggttttggcccaccacaataaaccttagggcctgcctactttgttggcggctgccaccgtggagccagacacttttgttaggcggggcatcaagagaattattaatatattatagttaaggtaattaatgatatttattattattaaaattaaataattttaaatattaattgttaaaatgtatcaaattaaacaaccaatatttttttaaataaattagattttataaaaacattatcaagaagatttaaaaggaaatttcaaaataaataaaaactagaaaaaaaaatattagaaattttgaataattttaattattttgtagtaaaaaaccataaaatttattttaaagaattcaatcatttatattataagttttgatatttttcatgaaaaattgtgctccgaggattaaaatttttatagatatcaaaattaatatcttaattttttttcaaataactaaatataagatagttgaaatgaaatcttttacttaaaacttatgttttatataatacgtcattacgaagcatgttaaaagttttattttttatgatttagttaagtctaataaaaaacaagtataaaaatgaaaaattttgaataaacaaaaagaaagaaataccaacattaaaagcgattttttttaattttagttcaattttaatatttgattagtaattaataatcaatattatttttttgataataatatttagttgtcattgttttaaattttatatttatatttttttagaggggataaattttctattttggtttttattttcctaaaaaaatttaacatataaaattgacggtgtggggtacacgtggcccccatgagcctgacttgaatggcaagcaggactcattttctagaaaaaaaaaattgtttctagaaaattgagggttggggaatggggacgggacatgtgacccccctgagccttacttgggtggcggcagggcgcgttttctagaaaaagttacgtccaactagtccggggtctttccaacttttccttctttccattcaaaaaaggcatactatcacaagtcgataagacatacaaattacccaaaaccaccaattgcccaaggcaccaaaacaagtaatctggaggggcattttggtcattatctttagaaaatttccccattgtgacgtgtcttcgagcggttggcaactaggacttggtctttgcgcagttggtaactatgacgccttggaaattggaaaaatattattctacggaaaatgaaacattcaatatatgtatatatagcctaggtgttctgagcaaatgtagataactcaggttttgtgagcaaaggcacatcataactcaagttttgtgagcaaagggtgtgcacagtagccatggctaaagctctcctcatttcaccttcttacttcatcttcctcgtcttcctcattttctcctatgccacaatcccagttttcggagaagaatacagttatgtcaaaactatcgatcttgagaaaatgaatctgccgaaggaaaaggtaacacactttcaactttattggcaagatgttgttagtgggtctaatgcaacctcagttacagtgattgaagcactgaataactcaacattttttggttcggtaaatataattgataactcgttgaccgttgggccaaatttgagctcaaaaacagttggaaaatcccaagggttatacgcatctacaggactagaagaatcttcattattgatggttatgaattttgcattcaccgatggcaagtataacggtagcacatttaccgtggtaggacgaaacaatgtaaatgctgaagtgagggagatgccaataattggtggtagtgggcttttccgatttgctagaggctatgttttagcatcgacttactcattcagcgacaatggagatggcactattgaatacaattgctatgtcatacatcattgatattttttctttttttagtttttctgtggagctttggtccataatagtgatat

SEQ ID NO: 11244 - DNA, 4070 bp, Vitis vinifera
  Intron number 7 from transcript GSVIVT01027853001 (locus G SVIVG01027853001) derived from phytozome v7.0 (chr-ID chr5 ; pos 8658298 to 8662367)
tctctaccatcttgactattctacaatgtaagccctcttttttatatgctgttttttcttctgtatttttggcccaaccttgacaaagttgggattgggtcccacatcttcgagcacaactctttggagactttactagcagggttgttgggatcttcaatattttcacctttgtttgtagtttatatgaatttttgtcatgtattacggtattaaactttgattggcatcctgtttttatttttattttcttattttttgttttttgataggcaaagatcaattatattaacagcgtctaacaaaatgtcatacaaaggcctacatgatgtatacaagggtgccaaaaggccaaaacaaggcgaagggatacacaaaaaacacctttcttgccttactcagatcttaaccatttaacaaagtccatcatgaacaaagaacaatctcctatgcacattctaacccactccaggaaattatatgtaaaggattttttgattgcttaggtctgccttttttgtgttatcaaaagctctcctatttctctccctccaaatggttcaaaataaggacaaaggtgtagttctttaggctttcttccttttcttcttgataaaagatccatgcctgctcaaaaaggcatctcacaccaaggaatgtattgcctactttattccaaatagagcttaaatcaactaccatagaataagtgctttcgagcaatgtagggagatgtgatcaattgatttttcttttcctttgcatagatagcatctgtttaatatcctcttgccctttcttttgagatgacccaacatcagtatcttgccccacttagcttcacatgtgaaaaagcttacccttgatggtacccaagtattcaaaatgatgctggaagggaacacatccattttttccatttacttttgcaacttcctaaaaatggcctcccgccctctcttccccgttggtccccgctctaactctcaatcattagcaatgcttattgtaaataacttttgaaggggctcccaaaagaaggcctagatagctagtggtgagtatacctagcctacgtcctagtatcgtagttagttcccccacattagcattcaccttgattgggacaaacttactttttccaagattgatctttaaacgtgagattgccttaaacataaacacctagctcaaatgctctatatgctccttcctgacatcagatagaataagagtgtcatcaacaaataaaagatgtgacacctccaatcccacacctcctcttcccctaactaaaaaccctgctatgaagcccctttctttagtcctgtttaggatgtgagagagtgtctctatggacatgattaagaactctaaaagaagcctgattcatagaactccaaataaaatttatcacctcatttttcatgatgtcctagcaaaagggctctctcctcacacaaactggagagagctgaaaagacctcctccttggaaaatgaaaactttaggggccctgattcttcattactcattactcaaataatctaaagtcactcgactaatacttggtctccacttcccttacttgaatcctttcgaaaacatttgccaccccctccttaatgtctacttcctcaaataacattccatcattcacccttattttagccaaataatatttcttcttctgcaaacattggtcatttgtgtaaaaaaaaaaccttaggacctgtttggtaactattctttgaaagaatatatatatatatatatatatatattgttagaatagaaaactgttttctaacttaaaagacacacttgagaaacttttgacagaaaatagttttttgagactttgttatggaaacaagttgtttttaagaacaattttgaggtattttcaatttcctttttttttggtagagttttcccagcaacagttgaaaaaatagagtagtttaaaacttttgcattttatatgtgctgagaaactgtttttcacatttgagttcccaaatagaattttgttaacgaaaacaattgagaactgttttttttatacttgttctcaaaaactatttttaaaaacatagccaaacagaaccttggtgtttttatctcctttggccataagtctgttgattttttccaccacaaaactttttccattgctgcccacttcctaatctcctccattgcctccctcctaacctcattgtcctcacccagaagaacatctttccttagcatcccaaaaatcaatctgatttatagcagcaacttattggttgtgatattccagagtacgtctcttccacgcttttaaattatgtttcaggaattgtagcttggctgctatgatatggctgtacaaatccttgatgtggtaacccactcaccaatttctaactaggtctttgaatccttccactttcagccacatattttcaaatctaaagggagttttatccctcctcatccctccatctaacaaaatgggagcacactcggatacgggtcttgttagaatactctgggacagaccactgaaatgattcttccattctccagaaatgaggaatcagtccagcctagatagaagtgattattcaacccactactccacataaaaagatcaccagctagagagaggtccatcaaatgatgctcctcgatgatctttgaaaaatgtctcattccccgggggatctgagtcatctgactacattcaaatctccttcgacacatctgggatcattccaaagccttctagtatcactcaattctacccaaaatcctctcttcccattttggactggagcatacacacaaagaacatccaaacaaaggtttttgaaattacaaaagatttaaaaggcccctactttaatttcaatggactccaacaccctattgtctcaaaacactaagatcctccctgcttgtgtcctagcttccacagccccctattccaggctacacccaaacttcttaccatctaaactgatatctattggaccttggtttcttgtgagcaaacaagaacaccatctgcaatctgttcagggatttggtcactttctgctttcccccctcattaatccctctaatgttacaaatgtgaagcttcatcagcaaactttgactagctcccaattactccttccgctcctccctttgtgtgaagcagagctataatttatggatcacttcagtttcagagtttcctttcaaatctaggcccagcaataggtctcttttcaatcacctgacttaatgtagttccccttttttgggttccatcccccctcatgagagccaaaatttcttcatcaaacctgtcaactagcatccccacaaacctattgagggatgcaagcttattgatgcagcccttagagatgtaggaatcccattttgtatcttgggagcaagactccttttcaccaccccacagccccctatctgctcttctactttgccactgtcgttgtttgtaacattttctaggaataacattgtcttgccatctttcaagatcatgcttagaggccctctcatagcatcctcagtcttgacagagtgcactttgataagctcccttccacaaattgaactcccatcaccccttctctgtaatctttccaaccatgttgccttttacatgctcaattgaaatctcaaaagattttgaatctatggcaaaccagcttctgcctccatctctccaccccgcaatgaattctgctatcttttgcacccaatggtcctacattcatagtcctttcctactctaagccacccaagaaacagctgttctttgactgtatccatgaagcccacattcagcaaaaatgcattttaaacagctttgactttcttcactaccttttttcttgtcccttactattggaattacacttgatttgacattttatactgtatgccttttttgcatattaggttcttataattgcatggcatattttgcacagactttataaagtttgcagaccagtgagtcacctaggacatgatttgttgttcacttaacaggttctggt

SEQ ID NO: 11245 - DNA, 3195 bp, Vitis vinifera
  Intron number 2 from transcript GSVIVT01010000001 (locus G SVIVG01010000001) derived from phytozome v7.0 (chr-ID chr1 8; pos 13313222 to 13316416)
ttaagcctgggcaactcttggtttgatctgctttcgtctatatataccaaaattaggctgctgtaatgtttgtttaattatgcatatctatataagagtgagactatgatgatagaagaattaagtatgtacctaattcgaatgaattataaatcaattactggaattgagcacctaaagtcttgcttcatctgataaaataaagcaaatgctagctaggaatggatgagggaatcgaatgagtcaagcccatttgtatgatatgtcaaagtaaatgaattaaatattttacataaaattattattaatttttatttttaaaaacataaaatgaaaaatatatctttttattcttttaaaaaaaaaacggcagaaaattcatccgaataacgctagaaatacatcatgccacttgcttatgctgacgagtcaaagccaaaaggtaaaattacccaaccacctcaagtgtaaattttattcattacttttacgccgaatgggccaaccacaaccgaagatcacgccaaaacgtcaaaaatctttgaccaaccgagccaagaatacgagaggaaggcaggcctcgaaaattaaaagggtagaaaataaaagataaaactacaatcgttttgaaagtaattcttctaaaaatatttttagtttttaatacttttattacatttttatgaaaattaatttattatatgcaaatataaacaaataaacaatttttataatatttttataatatgttatataataaaaaaagtggcttttgaaagccacatcttgattttatccatcttaaattattctagcaattttaaaattaaattaactctatcttattctgttggtgagttctagggaaacacaagcattttagatgaatcggggatggaatagcgtgtcagcacaactcgatgcaatcgatgatccgaaaaaatctcatgattttattaaacaatctgtcattttgattttttattatcatatttataggaatgttttaattcgaatctttattattattaatataaaaagttttatatcatattgtgattttttcctatttaatagttattttagaaaatagtcttaatataaaaaaaattttgaaaattacttttaatggtttaataagacttagaaaatacttttaaaattttgaacaatcatctataatgcttcctaaataagagtttgatatataatcctcccaaaacaaacacttaacaaaaaaatattatcaccgaaaataattgaactaaaaatattgtctaatgcatttttaatgtagcctaatataatttcatttaattttaaaagtagtaaagaaatttcactatcacatatttatcttatgtataaagatattttgataattatgcaaggttgcacaagtgatagtaaataagttctttgcattcaaataattgattaattatataatcttatgtgattaattaattaattaagatctattttgagttaaattaagtgactcaagttttggtggactcaagtacttaattaaatgttaataaaattttgacaccctctttcaattctaatactaatatacttattataataataatttataattaattttagtataagatttttttactttgttactatattaaaaaacagaaatactttagtacaacatgtgtgcatattattacccttctcctaattaatttcattttcatatttaatgagctagccacaaattaaaggtataaatgaatatttttccaaggaaaggcttcatcacttctacttcacaatttcaattgaggcaaaagggagagattacggatcttcaacaagaaaaaatggagtttttagggctgtttggcatctacaaggaatcctacaagctcatcttctcaaggaggaagattttcacccaaatcacccttgctttgatcatcccaccatcctttatcttcttggttcaggttggacatatgggatgatgataagcttgaaggttatggggcagagagagttcctttgaaggggaaggctgatctgcaagacccatttcatgtttgatcacctctatgtaggcgtattactagtagttgagctctaagccctctctccgttctctttccctttttaactgctatatatgatctttgttggggtctgaaatgttgtagctaaaaaattgaagttctaccatatataaagaatgttcgatggatttccattgaatgaaaatcaatatgtgacttcaactttactttctatatatatattagtcgtgagtggtcaaaatatattagagaaaatattattacaatcactagtaaccctggctatcatcctctcaagagcacttggtctaaatgtattttgattattttgaagcttatattaaaaggatcaaattttgtactaatgaaaagaaacaattgaaaaataaaatatctaccgatgatcatactcctaaaatcatatatcaagtgggataacaccttggttctataaagatggtttcacccattcatatttgaatttcaaaaaattgaaatcatcattcatttcaagatatcgaggggtttgtatatccttgatcaaactttgtcatcaatgaatcaagccaatgcaaacatgtctgataccttatcctcaattaatttaaaaattgattaaattaatagaaacaaaaatgtttacaagactgaagatgcacatttcattagaatcctcaattaggacaaactctttctttgagttaagataactcagtaaaatgtggtggagaatttcttcttataaaccatatttgagtctttgactaatacaaagaagaagagaaaactaaaggaaaaattgctactttattaaaattgaaaatagaaagtaactatagaggctctggctcctaccttctagtctctatagacatacttgaataccatgaatatatatatatatatatcacattgattcctcttacatattcttagagacaaggtatgtttgttatacccttcatcactcatttaggaaaaactaattcctaggacgggtagagtatcacaagcaagaccataatgaattaagcatttggagttatgaaggtgtggtcaaagcacatattgtacttgatttctagcttgctcttcttaatagccatttggaattaggtgttttgggatctaagaatattttgtg

SEQ ID NO: 11246 - DNA, 4655 bp, Vitis vinifera
  Intron number 2 from transcript GSVIVT01025220001 (locus G SVIVG01025220001) derived from phytozome v7.0 (chr-ID chr6 ; pos 3101165 to 3105819)
caggaggaggtatgttttgtccatttctcatgccttgtgcttccataatttaggtaaagtgcttgagtacacaatgaacttatatcaatgtgttataacaagtaataagacatggaaattatttgttgtgttcgttgaaattagatttcaaaaacctaccacttgtgtgttatagcacatttacactttttttttcttaaatagagggaaaccagcctctcagtgaccagcttaaacaactaatcagtggaaattttttagaactttagcaatggttgttttggatggtggatcaaaccaatatatgcttatcttcagtttagaggtggttcaagctatgtgaggattctgtttatttttgcctattccactacaaaaacttgtagcctcgtgtttctgcaaggattggtaaaaatgcttctttgctggatgatcattgtttgtgtggggccccattagcaaggaccatccaaacagtcaatacatgttcagaaaatattccaacactgttgaaattgattgtaggaggaggtatttcaatgcaagtcccaaaacatgtagggtcaattcaaaacaaaattcaaggaaattaaatgattcacgttttatgcaatttaatgcaatgacattggaaaggggttgaaatagtagagaagatattagtggcatattattgaagtgaagcaatcatctaaagatttggtgcagtgatgaaagtgaattgggtggcaatgccatttgataaagggataaggctaggcagaaatatttccaagagatcaagttcagaattgtttaattatttcttgtggcttagagcaatgtaacaaagatgcgcagagcatccaaaaatgtggtagggccttcaataatgatgtccccaagatttacatagtgaaattttttagaatgttggggagttcagcacctttctaataaaatgacatgctgatggattttgaggtagtgtaatggcaagataaggaaccacatatatggttagaaacaagtaatatttatgagatattagtgtagattgatctagctgttaggggcaagatgatataaaatagcttgagattgttaatacatatgcaatgaagatcactaacgccaaaattattaggcaactaataaaatagcttgagattgtcaatttatttgggacaagatgatgaaaaaataggttaagatggttaatgcataagtgactaagatgaggaactctgaaatgacattctttagatgatcctcttagggcaaggggacggccccaaaatgaacatgaatcaaggtagtgagaaaagacatgttggtttatggtctaaccaatagtatggctttattagatagaatagaatttcaaaataggagttgcatagccaaatcctaagtagatgggaaaacacctatgttgaagtgagtttagttcctgggttgcatgagtttgtgagcagatgtcagctgtaaattagcaccttgaagtcacattcgtcctatttccatgtcttcttctagtttgccaacctagagtgtgtttggcaatgtttctactcgaagtgttgttagtggaaggaagtgttttctacaagaatcacttattaagtgtttctccaaaaactaatataagtgatttttcaacactataagttattttttagatttttagaagtatttataagtgattttttagatttttagaagtatttcctaaattttttcaaatagcaatttttttttttcaaaaacacttttagactgaaagcattttctataatcactgccgaacggactcttagtatcagtacatgccatttaattgatcttataccagtgcgatttacaagtgctatggattaaatatgtatccgaacatatgtagggaagactgcattcatgatcagcatgttacaagtatgtgttccttgccatagtacacttgatttatttgggtcctcaagtatttacattcataatctaaatgtctaaaatgcccctttggcctaatgtaactctcatttctaggctctagacatttcttgatcagcattttggaattcttagattgattatattaatattaggcttgatgtcaagaatttggcataaaatatgaatttcaagcccatgtcatttgatcttgggttcttggaaaatgcatgatactgagattccttggtgtgttaattatgaaattgtttctttaggttgcgttttccaattagatgtactgatcatggatgaggcgtgaaactaggcactgcaatagaaaatgtaacaagtgaactcaaatagctgtgatttcaatgtctgcagtttgattgcttttcctgtgacatagccctgggccctttttaactcttgcattcattctttattgtttctttatttttttggagtcaaatctcatgttggacttgtttgtcaggtctcatgtaggtaccaccaccacacaaggttgtaaatagctcacttgtcttgtcagtaccaaagggggaattgaatcatatcagaattaaatcaaaaccaagcaaatgcaactgacttaattgccatggagttcgcctctggcatggcctctagtgcaaattttcttcatggctacttaagcatggaaacaaatttgcaacacaattttcaacttgataactccataggttgtatgtactaaaatatctagagctccataggtttaaccttttccttttacaaaagaaaaatatgacgcaaatcattattggttgcaatgtggtatttaggactatggtctagctggtttctaaatttttcacgtcttgtcatagattagacttgtgatgggggggttttaaatttggctcttattcaattagatcatttcagaaacatatcctttctatctgaaactgaatttgcaatatgtctgccatatgtgaaaatgaacttgtctattgtacttagtgatgcgcctggatatattccaaccaatttgagaatttgaattccctaagtaatctagacactttctttctagtctggattttttttttctgcactttgttgcactggaactgattttactctccaagaaacgagtcatctgtttaatatttcatcatgggttgaaggggagcttcttattccattctagcgtcttagtgttgttaatgataatgtaggtcttgatcgtaacaaagttcaagaaaattacatggttgatctgtaagctaggtttgaacaaattaatgatgcatgtgataaataccttactagttagattatattcacagcagcggacggatcctttcatgatctcatttttctttgatcttggaaatgttcctactccaagatgattctaaaattctagtttgttaacaatagaaagcagaagccttctagtgccttgtttatttccatacacttttttttttttcactcagttgactagctttatttgatcaaagaaaaagaggaatagaaccttgcaatcctagatgattattggagctttaagctttgtgctttagtttgctttccagttggctttggaattcaatggacgttttaaacgttcccaggtatcataagtttctaggttgaagatttaaaggtctgattatgtcttgaattctttttatgagatttttactttttttaattctttctatgttcactactggtagattagatttccaggtattgaatttccaggttatgttgactttccaaggtaactgttgattcaatgttatatctcaaagggcacattccaaatgaccatttttctatgtggtaatcctgatgagattttgatgccacaaaaacttctggtttagaatatactgaagtaattataacctctattttgtttcatctttggtaagagagaacatactgatttttgaagagacttcatgctttttccaggtcttaatcatcattagttgatttgaaaggcaaataaataactggctatggagttggagctaaattccatgtagcaataaaacataactgtagatgccccactttctcgtcattcagatcttgttgctggaatcagagattatatgtgcaatgttgtgccccttgcccaatcaattattaatggaaaaatgtcaagtagattatcccagtctctatagcaccaccatggcaattagatattctcaaataacagtgcacccttcttttttaatcactttagcaaagcaaagtcccaagcccaataaattgtcttcttgcaatatgtgaaggccccattacaggtttaaaagaagagcctctgtggttgtagagttgccaacaacacttcaaaaattctcaaccttccagcttgttactattgatttttggcataagttgggaccggtcaatgattatagagtagtgtagttcaacaagtatcactcatctataattgttttttttttattattttgcattattgtcgtaacaatgggatgcaactggcgcgtttgctatgattggttgatcttgaatccattgttgagaaatatctgcttccaggattttatctttaatgcattagtaatttgtcattcatggtgtttggtcatgaattttgttattggaaaatcacattttggtgacactgcttcattgtgctattgaaaggtttgcagaaggtacaagcaatatcatcaacagat

SEQ ID NO: 11247 - DNA, 8866 bp, Vitis vinifera
  Intron number 1 from transcript GSVIVT01011059001 (locus G SVIVG01011059001) derived from phytozome v7.0 (chr-ID chr7 ; pos 1897008 to 1905873)
ttttcttctcatccaattcacaagaccaaaaacaggtaagcagctttgtgctaatttatatttattgatttcaagcgtttgctatcaatgctttttgatgctaggtgctgctctttgaattatgcctacatatgtaatgtataaattggtattttggtatataaatagaaggttcttggttggatggggtttgccacatggatagtgagttgttttagcttgtggaaaagtagagcagcttgggaggaaagttgggtttggtgaagagcttaggggtgggaatctcaagacttgatatttccttgagtgagctttaaatttcttcccttggaccttatataggggcttggcatgtgctagccagatgggtcagacctagaaccacttgtggtcctttccctttgcaaagcttgtgggccaggaatccacgctgctgtctcagttgggaacttgggagcagttgataatccggcctccatacaacatgtacccagttggcaacaaaaaatattgattctttgcaataatttttgttgttttcgtcttagtggtagttcttctaggctaatctactcttaaaaattattttgatatttttgatgtcttatttttcaaagttcacatcacctagttacagcatgccacatgtccaacttgtgacatgtgtatgtcattatgccttggctaattacaagatcccacttgtcttaggatttcacatggatagactgcacaaatatgtcactaggtgaatcatttcgctactttctgttatactcatttatgtcgtagtgctaagagatttgtgcacatatgcctatctttaagtaaatatctatgtatttggatgcaatggaacatggatgcttcccgaaggcagatgtcgaaagggttcctcctattatagctttttttgaatgtgacaccatactgctattgcaaaaaagacaaatatttctttaaaatagttatgactcattggtctcgtttaactaattctaggtaccactccactcccgtttaggaggccttaggagccccactcgccactgcacctcatgcacaggcggggggtggctcgcaatagccctctttagcaaacaccaaggaactataatgaagcaatgtgctcccattaccctggtccctagcgcgtcgaggtgtcattgttttattcacacaaacaactcttggcaacaaatatcacctttgacataatgccctaataataatatgtctactagatccaaaagcaaggctaaggggggtctaatacaaacttgatgcatctcaatggtggagttaacctcccattagcaagcaatttgtgacttatttgaaagtcttggttaatgtctaaacttggaggcttgttggggcgagattgacatgcattgagcgtgtttcgattgaattagagaaacgggggacctacatgtgtttgtaatgtgttgtctcaagaagtttccatttcatcatggaaaaattaatgtaggaatcatcattttggtgcattttgaaaagaccctatgtcccaccaaaaaacaacaacaagaaatacttacttgcctaagttctctttttgatttcataccactctctccaacctcctcttgcttgtcactttagtatcctcttaaagtattgacacctcattgtcccttgtgggtcacctcctataattatgaaccctaaatcaacaaatattttaactaagattaggagctagaaagtgttgaggcttttccagtaaatttgcaaaagtatttagtgaagagggacacaatagatagattggtttggaaagaatcaaaaggtggactgttcttggtcaaagccttctactctcacttagagttgtcttggatcgacttttgaccatgaagaatttctgaactcctttattgatataaatcggtacacaccatacacatatatatacacaaatgactgaataagaaaaaatcaatctagcttaattctctcctaaaattaggaaactaaatcataaggaaatatcctaaatgatctctccttttttattcctaaattaaagtcctaactttggcattatttcaacattccccctcaagctggagaatatatatcatataatcccagcttgcaagttaagtcttcgaagttaggcctaggtaaagctttggtgaggatgtctgcggtttggtgcttggtaggaacatagtttaatttgaccgtctcactagtcaccttctctgtgataaagtgtctgtcaatctcaacatgcttggtcctgtcatgatgcacggggttctttgctatgcttatagctgcttgattatcacacatcatcagaattggagatgaactcgtttgtcccagttcactaagaaccctttttatccaaatcccttcacagattccctgtgcaagagctctgtactcagcttctgcactacttctggctacaactgattgcttcttactcctccaggtaacaagatttccccagacaaaagaacaatatccggaagtggaccgcctgtcaatgatgtttccttcccaatccgcatctgagtatacttcagtgttacggttctctgtctttctgaagaataggcctttccctggtgtcatttttaaatatctaagaatcctgtagactgcttccatgtgttcctcagtggggctgtgcatgaattgacttacaacactcactgcaaagccaatatctggccgagtgtgtgagagataaatcaagcgcccgacaagccgctgatatctccccctgtctaccggtgtactttctttctcgataccaagttttttctgactatccataggagtatcaattggtttgcatccaagcataccggtctccttaagaagatcgagtatgtattttctttgagagactacgattcccttccttgatctagccacttccataccaaggaaatatttcaaatttccaaggtctttaacttcaaactcttctgacaaatacttcttcaaattctgtaactcccccatatcatttccagatagaataatatcatcgacatagactatcaatatggccaatttcccggcatgagacttcttgacaaatagagtatgatcagcctgaccttgtttgtagcccagcttcaggactgcttttgtgaatctatcaaaccaggctcgaggagattgtttaaggccgtacaatgatttttggagtttgcaaacctgattctttgccatactttcttcgaaaccaggtggtatttccatgtagacttcctcttctaggtccccatttagaaacgcattttttatgtccagttgttgcaagcaccaatcttgattgacagccaatgagagaaggatcctgatagtgttcagttttgcaacaggagcaaaagtctcctgatagtctatcccataggattgtgtaaaccctctagctaccaaacgagccttgaatctttcgactgatccatctgctttgtattttatggtgaaaatccacttgcaccccacaggcctcttcccaaccggcaaatctgtgatagtccacgtcccattcttctcaagtgcatcaatctcatcttgtactgccttcttccattctgaaatttttaatgcctcttgtattgtgttgggaacctgagtatcatcaagagaagtagcaaatgctctgtaagatggtgataaccctttatacgtaacataattcccaattggatgatctgtacatctcctaacacccttcctcaatgcaattggcaaagtagaatcatcaatgctgggaattaacacctctccagccctatcctcacctatgttctcttcaggaagacttgaattggagtcaatatattggccacatgttgactgtgattcgtgctctaattcctgtcttttcctcctcctgatgtaaacttgtaagttctcattagcaagttgtggggctataggttgaataggcatgggagactggatggtcacgggagaaggaacatttgtgtgttgggctggctgaattgatggcggcatgggtgtggacaactcagtgggcgcgaattgagaaagatttggtgactctgagtgaaaagaaggtacaccctcaagaaaagactcccaaacttgatgtttattcatgctctccccctgaacatgagatttgggatagaagaagacatgttcaaagaaagagacgtccatggtggtgtaaaatcttttgttggttggagaatagcatttgtaccctttttgggttggagaataccctagaaaaatgcacttatttgctcgaggagcaaatttgctacgattttgaggatacacatgaacgaatgtcgtacaaccaaatactttgagtggtaaatcagaagaggcggcatgggtgtgaggaaactgttttaagaaaagttgacgtggggattgaaaggtaagcactctggatggcatacggttaatcaaataggtagctgtgagaatagcttccccccagaaatagtttggaacattagaggaaaacataaggcaccgggcaacctccaagagatgtctattcttgcgttcggccaccccattttgttgtggggtgtcaacgcaagaacttatgtggataatgccatgattttgaagataagtactgagactactagtaaagtattcctttgcattatctgacttgaggacttgtattttggaattgaattgattttgaaccataagattgaaggtttgaaaaatgtgcccgacctctgacttttctttcataaggaaaacccatgttacccgagtatgatcatcaacgaatgtcacaaaccatcgagtgccagaaatattttttatccgggagggaccccacacatcactatgtactagagagaaaacagtcgaaggtttgtatgggatttgaggatatactgttcgagtatgctttgcaaactgacaaatttcacagtgataagatgctggatttttattgataaataatctgggaaacaattttgcaaggtaaacaaagctaggatgaccaaggcgatagtgtaacattataatctcactatctttattgaccttagaatttgacacagaattgaaagactctgacatactctgagattgtacgcaacttgcttgagagacttggtttgagaattggccacatgaaaggaggtagagcccggaacacagttcagcactgccaatcatcttccccgatttcaagtcctgaaaaacacacaagtttggatagaatttagtaacacattggagatcatgagccaatttgctaatggacaaaagattacaatccaagtttggaacatggaggacagagtcaagatataagtctttagtaagttttatagaacctgtcccggcaatttttgactttgaaccatcagcaatatggacggatgaatgaccattacttggcttgtaattttgaagaatggcagcatctcctgtcatgtgatcagaagcacctgtgtctactatccacggcctcattcctcctcgattagcagtgaaggctacaccggtagtactgccactgccaacttggcttaataatttctgtagcatctccatctgctctttgttgaatggactcggctcgggaacagatgtgctctcagagttggcagccacgtgtgctctgccatctctgtcaaaccgtggctttggtttccaatcagcaggtttgccatgaagcttccagcaagtctccttataatggcctggtttcttacaataatcacaccacggcctatcccgtttctgacgatctccaccactactattaaatgaccgagcagcaagggcagaggcatccaatgtcggggcaggttgctcttttgatcccatcatcactttctttctactttcttcacgcctaacctctgaaaaagcctccctgagacttggcaggggtttaatgcccatgattcggcctctaacatcatccaattccctgtttagtcctaggaagaacttgaacagtctcttttgttccacaatttgcctgtatgttgctgcatcatccgaacatttccatgagtaagtctcaaataagtcaagttgctgccaataccttgtgagtgtgttgtaatactgagtaactgactgctctccttggcggaagtcatgtagagctgattcaacctgaaacagttctgaagtattttcagaacttgagtaagtttctttggctgcatcccatatgtcctttgcagtcccaaacagcaagaaattttcgcctatgtcattgttcatggaattgataagccatgacatgatcatgctgttttcaatcttccacttcctgaaacccggttttgtagtttctggcatgactgcttctccagtgaggtactcatcctttcctttaccgcaaatgaacagcaacacagattgtgaccactgtaaatagttatggccatttaatttgtgtcctgtgatgagaataggagaggaatcattgccaccaaggtttggaatttcagatctgccccctgattctggtgacgtgacgctggatacttgtgatgatgccattccgtattttgtcatggaccggaaaggtagaagaacacttttcaaggcacgtgcagggactggagttgagaaaaaatagccggaaaatctgatcagagggccagcggaagcaaaagaaccccaaaagaggcacgtgcagggctcggattgcacaaacaggtaggaagggtggctggtcggcgtcaggcgagcctggtggaggaagcgcgtcgccggaaagtggctcacgcgccctgacgcgccggcgcgtgagatgcagtcgccggccggaaaaacgcgcgtgggcggcgcgtggatgggtttctggttccggtgctttgggacaaattggagatctcctccaggcgctccttgcggtgtagaaaaaacccgtcgccggaaagttcgccggaaaagttgccggcggtgagtgttttctgacgacgattcgactgtccggaaagcgttttctcccttggctctgagaacagggactgatgaacggaatgagagagagagagagagagagatgatcggattgagatatggccagagagatttggccggaatgagtgatggcctgaataagaggtggccagaagggattagggtttcagaaaactggctctgataccatgaagaatttctgaactcctttattgatataaatcggtacacaccatacacatatatatacacaaatgactgaataagaaaaaatcaatctagcttaattctctcctaaaattaggaaactaaatcataaggaaatatcctaaatgatctctccttttttattcctaaattaaagtcctaactttggcattatttcaacagaccatcttatctgaaaactatttagtattcaatgagggtaggccaaaccttttatggcattcgacatcacacccctcgagcttgttctaagagccatcatttgggtgacccatccttgggcttaaaagcggcattgtagcaccctaataattccttccccaacatgatgctcccatgacttgaacccatgacccttggctctaataccaattcttggattgagttttgaccatctcatttgaaaaccaattggtgttcaatgagggtaggccaaaccttttatggcatttgacatcacaccttgcgggcttgttctaagagctatcatttgggtaacccaccgcaagcttaagagcgacattgttgcaccccaacaggttggaaagagaaaaataaaaacctttgctagtaaaagtagtgtggaacctgcaggtgccaataaaagtaggattcttttcttgggaagtagcttgaggggcaattttgactctagattagttaaaaagaaaaggatggactttggcgaatatatgtaatctttgtaaagttgatgaggaaacaactaatcatgtccttcatttttctaaaaatgagaatcttatgacatttgttattctcattgtttaaagttgagtgggtgttaccttctaaagttagagaaatatgatctagttggtaaggaacttttgggaggaagaagcgtatgaaagttcaaagagctgctccactcccttatgtttattttgaaccatttggaaggaaaggaattatggagcttttatcaatgaagcacaaacagatcaagctttcaaaaactctttcatgtctcttttgactttgggttataaagtctttagatggagcctctatgtctattctagattttgttggttgcttgggctcttttgatgcaagagaagtttatttttattttttttcaatctatcaatttggtttcctttctgacattggtgcataccacatatgcacttcttgcgccctcttttgattaggccttattaataatattcttctttgcctataaaaaaaaaaaaagaagaagatattttaactaataatgttgcatgatactcaaatatgcaattttgtggataaagatatgcaaaagctatgagtatttgcaattgtactcacttttatctagttccaaactcaagtgacctttgaatcagctgtattaaggacttgaggggtttcagaaagaactaaattaagattagccataaatggttatgattaagttcatttttttgggaagaatttaggagagttttgagaatgccatatgtatttcattattaagttgtcaaagattaaaaacttaagtttgagaagtatcttttggaaattatgactctttattattactatattcttgtgcttctcctttttgttttgaataattataatttgcttgttttttttcttaataacactgacttattattggttttctgtaggttttcgttttcgaaggcgacatctattattgtgg

SEQ ID NO: 11248 - DNA, 13255 bp, Vitis vinifera
  Intron number 2 from transcript GSVIVT01000657001 (locus G SVIVG01000657001) derived from phytozome v7.0 (chr-ID chr1 3; pos 20480005 to 20493259 reverse strand)
attgctctatatttccaaagaattaccatttcaaggtggatgaataagtcttgctgtggatgggagagggatttttacaccaagtgaaaagacagaagcagatggaggagataggcaccgaattctttcatgaattatttgcaagatcattttttcaacaatcaaatcttaattcatcacgatttgtgatgcatgaacttattcatgatcttgctcaatttgtcactagagatgtatgtttcaatttggaggacaaattggaaaacaataagcaacatactatttctaaaagatctcgacattcatctttcatttgtcaaagatatgtggttgccagaaaatttgaagcttttggtaaggtgaagaatttccgaacattaatagcattaccaataaatatttagggttatatggagaagggctatatatttatgaaagtgctacatggccttctaatgggaatgggatgcttacgggtactatctttggttggcctttacataagtgagctatcggattcaattggtgagttaaaacatctacggtatcttaatctttccgattgttcaataaaaaagctacatgattcgatgggtcatctttataatttacaaattaacattgatgttacgtaattgttatcaactcactagattgcctatagggattggaaagctaataaacccttcggcatcttaatcttattgatataagtgaactacaagaaatgcctttccaagtaggcaacctcacaaatttgcaaacatagtccaaatttattgtgagcaaaagtggagggctaggaatcagagaattgaagaaccttttgaatctccaaggagtgctttctatttacgggttgcacgagacagtgaatgttaaagatgcaagagatgctaatttaaaagataaacgaaaaattgtagagttaataatggagtggtgtaatgaattttgggattcacaaaatggtgtacatgaattgtatgtcttggagtccttacaacctcatacaaaaattttccaagttggataggggatccctcttcaaaaatggtgagcctaaccctccaaaattgtaaaaaatgcttgttattaccaactctaggtggactacctttgcttgaagttttgcggattggaggcatgagcgaagtttaaagcataggtgctgaattttatggagagtgtacaaatccttttgcatctttgaaggaattaaggtctgtggatatgccggaatgggaaagttggtctcattctaatttcattatgggagatgtaggagcctttccttgctttcagaggtttgtaataagaaaatgtcccaaaccgattggagaattaccaaaatgcctgtagtgcctggtggagcttcatgtgtcagaatgtccagaattggcgtgtcgacttccagaacttgcatctctcggtgaattaaatataaaagaatgtgatgaggcaatgctgagaggtgagtttgatcccacctccctcagtactctaaatctcgaaatgattttgagattgacttgtgtgaggatcggatttacgagatccttggtagccctgtaagaattggtgataaaggattgtggttagctgagatgtttgtgggaggagcaaggggtacattgcaatcttaaaattttgaggacagaagactacgctaatccagagaagctgataagccaagaaaaaaggagttggttactgatgtcacgagatgaagcccacttattgttagctttattgttattgatttgttatttttttaccagctgttattacagcctgtctccatctattttgaacactatatatatatatatatattaaatctctctctcttgtctctctaacaaagagaatagagttttcagctccagcttttctatcttggtatcagagctttcattcaaggtttgaatttttcttctttttttcactttctctctgtttctctcaatccaaacatggcctctactccgacacaatcttcttcttcctctagttcgattggatctggacaaagctcaacaatggcgtccattccttcctatcagatgcttaatcacactctgcctgtgaaacttgatcggacgaattacatcctatggagatctcagattgataatgtcgtttttgctaatggctttgaggatttcattgatggaacctctatctgtccagagaaagatctgagtccaggagtgatcaatccagcttttgttgcttagaggagacaagatcgaacaatcctcagttggatctactcgtcgctcacaccaggtatcatggcacagatcataggccataatacttctcactctgcttggaatgccttggaaagtatttttttcatcttctttaagagttaggataatgcaactcagactcgaattacaatccacaaagaaaggatcaatgtcgatgatagactacataatgaagatcaaaggagctgctgataatctagctgctattggagaacctgtcttagaacaagattaggttatgaatcttcttggaggtcttggatccgactataatgctgttgttactgctatcaacattagagatgataagatctctcttaaagctatacatagtatgctattagcctttgagcatcatcttgagcaacaaagctcgattgaacaaatgtctgccaattatgcctcttcctctaataacagaggtggtggaaggaagtttaatggaggtcgtggacaaggctactctccaaataacaataattacacctacagaggtcgtggacgtggaggtagaaatggacaaggtggaaggcaaaattccagtccaagtgagaaacctcagtgtcagttatgtggtaagtttggccacactgctcagatctgttatcacgggtttgatatctcttttcaaggtggtcagactactatttctcattctttgaataatgggaatcaaaacaatatacctgctatggttgcttctgcttctaatagtcctgcagatgagagttggtatttggattctggagcaagtcaccatctgactcagaatttggggaatctcaccagtacttcaccatacacgggaacatatagagtcactattgggaatggtaagcatctctccatttccaatattggctctaaacaacttcattctcatacacattcttttcaactcaagaaggtgtttcatgttccctttatctcagctaatttgtttagtgtggctaagttatgctcagataataatgccttgattgagtttcattctaatgctttctttgtgaaggatcgacatacgaagatggttcttgctcaaggcaagcttgaaaaatgagctttacaagtttcctatgttcagcaacgagaaaccttatagtagtattaataatgcttctgcttttcattcccaattttctagtactgttgaaaataaagcagagttatggcacaatagactaagtcatgctggttctgacattgtttcaaaagtcatgaatacttgtaatgttgcttctgggaaatataaatctattgtttgttctgattgtcagttagctaaaagtcatagactacccactcagctctcaaattttcgtgcatctaaacctttagaacttgtttatattgatatttggggacctgcctcaattaaatctacatctggagcgaaatatttcattctttttgtagatgattattccaggtatatttggttttattcattacaaacaaaggatcaggcccttcccatctttaagcgattcaagcttcaaatggagaatcagtttgacaccaaaattaagtgcttacagtttgataatggtggagaatttcgatcttttatgtcttttcttcaagcagttggtattgcccatcgattttcctgtccatacaacttagctcaaaatggtagagttgagcgaaagcacagacacgtagttgaaactgggttggctttgttatctcatgcttccttaccaatgaagtactggcactacgcttttcaaacatcaacttttcttatcaatggaatgccaagcaaagttctcaagtatgactctccttacttcactctttttagaaagcatcttgattataaatctcttcgtgtatttggctgcctctgttatcctttcattcgaccatacaacactcataaattacagtacagatctgtccaatgtctttttcttggctatagtttgaatcacaaggggtttttatgtcttgattatgcaactggaagagtctatattactccccatgtggtctttgatgaatcaactttcccacttgctcagtccaagtcttccaattcgtctaatgatacttcagtagaaggctctacccctgcccttataactcctcattcttttcctactctatgtcttctcctagattcaaaaatcagtcatgcttccatagattctcattctctatctacaagtgaaagtcctattcctacaacctcttcttcacctctggacacatctagttcttctcctgttacagatttgccacctaaatctattccagaacctcaagtcactgctcttgctccacgaatgacaacaaggtccatgcgtggtataaccaagaaaaggaccattcttgatctctctgccataaaggtttcagaaccatctactctcaaacaagccttcaaagatccaaattggactaaagctatggaaatggagattgatgctcttcatagaaaccatacttgggatcttgctgaaaaaccacccaatgtcaatgtgattggctgtaagtgggtgtataaactgaaatataagccaaatgggagtatagagaggtataaagttaggcttgtggaaaaaggatataatcagactcatggtctagactattttgagacttttagtccagtagttaaggctgtcactattcgcatcatacttactgttgctctcagttttaagtgggaaatttgacaacttgatgttcacaatgccttcctcaatggtgagctagaagaacaagtctatatgtctcagcctcctagatactttgacactcaattcccaaatagagtgtgtagattgaagaaggctttatatggcttaaaacaagccccacgagcttggtttcaaagactcagctctgctcttcttcagtgggaattcagcatgtctcggactgatagttctatgtttttgcactttggtaaggctactactttgatagttcttgtctatgttgatgatatactcgtaacgggcagctcctccacacagatttcgtctctcatagctaaacttgattcagtttttgccttacgagatttgggtcaactctcattctttctcgatatagaggtttcttacaatgaaggatctatgactttgagccaaaccaaatacatttcagatctgcttcatagaactgaaatgtttgataccaaaccggcaaaaacacctggtgctattgggaagaacttgtctaaatttgatggagatcctatggcagatgttactcattatcgaagtgtagtaggggcacttcagtatgttaccttgacaagacttgacatagcctttgttgtcaataaggcatgccaatttatgcaacaaccaaccacaactcactggctctcagtcaaatgaatacttcggtatctaagaggaacaatgcaagatgggctcttgttaagtactttaagtaacttgacaatagagggattcatagatgcagattggggtgctcaccttgatgataggcgcagctcaagtggatatctagtttatctaggaggtaacttagtctcttggtcctctaccaaacaaaaagtagtgtctcgcagtagtgcagagtctgagtatcatggctttgttttcgctactgctgagattgtttggatgcaagccttactgcaagagctatgtgtgccaatacctgccatacctctcctttggtatgataatatcagtgcttaccatatggcaaagaaccctgtgtttcatgctagaactaaacacatagaaatataccttcattttatacgagatcaagtcatgagaggaaagatacagctgcactttgttcccactgaagagcagccaacagatttattgactaagcatctcacaagttcaaggttcttgtccctcaaatctcagctttgtatagctccaagaccctttcacttgaggggggatgataagcaagaaaagaggagttggttattgatgtcacgagatgaagcccacttgttgttaactttattgttattgatttgttatttttttaccagctgttattacagcctgactacatctattttgaacactatatatatattaaatctctctctcttgtctctctaacaaagagaggagagttttcaacttcagcttttctatctgaagctacccaatggattgcaaactttcacgtgtcttgaagagttgcaaataacgagatgccctaaacttgagtcattttcagattcgggtttgccgctaatgctaagaaagcttgtggtggatgagtgtgagagtctaaaatggctgcctcgtaactacaactcatgtgcccttgaatccctagagatacttatgtgtccatctctcgtatgctttccaaattctgagcttccaaccacactcaagaatatatatattcaaggttgtgaaaatctaacgtctctaccagagggaatgatgcaccacaattccacttgttgtcttgaaaatttgatcattgattattgtccctctctcaagtcctttccaacaggggagttaccctccacccttaaaaaccttgccatttccgtttgctccaacttggagtcgatgtcagagaacatgtgccccaacaattcagctcttgactctttataccttgtgcgttatccaaatctgagaaccctaccagaatgcctgcacaatctcaagaatctcaaaataattgactgtgaaggtctggagtgctttccaaaaggaggcttgtccgtccccaacctcacacgcctttgtatcgctcaatgtcggaatctgaaatctgtgtcacatcagatgacaaacctcaaatctcttcaactgctgagaataagtggctgtccaagagtggagtcctttccagaagagggtttagcccctaacctgacatcacttaagattgatgactgtaagaatctgaaaacgggcatatctgagtggggcctccacaccctcacctctctttcgtcattgactattaagaatatgtttcctgatatggtttcctttccagatgaagtgttcttcttcccatttctctcacctccattacaatcaatgcaatggaatccctagcctccttggctctcagaaacctcatctatcttcaagtcctagagatatcaaattgccctaacatctgctctttagcgtcgttgcctgcaacacttgaaagacttcaaatccagaattctcctatactaaaagcaaggtgctcaaaggagaaaggagaatattagcccaacattgcccacatccccaacatttggatagttggagaatagatattgaggcagaaacttgtaggcggaggcattacgtttcatccattcttacattcagtcaggtgtgctcatttgcaactcacccccagttgcttttattttaatgcaattttaataccactaacttaactgcttgtgaattaattgctggactgttgttgaatatctaaatgcatccaggagtttttggaaattttttgctgaatgactcctttgcattatacatatatatatatatgtgtgtgtgtgtgtgtgtgtgtgtatgtattggcaatctttcatttttttgcagcatgatttactctgactttacacatataaggtccaaaccacagcttatgaattgttctgcagcgaaacaaatgcagcttcatgtcttaatctttgattatgaattgttctgcagcaaaacaaatgcaacttcatgtctcaatctttgatgagatatcttttgttaactcccaattgcatttactcttttcaattacacaattacttatttagatccctgagactgggggacgatatctcaaagtaatagaagttcattgttcacatatacttcattgattaggtgacaaataatttggaggtcaatttatattaagattattaatagttatctcttggtttcagtttgatcttaagaagattggagtaggcaggagtgaaaaccttctggttgactttggatttgaactatagtatctcaaggaaggtgcctatacataggttgatttcctgatttcagtcctgaagaaggctgccaacaatgctaaggcttatcaccagttctaaaagacaggcgcttaaaaacgagagaggaattctggccccacattgctcaagtcccctgcatggatgtagattccgaattttgttgattaactatcacaacttgagattgaacttcatttatgtatgctgaagcatgggatcaaagaccattcaaccctgtcccatccttagtttcaatcaggtatggacttctaattattaatgcaattttccataatcaagaagatgtaagcaaagaccacttctccctagtgcctccttattttggattaggtatgccctcccattttcattgacccaatatcagttttagtgttagccagttataaaaatttcttgtttacaagtggtaactagaaggaaaaaaatggcatgcatgaaatctaaggtttcttaatcataaccggttcctattcacatttggttgtatgttctcaatcacaaaagtagatcattgtttttttgcattttcatttttatttttatttttattttttgaagtaaatattacaggttgctctgacttgttagctgatatgcttcattttaaaaaaattcttctctatttaggaagaaggaaaaaatgcaggtggaatcaaaagcttttcaataataagtttgtggtctattcagatcaatgatatggaaagtatcccctgcttttagatagatgggaatatatgctttgaagtataataactagaaatagaaatacattttgtgggtaccagaaaagaaacagaagcagaaagccattcaacccccaatccttgcaggtacaatattactaccattttcctatcctttccttacttttattatacttagggatagctttattgtgtgtacaacgtcaaccttgttttctcctgggaccatcaaattggatcaaaggcaccatgccattgagttaccaaattcagcctctttcctttgtcatttttttttttttcttttaaatgatattttcagctttctaatttttaaagccattgtcttggatttggttcggaagtagtaaaattataaaaaaaaaaaattatttctttttctgcatgctattatatttagtggacttagatatggatatctagatgtgaattgctattccaatattagagtagcttagtagagaaaaaataaactgaaaatttgacaaatgaaacaattttctttttaatgaagacagaaacctttttgaatgattgaagtacattcacatgggtcctgctttgacaaggatgaggcaggtacatagggtgaagaaaaagatgagagatgttccattccctaattaagaaatgaaagtaagcaattagttatatctacccatttagctctcttccaacttcattgacccaatatcaaaatgtagaaagggaaaaaatttgtgtagattaaatgaagaaatttataaacataattgcagcctgttcacatattggtatatttgttacttctcctttggatgaaattttttctttttgttcttgtgtaagccgatcaacttcatttttcatgctaattatttctatcaccagtgcattttgttcatcctcctgctctcatcctttgcttcactatatatatatataaagagaaagttgtcattctgtaatttttttgcagcatgatttacttttgactctacagtccaaaccacagcttatgattgttctacagcaaaacaaatatagtttcatgccgcaattttttatgggttatcttttgctagttctcaatttcatgcactctttttaattacacaattacatatttagatccgtgagactggcgtggtatctcaaattaacagaacttcattattcggatatactacattgataaggtcacagttaactaatttgaaggtcaatttatgtttaggttattaataattttatcttggtttcagtttgatctaaagaagattggggtaggtaggaacaaaaaccttctggttaactttggatttgaagtgcagtatctcaagaaacatgtgagaatctgaaaatgcccatatctgagtggggcctccacaccctcacctctctttccaaattgattattgaggatctctttccaggtatggtttccatcttggatgaagagtgtcttcttcctacatctctcacttctcttgaaatcaggagaatggaatccctagcctccctatctctccaaaacctcatatctctccgttatttttatttttgttattttttttttacttttgttcattatttatttttttcttttccatttttacattcattgtcaaggttgatccttgcatgtttaggtcctgtaatttctggaaggggggtttggccccatggtagcttcagtttgggttcaattcttgatgcacatgtgtctgagtagcactggtccactaggcctttacagatgatgaaatcatgctgccagtcctctaacttgaagtaagctttttttctgaaagtttcttcaagtgttatcgatcttaagttgttctgagctctggtcctttttgctaaaggaagggttgcatgtgacacccaatgcttgaaatccagatcaattttcctgtactaggacaaagttgcttaaaggagaaaggaggaagtttggcttagggttgcctacatctctgacattcaacaacatgacttcattggaaaatatgaatttatattgaattgtgttttgcccactttggaagttgagagggagatcactcctctttccttcacccagttatgcttgactaaccacggatgtagaaccgtcttttttattggtcaataatagggttcacttctataattaacagaaacttcttttctacatgtaggagagggataaaatgagaggaattttgagacttatggctctctaagaagaactcaactcaatggatgtctgtgctgtgcttttttagttttagtggcttaagaaaaattagctgtctctgattttggaacttgatgtatataatgtaagaagtttgaagcttgtttcttgatccttagacaattgtagcaaatgtttccataggatttgtttctttagtttgatgatttaaacatttttattttctcaaaagttgtaatacctcaagtccttttttttttttccttttcctttcttcttaaaaagaaaattgtgagaacattgtaatttgctttttactatagtggattatttctatgattgccctatggtttttcccttgttattagagggtttttcatgtaaatcttggtgtaccttttatttcattatttccaaagacattcattcattgtgtcctaaactttgttgtcttacaggataagaggctgatgacgcaacttaaataaaactgtaaacatgtctaggcgcaactagagcttcaactctagcaatcaaccatatattgtgtttattttcttgtaaattgtttcatgagagttaaaaatggttcaaacataattggaagctttacccaaagtatagttatccagatatccttttagagtagtctaagttacctaggttagtgagagaaaaattagaaaatctagagcctgcttgataatgcaaatgagaagtatttttttattaaaataatatataaaaaatgacataaaatattataatatataagtcccaagcttatttcatctttttgtatttggatattctttgagaaatggttcccctttcaaatgatgagtgtttctttcctacatctctcacctctcctagaatctggattatagaatccttagcctcccttgctctccaaaatgtcacctttctaaaacatttgcatacctatccttgtactaaacatcatagttctttatgtttttttcttttttggaagtaaaccttataggttgctctgagttgttagttgatatgcttcatttttaaaaaattcttctctatgttggaagaaggaaaaaaaaaaatgcaggtgaaatcaaaagtttctcaatagggtctattcgaattatggtgtgttcttgacctcaatgttagatgttattttcgaaaaaagaaaaaattatttctaagtaagcctgataggttcccatgttttttaagttgatatgcttaatattaagtccaagtataaccagtgcaatcctcatattccataaaaacatataatctatcaagattgaagagccttgtttggtctatcatcatttacagtatcttggaccctcacttcacatatgccatggcttttgaattcttatgcagcaaagttatgcagtttcgttctcactctggtatcaatcttttcttttttcttcttcttaggtttcattgtagcaagtacagtttttaagtatgcaatcactttacaaagtcttaaatacggttttttattcaagaatttataattcttttaagctggcctagcatttcttatattttcactatatgcatatgctacatggagaaaattgaagtcattacaaagttttatacatatattaagatctactaatgacaaggttgtaatattataggcgaagagcattttcttatattttcattgtaatgtgtttagagtgtggccatcaacctaaagtaatatgttgttcacttttacaaatttcaaattaagttgtaaatattgttaactcataaatggttgttatttgcaacctaatacaaccttgcatcatggactccaagaatatcaagcccttgccaatttatggcatgggatagactcacattccttcaaacttccgccattgttagcataatacacatgtatgcttccgataattataaactattttttttatcatcacattactaaattggaattttttatcatcatcttccttctcatttgaagcactgctttgcttattgctctatatttccaaaggattacgaattcaaggtggataaactagtcttgttgtgg

SEQ ID NO: 11249 - DNA, 7070 bp, Vitis vinifera
  Intron number 3 from transcript GSVIVT01019131001 (locus G SVIVG01019131001) derived from phytozome v7.0 (chr-ID chr4 ; pos 16405304 to 16412373)
gggagaagcacatcttgagaggtgtgagttttaaggtaaatttggtttagttttcattataattttgtggtaatatttctttatatatacttctataatgatagattatgctatctttaatattgaaataggaggtttatttaggaatcagggtttttaaacatatctaagaaaatttcttgttgaataatcatttctgcggaggaagccggtttggcaaaaccatctgaatcatcttaggaaatctattcctgctttaaaccccttttcttttgttcattttgtctttgattactagtacttggcagtatgatttgctccaagtggtgcatgggtcattaatcagaagagttttgttgggcagtgccataataattttttattattctactttttgaaattgaaagcaatgatgattttagtttcagagttaccttagtgcctagagtcccaatttgaaacatgtttggtaggactgatgacttccaacatatgacccaagaatattattggattatctttttgattggtaatcccaatcagagtattcttggatttttgtagttttaaacttttagttctcaaagggataaaaaggaaaaagaaaaagctagagatgacgattactagtctcttcctaagcttctgttaccactcaatccccatgcttcattactatatttgtgtatggataattgaagacccagtgcccttttatgttttttctttcctgggaaaaaaatgtggttgtgggtgaaaacacacagctcaccaccacccaggcactcttgcctgtccccttaactctcttttgagcttcgacaagactccttgcctctcgcctcatgtctctttcctcccttctctttcatttcacctcttacttttacttaggctaaagaaagcagtacatgacccgccattcataaggtgattgacatacttatttgtctcttatagtagcaaaacctaaaaatatgtttgtcaacactaattttgtttctgatcttcagaaaacaacccaaacttcaatagtggtaacaaaaaatcttgcttttacatcaaaattggaaaaaatatgagtacatggatttgggttcaagtcccctttctctttcctaactacacatttaaccaaaaaaaaaaaatcgagactctctctctatacatataatgacctgctccctcttattagatattatgcattccccctctctttctttgtgacaatttgcttttctcttgacccctttcttttccttttcatggttgtaaaacacgtctctatggttaatagaagctctttgtatttgtagtgccaaaaatttctttccttaattgatgtggtctctcacaatccctcgtccctccatcctagcataggcacaatgtcatccctgtgtctcatgggattgcaaggccaatcaaaatacttactcaagactcccacatagggttaaggattgactttgatagtatttgcaatgattcacttctattcatgtagctattgttcaccttgggccaagacccttatgactttagaatgtgtttacatagttaagagaagcctacaatatatatgttatcgataatttctccctagccaatatgagatctcacacacatattattacaaaatcaaggtcacctactatgccaatatcctcttcaaagatttcctctccttataattttttttttctaaacttattttgaacttttatgagcattgttggtggcatatatttatgtgtgacaattggattgacttgttatcgtgatattatattccatgaaaataataacttattcttgtgtaatgtagtaactgttgataacagctacatttattttttactttcttcttttctacttcttttttcaatctcaatgtggccatgttttcatttttcttatatctctttgtcaacaatctcaaagtgacaataaacaaagactcttagaaaccaaaatgaccccttagctaggtgctctttatatatttttcgtgtacatgggtcagtgcccccttttttgcgtggtacctttttaatgcagttttttattagtgctctttgtatacttcctgtgtatatgggttgtgccacctttttgcttgggacctttttaatgtaactgtttatttgcctatcgaatagaagaacattgaggaagccaaatgaattaataatggagaaggttagtttaaggctatgataaccatactctccaacttcacctagtgtacctgtgtggacacaacatagatgtgtgtgggatcctactatatacttgtactttgcttcagatttggctatttaattttgattgattcattgatttatttttatttcaagaatatttagagattaagaagaaaatataagaataaaagaaaaaagttaagttgaagtccttataaaagatatatttattttaattgatttctatttttttttccccttttattatgttaatccatatctaaattttgagtcctttgtagctggttcctcaaatcctaaattttagagttaaaagaatcttactcctagatatgtacctgcacttgacatcttggattggttcaataaccttggtaggatgattgatagagctgaaagcatggaataattggaatatctccaaacctgtagaggttgagttaaagtttacaccttcaatttgatgatgatattattatcttctcttctactgaagatttcaaaatcccctgtcttgatttgaaattgaatgccatcagttagatttttgaacaaaagatagatcttcttacgagtgccctttctggaattgatgccggtgcattctgattccaaggtttgtaagagactctaagcattaggaattagaggcaaagcaggaattcttgggagcaattaacagtgtgcattcccaactatagagatttggaaattgtttgtgccaccaaaagggacccttttttggtcaaatggcagtatgggagagaattctaaccttagatcatcatcttaaggagagagtatggagcatgtttaaccgatgctcttttgtagaaggaatgaggagtctgtgaaccattaattaatccactgatcaattgcttgggagttatagtccatgattttcttctggattcctttggttcttcttgtcttgaaatagaggaatacaaggacttttgaagggatagaatctgcaaaatccaaaattaaagagcttatgctactctctttacagtcttggataaaggatgattcttttagtcagaggtgttcttcaatgcgttcagttagttccttaagtagtactagacttctaggtgataaaattttctattgtgttccttgtcattccttgtatggttgggcttgacactttgaatatatgccatacgtaaatgggttactgatacgaaatatgggatgaaaaataataaattctgtctcttagattgattatacacacagtttttataggagattacaagagaagaaatagaaaacaagagacataataggagactaatttattcctaaatcataaaaccatctatttacagaaataggaaactaataaaactatctatttatagaaataggaaactaacaaaattatctatttacagaaataggaaactaacataataggaaaataattctcctatttttttttcagctcaacattcccccccaagctgaggaatagatgtcttccattcccagcttgaatacaagatcgtgaaacattgaactgttcagcccttttgttagaatatcagctaattaatgttctgatggaacattggacatacacactactccttcctccaatttttctttgatgaaaatgcctatcaatctcaatatgttttgtcctatcgtgttgtatagagttatgagcaatattgatagctgacttgttgtcacaatagagctttataggaccatcccacttgattctcaaatcatctagaataatcttcagccaaagtagttcacacaacccttgaacaatgaccctaaactctgattctgcagacgaccttgttaccacattttgctttttacttctccatgttacgagattacctccaagaaaagtacaataccctgtagttgatctttgatccactagggaacctgcatagtcagcatcggtgtatgcttctagagcaagagtattgtttttcttgaacaacattcctttcttggggttgcctttcaagtaatgcagcaccctgtaagcagcttgaagatgaggttctcttggatcatgcatgaattgactgatcacgctcaccgagtaggcgatgtctggccgagtgtgagtaaggtatatgagcctaccagctagcctctggtacatttttttatccaccactggttcttctttagcttctcccaacttatggtttggatccattggggtagagactggtttacacccaatcttccttgtttttgccaataaatcagtcacatacttttgttgagagatgaagatcccttgtgtggaatatgccacctcaataccgaggaagtacttcagtttccctagttcctttattctcaaactcagttgctaatctctgcttcaattcatgcttttctctctcatcatttccagtcactatgatgtcgttaacatagactagaagagcaattactccccctgaagccgagtgcttaatgaagagagtgtggtcaccttggctttgtttgtacccaaactcttttatgacttttgcaaatctcccaaaccaagccttaagagattgttttagcccataaaatggcatttttcagcttgcacaccttgttacttgtgtttctctcaaatctcggtgggatgttcatgtaaatcccttgtctcttcggagacatccgataaaattggaacgatacagagaagattagcatgccccctgcgcaaggatgacacgcacaaatcgagaaatggtccaaatttttttggagtggctagcggccacttaagggagggtaagggtgcttgtttttttgtgctctcgttttgaggctgatttgtttacttcctgtatgcttggtggcctttgccctttaatatatttgtgttatctataaaaaaaaaatgttcatgtaaatcccttaatctaaatcaccatgaagaaatgcattcttaacatcatattgtaggagttgccaattgtagtgggcagccagtgatagcaggattcttacagtattcatttttgcaactggagcaaaagtctcctgataatcaacttcataagtttgagtgtaccctttggctaccaatcttgctttatgtctctcaagagatccatcagccttatatttcagtgtgaaaatccacttgcaatcaacagtgtttttcccttttggtctttcaacaatcttccatgttttatttttttctaatgcactcatctcctctctcatagcatccttccattccctttttgtcaatgcctcagaaacagtgttagggatgatagtggtgtttagactcacaataaaattcttgtgggttggtgatagatgtttaagagacacatagtgtgatagttgatagagtggtaggttagtacattttttggtgccttttctaacagcaataggaaggtctaggtctaggttgtctgttgagttagtggaagtttcactaggttgtgtatgtaaaggtgggtttgatcttaccgtgatttcattcccaggatctgagttggattcttggacctgcttttgttatggaatgaccttttcccttgaatacaacttaggaacctgtggaaaattgcgagtgaactaatccttggaacaaatgaggaaacatgacctttaaaaccctaaaagatgaatgacctagacgtaggtgatacaaccaaatggtatctttatttgaggaactgagaaaagacaacgaaaaattattattagttttctgagatgattcaaggtggtaaagaccgctcctttccttagcaagtccaatcctcctccccgaagaacacaataagaaggaaaaaaatagcataacatttaagatcatagataagcttttgaatggaaacaaggttggccgacaatcttggtacatggaggacatttttaagaataagggtaggtgtgatgtatatgtctccgaaacctgcaatggtagctaaagagccattggccactacaattttcttgttacttgggcttggggtataagtattgaaaagttgagatttggaggtcatatggtctgtggcaccggagtctattatccaagagtcatcataaactctgtgtgaggcatttatgcaaaaagagagtgaaggtgtacctgaattttccaacatcttccacgaaaaaacttgatctcttggaattaaggcaaatcgcgaaacaaaaaaatcagtagtaatgaaggttggtaaaagaacacgtgaataaaaaaaaaatccagctatgaaggccagaaaaatggcgatgaaagccagaatgatgcccaagtcttaaaaacctacagctctgatactatgacacgaaatatgggatgaaaaataataaattttgtcttttagattgattatacacacaatttatataggagattacaagagaataaatagacaacaatagatataataggaaactaacttattcctaaatcataaaactatctatttacagaaataggaaactaacataataggaaaataattctcctattttatttacagctcaacagttacaccctttgtggtgctctgaaatttctttgtttgtgataaaaagcgtttatatcttttgagtttttggtaatttcaaagaaatgaaaaaaagaaaaagaaaaatcatgatttaattgttggggtcccatagtatgatgactagcacgcttgttatgtttcacctttgaactaacacacaccagaactggcatttttattcagaaccatgagcggagtggatttttttgtctctcttttcatatttagtttcccttgaattttggttatgttttatcattctctgtttattttcttactttaacccatttatagattagac

SEQ ID NO: 11250 - DNA, 10373 bp, Vitis vinifera
  Intron number 5 from transcript GSVIVT01010741001 (locus G SVIVG01010741001) derived from phytozome v7.0 (chr-ID chr5 ; pos 21987305 to 21997677 reverse strand)
tgaggcttgcatttttggctggggctggacttcaggtaaggttttcattatcagccccttgtgttataaaaactgtcagtgtctctgtcgtttcaagatggtcaagttttaggtacttcataattgtaatttcacagggattaggggaaaacactgattttcactgttaatttatggatttgattgtgaagatctattaggaataaatcaagattaccttttgtagtaagtggtttggagagagaccatctggtgggacagaatcagttatagacgtatagctagggggttaggtatcggtaatcacaatgaggaatagagcctttattggtatatggttgtggtggtttgcttgggattgtgatttcttatggtatcagttgattagcaacattctttcgtaggatgccaactttaaggtcaggacattgcatctgtgtccttgagaagtcattgagttgaccaaggagatgaacactctcccttatcaagctttctttctttctttctttcataattcctcttcttaagaatttgaatttcaaacttttgagaaatcaagaaatttattacctattgcttttggagcatgtctttccctctccttcttttctaagacaagaggagtaggaccttggaacctgtggcttttttcccttcaaagctttctgttctgccttttaaaaaaatagatcctcattttgttttcccccaagtcaatttcatttggaagtcatgggtgggacttttgcttgcttgatagccaattagaaggtcaacattaatgatgcgctcctattctggaggccttgtaaaggaatattgttgaatcctttctttgggaagtggggaaatgcttggccaccttcctttccactgtcccttttctctggagctttactggagattgttttccataattgggatggtgtgggttgcagctggagatactgtatatctgttggttatcctccttcctgggctttgggaggagattaggagatagtttgtagaggagagccattctacgtacttctgggttctctggcttgagaggaatgctggactcatttgggacaggagtagacctgtgggcaacctgtgggcaacctgtggaaggtttgcattcactcttgaatctttggatgtctacttccaagcaggtattttgttggctattgagacacaaatttttgcattattgaaaaggctagaagaagccaaaactttgggtgtctcaaacctattggtcaagggagacccaatagcagttctttctgaggtggcttagtataggaggggacttggagatattagaactggcagtagaaggtagcacatgttgccagtgaggtaggctgtccattttcttaaaagtctaaattgacaagccatgaggtcaacaagctttccaggagaggagcttcatcccttttttgcttccgtggggatgatctaccattatgtgaagttttcggactgtattttagttagggtccctatatgggttagtcttgttgttgtcttctgttttctccctttttgtttgttatagcttctttcctgaataatctctcatccttttaaacaacgcaaatgtattagaagtgcttggaaaaggcacacaaagtacacaccgagtataaaagatgcaactgaaaacaagcaaaagggaagagagaaaataaaccaacacccggaataaaagatgtcaccctaaagcatagcaaaacaagaaaccccctgcataacaaacacaacctacaacagcaaccaaccctctaagccaaccaatagcagccccaaaaacaacctacaaggtcactcgcaaaccatcttccatccactactccgactcctctcttttttgtttgaagtgcagtatttgacaaagtattccaaatttagaatctccctaacaaggcagggagtggaggagggcctcctcttcacagtcgacactctacgaccctttctggtttccatctttctcaacagggaagcaatttccctctcatacccaaccactagcaatcccagaaacttgctaaaagaaataaatttctgaaaagaaggatcggaaaggctttccacatctgataggcccctactaggactcctaaaacctgaagccccctccccactacacacttctaggttcgtatccctcacatccttgggctgaacctttgggatttccacaaccaagcccctgccagaactcatatgcaaaggcctgtaaacatcatccttgccttctgctaaaagacccacgtcctgctccttccaagggaccaagcttttagtccttcccaaagaaaaaccttcgtctttggacgtggaagcagccaaagaagaagaccttccccccatcaagcacactttgcgcttcaaataagagagcaatgtcggcaaaaggtgctctctcctctgggtgcagggaagagcaagccagaagaggatgggaatcgtcttcacaactcagccatgggccatccaaaacaactggagatggcaccagagcaagacttaagccttctagggcttctattatgcacattggctccttgtcgcaaccctcaacacgttctctttccaaggatgagagattaaaatgactctcaagccccttagaaccatttgaagcccaacccacctcccttggtctgttgttcaaaacacttaaagttagaaagttgggccaggtagaatcgataagatagattggtgattgagccacccttcctttcaatgatacagccccattaggcctcctttggtggcccaagatccacctctcgagacctacccccacaatcataatgacctagaaaagatgacatctcatggtcgcctgctacttccccagctatgaaacctttgtaggcccccacacttaacacgtcctcttaacttctgcgaccaggctaaacctcctctctcacacccttaatggcatgtggatcaccacctccttcttcttcttctgccttaacatcctgcttcttctcaactttcaaggttgtgacctgagatagccaaggtgaagcctcccaccacagttgaactgagtaatgatggagcccgacttccacctgaaggaaaccaagaagcttcttgccatctgacctcacgagaaatcttgcccactgaagattacagtgtcttgtagtgtcttcgtctgctacaacaaagcccctacccccacaacaatcccctacatatataaatgacgccatgtcccacaaatgcctaccaacctaccccaaacctcctttgcatgaacgtctcttcgaaagcatcccaccttcgacgaccatctctccagggacaaacatttgttggcaaacctccttaagcccctatgcatcacttcctctgcatcttcaaaagaatcaaatttgaaaaggataagagccctccttaacaaaaatagatcaactcccctttttaagcgccagttgcaaactgcccacttcttcagaatctgcaactctgacaccaaatctgaataaaccccccatcggcccactagacaactcttcaaagaatcctttttaagacggacctccttttcccccatttgaaaccacactgcctctcccaagacttctaaacctttcttcgccttgtttgcaaaagacaccagaggagactccctgttaaggttccctctttttactggcttgcaaacaacggtgcagctctactaacttgagagctaggagtcactcccaagctgcaaagtttcctggccaaaatgccccaaccccctggacaacctttcccttctgggaacaccaaaacaaacatcttcgcctctgcagagcacactgaacaaaggatgaaccttccagcatcattacagcgatattcaaccctgtaaactctcctcccttccagccattgcttgctgaaaggcttccctgtcaccctggctgcataactccactccatccaaaagatgggagagactaagttcaccaaatcttatccaactggaacatcctctacccttttccaaaatttcctgacagcttgtctctgacctcttctacagggatttcaaatgtcttcaaatccacaccaaaccaacactttcctcctcttaataaattcttcctttcttattgttgaatataatgtatttatagtatattatctttccttgttaatataggtcacatgtatggtagttaggactcctagccttgtatatatatatctctcaattgtaagtagacattacatgaatgagaattaaggtttttcttctttctctctctctcaacatggtatcagagctagggaagaaaacctaattctttcttgtttcccgtttcccgtgtcatcaactccgggcaaccttccggtgaccgtgtttcattccggtcaccttccccatctcccaatactttccggtcagtcggaacgtcgttagaaaccactcaccgccggcgaaattttccggcgaacttttccggcgacctatttttccgacactgaccataccagaaggagcgcctggaggagatctccaacttttgtgaaggcaccggcaccaaaagaggatccacgtgccggccacgcgccattttccggccggcgactgcatctcacgcgccggcgcgtgagggcgcgtgaggccttttccggcgacgcgcctcctcctccagcctcgtctgccgccgaccagcatccctacctacctggttctcccatccgagccctgcacgtacctcttttggggatttttgtctccgtcagccctccaaacagcctttccgacgaagttccggctactttctctccaccccaatccctgcacgtgccttgggaagtgttcttctacctttctggtggtaccacgtcgcgatctgaggccgtctccctttttcggtggtgccacgccgcaatctgaagtcgtattagggctctcttcgatccaaatacgtgaatatgaccaccaaaaatcagatctttacctctgttatctctggatctcctatgattacctcagagaaattggttggcagtgaaaattatctttcctggtctgcctctgttgaactttggtttatgggtcaaggatatgaggatcacttggttacccaggaggcagatatccctgaggttgaccgcgtacagtggaagaagatagatgcacagttatgtagtgtattatggcaatcggttgatccccggattcttcttcatcttcaggcctataaaacttgttttaaattttggactcaggccaaaggattatacacgaatgatatccagcgtctttataaggtggcttctgctattgtccatctcagccaacaggacttggatctatctacttatattggtcagattgcctctcttaaagagcagttcttgactgtgatgcctcttactcctgatgttggggctcaacaaacacagcttgacaagttcttcatggtccttactcttattggcctccgtccggatcttgagcctattcgtgatcagattcttggtagttcatcagttccgtccttggatgatgtgtttgctcgcctcctccgtatctcgtccactcagactttgccatctgatagcgcttcagattcttctgtgttagtttctcaaactacctctcgaggaggacgcagtggtacccgagggagaggccaacgtcctcattgcacctattgcaataaacttggccacactcgcgatcgttgctatcagttacatggaagacctcctcgcactgcccatatggcccagtcctctgattctccgctgcctcagcctccgagctcctccgcatctcagacatctcaggcttctattgcctctgttgcccagcctggtaatgcctctgcctgccttacccacacatcttctcttggaccctggattctagattctggagcatctgatcacctatctggtaataaggatcttttctcctctattactactaccactgatttacctactgttaccttagctaatggttctcaaactgtggctaaaggtattggtttggcccttcctctgccttctctacctctcacttctgtcctttatactcctgaatgtccttttaatcttatttccatcagcaaaatcactcgtactcttaattgttctattaccttttctgataaatttgtgaccttgcaggaccggagtacggggaagacgattggcataggacgtgagtctcaaggcctctatcacctcacctcagattcatctcctgcagtttgcatttccactgatgctcctctcctcattcacaatcgtctaggccaccctagtctctccaagttccagaagatggttcctcgtttttccactttgtcgtcgcttccgtgtgagtcatgtcagcttgggaaacatactcgtgtctcgttcccaaagcgtttgaataatcgggcaaagtctccttttgagcttgtccacactgatgtttggggtccttgtcggactgcgtctactttaggatttcagtattttgtcactttcattgatgactattctcgatgtacttggttatttttaatgaaaaatcgagctgagttattctctattttccagaaattttatactgaaatccaaacccagttcaatatttctattcgtgtgttacgcagtgacaatgccagggaatatttttcagcccaatttacttcgtttatgtctcatcatgggattcttcatcagtcttcttgtgctcatactcctcaacaaaatggggtagctgaacgcaagaatcgacatcttgttgagacagctcgtactctcctcctccatagtcacgttccttttcgtttttggggggacgctgttcttaccgcttgttatttgattaatcgtatgccctcctctgtcttacacgatcagattcctcactcccttcttttccctgaccaaccactttatttccttcctcctcgtgtctttggttgtacttgctttgttcatattctcactcctggacaggacaagctttccgccaaagccatgaagtgcctcttcttgggatattccagacttcagaagggttatcgttgttattcccttgagactcatcgatactttatctccgctgatgtcaccttctttgaggactcaccattcttttccacctcttctgagtctcttcctgtttctgaagtcttgcccattcccattgtcttcccacctgatgctatgccccctcaaccacttcaggtttatcatcgtcgccctcgtgtcgttgctcctctcccttttcctgaggcacctgctgactcacttcctatcccttcggcttcacctgccccggctctgccttctcctaatgacttacccattgctgttcggaaaggtactcgctctactcgtaatcctcatcctatttacaattttttgagttatcatcgattatcttcaccctattctgcttttgtttctgctatatcctctgtttctcttccaaagagcacccatgaagctctttcccatccaggctggcgacaggcaatggtggatgaaatggctgctctgcactctaatggcacttgggatcttgttgttttaccctctggtaaatctacagttggttgtcgttgggtctatgcagttaaggttggtcctgatggtcaggttgatcgccttaaggcccgcttagttgctaaaggctatactcaagtttatggttctgattatggtgacacattctcacctgttgccaagattgcttctgtccgcttgcttctctccatggctgctatgtgttcttggcctctttatcagttggatattaaaaatgccttccttcatggtgatcttgccgaggaagtttatatggagcaacctcctggttttgttgctcagggggagtctggtttagtgtgcaggttacgccgttctctatatggcttgaaacaatctcctcgagcatggtttagccgttttagttctgttgttcaagagtttggcatgcttcgcagtacagcagaccattcagttttttatcatcataactccttggggcagtgtatttatctggttgtttatgtggacgacatcgtcattacaggcagtgatcaggatggtattcagaaactaaagcaacatctttttacccactttcagaccaaagacttggggaaactcaagtatttcttgggaattgagatagctcaatccagttctggtgtggtcctttcccaaaggaagtatgctttagacatcctggaagaaaccggtatgttagactgtaaaccggtagacacacctatggatccgaatgtcaaacttgtaccaggacagggggagcctttaggagaccccgggagatatcgactactcgtaggtaaattgaactatctcaccattactcgtccagacatttcttttcctgtgagtgttgttagtcaattcctacagtcaccatgtgatagccattgggatgccgtaatccgtattcttcgatatatcaaaagtacaccaggccaaggtgtattgtaccagaatagaggtcatactcaagttgttggttacacagatgcagattgggctggctcacccacagatagacgttccacttcagggtactgtgtttttattggaggtaatctaatatcttggaagagtaagaaacaagatgtagtggccagatctagcgctgaagccgagtatcgagctatggctttggcaacatgtgaactcatatggttgagacatcttcttcaggagttgagatttggaaaggatgaacagatgaaactcatctgtgataaccaggccgcattacatattgcatccaatccagtctttcatgaaaggaccaagcatattgaagttgactgtcattttattagagagaagatcgcatcaggatgtattgctacaagttttgtcaattcaaatgatcaactagcagacatcttcactaaatctctcagaggtcctaggattaaatatatttgtaacaagcttggtgcatatgacgtatatgctccagcttgagggggagtgttgaatataatgtatttatagtatattatctttccttgttaatataggtcacatgtatggtagttaggactcctagccttgtatatatatatctctcaattgtaagtagacattacatgaatgagaattaaggtttttcttctttctctctctctcaacacttatattaaatattctccttatttcttactaaaaaaatccctaaagaatttcctctaagcccaatttttagcatcaaatgaaatgttctttaatgcaactgtcttaaaattgctagttgagaatatctaccaaaaattgtttagggaaataaactatcaaagaccaaaaaggaaaagatacacgttttgtgatccatatatgagacatgaagtgagtcatggttgttgttcttgagccttgtttgcagtatgcccaaaggtgtaaaacactaataaatattgaaatatgcttgtagtgtatgaaccagaggggtctctaatagagtagctagctacattcttcctctattttaagaaaaataggtaatgttaactttcgacatcacaacatgtggtgtggtgggagttgcacttgtacctcacccagaaggtacatttttacattggcctttccattgcactagctgctgaccaagttttttccccttttcccaattgaacatagagcttgaaaaaatccatggcacctctgaaggtatcactcctcaagaatctcaagtgctgaatgtttaaaaatcaatttcaatactgaatttcaacaaacaggattagtttttttttttaataagattcaatggttgagattctggaaatatggtacctcaaaaggtaccacaggatgacccatagaaaatataagtacaaaaatgagtgggagtttgttggatttggatcactttgtgtccatttgaatacatttcctattttttgtttttaaaatcagaaacttccatataaaaatagaatatcttgtgtaaaaaaatatagattgtgtttttaaaaattactttcagaaaatttaaactttgaactagtaaaagttttttgatactgcaattttttttaaaaccattattttttcaaatggaagtcactaagtgtttttgtgtcatatgtaaaagttactattatttttttattttaaaagcagaaaactgaaagtgtatccaaatagatagtttgaattcattttttttttttttttttctcttgttgagtgactcctttggaaattgcattgaattcctagcagtacattgggaagcctcttccttcttttcacactaagtgctatgatcatgtagtgaccaaaacatctgatatgcaggcattccagcagttcactggcatcaacacagtcat

SEQ ID NO: 11251 - DNA, 5870 bp, Vitis vinifera
  Intron number 3 from transcript GSVIVT01015616001 (locus G SVIVG01015616001) derived from phytozome v7.0 (chr-ID chr3 ; pos 14124129 to 14129998)
cttagaaattctagcattcttgagtggtataacatgaataccttaggaacttggacattaaaaaacatatattagattcataagatccttctagattgtgtttgaagatggattattttaattttttattttatttttaagtcatattatcaaatctctctttatttatttagagttcatttgacaatgattctagaaaatgtttttaacctaaaaagtgtttttgaaaaaaacaaatagatatttaacaaattttaagaaatacttctaaaaatctaaaaaattgcttgtagtatttctttttagaaacatttcataaatacttctcctaaaaatacttcgaaaaaaaacatttctactaaaaacacttcgaataaaaatattgtcaaatacactttcgattaattatctagttataccatctatcaaattctttctccattttatttcaaattcaataatgtctactagaattttttataaatattattttatttcaaaatcaataaaatctaatatattttttttttacaaatattattaaaaaaaccatttaaataaaaaatattgtaaaatcaattgttctttcattaattataaagccttacatgtataatctcattaattttttcaagatgccttatattttcaatctctttttctctataatttttttttcaatgtttatttttcttctttcaatatttaatagctaggattggagcaagcaaagtacctagggtttggataaatttgtctttggtatgatcttaaagtgacccattttatatggcattacactattttgacaaggactcacaaatataatactctatgagtctaatcctatttcgatcattcaccccaaatatttaagtttattttcaactatttattttaacaactgagttgaccaagttattctaaattattcctaaatattagggttggtttggtggtgtttttttaaaaattactttcaaaatagagaacaaaaaaacagttttttaaaattttttaaaaataagagtgtttgacaagatgttttaaaaaatagttttttaaaacaaaaaacaaaaacttgtttggatgaaagaatttgtattgtttttaaaaacataatcttacttttattttataaaaattttataaatttaatttataataatatgaaattaaatttaattttataaacaataaattaagttctttattacatatgcacacactgagtacccaattttgaacataatattttagaatgttttgatttaatctacaattaattgaatcagttttttattgaaaattattcttaaaaattaaaggatgtattaaaaaatttaaattattaattatatcttacttaatttttaatctatttacctaataagatttattttattttattttttaaaaaagatagttgtgtgtataggataaatactaaagccattacttatgacatataagttttcttttattatttttttcaatgattagatttatttttgagttccaaattatttttaaaaattgttaaactcattaataaattcaataaaaagtgtcacttgatttgaagttcttttttgtagtaggaaaaattataaaaacataattatatgcaaaaaaagaaacaatacagtcagtatgaaccaatttttctccataaatttatggtattcataagtttattatttgagttttaaattatttttaaaaattattagacttgttgatgaatctaacgcattaagtcttttttaatttggagttcatttgcctatagaaaaaaaataggaaataataattttatatatataaaaaaaacaataaagttgttttaaaccaattttaattcataaattttttgtattaatgaatttattatttaagttttaacttatttttaaaaattaattgacttgttaacaaatccaatgcattaatttttgtttaatttggagttaatttgcctaatgaaaaaagaaatcgaaaaataacgattctatatagaagagaaataatgatgtgtgtatatttttctattatttttaaaaaccggtgaaaacaacttttacttgttctccaaaagttgttctctatttcacattatttttaaaaactagaaacaaagaaaaataaccaaacaatgttataagtttttaaaaactattttctatttttaaaaacagaaaatagtttatcattttgccgcaatttatcttgatttatatttaattgtgaccctttggcaataatttatttatttttaattacctctctactgtcttctaactaacaacatattattataaaaaaggttttaattatgccatagttccaaaatgaatggtgaagatgagctgcatgttacaaggataaacaatgacattgtagacccctcaatggaaaaggctttattattattattattattattattatttaccacccctctttagacctgggagaagctggtagcactttggaggagtggggggacctctttctaccaggagcaagctgcatggacatgtggcaaaagcatgaatcatcatgatggtggttgaaggtggtgacatccttcctgaacgaggagtagtggaactggtagcatcttatggaggaagaaagaaatagtggagccgatagaagcttgcaagagaagaagatcgggcttgagaagagaaggagcaggtgaaaggatgtagaaaggtaggtgagaggaagcagagggcaagtctgaggattgataggaggggagtgtatgcagttagtatatttttagctagcttagagggtaagaaaaaaaaaagtgagcttggggatggcaggctatttgagagagaggatatctttgaaagaaaaaaggaccacctgagagtgagaggagagggaagagctcgagcaaaaaagaagccgaaagggatgaagggagcattctctggtatgacattgtagactccctatttttcttcatcatcctacactttcatttctatattgctatttctggttgttacttctttgatttggatgtgggtagctagccatttatgtcttcggctgagatccgagttatcaatgagttttgatattgctaattcatgttttgttcatataattatgtttgttgattggagccaaaatatgtgctctaatgacacatattcgatatgatttgtgcaccaaaggacattcaaatcacccaacttgacctaaatcaatgctaaggccctagccatgagtttaatttgtactttggagacttatctcaggtttaagggaagaaaatggtgccagttgaatcactttagattttgaaagatcaagaaagggctaaatgaggaaataagtgagtcaagactcatggaccataaggaaaggaacgaagagaatatcatgagtttggaagatgagaaatgatcattatgaagtaagaaagaaggcaagaaaacatgggaaataaggcatgaagcaagattcagctgcatggaaatttagaactcaaaaatttgatggaattatatactctgactttgaggacaaatttagagcacttcctggagtctattatatacatactatatattgtttcgaagattgggaagtcaggagtccaataatttaaacagtgtgcaaattagagctgaaattaagaagttatggctatttgaagacaattgcaccaagttggagggtcatttcgaaattcaatttatgaattcgaaatcaacttcgaaatgacaccaatttcgaattcacccactgccactttgatgtttcacctcctctatctcaggaattgcatctattcaactaatgaattcgaaatccacttcaaaatgacaccaatttcgaattcacccactaccactttaatgtttcgcctcctctaccatgggaattgcatctagagcacttcatctaccctaagtggaccccacatgactagaaatcacattttattattttttcatcatttttaggacattattttgtaataagtggccaatgagagtgtgtcacatgttaggtaattgatggtattatataaactctctcaattctaggttttaaggatcttagatttttttttccgaagagtttgacattgaaggtggaagaagacaagaactttggtttgttttatttttcttctttattaaatatatattttttagtttcttttgattcaaattatggattttaaccctattatggattgtgaatgtgacatcacccccatgagaggctaagagccaacttggggcttgaagcatgaaaacctaacggctaggaaacctatagggacaatgggtaaattattttaacaatgagattaattattggttgggtggaaatttattaattttttttatcctatccttgtgagttagtttagggaatgatatggtaggttattacccgatactagtgattcttggtaattcttgatcattagttatcctcgtcttccctatcattatttgccccaaaacaaagctataaggagtaggaagggttaaaaagccaaatcttaaactattaatcaatatcattcatttgatggttttaggaatctgttttaaaaaggaaaaattaggtttcagatgcaattttgagttatagaactcaacttgatcgcgagcggccaaagatcccaaaaccttaagatcatatcacttaaaatacctctattttctctaattcctataccctaggttggattgtggaaaaccccaaatttgaataaattgaatttaaaatcaatattcattttgttattaatttaatttcttttacttagtttcacattattcacatattgattttcactttaggatttaaacaaaagtaatttatttattctagtattgacaattttcataaactagtccttgaggacaatacccgaagtactataaaagtcatagtgactttttctatagtttttcttgactagagttgctatgtaaaaagtctaagtattttggtacaacagagaagttcggtcacttgtgtgccacttggctttgctgggatttttgctagaagtcttgccactgttattattatctttagatctgttttgatgtcccaccttgttcttaagctcaatgttgcatgctttgggttatttatctttcttttttatacaatctcccctgttccggtttcttttctttccttccttggagcttgttgcaactgatgtttctcttgagccctttgttctgagtttccgctacctgagaagcttctagacgctcccaaatctaaagactatatatctgcagtccttcatcttgaaggtctatttctcggaatgggtacatctgaggtttgttgaaatttgggacgtaaagaggggttcaatggccagatgttacctcatggccactgataatgttgctgctgcttctggtactggcttggctactgcgtgcagtaacagcataggaggagaaggtgattttgaggaagggtttcctaagatggagaggtccgagaaccgttcgtgcatgctgatgtagaccctatgtttgagaagggagaagcggcacacgttaattgtgatgattctgatgataaaaatagtgggatttttgggttcttctggtggtggttgcactatatcacttcaagttgagaaaagagactaaaacagaagatcttggtgaaacagataatgatgctagcaaagagtgtcctgatgcagttcctgatgagaaaaccaatatggttgttgagaaagacgtctttttcaacaagttatcattagctgagatcctgataacaggactggacaaatggaggcccataaagcccattcaaagaaagccccaataataccccttcca

SEQ ID NO: 11252 - DNA, 938 bp, Vitis vinifera
  Intron number 10 from transcript GSVIVT01021995001 (locus GSVIVG01021995001) derived from phytozome v7.0 (chr-ID chr 14; pos 4576421 to 4577358 reverse strand)
gaagtgcaagcggcattgaggtaagaagactcatggtttttccaatttgtcttctacacaactaccaataaagaagatatattacatttgtctctgcaatttatcataatgaaaaccttgattttcttccaagttgtgaaagtgcaaattcttgttaattcaaggaaatggatttaactccatattcatcaccttactccttttgttagattttagtattagtaaatttttttaactcaatgaaaataatctgttctattgaagacttgacttcattattaaagacagaaaaaatggctatcaattgaaatgtctacaactaagatcctttaaaatggattatattgttctgattatttgcaattagattttgatttttgtgttttggactgaattccatgtcatgtcatatgtgtagacaaaacatttttacttgtatttgcccataaaactaatacttaaaaccctagaataaacaattttttttttttttttttttttttttgtggagtttgcctctttggtttgttatgtttgctcttcaattaaaaataaccctctatattctttggtgaaatgagagagtttaactagtctatggaagagctgtcttgatatgctcaaaattagctagtgcttcattgcatttactaatgatgcttgttccaacagggcaggggaaaaagagagagaaatagtgtaacctatcaagcaaagacacatgtttgtttgaattgttcgtagttgttatgattgtagcatcccaaatattgttttagatgagctacactgtagttgtagcatagtgctcattgcactggattgcctattgatgcctcctgcctggactatgttctgatctatgaggacctcataataggccattagaacactattaaatttctattatttcacaggttgaaggggtccaagggatc

SEQ ID NO: 11253 - DNA, 6438 bp, Vitis vinifera
  Intron number 1 from transcript GSVIVT01022807001 (locus G SVIVG01022807001) derived from phytozome v7.0 (chr-ID chr2 ; pos 16812696 to 16819133 reverse strand)
agaggactgccttcaatccgggtaccacaaacagggtacgggtttttctcagttttatttcattgttttgtattaatcttcttgtttccattgcttttattttttattttagatgcttggtgtaattcatttattacccaacaaacccacctaggattcacattcttctcagtaatgctcttgttggttgtatttaggggatgctaaaggcgggctactttagcaaaagatgatagggagtgtaggattttggttcagaggatatgttcgttgttgtgcttctcgttagtacttgaaataaaacgttattcttgggggaaaattgctgttctttggggaaagaaaaattcccatagattagatttcatgagtgggatttggggtcaggggttttgaaaatagtggggaagtggtctacttgtggatttgaaatgagagagagaaatgattctcgtgatgattaatgttgctcttgattggttaagcatattgcattgttggttgtggggaggaaattgtgttgtaacggtgtaagcatgtctaggcctgaatgttatggatacttgagtggaggggttcttcttttgagagttggcattgttgttccactacaaaccaaaattaccgttatattttctatgactaaacgctgaaggtgaattcaatgaatccttagtcttggatacttaatgaagttgacttttcttttcctgtttccaatttttagggaatggaacaaatctatgcaaaatagattgttgtgcacactaatattttgcgaggcctatagtgatcaattgagatatttgagttggttgtttatgtggtttgaggcgccttttggtttaaaagtgaatatggataaaagtgaagttattcttgtggggggtagagactttggaggatgttgttttggtgttgggatgtagagtaaggaaggtacccacttcttatttaggtcttcctttgagtgccccttttaaatttcccagggtatgggatgcagtagaagagagattttttttttgataagtaagcaagcaatagattgagaagcgacaaaaatccataaggcatacatggagtatacacagtagcctaaaccaaaagacacaaaaaacaaacaatctcaccagcccttaagtggacgctagccactccaaaaagcctaagagagacaaggactcctcaccaatgtacacccgagcccaactccatagattacaaacaaaagaatttttaagcttttgaatagctaaagacctcccctaaaagctaacccattcctctccttccaaaccattcaaaaaatacataacaggatggaattccaaatctttttcctttttttccccacaaaagggcccttccaactgaacaacacctctttaactatctttaggaacacccacggaaccccaaacaaggcgagtatgatctcccaaaggaccctgaccactatacagtgtaaaagaatatgatttacagtttattcttcacaaccacacaaaaaacaacgattagagagctgccatccccgttttttaagcctatctagggtgagaatcttcccccaagtggcctcccaagcaaaaaaagcagctttggttggagtcttatccgcccaaatgttcttcttcaggaaagagagagtcattgggagcgaccagcaaaatataagcgtccttaaccccaaaaatgccacttcccccacctttccaaaaaactgaatccttctctgaagatatcttgcaatcccttaacaaaatcagcaactcccctatcaaatccaactcccaatcattaaaatctttagaaaatttgaggttccaaccttcttgaccaaagctagagtcccacacttcattaatcgttgcattcctatggacctccaaggtaaataactgggggaagatttgggacaacgttgcattgctgcactaatgatcaatttagaacttaattttagtccctttacccactttaaactggaaattatcctaacaccagcaagcctccttcagaatctccttccaaacccccactccatacgtcccacgaacctcattagtcctccacccaaacccctcttagccatacttcaccaacaacaccttcttccaaagattatccttttcaatggctaatctccaaacccattttcccagcaagacctttttcagaaggataatcttccttaagcctagaccacccttctccttttgagcacacgccacctcccaattgattaagtggactttcctttccaagcttccccctccccaaaggaagtctctttgtaatttttctagtctttttgcaacaatcttgggcattcaaaaaagggacaattggtaaattggcatgttggccagcatgctcttaataagggtgattgtcccgcctttggaaatatattgtcttttccacaaggctagtcttctcctcattctctcttccaccccatcccacatagaaggagtcttgtgataggctcctaaaggcagccccaaataaacagtgggcaaagaccccaccctacaccctagctccactgccatttcctcaatcttttccacctctccaactggaattaattcgcttttggccagattgatccttaaaccggaagcagcctcaaaccaagccaaagtccaactcaagaaagttagattctctttccttgcttcatagaatatgattgtatcatcagcaaagagtaagtgggacacatttaactccatcattcctcccccctgaagcttacagcctgaaatgaaccccccatccgcgacccttcttaaaagtgcatttagcacttccattcccaacacaaaaaagtaaggagaaagagggtctccttgacgcaaccccttggtgcttgaaaagaagcctacaggcaccccattgaccagaacagagaacttggcagttgagatgcatcgccaaatccacttcatccactgatacccaaagcccatcttatgcaaaaccttcattagaaacctccaatttatgctgtcataggctttttcaatgtccaatttacaaatcagccatttctcttttcgtttttgccaaaagtcaaccacctcattagctataagcgaggcatccaaaatctgtctaccctacaaacgcgttttgatcctcggaaatcaccttttgtaaaaccttcttcagcctattagccagcaccttagctaacaacttgtacaaaccccttagaaggctaatgggccggaaatcccccaagttctcagcaccccctttctttggaataaggattaacactgtggaagaaacaatacctctctaagggtgggaggcttaccttgatcaaaaacaccttatcaagtcttccgatttatttcatgtctttttttgttatccctataaaggtgtgttcaagacttgaaaagatccaaagggattttttatggggcggtggtgccgtagagaaaaagcattatttggtgaattggaattgtgtggataagaaggagggaggtctaggaatttgtagtcttgtagccctaaacaaacccttgcttgggaagtggagttggagatttgttgaagagagggagcccctttggagacaaatcatcattgggaagtttggagtagaggaaagggtggtgtttgagaggagtgagagaaggctatagtgtgggggtgtggaaagcaattagaaatgagtgagaaggcataagatgtagatcccattttatagtagggaatgggagaagggttaagttttggaaagacttgtactacaaggaccaaatcttgaaagaagctttctctaacatatttctattggcagtaaacaaagatggttgggtgttagaagcatggggggagggtggggatctgaatagttggagccttagctttttaagacgtcttaatgatttgggagatgggagaagtggagtctttgtttcaaaaactacaaccattaattgtgagaaaagaaatggaggacattctgagctagagagaaagtaaagatggcaaattttcagttagatccctttattgcttctacatgagggcttctaaagatccttttctatggagtattatttggaggtcttgggctttagtgagggtgagtttttttgcttgggaagcttcttggagcagaattttgactttcgaccagctgaaaaggaggggatggaatatcccaaataggtgctacttgtgcaaagaaaaggagaaaaccattgaccacctactcttgttttgtggcaaggttagattgttgtggaacttgatctactcccttttcgatgtgtagtgagttatacattcctcaattatgaggattctgttagtttggcacggttctattgtgggtaaaaaaagggagaaagcgtggagggttgctcccttatgtttgatgtggactttatggaaggaaaggaatggaagagccttcaatgacatcgagtgatctgaccaagcaatcaaatcttttttcatgtgtacttctgtgaattgggttagggtgtatataaagaatcacactttgtctatgattgattttatagattgattgtttgtcaagtatgggagagacctttttttgtctccttactgcttagcttttttggacattgtttgtatattttgtttgtgttgttttcaccgtttttaagcatttctaatgcaagcccttttattacctatcaaaaaaagaaaaaaaaaaaaatagaagtggtgctattttaagcaagggtctggtttggattttaagagatttaactcaaactcttcttgttttagaaatccttatgcatcatcaaccatttagtaataaacgactgagccccattgacaccaaatcagaccatttcaaatgagataaagactttgagttccaaatagcagtcgtgaaagagcaatggactgaaaaatggtaaacaggctctgaataggctctgcacatgatatttcagatcagaattggccaatctcgggtaaacagagatgttaatccaattactgcttgaacatcagtgggaaagaattgatactgagttgggattttagtaaactttcttaaggagctgttagtcaaaaatatatattgtaaatggtatcacttggaataagataggtatatgatgtccagttctgtttttttggaacacaattacaattaatgtcctgaatttaataattatttttataacttattcggttcacatatccctcgactagatgggataatataagtcaagacatgtggcagttggacatccaagtgagttcaggttgggttgggttttagaataacctgtcaaccaggaaaaaaaatcaagccaattagtgttctaattggtgagtccagcaggtttaacccacaaaagaagggagcttaaaacctttctttctatttcattcttcgaagtttcttctatattactccttccaatacagacccaagaggggctatcctccttcctttctctgcttcacgtgaggaactgtgctagccactttaataaatccctggcatcttctcctagaagacccatactcctcttaggagcatcaaagcatggacttttggacttgggctgctgggtaatgctggaggaggtggttgatggatgcatgtttgttttgcatatgaaggaccagttaggaagaagaattcctgtgactatcaattaatcatggttcagatcctctttgggttgctttcacataaaaatcgggccagggacattgaaaaacttattcctctctctgtccagctaacccccttgaaaaatgatgtcaccatgaacctcctttcattagattccctccactctactatatcttcacttaccatgttgggcctcgctatggaagttccaaaccactccggaaagtttcatcctgtatagagggtgtagggttgggttgatttctgctatggggtgcgtatccacccttaagacgctaccaaatgccagaaagggatatgcatattcattcaatcatcttgagacagtcgtattggtaatataacaacctaactttatgcaaagattatgatggatacagcctgtttggatcctctgtatgaatatagttttcaagaataagtttccaaaaacaagaacatagaatgagtttttagtattcctgaaaggcatatccaaacagtttttgaaccatcttctgttctcaaagaacagaaccaaatagacaaattcttgtcttgtttcctttcagctcatggttttcataatgctacatagttgtttaagtaagaagttcttagttttatgatgcttaaaacttgttgtaagtcatgatacaacattttccaagagcattgattctcaatatgacatgtctgtatttgaaaatgaagacattttatgtggtgatgcagctgcaggtattaattaagtcaagaaatctgagaca

SEQ ID NO: 11254 - DNA, 2195 bp, Vitis vinifera
  Intron number 5 from transcript GSVIVT01009178001 (locus G SVIVG01009178001) derived from phytozome v7.0 (chr-ID chr1 8; pos 5809042 to 5811236)
aatagtcaatcaaggtacccatttcatagagttatgcatgtgtgagtttatggtgttttctaaactattgcagacggtttaatatagtccatatccacttggcttattgcaaagtagttttaattgaaacatttaaatcgtgcattatggttattattgctagtgatgtttctctattaattatgcaaatctgactagtagaactattcttgtgtttcctaggcaccattgaagaatcagtgttaagtcatgttgagtataattttttgttctccctagtccctttagtacatgaaaaatataatgttcatgttagaatatgttatacattgtggacctaaaatagaagtttttaggaaagttagtagttcaacatggttagagcatgctatacatagtgggttcaaatcctagcagcttaaacttttaggaaattaggtagttcaatatggtataagagctttggttaagtggagatcttggttttaagtacaccatccccccacccacatcttttatcatttgtagaaggaatctaaaattgtcaagttaccctgcttcatgaccagtggacatgccatgtatatccctgacattagctctggctcatggcaaagtgaccaaacacctttaagagctttccaagccattctcactatttttgggggaaatgttaagcatccctcagagacacttgtagagtttgctgatattcaaacaggtgtccatgggaggttgccttaaataggctttctctcctgaatcaactcattgtagatgctacgaataaaaaacagaatcactctcaatgtaagttattctgtagtttttcagctgagctttctttctacacgctttgctttttttgaggatgaaccttcacaacccaacccaacaacaaaccccaactccacccactccccttggtatgagagtatggactgaacatcaatatgtatcttggaagtttttatttaggtattatgaggttaaaagatgctggatgtaatttgattatgagagcgtgacttctatttaccctgactgtttaaacagctcatgtagatttgccagcgaaatcaaactgctgtcatccctctttcatggaacatattaaaaaatggaaggcatgccagttttgaaggattaaattttgccttgattgcactcaagaaatttttttccctgtttattaagcacatgctcttactgaccagggtctctcacaaagtagccatattgtacattgtgtgtgctagttaaatggttgaagattgagtaataaaatggcagtttgtgacttcttatagttgaaggctacataactaagcactaaaatttaatatcgatattgctctatgttgttgtgatatactgccttaccaacatatacatgagatctcggtcttagcaacctcaaaagcaaaataaacttagaatgataattggtgcttacaacagagctgttagtctctgctcgagagtataattttaaaagggattctaaaatagaagtgagcttatctaggtgtcccactagacaatgggcattccacaagatatgactctaacttcaaaatttttcatttttcattgtccttccaaatgaattaagtaggtactaagttctctaattgaggataaggccagccagaaatttctcatgtattcttatgctcatattttcatcttgtagtttcattacaaacggaaagaatcagtttgggtcctgactgattcttatcaaaattgatagagatcgggtttcaaaataaccttacttaacataatcatcaacatatcattgaaaaggaatttatttattctctctcaaccttccttgtcaaggattgaattagttagaggccttcttgctgatacttatccaatcaacaaagttacctcaagcaactatctctaggaagtttccttatattaatctagtttatgatatgttcaaggttaaattgctttccttggttaatcttacatttgtcttgtgtgtgtatgcttcctactatagaatttaatccaacaaaacaatgtcaaatttatctatctttacattcacttgtgactttttatttttggtgtttgattttccctcataaccacaaattttcttttctttattagatattataccatagtttcagtttttctacttgggttttcattgtgtttcagtcgctcgc

SEQ ID NO: 11255 - DNA, 5350 bp, Vitis vinifera
  Intron number 3 from transcript GSVIVT01011187001 (locus G SVIVG01011187001) derived from phytozome v7.0 (chr-ID chr8 ; pos 7944428 to 7949777)
agcttctcggcattaaaggagctgccaaagaaacggtgagttgttagtgtttggtcattactcagagctttacgatcatgattatcagcgtgtttctttgatttttatttttgaatcaccgtttccttttttctttgaatcctcatctgtaatggaatattcaagacggttcacccagccaataccaacaaagacttggattccaactactttcttttggataatggtcccttcagctttcattatggttacattatccacttgatcataatcaattgggtattttctcactgcctagatttacattttctcagcccccaaacaacaatatacaatgtgaaaatgtaaataaaaagagcgacatcaatttatggggaatccatgtaaacaatcaactggctattggaaggccatgggactagtgttgtcaaaggagccagttcccatgctgaattttgtagatacgaagaaaatataggagtataccacaaatctctccttaactaaacaacgggaattccgttgatttaaggaataatagtgaatcctagagatgctatagaacctgattaaagaaacagtatcaaaactagcctaccctttcatatgaataatcaagatactaaatattaatttcaacaccccccttaagctggagcataaatattttcaatgcctagctttaaacaaagatgtagaaacaaactctgtggaaaacttttgtgaagatgtctcctagttgatcttctgatttgacataaggagtaatgacttttccattcatcacagtatctctaatagagacagtcaaccccaatatgtaaggacccaattgtgtgccacattgagaagttaaggtttagtgatttggcttataagcacttgggcaagttaagggttagtgatttggcttataagcacttgggcaagttaagggttagtgatttggcttataagcacttgggcaacttaagggttagtgatttggcttataagcacttgggcaccctccccttaataatcggtcttcaagggtgagttctatgtgtgcataataattggtattagagcatgcaccacgcagggagggccctcttcccagaaggggcaagggggaggggggagggctgctacctagccgtaatgtggtatattgtaacgacccaattgcgtcccacatcgaaaagtaaagggttaatgattggggaaaaagtattgagtatggagctttaaagttaagaatggaggagggaagtcttttaatttaatagcaagcaataaagatagctttcccccagaatttctttgggaccctctaagctaaacttctgtttaccctttgcccttaggtaaacttgtacaacttttgaccaaaggagaaagtttgtattattcaacttcacaatagtgattaaaaaggacctggacttgcattcgtaggtgtagctattgcaaaaaaaaaaaaaaaaaaaaaaaaaaaattagaaaaacctagagaacaaagggcaatcaaaagagcagtttttgaacttgttctgatataagaaataaagaacagaaatatgcactcatgaaaaaaagagttcatactttccattacactctatgctgagtttatgaatacaaagaaaaatataaaaggagcagacgacaaaatctctccttaactaaaggagttagatttcccatgattttaggaataatagtgaatcctacagatgctatggaacctggttaaagaaacagtgtcaaaactagtctaaccttccgtgaggaataatcaagagactaaatattaatttcaatgggcctcattggtgaaaaataaagcgtaactaggcgataacaagtatatgtatagttttagctatatattgtcatactaaaaatatataacagaacatagcatcatcttcgccatcattattgggctaatcattcaacaaccgatactaataagctttcattccttaaattttcttggtggaataaacaaagtaatattaagttgtttaatacatcaaatatcacacacgacatcatgagaagcattgaatttgtttaacaaaaaaaattattatccataattcatggtcttatttccttcggttggttggcttatagtttaaaacttccaaatttatttttctcttatattactaggcagaacgttgaggagaatgtatccaacacaatgatatatattgatcttgagtattgataccatccatatcaaggcactaatatttaggtgtcagtttggtattgctacagcttaatcaacttttgatgaaataaatcattatattatttaaaaaccaattcttagtaatttcattttcgttttcattttcattttcattttctaaaaggaatacactcatttttatgttttaattaaattcaagtgaacatatttatgatggcatttcttatgccttctataataagtaatataaaatatacatcataagagatatgtcttgaagtagaagaagatgatagataatatgtacacatgtgaaatcatgaaaggaaattatttgaagtcatgacaagcaatttaaataaaagggcttcaattcttggaaaataacttttgaaaagattccttttacctacttaaaattgtttctaaagtaggtcaaattctttgagaaccacttttatatactttaccaaacaaattagttataaacttattgcaaaagtgattttgaaaaacataaaattgaatcccaaatggagcctaagaataactccaccttttcttcaaaatggtgcttgccttgtcatccattgccttggttgaggagattgcctagacatagccttttcgaagatgccttgtttgggtcttctaaatgcgacaccttttgcttcaattttcttggtgatcaactttaatagcactatgtgggaccatcatagcttgctaactaatccactagaagttctgttgaggttataggaataccaaacaaagtcacaaccatgttctatcttggtacatgaccttgttcttcacgagtgttcctatgccatgagtttgtgaaatgccatgaaagaatccatgcttgccctctagcatatcataaacccttcacaaaatccattagaagtaacatgcaccttgtgaatctcctaattgtatcatggtgaaaatggttgaggattttaggatgttcgtcaaaattaaaagtaaggagaattgatttttttcttttccctttgattaaaaagagattttttacttatttattttttattttggttttataaacattgataatttaatcataaattcctcaataccccccacccttgaagaaggaaataaaaagaaaaatggagactaagtctcctaaaatttaggaattttcttggtttacaaattatttaggaaactttctaaaggatattttttttgataagtaaaaagtaagtatattaatcacaaagaggaaacaccaaaaaaccagtgcccttgaaatatgcagggagtatacacaccgccttcccttactaggagcctatccagtctaaaaaacttacaagagaagaagggctctctactaaggaaaccctgacccaagaccaaagattacatacaaaagaatatttcaacctttgaagcgagagttcctcattcccaaaagctagtctatttctctccttccagactgaccaaaatatgcataaaggagccatttgccaagccctcttgcgccttttccccacaaacactccattccatctaagaagggttgccttcactgtacacgaaagagtccaagtaacatatatttttgccaaagtattttttagtataattaaacactccattaaaatatgaaataaattggtaatagttttcaatttttaataatgaaaatgtggtctctaggtcacttatgatccctaggatatgctaaaaagacatatttgatcttgaattgtaccctcttgaagctttaggtggatgaatcataaattggaaaactagttagaatacattttggaatgtgattgtcgatttgtaaagtccttcacactaggatacaagaaaaaatggatccatttacttagactatctatgcaatgaccccctatgtagatattgtccaactttttccaaaagcctgcacataattaagagaaattcactacatataaagtgtcattcttgtccttttagccaatgtaggatcttacaatcgccccccatgttagaacaatgttctcattgcgtcccatgagattggcacctaagatgctgactataaagtgtcacagttctatccctaagatgttctattgtggttctctccctagtcgatgttagatctcatattcacctctcatgcatgcatgacttctttgttgtggtctcatgaggttgtaaggataggcaaatagatgcccaacaagtgattatctctagtaaccctttagatattacttgctttacaccaaaggtttgcatggctttatgcgtctacacaattaagaggagtctagcatataaagtggcacaattctctacctaaccgttatgggattttacaatctagccgtgctctacaagctactttgataaaagaggcttttccttggcattgatatcaatcatatcatgaaatgtcaggtaaataacaagtaatctgattcttgacatctttcgccaaggttggaagtgatgaacctcaatagaaggttaataagcaaatggttgccaatttgactggactttgtacaatggttttcatattttacttggcgagaacttttctgagattaaaaaattgtttcaggtttgccccacataatgtagatccatctcgattcaaaatttttgggattagatgaagctaatcaaggcagtgaggtggccaaaaagggtcaaatggccaatcatgcatcttatgaagaagccacttaaaatggaatgttcattcatggtttcttcccatgtttttaacagtgtaactttcccactcagtgtatgtgtgaattgagattctctgactctttggccagtaagcctaatttgatgtatagaaatgcatgtagttcaagtgaagaccatttttgtgattagcacatgctcttgtatggtaacatgtgataacaaaattttcagtatgattactggaaaaagtggatttcctgagactaggttaaatttttcagacctagaacttggcttatgtgctgttctttaataataaattgacattatctgcagtttggaggtgtttttttttattagaaagacatttagcagaattatatgaagattaaaatctgcaactagagttgattgtatgatttgtattgtgcagaataa

SEQ ID NO: 11256 - DNA, 17338 bp, Vitis vinifera
  Intron number 7 from transcript GSVIVT01021587001 (locus G SVIVG01021587001) derived from phytozome v7.0 (chr-ID chr1 0; pos 7512598 to 7529935)
aataaaggacagctgaaggaggcgtttaatattaggtatttctttctttcccttttggtcctctaataataaatgactgattctggagatgaatttatccatgatgggggaactaagacacgaattcttaatttactggatattactactgatgttgtaaaaatatatatttgtcacatcttgcattgggttttattagttgctttagagtgtctaagtagcacagcctattatttcttgaacccttgagtaagaatcaccttggattttaacagatctttttgatagtgtaaattatgtgaacctgtttaccttttttttttggttttgaatgatgggcattgagtcttttctgtgttagttgttttgctcataataaaatctttctaaaatatattttacagtaacaaagtatataacccctaaccctcggggtacaccatagagatcatggactcatgggctcatatgaagcccaggctttttggaagaaattatatgaaataaatatcaatgaaacatatctatcaaaaaatatcaatgaaacacaatgaccaaaacatttacagctgacttgttaatgaccattttttttttccttttttcctttttttaatttctttatttcttttgagtgttacttaaatgccccaggtactaagatttgcccttcatggtcagtataataatgaaaaaaattacctataaaaaaaaaagaaaaaaaagatttgcccctcatggtgcctttttgagtatttttcttcccataaaaggtagttccatagcttctgaggaactaggcaatatatcaaaatgcacaaaactgattccacactacacttggtaatgtcaacaaagatgcattacacacacacatggtaagggaatgggatagagaataaaataggtagaagttgtgatgcaaagctacttatttggaaaattgatggctacaatctctattgttgcatcatggtttaggaaaaaaaaaatttaatatttaaaaaaaaaggtttgtattaaacaaaaacaaggggtatacacggtgtatgtaaggtaaacaaaagaccaaataagaggcatgaagatataaaaactagcaaccgtgccctatagagaacataaccaatccacaaaatctaacagggtcaaagaaccattcccaataaacaatctaacccaatcctaaaaaagatacaagaaagtgtttggtccatgctttcacaattgtcaaaagctttcctatttctctctctccaaaaggtccaaaacaaacacaacggagcaaccttccaagccttttttcttttctttttttctaacaaaggacccatgctagctcagaaggacccttctaattgaagagtgcatcactcattggacaccaaaaagcgtaaaaatcaattgttgcaaaatgtgagctttcaaacaatgaatgagaatatggtctcccatttcttcttctttcttacacatgtagcatctattaggaatcctctagcttctccttttgagttgatctaaagtaaaaatcttgaccgaatttgcttcccaaacaaagaagctaattctcgatggcacttaagaattccataccgtatcataagggaacaattccactctcctatttgccaaagaggaatagaaggacttaattgaaaaagtgtaagcaaccatatcataacatcatcaatatccaaagtagtggagtgttcatacaacctcctaatcatgcaattgccctgtaaaaatatgactctagctaccatattccgaaaggtcacccacccaagcattgtttgaagtagctatagaatggagtttcaaaaacaattcccttaaagatgtgttcctacatcactcgtccttctaaaacctcaccctattcctaaacccaaccttaaaacctgttttatccttgaaaacctaccaattgcctttgattacctgttgtgcccccgcactatacccttctctcacttctttaatgcaccacccctcttcatcttgctcatactttcttacaattacccgtttccagtgatgattcctttcatttacaaatctctaagaccattttcccaaaagagccttactaaagatagatatttttttgatacccaagccttcttgcctttgattacctgctgcgcccccgcactatacccttctctcacttctttaatgcaccacccctcttcatcttgctcataatttcttacaatttcccgtttccagtgatgattcctttcatttacaaatctcttaagaccattttccctaaagagccttactaaagatagatatttttttgatacccaagccttctttctatttctctaagcaaacaatagatcaattcaccaaatgtgttttttttttaaaagccccttttccccacaaaagtacctttgaatcaatctaatagttaccctccttgggatgacaaaaagagacatgaaataaatcgacaaactagacaaaatactctttactagtctgccttccaccttttgaaaggtactatatattccacaaagcaggccttttatagaatctttattccaccccttccaaaactctagaagatttataaggggctcccaataggaggtctagaccttgttcaatgtaaatgagattcttgattggtttaagagaggcaggatacatctgggtattcctctttttccaaattatctcttttttttttttttttttgataggtaaaggaaaatttcattaaacgccaaagaggctaaagagtatacacagagtataccaaggaacaaaagaacaaaagacaataaggcaacaagtctgtcccttacttggtagctaaccagtctacaaaattaatcaaagagaaagtgtgttcctctatatataccctagcccaattcacaaaagtgtacaaaaaaatagatttaatttcttggtcattcctctcaacatcgtcgaaggccctcctattcctttctttccaaatggtccacaacaagcagagaagggcagctctccaagctttctcccttttcttgcccacaaaagaaccatgccatcccaagcggttcctcctaacagaggagtgcatcactcactgcaccccaaatatctcatttaatgtctatttaagcttactaagtgttttccttaaacctggatttctgacctcccaatggagtcgttgagaatggggaatatgttttagatgcatttatagattcttatttacaagaaacttgttctactaaatggagtcttgcttcttccgcattgattccaaatcctttgaggtgaggattgtctggtcaaagggtaggggtgaggtgcagatagtggagaaaggtaaaggcttccgaagatggatcaaggcaagtagaggggtagtggtgtagtttctgaagtcgattgaagcatgctgcaaatggagagggaagaaactattcaagggagacgtgaatgatcgaggtaggaggtttagaatagaaatgcgtcaaaatgatgttggacgttacctcttgctttcggtccttttagaagatgataggagatatttcattattataccaaaggggtttgacctcttgggttgggacttattcagaagcaagttagctagaattggtgatggctctaagcatggagcagaggactctggcacctatggtggagggaatgaaacttctcttgtaaggcctggtttaagctatgtagacgcattcaagaggaaggctaaaggaagaagtgaggaagtttgggttgaagtagggaacgaggcttacacttccaaactgaaagatctcagacgctgtttggtgggaagatggaatgccgagaatgaggcagctcccgacttaagggtggtggagatttgggcaaacacctattggagtttcagtggtcaagtgagtgtagcctccttaagtgattccttgtttctttttgaattttctaaagtgggagatgctcaaaaagtgctggaggaggggagccgatgcctcaatggtgtctgattatctttagaccggtgggctccaattgtggggtgctctaggagggaattctagagggatgtatcttgggtgagaatcccagggttgccgcttcagttctggagtatagagttctttaaaagggtgggggatgcttgtgggggctttgtagatgtggatgaggagaccaaaaatctagttacaggaagggggctagaatccttgttaagaacaatggaaaggaggtgcctggaagtttagaggtaatagcgaggtttgcttcgttctctatcccattatggtgggagaactcggtttggttctcggctctttaggtggcgaatagtttaaagattcaaagggaaggtgaaccagagagcagggcctcccttcagcaggaggaaggggggtgtgagtcacccaagatgatgcgcgtgaaagggatgtgctatggagaaggaaactctgatgcagccgtaggtgatggagtctctggatgggggctctggattccggaggaaaaggctaggatagtaggctgtgaagaccctgcttctatgcaagaggatgctgggttggtggaggagacgagcgacacgacagggagtgggtcggctgcagtagtcaggagggacggaaagctgatttttggcggtggaaggagacctgtggatgggctgggcggggaaatttctaagtgggccgagttgagagggccatctggcagtgggaagcccagtctccatcgggccaagtttccttttaaaagaccaggcttgggcttatataaaaagaaagggaaatgggctgtgattgttaggcccaataacttaaaagggactaaaaaggggctagcccaagaatcaatccaagactcaatcctagggctccctgcctttaagttgggggagctcaagacgaagtttcagaagcctagatttgctggggagagttcagggaagaaggcgaccccgctggaccaaggcagcagggaatcgcctttgaaaagtcattcgccaggtatgtttcctagatcgactacctttgggggggtgtccggggagttttctggcttttcttcgccttctacttagggaatgggggactttgtggagtatccgttggcatggcagtctgaggagacgtgtgacgatcctttggaggttgaggtgccgctgagggtgatcctcaagaatggtcgatccttcatcgtgccagagggggtaacccctaagtctcggggtaaggagtttcagacgccacctcttcacataactgtagcaggagaaggggaaaaggtcaaatccccttgggtaaataagaaattcctgggattttgtaagacggtgggggtcttgattaaaggctttgaagaggacattttgagaatccttaaggagattgagaatagaagaggtgttatcaggaagcctaatgatagcaagagaggaacattgtctgcttcaaggaaggaaagggagctgaagaagcttgtcagtactattaactatgatgggctggctggaagagagacagaagaaggggagttgggaaggcaaattactgtggttccttatgaagcttaaaataatgtcctggaacgttagagggttgcatgaccctgataaaagaatggttattaagtcgatggtgagaagacacaaaccagatttggtgtgttttcaggagacaaaaatgaaagaaatgtctgataggattgtaagaagcttggggattggtagatatttggggtgggtttccttagatgcaagggactcggcaggtggggtgctagtgatgtgggataagagagtcttggaagtgttggaggctgaagtgggctctttttccatttcttgctgttttaaaaattgcgaggagggttttgtgtgggtcttctctggtttatatggacggtgtaacggtaaggagaggagggagttgtgggaggagctagccgctgtcaaggggctttggggtgatccgtggtgtatagcaggggatttcaatgtagtgaggttcccagttgaaaagaataatggcagacagatgtcaaccatgatgagggatttttcaggctttatagaggagtttgaattagttgatcctcctcttggaggtggaactttcacttggagtggaggggaaggaggatccttaaatgctcggttagaccgctttctgttttcaggagattgggaggaacgggtgtcgggggcaatgcaagttcttcttccaagacctgtttctaaccactggctgatcttgttagactatggagggatgagaacaggtaaaaacccgtttaggtttgaaaatatgtggctaagggtggaaggtttcatggacaagtttaaagattggtggcagtcctacagttttagggggaaacctagctttgtgcttgcaaagaagcttcaggctttgaaatatgatttgaagaggtggaataaagaggcccttggcaatgtgacaattaggaaggatgttgccttggagaagttaaacttttggggcagtttagaaaggtttggtcctcttttggaggaagataggaatagccagcggatagctagagatgaatttagccactatgccatccttgaagaaatttcttggaggcagaagtctagggctctttggctaaaggagggagatagcaatactaagttttttcaccgtatggccaatgcaaggaggaggggaaattttatcagcaacttgacaattaggggtgttcggctgagtaaagaggaggagcttagagaaaggattggatcttattttaaatccctgtttgaggaacctcgggtgagaagatcagatgtggagtcaagtctaattaaaactcttgctgctttggataatgagtctttggaggggcatttttcgaaagaggaggtttacaaagctatctcagagttggggggagataaggctccagggtcggatggtttgacgttggcattctagaagttttgttggcctattgttggggggaagtgatgcaggtctttgaggaattccatgtgcacaatactgtttttcgtagccataatgcaacttttttagtgcttatcccgaagaaagagggagctagtgatgtgcaggattttagacccatcagcctattagggagtctttataaaattattgccaaagtcctagcaaataggctgaaaagagtgatgggaaaactagtttcgtacagtcagaacgcttttgtggaagggagacagatattagatgcggttttggtagctaatgaggcgatagactcaaggaagcaaagcgtcggtgcaggtttagtgtgcaaattggacattgaaaaggcttatgatcacgtaattggaggttccttctctcagtcttggagaaaatggggtttgggcccaagtggcgtagttggatatttttctgcatatcaactgtgaaaatggcagttttggtgaatgacactcccacagagtttttttcaacttgtagaggcctaaggcagggagccccactctcaccttatctatttgtgctaatcatggaagcttttagtagcttaatctcaaaagctgaggagaaaggtttcattagaggattcagggtaatggggagaaatggagaaggggcttcggtttcccatctcttgttcgccgacgacactcttcttttttgcgaggataataggaaccagttggttttttggaagtgggttgttatttgttttgaagtggtttcaggcctaaaaataaatttgaagaaaagtgaaattatcccagttgggggagtggaggatgtggacagagccgctgcggtttttgggtgtaaagtagggaatttccctactacttatctaggcttacctcttggagcccctcataattcatgtagagtttgggatgtggtaaagaaaagattcaagagaaaattggctacatggaaaaaacaatatctttctaagggaggtcgtcttaccctcatcaagagcaccctctcaaatctccccatctattttttgtcactttttgtaatcccaaggaaagtgagaattagattggagaaaattcaaagggagatgtggaggggagaagaaggttccacttggtaagatggacggctatttgcaaagataagaggtatggaggtttggggttaagacacttgaaggaattcaatcatgctttacttgaaaaatggctttggagattttctttagaaagagagtttttggaggaaagtcattgttggtaaatttggagagggggaagggggttgaaccactagagaggtaagggagtcctatgggatgagcctttggaaagacattagaaagggatgagaggagttcttcctcagaactagtgtttgtattggaaatggtagacgtaccagattttggtgggactattgggttggagattctaagctgaaggagctctttcctttgctcttcagaattgcaacccataattctgctgtagtggctgatctttgggggagacaaggaggtggtggcgggggatgggaggtgcactttagaagaccctttcatgattgggaattggaggaggtgaatcgttttctaattcacatctctgaagtaaaggttcaagaaggggaggattctctaatttggaagattgagaggaaaggaaagttcagtgttaaatcttactatcggtctttaaaggtggagaacaaccccttatttccagcaaaggaggtatggggttcgtgtgcccctttaagaactcgtttttttgcttgggaagctgtttagggtaaaatttctactgttgatatgttaatgaggaggggttggtctatggttaatagatgcaatctttgtaaggagaatgaggaatcggcggatcatattctaattcattgcggtaagacaaaggagctttggactgtggtgctctctttttttggggtggtgtgggtgttcccgaactcagtgagaaatttgcttcttgaatggaaaattaagggcctagaaaagaagaggagtgtagtttggaaaatggcgcctatttgtttgttttggtgtatttggggagagcggaatagaagagtgttccaagaagaagaggagtcagatacgagcttgaagaatctcttccttcggtctcttcttgaatggtctcaacagttcatggacgtggactatctctcttttatgaatgtgttgggtggttgatttgttggtcatctttggcatttctaggtttttgtttttcctttgtttccttgggtgaggctttctttgtatactgccggtgtacttagggagtgccccctgttttggcgtgttctaatatgatttcttctcttggtttataaaaaaaaataggcttatcttgatccactagttgcacctaacaagttaacaattcaatagactcccaaaagaacaagctagataaaaatgcaaaaaatggaggaggatcagttccgtaacgaaggttgccaacatattcacttgttgggttatgaacataggtctccacaagaaagaatctctgaaggaagctcttggccatgtgaggtggacagtgttggtttgcagtggagtaaaaaaattttgacctttctatggaggaggttaggggaaaactgagaggggttattgtggaaaagggcagaggtttttttttttactagattaggtttggggatttgagtttgcaactcttgttagaaagggtagaagattattgcagggatgaggatttggaaagatggaacaaaggttgggtggaggggggcaggagggggggaggaggttcaggttggaacgacactcaaatgaggcagggaagtttttactttgctctgttgtggttgaagaggaaaagaggttctcgttggttttccgtgaaggagggtttcatgggggatggccgattctagtagagaagctgcgttatttaggtgtagcccccttcaattgaggctaggagagtgagccccccctgctaaatcaaggagcacttgtagggaggagacaacccatgggtcttttgctaatgcaataagaaagccttgtggagtggcaggggaagcagtttgggttcaaattggagaaagtgaggtgcgagccagggaggagtctccgcgcaattatttggttggttggtttgatgaggggtgagagcagccatctgacttttcctttttgaaatctttttgtgattgctctttggtctctgaagagggggtgggtgttgaagatttcaggttttggagttaccttgctctggtttgattttgagtcttgctgaggcaaaaagggtgcttgccagaggttctcgaagggttaaggaaagagtgctgcacccggcaaggtggactcccgaggctagttgtctaggcaaggggggtcgtgccaaggagatgtgggtgagggtgttaggtttcctgttacacctttggagttaggtggtgtttaagaagattggggatgaatgtggagggtttgtcgttgtggatgaagacacaactttaatgactaatctacactaggccaggattttggtgcatcctgttgggagttctttacctagcttgttgcaagtggtagtgggcaattctagcttctctttacaattgtggtgggaaactccgtcggatttttcgtttgtggagccgataagaagaaattgtgtgcctagtgagcaaaaggttgtggggaggagtggaggtctcctcacgcaccgacaaagcgagaggatggggatgcatccgttgagtactataggagctatcgagtcgctttgctgcaggtctaaagcggcgggagagggtgctgcaggctttgacgcaaaatctgtcacagtaggcttgacttgttgcaggccgaggttggtaggagaggctatagtggtttctacaacaatttctgtttgggggggttacaattgtaatgggagaaagtggggtagttgggcctgttgcctttgtgaaggatggtggggaggttcttgggccaacaggggttggaagaggcccgcggtggtgtagttggagatgcctctttgtcgttggattcaagaggggtgggttcactatttttgggtctggcccaagcttgtatccttcgcaaaggcgggcctttaagtggagctttaaaaggcagagcaagcttgctagggctcaattcttctgcaaagaaggtgcaagaggggtgtgttcttcttgtgcgagagagcaaaggagggggcagttttggtggttcagtcgggagaagagggcagggtacaacctcagatgaggagcccaaagtcaagttgccccacggtcctaatgtttttttcttgtgtgatgagggcagtgaaccttttcctatggattcgttatcttctcgagttgcaaattactgatgaggcacttgtggcggaggcgaataggcttacaaggtcttttcttctctccttgggtcctcaaagcacgggttgtcagtcgctgaatattttgcaggatggcaacatgctagatcactcaaggaaggtattgaaggaaccctttggtatggagttagttgcctgggccgaggagatggaacttctaagggatgtggaaattgaggtcttggggggggagaatattagcagccttctcaatggttttgttgagttcagtaatcgtttagggatgtgagaaagaaatttgtgctttaataaaaaaaaatggagttaagaaaagggtgggggataagaatgtcaagggctaaaaaaaggttttcttcctgttttaagagggaaatttttaagttagagtgctcaattaattataatagctctccattcgttgctaggggaaaggagagtggggctagggtttgagggaagagggtgcttccggttgtagggttctctcgttggttttgtttttctgtttagttaaggcagcttgttgttagggtggtgggtatttctccttttttccttctttggcttgcttttgggcctaatttgtatactccatgtgtacttttttgcgcctttttgcaagcgctgtaatatatctttgcttacctatcaaaaaataggaggtccaaataggcggttgggaaggcactcaccttgcagcctaaaacctcaacaagatcctctagatttgagacctctccaattaggatttgctcacttttttcctggttgatctttaaccttgataaaccctcaaaccacataaaaacccaactcaggtactttagattctccttcctagaatcataaaaaatgagagtatcatctgcaaataacaaatgggaaatccccaccccactttgtctcttccccttgctggaaagccattaataaaccctccctcctttatccttacaagaatgaaggagagtctccattgccaagatgaacaaataagaggacagaggatctctttgtttcaaacctttagagctttgaaaaaaacctgatggagacccattgaccgagttaaagaaacaaactgtagaaatgcatcatctaatctgattaatccacttggagccaaaaccattttttccaaaattatgagtacaaaactctattttacatggtcataagctttttcaatatcaagcttacaaatgatctctctcaagttttctttaagtttagaatcaatgaccttatttgctataaaaacaacatccaaaatttgtcttcttgccataaaagcattatgaaaatccaagactaagttactcaccactttcttaagttgattggctaagacctttactagtagcttgtgtaagcctcctaccaagctaattaggttaaagtcgtttaggccttctgcccccctttttttagaaccaagactacaacaaaaaacccatcacctcctttttgactttattctaacaaaactgccaaaaggccatgaagaagtcatccgaactaggagttttatcctcgcttaagctagataaagcagcaaggatgtgctccaagagaaggggacctccagagtttctaaagcaatgttatgcaaggaaccaaaggctaacccactaatgcttggccttcactcccccgactcaaacaatctcaagcaaaaagtatttgtcacagctttaatttcaatttcctcagttaacatttcaccatttacccttatcttggctataaatattcttcttcttcaagcattggccacttatgaaaaaaaatagtgttctcatccccctcttttagccaaagttctcttgatttttgtccccaagagatttcctctaatgctgcccattttttaaggtccttcaccaccccccttctaacctccctttcctctattgtgagacaccttttcctttcctttgcatcccaaatacctaattgtgataaggcaacaagcttcttgctagagacattaccaaaaaccgccttattataggctttaagatctttcttctaagctttaagcttaactgtgaaaatatggctaaaggaaccttgtacaccataaccctccctccagctctggataaactctttaaaaccttccacttggccacatgttttcaaaatgaaaaggtgtttttcctttccttatcctaccaccattaagttggatgggggatgatctaagactggttttggaagaatgctttggaacaagccgctaaattaattttcccaatcttcagaaacaagaaaacagctcagcctagaagctaagcctattatttaacccaccagtctaagtaaaagcttccacaaataaaggaagatcttttagctctaaatcttcaatgaccttcgagaaacacctcatagaagccgaacttctttgacaatttctcctttcacttgaaaatctcatgatagcgaagtcccttcccacacaccaaggactgttccaaagacctttgatgtcacccaactcattctagaaactctccctcatctcatttaaaacacgactgtaaacccttttaaacatccaaataaagttgtcctcacaagaaactgaaaaagcatctacttccatctcaataagttctagcactcggttatcccaaaaaaccaaaatgctccatgcttgacccctagcttccactgatcccatttcacagaaggatgcatagcttcattgacacactctggctaattcccaattactttttcccactctcctcccaatactcaagtttgacttgtaattaacagagcattccaacttacagtgttccatctcaaacttggatccaacaagaatactccttaacacttggctcaaaaccttccctttctttctcagctccaacctttgcaaaagtgccctaatatcctcttcaaaaccatctactagaagccccacaaacttattaaaggaggctagcttgctgaaactactctcatgcatgatggaatccctcattggactctctagagcacacctcctggcaagaatagacctttcttcctcctcccctgccctagtctcatattcaaaactcacattgtttgtctaaagatccatcgctgaattgtctttcaaaatcattctaagaggaccacccttcatagcctctttcattgacaaaagctcagtgccattcttcactgaatccctcctacaaatcaaaccctcgttccttggtactaacccaattccgcatcaaagtgtcatgaactgctgacccgattccgcatcaaggcatcatcaactgcagaaaagccaatctcatttctctgcaccagcgataaaatggagcatgtaagctctcttcctagagccaagcccctcttagggcaaaaatctccccaaaaggggagaaggggcctgatggggtcctaatcctttcccactcccccaggcctaggagggcaaggcccacacatccctaatgggccactagcgggtaaagcaaatgggcctttgaccatcaatggcccaatcaccacttaaaaagcttgatagcccttctttgccaaccttcatgccacacccaaggcccaactccaaagaagggctgacaacttccatcatgccctcctttaaggctgcccccctgctgcagaaacagggttgtctccttccaacccagcccctactatctcctatcccacctgctgcagctttttcctagaaaatcctaaagaagccttacttccactagctttcactctgtcaaaactcaacacttcaccacctcctgccctccgttgcaggcctgaagaacccacgctcccagacgcacgtgaagccccccctcaccttcttctttacctctaaccattccttacatggacacatctgagggcccaaaagtggaagctcccaacacaaatggacagcggagcatgactgccctacagccacttcttgtaaactccccaaaacctttctcctatttgttttgattaagacccttgcccactgcagattctttcctcttggggtctcctcatgcacccctaaaaagcccccacaagcgtactccacctgtttgaagaagcctttgtcccaatagaaaagtggtaagacatcctgacccaagcttttttggcctgaacaacttctctaaaacagcctgcctctagactgcatctatcaaacatcagtgatttttccttgaaaacacacacatcttcttgcaaaaccctttctgccttccctgcaagctcaaaaataaaatcaaggatcctcccatcaaagacaggtttaggttcccttgtaatctctaatgatacctagcccactcctttcaaggaaggcaaaaaaggggcgagaaatctccctaacaccccaccaagcaccaattgaggtactgcacttttttttagagagtttacaactccaaactgcagccatgcggattcactcacacccccatcccctcagcctccccgtggcatactcaccacctcatcaaaggtaccaagaactttaggccccaaaggctgaatcctctgagaaggagaagccccagcattaagcacttaagtagctttgaatggaagcaccactccataactccccaatttctgagctaagaccaaacatctccccaacaatctgtttcctttgcagtagataaaaaaaaaaaaaaaaaaaacttttcgcttctgctggaaaaactgagcacaggagatatcttccggcctcattactacgaagctgaaacttgtagctcttaccaattaaatataagtattaggtgctcttcattaatattctgtttgcctaacaaaaaggaataaaggaagaagacacagtttcaagacaataagtgtaggttgctggaatttctgggcagtaagtaatagagaacagaaacagcagcaacggcaagaccaagaaggaaagtctaggcaatcatgcctttaatgctcaaaaatcaagttaaaactttctcgtctttttggtggaacttttgagaaatttttaggctaaagtcccattttggaaataagataaactaatataggaaacaaatatatctaaatgaactcttgtaaagcaaagtttctggaacaggatatatatagtaggccaatgaagcaacaggtgacccacagttttgtgattttcactgcactatttgggcaaagaacatttttaacctcctttgcttgctatttgttgatattattatcatttccatgagccattaactgagcaaaaggccaccttttctggggatttgtttttggagaagtgcataaggcaataggttcagaatctttcaagtttctaaagaaatgcaaatttcgaagagtaaaacctgcttaccaatggctccctctaaattcaaacaataagaccaaatcaaattcagtaagataatgcagtcactaaaacagaaattgtaggggaaaatgagtcttctgtcaattccttgagccttcaggatgagttgaaccttttttcttctgataagcaattcagaatgaatggtacctttttctgcatgagttaaaatttactggttgtttgggccattataatattttggttcatggttccttgagaattttgtttggcctttctcttgtatttcttctttctatctctttgtggatgctctacatgtatgtcctgtgtaatggagatattctggagtctccaaaatcttagcgttttctagtgttgtgtcctttttttggtgtagtcctcagtttatagaccattgctctcctgattttgatagagcaatggtgaagttcttgaggtttctctaaatggttagcaacacttaattgaatagtttttcatcctttatatgtttcttgaagttgttttatctactatttttagtttaacactttccttctaatgatgaatgcttttcaggcttgaggagcttcaagttttggatatcaagtttc

SEQ ID NO: 11257 - DNA, 3536 bp, Vitis vinifera
  Intron number 3 from transcript GSVIVT01033372001 (locus G SVIVG01033372001) derived from phytozome v7.0 (chr-ID chr8 ; pos 21131536 to 21135071 reverse strand)
acaagttcttgcactttcaccaccaaccctaatcagtcagacctcccgcaaagctacttcaatcaatcattattcaatcaggcattacttttgaatccttatttcccatttcaaggatgaaaaagggggtttggccaaggaaaagaagaaagtaaaaaaaaaaaaaaaaaggaagaacaatggactcacccaccgccactgataaagatgtgtacagatagagccagagaggggatatgtgcgagactttcgtgtatggaaaattgtggaaagctggaccggatatccaacacttaaatcaaatggcataaagagaaagcaaacagatgccattacaaattaggccatgacaatgaaacagaataaaaaccaacaaatgagctgcaaaaaaatagactagtaatttggtcaaggatttcgttatgccattgaatggaacctttttccactgtagtgtaacgtgttcatttttaatctaatccctatatattttagatatgatgacgtggattttatttccccatgacttatcccattcttttagttccatatatttatattgttatttaaaaatacagattttgttatacacgtaaataataatagaattttcttttgattaaatacgtcatgatcgtagtcttttttcattcaatggggcatgataaaatagaattctttcttacaaatgaagggatgtaaaatccaatttttcttaaaccaagaattcttctcttgaccgtacaactttgaatagaagcacgtttacccaatctgagaagcctgtatttgcatatatggacttggggaaaagtgccttcatatgcttgtaaatatcaacaatatcatgttgttgccctcaggttgtttctcttgattagggtaattttgatgtattttcggtttcatgttaaaatttaattagtgtttgataaaatctacttattaagggtatgtttgatagcttttgaaaatagttttctattttctagaaaaaaaatagcaaaatatgtttaacaatcaaaagttgtttttgtattgtttttaaacaacatttttcaattgttttatgttgtttttacttgtttttcttttaaatattatttaaaaaaaataattatacaaatatatagaatgattaaaaatagaactttagatataaaaaattatttttaaaacatatttaaaaatattaaaaataggttaaaaaattaaaaaaaaaatcataaaatagttttcaaaaactattcttaaaaatgatttttcaaaattatttttgaaaacagttaccaaatagatcttaagagcgttttaagtgtttttagtttaaaaagcgttttaaaaaatgaattagatgtttgataaaagttagaaaatatttttaaaaatctaaaaaatcatttgtatgattaaaaaaccacttatagttttcgaaaaaaactattgagaggttattcttttaaaaatacttcaaaaaaaaaaacttcaattacaaacacttggaataaaaacattgttaaacttcgagaaaataaaggttaatcttaaatgagaaaaacacctaagaaagttcatttgataaaactcgggttttgatgaaactctaactttaaagaataaaccgagtttttcaaatatgcatgaaatgatatgtaaaacctaagtgtacccatgcattcatcttacatatgtttcctatgattaaagagtcttccaaatgtcttgatcttgcattcattaggtcatttgatgaattttcaaattaacacctgaaattttttataattcaaaccaaatagtaacttaactatgatttgttatcatcaaaatctgattaggagaacccttgggctaacaaactcattttaagaattcattagacagtgaatttaagaagtatttttagcctaaaaagtattttttaaaaattaggaaatatttttaaaattttgaaaaatcgattgtagtgttttctagagaaatacttttaggtgactttcctaaaaatatttaaaaaaaaatactttcaaataaaatacttatactaaaaacacttcaagtaaaaaaattgttaaatcatattctaatatttagtgtgttcattcttatatttgcttcaagaaaaaattagaaaaaaaaatttaatttttattaattttaattatatttgattttataaatcaaatataaaaattaaaatttcctaatattttatttttctttcatgagtagtttaaatgattttaagagcatgttttgtagtgattttaggaaatgtttttaatttttttaatattttaaaatttataccttttaaagtattagaaagactaaagacacttcataaaattactattaaatacactttaaattaaattatatttaagttatcaatttataatttagtattttatttttaactaaaatattataaactgatttagacaatggttgaaaaattctaatttaaaatttattataaactactaaatttatagattttgttttatagatatttagtaacaaagttgccaaaaaaaagggaacaggagtaatcaaataattttaaattattttttcaattaaaatattaaattattttttcaaacatattattaattcacttctatctttgaataagaatggtgtttaagaaaatttcaaattaatgatttagaaattttcacccaaacatatcactatttggattgtacggccaaagctggttgtttggataccatatccaaacatgccatatgaataaataatggaaatatatcatatttattattaaaagtattaaatttctcttatattctaccatttatactttaataagtaattttatcataattaataaacactattacactcaatcgtacgactttaaaaggttgcacaaatacccttattaagacataacatccttgttagtcccgactttaaaaggtttcacaaataccttatatagacacgatatcctcgttatatctcatacaattatgagatcaaaccacctaattctataagtattgtccactctaaacccaaatagactatctcgattttaaaacagtgtctataagattaacaaatgttcattaatacataaattcagtaactttctacctaatctaatgtgagatattacaatattattaaatacatacaaacacaattcatttttattatctaaggaactaaaagtttaaatattttaataaaacattttttgttttgtaaggtgagtagtataaatttataatggattagagataagatttcactaaatcgaaatttcgaggaaagaccggacttacctagacgtttcaaaatcaatttctttcattttgaaatgattccaaagaaggttccctttctaaattttaatgtgcttttagggatgatttttcggggattccaacttcaactttaagttgagtgaaaaacaagccattccaaaatccaaacgagcgatcaatattaatcataaaacatgaatctccccttttagacctaactcagatttgggaacg

SEQ ID NO: 11258 - DNA, 7239 bp, Vitis vinifera
  Intron number 19 from transcript GSVIVT01030240001 (locus GSVIVG01030240001) derived from phytozome v7.0 (chr-ID chr 8; pos 9986066 to 9993304 reverse strand)
gctttcttcggatcccttccaatagtctctcaaaggtctataagctaatctgcttgcatggataaactcttcataacattttgtctagaaataaatttacaaatgttctcatcttagaatatattatataaaataattgtttctcgggcctctatgctctgcatgttacttgcaatttttgtagaatgggaaacaacttagacatcagcatgtgcctagagcaaattggacacaagtaccactaggttggtggaaaaaaaaagtgatgatttatgtgcatttgagcaaaacctgtcgtgaatggaggcttatacatgcatgtaacttccaccttctaaatcatgaatgactgaattaggccagacaggttattgatctttcatttcacttttaaataacagatgaccaagaaagattattgtattttttcccatggaagttaaagttttgagcaaaatacacgagatttagtaatctggtgttttctgtggaaaatgtgatttccatcccttcgtatacaaggaaactgccatcttatggaaaggttgctgtttttccttcaatctcatttacagtaatcctaactaactgcagcataagtgagtttcatatcaagtgcatcaaatgtctgggtgatagaagagttagcagtgattgcacttctattctgttgaattgtcttttctggggattcccttggtgtttatgctaagccttggacatgcatcctccattagttgcatggaaccaacatatctactttcctatgaagaatgacagaaaaaattaaacacacctattaaaaaaatgacagaataaattaaacacattatgatcccaccttgtccttagatgttatgcttgagagggcatattgtccacatgatgtttgatttttatacacatactctctctctctctctctctagcacattgtccacccaaaatttgattttctttgaacaatctccctctctccaacctggcattagtttttatcactgatggagcaccatatctacctaagtttgattcttctagacaaccactctctagcatattgtctaccaaaatttaatttttgcagacaattgaatattatagattatccctctcaatttgattttatagaaatcttcctctaatcccccacccgcaccccacaccccttttctctctgagacaaacacaggcttggtgatatttttatatgaaaactcttcatagtgattttaattttatgatgtttgatgtttccaaagattgatgtggcatttatatgggagaaggtccatcttctacttaacctatgatatgaagaacattgttctaaaacaattggtgtgtcaaaaactcacatgaaccatgtctattgacaattggcatgcccaaaattgtcgatataaccctgtatctatattcatcaccaatacaaccccctgtatctgtatttatcaccagtgtggttacttagaaaaatatcaacttttggtcactcgtcaagcttctgtgttacaaaatctattacatggttgttactttatgttgaatataatgtatttatagtatattatctttccttgttaatataggtcacatgtatggtagttaggactcctagccttgtatatatatatatatatatctctcaattgtaagtgcacattttacatgaatgagaattaaggtttttctcctttctctctctctctcaacatggtatcagagccaaaggagaaaacctaatctttttttcggtttagccgtgtaatcaattccggcaaaccgtccagtgaccgtgtttcactccggtcccctcattctcttcccgaaccactccggacaacctcatcgccatcggatctccaccacgccggcaaccttttccggcgaaattttccggcaacctattttccgggaaacgaccacatattccgaaacgccggaggctgatctacacgccagtggaaaccccatcggaaaccggcatctcacgcgcccctacgcgccgctcttctcctccggactgtcaccctcgcgccggcgagtgacggcgcatggctcactttccggccacttccgacacctctccaggctcgtccggcgccgtcttggccttctagccctccggcagtcctccccgagccctgcatctccattttttccctgtttttggctttcttgccattccggccacctccgacaaggctcccccccatctccgcggcttgggtgctgcttctcttcctctccagggctctcttcaatccaaatacgtgaatatgaccaccaaaaatcagatctttacctctgttatctctggatctcctatgattacctcagagaaattggttggcagtgagaattatctctcctggtctgcctctattgaactttggttcatgggtcaaggttatgaggatcacttggttacccaggaggcagatatccctgaggttgaccgcgtacagtggaggaagatagatgcacagttatgtagtgtattatggcaatcggttgatcccaagattcttcttcatcttcaggcctataaaacttgttttaaattttggactcaggctaaaggattatacacgaatgatatccagcgtctttataaggtggcttctgctattgtccatatcaaccaacaagacttggatctatctacttatattggtcagattgcctctcttaaggaggagttcttgactgtgatgcctcttactcctgatgttggggctcaacaaacacagcttgacaagttcttcatggtccttactcttattggcctccgtccggatcttgagcctattcgtgatcagattcttggtagctcatcatttctatccttggatgatgtgtttgctcgcctcctccgtatctcgtccactcagactttgccatctgatagcgcttcagattcttctgtgttagtttctcaaactacctctcgaggaggacgcagtggtacttgaggtagaggccaacgtcctcattgcacctattgcaataaacttggccatactcgtgatcgttgctatcagttacatggaagacctcctcgcactgcccatatggcccagtcctctgattctccgctgcctcagcctccgaactcctccgcatctcagacatctcaggcttctattgcctctgttgcccagcctggtaatgcctctgcctgccttacccacacatcttctcttggaccctggattctagattctggagcatctgatcacctatctggtaacaaaggatcttttctcctctattactactacctctgctttacttactgttaccttagctaatggttctcaaactgtggctaaaggtattggtttggcccttcctctgccttctctacctctcacttctgtcctttatactcctgaatgtccttttaatcttatttccatcagcaaaatcactcgtactcttaattgctctattaccttttctgataaatttgtgaccttgcaggaccggagtacggggaagacaattggcataggacgtgagtctcaaggcctctatcacctcacctcacctcagattcatctcctgcagtttgcatttccactgatgctcctctcctcattcacaatcgtctgggccaccctagtctctccaagttccagaagatggttcctcgtttttccactttgtcgtcgcttccgtgtgagtcatgtcagcttgggaaacatactcgtgtctcgttcccaaagcgtttgaataatagggcaaagtctccttttgagcttgtccacactgatgtttggggtccttgtcgaactgcgtctactttaggatttcattattttgtcactttcattgatgactattctcgatgtacttggttatttttaatgaaaaatcgagctgagttattctctattttccagaaattttatactgaaatccaaacccagttcaatatttctattcgtgtgttacgcagtgacaatgccagggaatatttttcagcccaatttacttcgtttatgtctcatcatgggattcttcatcagtcttcttatgctcatactcctcaacaaaatggggtagttgaacgcaagaatcgacatcttgttgagacagctcgtactctcctcctccatagtaacgttccttttcgtttttggggggatgctgttcttaccgcttgttatttgattaatcgtatgccctcctctgtcttacacgatcagattcctcactcccttctcttccctgaccaaccactttatttccttcctcctcgtgtctttggttgtacttgctttgttcatattctcactcctggacaggacaagctttccgccaaagccatgaagtgcctcttcttgggatattccagacttcagaagggttatcgttgttattcccttgagactcatcgatactttatctccgctgatgtcaccttctttgaggactcaccattcttttccaccacttctgagtctcttcctgtttctgaagtcttgtccattcccattgtctccccacctgatgctatgccccctcgaccacttcaggtttatcatcgtcgccctcgtgtcgttgctcctctcccttttcctgaggcacctgctgactcacttcctatcccttcggcttcacctgccccggctctgccttctcctaatgacttacccattgctgttcggaaaggtactcgctctactcgtaatcctcatcctatttacaattttttgagttatcatcgattatcttcaccctattctgcttttgtttctgctatatcctctgtttctcttccaaagagcacccatgaagctctttcccatccaggctggcgacaggcaatggtggatgaaatgactgctttgcactctaatggcacttgggatcttgttgttttaccctctggtaaatctacagttggttgtcgttgggtctatgcagttaaggttggtcctgatggtcaggttgatcgccttaaggcccgcttagttgctaaaggctatactcaagtttatggttctgattatggtgacacattctcccctgttgccaagattgcttctgtccgcttgcttctctccatggctgctatgtgttcttggcctctttatcagttggatattaaaaatgtcttccttcatggtgatcttgccgaggaagtttatatggagcaacctcctggttttgttgctcagggggagtctggtttagtatgcaggttacgccgttctctatatggcttgaaacaatctcttcgagcatggtttagccgttttagttctgttgttcaagagtttggcatgttttgcagtacagcagaccattcagttttttatcatcataactccttggggcagtgtatttatctggttgtttatgtggacgacatcgtcattacaggcagtaatcaaggatggtattcagaaactaaagcaacatctttttacccactttcagaccaaagacttggggaaactcaagtatttcttgggaattgagatagtttaatccagttctggtgtggtcctttcccaaatgaagtatgctttagacatcctggaagaaaccggtatgttagactgtaaaccagtagacacacctatggatccgaatgtcaaacttgtaccaggacagggggagcctttaggagaccccgggagatatcgacggctcgtaggtaaattgaactatctcaccattactcgtccagacatttcttttcctgtgagtgttgttagtcaattcctacagtcaccatgtgatagccattgggatgccgtaatccgcattcttcgatatatcaaaagtacaccaggccaaggtgtattgtacgataacagaggtcatactcaagttgttggttacacagatgcagattgggctggctcacccacagatagacgttccacttcagggtactgtgtttttattggaggtaatctaatatcttggaagagtaagaaacaagatgtaatggccagatctagcgctgaagccgagtatcgagctatggctttagcaacatgtgaactcatatgattgagacatcttcttcgggagttgagatttggaaaggatgaacagatgaaactcatctgtgataaccaggccgcattacatattgcatccaatccagtctttcatgaaaggaccaagcatattgaagttgactgtcatttcattagagagaagatcgcatcaggatgtgttgctacaagttttgttaattcaaatgatcaactagcagacatcttcactaaatctctcagaggtcctaggattaaatatatttgtaacaagcttggtgcatatgacgtatatgctccagcttgagggggagtgttgaatataatgtatttatagtatattatctttccttgttaatataggtcacatgtatggtagttaggactcctagccttgtatatatatatatatatctctcaattgtaagtgcacattttacatgaatgagaattaaggtttttctcctttctctctctctctcaacactttataatgtcatttttcatggtttttctatgcatataactgcccaagcaaattgatcaatgtgaatgcctatattaattgaattcacagccacatccatacatccatgctctatgtctagttttttaggaccttgagatctttctgagttctgattcaactcttgggattgatgttgaaaggttgacctgtttccatgtctgcgaattatagcttgaatcatttttcatgtaattgttactggtttaaatctgaaaaacatacatcgtgtcattacttgtattgaatgcaaataaagctgagctttgctgttggctgactaatatgaacactacaccaatttgattggatgaagaaaaaagaatgaaacagtgagagggttctttgattaagttatctttaagtgttatctgttaaagtattttcattgacaatcttccagttacttctgagttcaaatctgagtaattttcttctgatttcctagacacccatcaaataattggttttatttattatgatgttttcctccatttacctgaaatatttagatccttttcttatactgttcttctccttctgacacattaagtgttcttgtcatttaattgttgccaaaaagatgttgaagtatggaatcatttctcctttatgcagtaattattgagttttcacatttttactttgatgttcttactatttatattctattttatcaattataggcac

SEQ ID NO: 11259 - DNA, 1996 bp, Vitis vinifera
  Intron number 13 from transcript GSVIVT01022434001 (locus GSVIVG01022434001) derived from phytozome v7.0 (chr-ID chr 8; pos 2975783 to 2977778)
aaaggctactacaaggtaacttattttcttttaattgcaactagaattgcaaatctctaaaactagaagtgcaaatctctaaatatttacaaggaaatgcttaacttcattgaatttattcaaactgttataactttatgctcatagaaagtttacaattacttggtatttctatattcagttgcaagttctatgagtgcaaagtacaataggcagtcacatgcagtttgcctatattttggtatgctaataatatatctatgtgttcttaattatcaaattttattgacatggtttatcattgggagaatctttttaaagcacatagtgcaggcactgtttatagagtttcaaatttagaatcttatctattatttgatgtcggactctctctaccctaggcaaaatttctttttaggagttgtgtttttttcatgaattagagtccagaaggttgaacaaattaggagggctattatattcagtgcacattaggatgtttcattggctcattgtcttggaaatgagagtcaggagctcatctgcaccagggcttcagtactgttctccatcaaagtgatgaccttcccaagtgtgcctcagagaactatgtatttgcttactattgaaatcatgattatgttacaatttgtagcatgcaatgtattccagggatcctaggtaaatgaagaaatgtttagaaaaatttatgctttctgaaaatagtgcaatatattcgggccttgattcttgaaattaatatctagttcaaaattgctttgtcacatagtatgcaatctacatatttggcacttaccattgttgaagctacatcaatgagatcccaccacactttcaatattagttggaaaagcaaggatttcccagacactgattctttccctttttacctctacaaactttcaagtagctaaagccatctcaaaattatcaaaattgactggacaagttggtgagaacaaactgaatcttcatctaaggctgtcaagtttttcagccaacactatcaaccatagaaataccgatcccattggatgggccaactctggcggtatcagaggcctttatgatttgtagaccatttcaaaaattttgatcaaattttactagtgctttacctagtgctaatgattctaaccattgaattgcatttgggactgtgatatgagatgaatttgtgtcatcttatccttagtttctgactcatcttcaaaaagacattcatttctagctttttgtttctctttgaacacttggatacacatgtatctgtgtacaaaggggtgtcaaacaagcatagccacactggcctggactgagcttgcacctgagaaaggagggcctgcttgagtttttggaccaagcttgggccagcccaaaaacttagggttggttccagtcccagctctgggccccaaagaggcttctggcctatgctgaagacttggacttttccaggattcaggctttataattgatcaaacttacgaaatttagcaaagagttcaacttataattattgaacacatggactcaagccaagcttcaggttgcagcaacacagatttggccctggattcaagaacctggctcaaccctactctccttctggctaaggcttgagcccggcttgactgggttatagtgttacaagccaatccttatgaacaataaacaaatggtattacatttatcactgtaatttattatgatataaaaaaaaaatgttgtttgttaatgcatgcaagacattgcaacatgaaatggcattttcaatttgattagaacatcatttttaacttaaggatccattaaacatatcacatgtaacttatgaagattttgatcttgaattacattatgactgcctgacagttttttgtgtaaaaacctggaagcatgatggcatcaagttttgtagctttctcgacatggtaacttttcatagtaaatcttgtgttaattttgtattaga

SEQ ID NO: 11260 - DNA, 1060 bp, Vitis vinifera
  Intron number 1 from transcript GSVIVT01008978001 (locus G SVIVG01008978001) derived from phytozome v7.0 (chr-ID chr1 8; pos 3994534 to 3995593)
aatttggctggtgagttaactcagtctacgcttaatctttcatgttctatttgcttttgttttgattatcatattactccgtgtgtggatatttgcttgcttagctttgcagatatttgttaattattatctttcacttgtgtgggatttgatttgaccaaatgtttgcgaattgtgagttttgcgatatgctaaccagtttacttttgccatttaatcacactggcatattcacattggacaatggattgagaaaggtccctagacttgagagtcgagactccgtaaacccttggatcacgaagagagaagtgtcaacatttcgtttacttctccctcatggaggtggagtttagggtctaggaacaatattatattaaaaatggaaaagataaagctgttctttttggtctctagtaattttgatatgattacactttgaattcaacagtaaaggaagtattaactttaatttggattggatcccggaatccctgcttacctattattccatatgatatctatgatatccatcaaacagtctcctaaccaggatacacagaactgagacaagaatacattctttgaatggtatccttgtcaggtagctaatagcttcctgaatacctgaagagcaatggggaagagaaaatgacaactggttcattgtttttgatctacaaatcagaagtgatcaaggcatgttatgattgtagagaaacaaatatttcatctagaagaataatttgatagaattttcaatgatttggaataaaatttgctccattcacaattttggtacaagtcttttacatgatcgaactatatgcagtttaattgagttatgcatgcattgtgaaagtggtttatagtttaggatctcttaaaaaactttggaatattgtcaaaatgttgtcattgtttgtgattgaaaaaaaaagaactaaattgattattatgtgctctattcctatgatatgtgaatgcttttgttaaaaccttctcttttattttttccttttcaggttacattacacttggattgatataggaacaccga

SEQ ID NO: 11261 - DNA, 411 bp, Vitis vinifera
  Intron number 7 from transcript GSVIVT01035977001 (locus G SVIVG01035977001) derived from phytozome v7.0 (chr-ID chr4 ; pos 6714176 to 6714586 reverse strand)
gtgattctcgttgtgtaatttctaggaagggtcaggtaagtgacaggaaatttttgagagacttctttaaacatgttttacttgcccaactgtgagaaggcaactttttttttttttttttttcttttggttcttgaaaagacagttgacacaaaaccaaatgacttctgcaccataggcagttaaagatgtaaccaaacttttgattagtgatgaatggacaggctctggcattcagaattttttagcataaaaaacatagaatttatttttattttttattatcattttcatttttatgatagattctctataaaatatgcattttgtagttaatttgattttttttttttgtgtgtgtgtgtgtgtaatgcaggcttacaatctatctagagaccacaaacctgatct

SEQ ID NO: 11262 - DNA, 1740 bp, Vitis vinifera
  Intron number 5 from transcript GSVIVT01014905001 (locus G SVIVG01014905001) derived from phytozome v7.0 (chr-ID chr1 9; pos 11543714 to 11545453 reverse strand)
gaggtatgcataaaaatatttcaagaaatatgcagcttatttttctgaaactattcatacacgagtctgcttggtacaaaagatcaaagagttatttggggctttgttttctttttgcagcagtgtttcgacagatttccctggagtttagatgcctaataagtctctttgtccttgcacaccatattccattttaggaaattttgctttcctgaaatgttaacaccatgaaattttagggaaagagactataatctacatcgttacataagcctaacagaatgtaacaggttgaacaattgatatgaatttttatagaccaaccagcagattcacctatgttgcagcaatgtggttgaaaaaacacataagcaattacatatataaataattgagatgattaagaaaaaatttattatcatccacctgtacacttgatcaactattacataacatcttatttatagaaactaacacctaaaaaaaatagatactcacgatagtaaaatataaaatcttgcagtaacaaaatatacaaactaaatcaagaattttgtataaaatattttaattaacttttaaaacctaactcaaaatctaatttttagaaactttataaatctagtttaactaacatcctcccatcaacttgatttgtaaaaatagcatccttagctttctaaaatctttaaacttgagagacttggttaatgttttcacaatttgatcatgagattttgtaaattttaattgcacttcatatttcataatgtactctataataaatgatattttgtatcaatatactgtcttccatctgttgatcttagattgaaacacttatgcagaatatatatttttggattgctggaacacacattttattgatgaagagtgttgaatttatacatgagcttgtaactgaaatgacattagaataatagaaaatcaagctactagatgatgaacaattacttccaataaaatagaaaccaaatcttgaccaaataaaaacaataaaatatttggatgttgcatattttttgtaagactccagctacaaaatttaacttcaaaattcaaattccagcagatactaaggcaaaattcaaaattcaacaccatcatggagaactagatttttctcataaggtaattgttgattttatatccatatagatctttatcagtctcttgtgtggtaatttaagtttcttgaacaaatttcatgacctacaaatgatgccaacacaaatttcgcttcataggttgaaagtttcacaatgctcaagtgtgtgtttggctaacaaggttgaagggaatttatgttcgaagagaatttatgttaaaaatggattacttttcaaggtcaagcataagagatattagatttacaactctgagatcacttcatccccttttagtcaattacttcttttgtataacacttagaaagtagtatgtttctctaattgatgtttagtatcctcaatcttatgtttgtaggatattgtgtcaagatgatgagataccactacaacacatgtgtagatgaaaccattagttattgtcttcatagtttctacctttgaagccttatacaagtttcaaaaaattaatggagaagtagaaggcatggatgaaaataagaattaatgtatgtgtgtttcatgtgatgttttatttactagaattactaacatgcgcgcaggtttttacccacaaagacggaacaggagg

SEQ ID NO: 11263 - DNA, 7816 bp, Vitis vinifera
  Intron number 9 from transcript GSVIVT01025756001 (locus G SVIVG01025756001) derived from phytozome v7.0 (chr-ID chr8 ; pos 12172683 to 12180498 reverse strand)
ggcaggctctttcaaatattctagcatcactccaagtaagcaaccttcttatcttaatttgcacatgaaagtctgaacctttcaaattccagtatattctttgtggatttatttttcttgggcagattgaggttgaactgttcttcattttttttttctttttacataatgcatactcacagtattttagagactgttcgactcccctctataatgagttaggtttttctgattaagatgccatttctctttattcatatatgcatcatttgtgaaaatgattgctcctgggtgaattattttttaactaaggttttaaggatattgtgaaatgattgacactagaagccaaatatatatgtatgaaactagaaattgacccagaattctcttcctaacacatacctcaaattgattatgtgatgccagtgtgagtttgctatggagtgattagacaaaatccctcaagtggaggtttcttgttgtgtccatttatgttctgtgcaacacatttttgttgatgtgttctctaaattagggtacatggccatcataaatgcacccattctctctgctaataccaaaatttaattagatttttttttgaaatgttttaacaatgatcttatctatatatttcctgaggatgacacaagtacagttgatcaaccaaactgcagaagatacaaataatgattgcaaagataaaaagcagggggaggtggccctagattaacacacaacatttgtaatgaggagattctcaattatcataatgtgcaaaatcaaaagaatttatcaaatataggatgtgacatgtgacaatgtcagaagctaatgaatctcacatttaaaacatgaattaggtgaaaatttaataaactggttaaaaagttggtttgaggacaaaagtgacaaatgattgatgataacaatattaagctagtcttactgattctactaggctgtgatctacctgaggaataatgttgacttaaacaagtaataaccattaggttcaagaaccctgatggttatcttactctaattggtagtaagaaactagactaaagaaaaatgcaagacccattattaagttttatatattactagtaacagatgggattagtaaatgatatcataatattcttcttcgaaaatatatgaggaagtgatgcattggcaatctgaaccctaatattgcattaacagatacactagaaaatgattatacataattgattcgattagaagttttttaattgatgattcaacatttacttctgataggcctcctatatgttatgtgtatactagaaaagggaagaggaatgtactgccatctagcagttagttgtaacggccttagtataggctaggtcacaatttggatatgggttgggatggtttaaataggaaaaaagagggaattacaggggctagatatcatgtggatttggtaggagagtgataacctctcgaatagctatctaagtatcagttgggtcccttgtttcttgaaattcttgaaatacaataataattcttcattagatacctatcaatttggtatcagagcatcgatctagatggcttagaaaaagaatgaaggtcgggtggattttctagagaaggaagttggagaaatcagagaggagatgcagcgcttactaggaatggaaaagacggtgatggaccttgcctagaatgtaatgcgagttctgcaatcgttggaagagacacaaaagacggtggcggcgttgtcatcggggcgggtcacgacgactgctgctcaacgagaaaaccatgcaaaatggatccctggagttggggaaactagtggggggtggatggcatcagatgagacgaggcgaggcggaaacggggaatggtgtggcggtcgacgggtggagatgcctgtatttacgggagaaaacctggatagctggatcttccgggccgatcgatacttcgcgacgtatggactcatggaataggagaaattagtcgctgctgcgatgagtttagatggggacgcactctcttggtaccagtgcactgattcgagggaggcgtttgggagttgggaaaatttgaagaggcggctattgctttgctttcgtcagactcaagaagggagcctttgtgagcagtttctggcagtgtgacaacaagggacagtggcagcataccagcgggaattcgagattctagcgactcccttgaaaaggatttcagaggaggtaatggaaagtacgtttatgaatgggctgcttcctgagatccgggctgagttacgtcttctgcaaccatatgggctgggccacttgatggaaatggcccaacaagtcgaagataggaatttaaccctaagggcggcccgtgaaccaaaggacccaaagagcaccaaaatgttgtcatctgcaaatcgaggtgattggaagattggggaaaattttcagactagggcagtggttgttagtgagaagacgatgaactagcgacgtgagattccgataaagagactgatggaatcagagcttcaagcccgtagagagaaggggctctgttttaagtgtgatgaaaagttctcacttggtcatcactgtaagaaagaattaagggttttattggtgcacgaagatgaagaggaggaggataatcagtttgacgacagagcaaccaaagaaccttcactcatcgagctgaaagacgttgtggaattatctctaaattccgtggtcggtttaactatgccggggactatgaagattaaagggacgatcgggtcaaaagaggtaatcatccttgtagacagtggggctacccacaattttttattccttgatttggttcaacaattagcacttccattaactacaacaactagttacggggtgatgatgggaactgggatatccgtgaaagggaagggcatttgtaggggagtttgtatttcgatgtaggggctcactgtagtgactttcttccacttgaattatgcaacactgatgtaattctaggaatgccttggttggggactttaggagacgtgaaagtaaactgaaagatgctaacaatgaagaccaaaatagggaaggcagtgatagtgttaaagggagacccgagccttagtcagaccgaggtgtctcttaaggcaatggctagagcattgcagcaccatagccaaggggtatgggtggaactctgttagacttccaccacttcggatttgagtgaaggagtacaagaggtcccgaaaacagtcaaagaagtgttagctcaacatcaacgagtttttgggccaataacagggttaccaccaagtcgtgatattgaccatgccattcaattaatcctggaagcatcttcggttaacgtccgtccctatcggtatccacatattctaaagaatgaaatagaaagattggtgctagagatgcttgaggcaagaattgttcggactagtttaagcccattttctagtccagtgttgttggttaaaaaaaaaagatggagaatggaggttttgtatagattactatgctcttaacaaagttacagtcccggatcggttccccattccggtgatcgatgagttactcgatgaacttcatggcgcgaccattttttccaaactagacctcaaatcgggctaccaccaaattcaagtccgacaacaagatatccacaaaacgacattttgcacccatgaaggtcactacgagttcttggtgatgccttttgggctaaccaatgcaccaacgactttctaatcgttaatgaaccgtatattttggccacaccttcggaaatttgtgctcgtattttttaatgacatattggtgtacagcaaggacttgaaggagcattgtgattatttgcaaagtgtgttgtccattctggcgaaccaccaactgcacgtcaatggaaagaaatgtctctttgctaaaccacagctggaatacttgggccatttggtttccgccaagggggttgctgctgatcccaacaagatttcggccatggtagagtggcccacacccaaatcccttaaagaattacgaggatttctcggattgactggatactattgttgatttgtcaagggatatggagctatttcttggcccttcactcagcaactcaaaaaaaaaaatgcttctagttggaacccagaggccaaggcaaccttctaaaaattgaaaacaactatgacaacgattcctgtattggctttgcccaacttcagtcaactcttcattgtaaagacggatgcctcggggtatggtttgggtgccgttttgatgcaaagtcatagaccagtagcttattttagccaaatcctctcagcaagggagtgacaaaagtccatatatgaaagagagttaatggctattgtcttagcagttcagaagtggcatcactacctgcttggtcgccactttattgtgtgaacagatcaaagtagtttgaagtttctactagagcaaagggtggtgaatgagtcataccaaaagtgggttgcaaagctgttggggtatgactttgaaattcagttttggcctggattggagaataaagcagctgatgccttatctcacatccccatttctatggagttagctgccctcatagttcctagtcgcttagacacttcgttgattagttcacaagttgaagctgacccacaccttgctaagattcggcagaggctgctggttgatccagatgcttatccttggtattctttggaccatggcattctcctctacaaggggcacctagttcttcccaaggcctcaccccttgttccagcacttcttcaagagggccatgctagcgtggttggagggcattccgggttcttgcagacttacaaacgactcatacgagatttttttttgggttggcatgaagaatgacatcaaagagtttgtatgccaacaaaataaggccctaactttgtcgcctgctgggttactacaaccactgcctattccagaaaaaatatgggatgatgtgacgatagactttattgaggggcttcctaagtctgagggttataactccattttagttgttgtggattgattgagcaaatatgcttacttctctctgccatagtactgcatctcatcctcaaatggatggacaaacggaagtggtcaaccgttgtgtggagacatagcttcgatgtttttcatataacaagcctagacattggtttacatggcttccatgggcagaatactggtataataccacattccactccactaatatgacaccgtttcaagcagtttacaggtgagacccaccaccgttgctacgttatggatcagattccacctctgttctggcagtggatcagttattgcaagagtgtgatctaattttaaatgaactgaaggaccatctctgttgtgcccaatctaaaatgaagtcatctgcagatgcccattgtcgtgtagttcaatttgaagttggggattttgtctatataaaactccgtctgtattgtcttcgttcccttgccaaacgacccaatgagaagctcttcccacgatattttggcccttacaaagtggtgcagcaaattggtctggtggcatacaagttagagcttcctttttcggcaactattcatccagtgtttcatgtttcacagctcaagcgggctcttggttcagctgatttatgtcagccactttcccctattcttgctgaagatatggaatggcttgtggagcctgatcaggtcttagatattcacctgtctcccaataacaatcagactgatattgaagtacttattcaatggaaaggacttcctcagtttgaagcttcatgggaatcaaccgacacaattaaagaacactttcctgacttccaccttgaggacaaggtgtctctcattgaggggggtaatgataggcctcatacacgttatgtgtatactagaaaagggaagaggaatgtactgccacctggcagttagttgtaacagccttagtataggctaggtcacaatctggatacgggctgggatggttaaaataggaaaaaggagggaattacaggggctggatatcatgtagatctggtaggagagtgatagcctctcgaatagctatccgagtatcagttgggtctcttgtttcttgaaattcttgaaattcaataataattctccattagatacctatcaacttcacttgaagagaaaaccaaatgcatgcatgtgcacttgtgaatctttattaaaacaattaatatgagtgcgcgataggattgtttgttaaatagagtttcaaagcagcttcaaaacaatatcagtagcttggggtgttgaggaaacgttgttcaatgatcacacatttcccaaattatctctttagcttgaccagatctcccacaatgatgacacttaaaaactgatccttgccattagtttttacattgctgtggttaggttttcttcctcttccccttttaggcccctctagggcaaaggtaacagtgaatagagagttcaccattgcatagagctgtcccttttttgggtttacactatcaaatagagctgtctttattattattattaaaaactgatccttgccattagtttttacattgctgtggttaggttttcttcctcttccccttttaggcctctctatgccaaaagaaacggtgaatagagagttcaccatcacatacagctgtcccttttttgggtttacactatcaaataaagctatctttattattattattattatttttttttttattcttttaattttaatttttatcttgtgggtttatattgaattcattgttgctgctgctactaacatatttgtcaaacaagaaaaaaaagagtacttaccatcaaaggctgatatctcaaaaatccttgtttgcttgtctaagccaccttacttggacaagtcaaccccaatctttttctcctgtaccactactaaagaaaattatatgatatataatgcttatagattgaaataagggtctaatacagttagcataaacactaaggtaaaacataaaataaaatgggaaactaaaaggaaaatatatttggggtccattggatggtagccaagggtcattccattaacgagttcaggcctcagaaatattgttgttttgaaactgagaagaaaattagcattgctagaagaatgaattactttagtaacagccccaagtgggatcaaatatattgcaagatacgtggtaatgagatattgaatgtccttaatttttgtactataattccaatcatggataccaatctaatattattataactttcatgaaacatttcactgacccaactcaaactagattgtaataataacacattgcttagtagactgtttagagtgcattcttcaacataagctgccttcatcttgtaccaaaaaaggtgtaatctccatgcatattatgttgatatgaacatcaaagtttcaccttgggggtgcagttggatttagaaaattttaaaaatcattactcatgaacatagagatgcatataattgagatggtgcatataactgaattttcagtggtttaagataatgatgcatctttaaatcacatctactgagtatatgcagaactttcttgagcttgctttaatgatgtgcttatcattcacttagaaattcaaaaaatcagaattgcatactcagttaaggatcaaaattggctcaacaacattactaatcatgatgggtgtttgctttattccatattttatacactatctcttttctatacag

SEQ ID NO: 11264 - DNA, 12586 bp, Vitis vinifera
  Intron number 3 from transcript GSVIVT01033088001 (locus G SVIVG01033088001) derived from phytozome v7.0 (chr-ID chr1 4; pos 25628711 to 25641296)
gaagagaagcatactgatgatcttgttgcatccaatgtgttagcataatagtactggttctatgtatatgtagtgcatttgcagctgaggcaatgtagttttcttggttggttcttttactaggtacgagttgctactctggtagactgtactaggtatttatatttctctttatctgtttaaaatttggttttgaaggtttttagacttcagaagctatttcgccttattttttgtttcatcgatagcaacttataatttcttagattcatgtggatcttaaacgcattgttctgcatcattcctctatgattgatgtccctctagtaccctaccttcgaagatgcacacatttaaagttgtggggggtgtgagaagaatttaaaataggtctgtttggtaaatcaagtagaaaaagaacttccccttgatttcttccagggtactagagccaacttaagagcatggaagagttcttccagggtaggctgtttcaaggctaaaaggctgatagaaaggatgtgaactgcgaaggtggaaaagcacttgtcggatgagataggagcccttgtgcaggaccacacatgttggtgcgatacttataggccacacatattgttgctgcagcaatgatacaaccaaaatttcatggtagagattaagcagtgtcagctattatctgctttgcaaattggatgggaccgacaagtggctacagtgctagcggccataatggactctgaaatatgtatctttttttgttgtattagatgaatcctggatggagctaccggccaggcccatggataggacatagttgcagcccaaaaatagatagctcccaagctcgacatctaagcctaggcaagcactcgggctggatccaggtccttcagggctcgggctaggctggagattcaatcctcagcttagtcccaagaatttagcacaatctgattattttgtttcataaaacatgcggcaatgcattacatgcatcgtaactttcgaacgtacaaaatttgaaggagctatgttttacttttagggatcttgtctcgagctagcttttggatcgggaatgggctttggcacgaaattgtccgggcaagatgggctgggtcaggctgggattctgtctgaatttctcaggttacaaccctaataaacctgtgggcctggccagactcaaatctggacactaccagtagcctgttttgtaacaatttgaaggattagttttagttttagttttaaaccttttagtcgagtgaatatgaatattttcagctgttctttctgacgcgtagtgtcggttaaggacgctctgtgcaacactgaatctacatttactaatccgacaatttcaatttcaaatcatgccaagttgaaaacataaggatggtctctaattcaatgagacctcatttaaaactcacgtttccaggaaagcaaagctttatttcctttattttgttgcaaggatttgaaagacatggtatggttacagttgagctttgctgatccagtttggtgccttaatttgcagaatgaatcctctattatttaacttttttgttatggttcaattaaattcagaagctcatggtaatataacagaatttgggttcacaattaacacattactgtcatacaatgatgaaattgttatataaaaatctttaaagttacaagtaataaaatgaaaatcaagatcgtaccttcaatcatggcaatcagattcacacaaaatatggattaattggttagtccttaaaagaccttatgttcatgcatcgatgatactcacaaatttattcttataaaccagagatcattttttttcgatagatattctcttttttttcttctttccataagacataggatagttttcaacttatgtctttataaacatgagtggttactccataagagatgtaatcctacgtttcatttattttaggaaaaataatatttaaattgatacaatttaaaaaaaaaattattttattttattttattaaaatacaaaatggtttggaacaaaaatatgtacagaaggattggactgaatcaaatgtttgtttaggtagattgacaagaaattgtctattttgatttttaaaaattacataattctctatcccattagctaggttaaaattcctacgaaattagaagccaattattctatgataagaaaaggataggcacgtatccttttaattccccttcacgacgtcttgcttttacactacatgacattcttattagactatggttattggctaccaaaaggctcgtgccctttttctgtagcatcacccacaactctaggaagaacaggccatgtgtcattcctttattcacgtacataagtgtcaccgtgcggctaataatgatattcccattaatttgtggtgccttaacgaagaaagcccaccaccatgattaacaggggcgccatgatgaaagcgactgctgcgggttaacgtttagtgcaatgtgggattggagatgaagatttctagaatgagcccaatgtgctcaaagagctgtttgagttggacacattgtcttgtctctacaagagctattgtgacgccagaatcctttgcacagcattgcaagagcttgtcgtagctaacaaggcgtatcttttctgatgaacctcttcgctcgtctgataagatatccatgacaaaaaaattctgacattatataggtttgaatttctgataagtttaaagtcgcgagcatcccattggcttgggctctgaacggataatatctgaataatgtttgctgtacttttccatcaaaggtttcacatgtagaattgatccacttttaggccacaaaactagcactcgcctgcaaattacgtaggaggaagttgttgtcagctgaggcatttcagatcgcaacccagcatctgaaactcaaaagggcctctcccacgctcaacacccaagctacaaagaccttctaactttgatgttcactgaagaaccgagcaaaaaaaaaaaggcaatgcattcccttggatgagatctatatgatcatggtttagtccctttagaacaaagtccatgtgttggtgggccattttgttgggtctgggagggaactcacccaccataaccaaattactttcccacctttccttcacattttctaggtgaaaaaagagggaaaagagccctacaatttgattctctgccattttagagaaataaaaaattcaaatttctaaaatgaaatgcacactcaaattctaataaagaaagaaaaagagggaatcagctagattagtcttccaaactttacctggcccattgaggacagacatcaaactattgaaacataaatgcacaacaacatttgtggaatgccaaaaggagaatctttgtatagaaaagcatttttcatctcaacaatcagtgagaatttggattgtttaggacttaaccaacacttggaccatgacattatcccttcttgttagttgttcttcttcccagtagaatatattccaatctctcgtggcaccaaaaccaagctgagaacaattggtttagtgatggatgagacattttttaatcatcatggacaattataaatccttcttgtattaaaaaaatcccatgtcgttttgtcgtcttggcattttagctcaggcgatggcaagatgacaagtcgcaacgtttgaaatgatcatcagaatgagtgatatgaccaaaagacatgccctgcgtttgaccacttccttctctgatttatatataggaaaatagtaataaattttttgaaagaaattgaaatacccagaagttgcaacttgtaaaacaaatctttttaaagaatggattcaataaatgtcacaaaatccaactttgtaaaagaagtagaaagatgcagaatggccccatagcaggggtgaaagaacagagcagaaagtcccattaaggacatgtaatggcaccaatggccatcctgatattatacagagaggatgctgcaacaattgcggtgggtgacatggctgttgcagatggtgaagacatctgcaggtactagggcaattaatggtacaggctaattcaatctcacacccagtcattcttagaaatttaataggaaaaaattacaattatagaaaaagttgaatttatacaaattatttaggaaatcactatcattgtcttttataataaaaatcatccaaaaataaataaaaaattgtgctatctttctatatccacgtagatattatttatccaattttgtttaataattaattttatattttgattttagcggaaaataagggagattacattttattattttgacaaagtagaaggagagagattcttaggaagccatttgagagggtgacgtcatctaatcacaattataatttgaaactgtagtttacaagagggtggtccactctaattagggattattatctctttctattattatatatctaaatattttatattaacacccccaaagactaaaagatttggagatttctcttattctcatctctacagttttgagagagagagaaagagggagagatgaagaatcgccgagttcttttcgagaggccgtggctactcaccgtagtgattggcggtatgatcggcgcggctattctcatcaacagcttcggccgaacgtccagcaactctctcttgtgttccttctccggcgcttatacgagacccgaccactccgatgactcagtggcgcagacgcagctcatcgccattctccattacgcaacatctagagtggttccgcagcaatctctggcggagatcagagtctcgttcgacgtcctccaatctctcgctccctgcaacttcttggtctacgggctcggccacgattctgttatgtggtcctccttcaacccaaaaggcaccaccatcttcctcgaagaagatcccaagtgggttcagactgtactaaaacaagcccctaacttgctagcccacaccgtccgctatcgtacgcacctctccgaggcggatcagcttctccgctcctacaaatcggaacccgcttgcttgccccctgacgtccgcctccgcgacaacactgcgtgtaggttagcgctgaccggtttgccggaggaggtgtacgatacggagtgggatttgataatgatagatgcgccgaggggatattttcccgaggcgcctgggcggatgggagcgatcttcacggcggcggttatggcgagggcgagaaaacgccagggcgtaactcacgtatttcttcacgacgttaacaggaggatcgagaaggtgtatgctgaagagtttctgtgtaaaaagaatttggtgaaggctgaagggaggctttggcactttgcgattccgtcggcggccaatgatacgatgaactccgccttttgctaaagatgtttctgactaaatctagtactttttatttttctttttcttttttaatttaaaaattcttagatagttttttttttttttttaatttcaaaagtttttttttaattttacattggagatgttagttgatataaagaataaagttttgtgaatttctaatttttattttatataaaaggagtgaaatgaatggcttatagatgcaattctgggcaattcccttattttggaaaggaatgggtagtaggaagagtccccgtatgaatttgtctacaaacttctgaaaaggagtgaggtgtaggtgaatatcccaaacccctacaaccaattaaagtatgagtttggggtgcatgctttgctattcaacagacggccctaccattcaatgataaaaaaatttatttcttatgtaacaagatatgtacaaaaatccaaatacataccaagcttgaagtattcggtacggattcttacaagcttctatttaaaattatgccaaatttgaaaaaattaccgaaggatttttaataaaaattttaaatatcacgttggaatttatgcctaaaatcaagcttctcacattttccttttattttttgtttttttttttaattttaataagtgaagcattttctacctcacccgttatttgattaaaatggttattgaaaattcaaaatttaaaatttaacccttcatgatattttgacatcatttggacaaaaatacttttattattttcttataaaaataatcaactcttttaaatcttacatataaatactaaatatagaagagttaggtggtgtttgtttttttggctttttgctgaaaaccatttagttttagaatttaagttgtttgtttttttactttttcatgacttattataaactttttactaaatagaaaaagccaaaatatgtggctttttctaaatagaaaaaataacacaatggttttttttactttttaatacttaatagaaataaaatactacaaaaacaaacaacctaatatttaatactattaagtattaaggttctatttagaattaagtaaaaaaacaaacaccaccttagtgtatacccctttttttttacaaaccaaaggttcttagtttttttattattgttttgctggctttccttaagaagccggggagcattttcagtgagggtgggggggacctcccatagagctccatgcaaggacgtgtggtgatccttcagcagccggcccatgacggtggttgaggatggagattgatgaggggtgcacaggaaagcaggtagaaggctgacaggagaaagatattttttcggagggggagtttctggtggggggcaggagatattgagagttggagaagaacaggaaaatggaggaaaaggaaaaaaacgagtaaggaagttgttgatggcaaaattctgacgtagcaattgcagctaccagaaacggagtttggatcaacgcatgaataaatccttccttcctcctgcaaaaaagatgtccggacgggttgtccgggcatctcctccgatgcctcagttagtatttaggaagttgtttgaaagcaattgcgggagtgttcctccacgatgtttctattgcttacctcctgagaattaccttcaagcttatatataaggcagagaaggtgtatttgctgggctagcaggtcccatcgtcatgattacggctcataaggtggcgaagtaatcatgacgtttttggtgcgagatggcagttgtcaggaggatatttaggcggttccaccgcctcaataaatatcggggatgtgtcaagagacctgagaagacttgggaatgttttgtcgaatgtatcttgcattgaatatgcgtgacagttcagaagacttggtcgtcagtgttgtcagagttatcttttttattgtgggccgaaatggatccgacgaatcgcgagtgtctgacgagccaagctgtccggttaagcgttactggaggatccgtacatgtctgtccggggaagttgaatcgtcatcctctcccattcggcgacaggcgccggatgtgagatatccgaatagggtagaacgttggccggatagaatggcggaggtgaaacatccgggtggaatgagcgatgacttccgtccgggtggaacgagttatgtcacgcgtcgcaagacggacgtctgcgtgtccaagagagaggaagccacgtggcagtttttagggaggatcccacagaagtaagcgaggagcctgaggggattggaccagaggggagagcttttacagagagaacgagggacagaggagagtttgctggaagccaagccacttttgctcgaagggaatcactcaggcaacaaccagtacctccagtctgaaatcacttttgctttctgatcgaaggggaaggcttacgtcacagcgccttccattacgcttaaaggtttcttgtgctgcaaaaccagagacggtggagaaggtgtgccattgtcaagaaacaacttgcattaccagaggactctgcaattattggtgaataaaaaatttgcagcgcttggaactgattctcttgatacggtatttgacaattatccataagtacactaaggtggtgtttgttttttggctgaatagaaaaaaccaaatattttggctttttctattcagctaaaagtaacttattgacatcaaccaacatcattgaactaaacttattgataataagctcactttatctatgttggatagttttaacaagttacttttagctgaataacaaaaaccaaaatatttaattttttctattaagccaaaaaaaaaacaccacctaactgttttccttgagctattttctatgaaacatccatccttatgtaatcatgatggttctttctctggctggttgaatgaaatgtattacccactattttttattttttattttttgccatgtctattgtcaaattcatactgtcaattgcttcctcttgatttttttaagcaacaatgtgaggtagtcaagaagaaataggaagactggattttctaattcactttgttgctcctccaaaatagcatatcttaaccattaaaacagtttggctttcttctctctagaaattgctggcatgcacgtgctattccaaattttcagtttagtggatcttcaaggaagcaatggtctttattgacttacaaaaggtatattataggttatttaagcacattggtgtggatgtgctccagaaacgtggagtactagttgagttatatcttgaggcttttagtggaagctagctacctaatggctaaagcttttggattaaaatggtagtttaattttggtattaaagccttcatgtgtgataggaagctacgtgtaaaaaaatgttaggatattagcctaattgttggttggcttaatatatactttgtttattgattataggcttttaggtcaaaatggtagttttaacattaaaatttaatttccaatcacgatacattttcacattttcactgtatagttgtttatgcttcctgtcaatcaatatatagttaattgtgcttatattagaagtgatttcaaggcttagggagatgcttgtgcctcagtattaaaaggtttcagaaatgcattatattgtcctttaaaaaaaaaacaaaaaaactttgtggtgcctttatttttttttatttgtttattccttaaatgacatgctatacacgttgccaggccatttcttctttttattattttcttagttctctccaacttttaatgccaaagacttcattttcaaaactttaattgtaaactccaattttaatttgatttttcaaagctacaattttaatttaatttttcaaaaactcccatttttaaaaattcaatttttaaaacattgacttcccaaattttaattattttcaaattttatttttaaaaatctcaatcattaaaattcaatttttcaaaaatctgacttttgaatttaattttcaatctcaaaaatttcactattcacgttcattcatttaaacattatttttgttattattattattattattttatatttatttatttatttattttaaaaattcaaatcattaaagttcaattcttgaaaaatctgactttcgaatttaattttcaatctaaaaaattccactattcacgttcattcgtttaaatattattttcattattattattattattattctattcatttattttacaaattccaataattaaagttcaatttttcaaaattccgtttttcaaatttaatttaattatcccaatgtaaaagagttgaataatttaattatcaaaagcatagacgtcggtttggggtgcatgctttgctattcaacagacggccctaccattcaatgataaaaaaaaaattatttcttatgtaacaagatatatacaaaaatccaaatacataccaagcttgaagtattcagtacggattcttgatgttacaacttacaagcttctgtttaaaattatgccatatttgaaaaaattatcaaaggattattaatataaaatttgaaaaaattatcaaaggattatcaataagaattttaaatatcacgttggtatttattcctaaaatcaagcttctcacattttccttttatctttttttttctattttaataagtaaagcatttactacttcatccgttatttgattaaaatggctattgaaaatttaaaatttaaaatttaaccttttattgacaaaaatacttttattatttttttataaaaataatcatttcttttatattttacatataaatacttaaaatagtaaaatatatttattttaataaaaaattggttatttttcaagtaaaaacattagaagagttaggttcacaaatcgaggtatcatttaatcatttttatcaaattaattcttttaattactattttttttggttttttatttcttttttatgaatattatccaatgaatttaagaagttaacaattttttaataaataaattaaaattaatccaaaataaggaaattaaaatgaagatttaaaaataaattatttaatagaaatatattgaaagactttacaaacttgtaaaaggtgttagaaagattttaaaaagatattttttatggaaaatttgttgaaataagaagggctcgccagaaaatgtagatagttgaatttgaacaaacttaatataaaaaaataagaagataaaaaataaaaaaaataaaaaaagggtcaaatttgagcaacttgataatgggctgccgccatacatgacttaagtatggttaataatgggctatccgccaatgaaatgttagccacttagtaatgggctacccaccactcattgtctacgttgactcaaggtgcgttggtagtgaccccctaccaatataagtaaattcaaagcctcttcacagtgggctgaccacaatacattgacttacacggctatgccacgccctctaatgggctggatcaatcccaacttaaaaataggaaaaaaggctgaccataatgcattgacttaagccataccctctgatgggctgaatcgatctcaaattgaaaatagggaaaaaggctcaccacattacattgacattgattcaaggtacacgtgcaatggctgtctaccaatgcaagtaaatccgagctccttcatagtgggttgaccacgatacattggctcaagccacacctactaatgggctataaaaaacaaacaaataaataaatgggctgcacacaatacattggctcaagtcacacctactgggtaacaaaaaataaatcaagcccacattggcttcaaccagacctattaatggatagtaaatatatgtggagagtgggatttgaacccacgccctttcggacaagaaccttaatctggcgccttagaccaactcggccatctccacatttgacatgataatttgtttgcgagtaaaaaccgttctattgaaaataaaaaaaaaatgaaaaaagagtgggctgaccacaatacacccgctaatggaaacaaaaggccggaatgggctggatcaatccgaacttgagcccacgcccttttggaccagaaccttaatctggctccttggaccaactcggccatctccacgatcaacatcatactctgttcgtatatcctttttaacctaatattgagttgaaacacaatgaataaacctacagtgatattatgatgtatgtgactatcacctgaatagatgttatgttcattttaaaatcgcgatccttgattgaaagaaaacatactgaccaccagttcaaattccaatacccttgaaaaccattccaatttcgaatcttttttacagttagactacagagtgggcacaccattacctcgtgtttcacaaaggctcagaatcgccaaggttgctgcccaatcagagagagcagtgaaaagaaaattttcaagtacccgctccgtcctaacgggattcaaaagggcataaacgagttaaaaggagttagatttgagattttttataaaagtatatatatatatatatatatatatatatatatatatatatattccccaatgcaattctccacctttttccttttgtgttgttcattagcatgagcttggaaatttcagggagccctggacttccaatacaaatggagaatccattccacacggtttacatgctatttaaaagcacaggtcatcatctagaatggacaatacaagactgagaatttggaaaatattgaagcgtagctcatcttttcgcataattcatataaagaacaattatagcttgtgattcgttccagataccagggaggggttcctctggaaattttccaaaagagcccaagaaaaagattaatgtctacctcctttagacagttctttcattttttcagaaaactttccctcaaatttccctatcttctgcaactccgcagcaaagcattgtcatatttcttggtgttgcgctacctgcttctaaacctgatggctgcggtatgtatatatttccatgaattccctattcccctttggatcaacagaagaaaccgaaaggaaaactggctaaaagccaacatctcactaa

SEQ ID NO: 11265 - DNA, 5921 bp, Vitis vinifera
  Intron number 3 from transcript GSVIVT01031413001 (locus G SVIVG01031413001) derived from phytozome v7.0 (chr-ID chr6 ; pos 18884492 to 18890412)
aaactttccagtgcttggctttgactgtatgggaacatgaaatctcttttacgtctcagatttatttgcttatttatttattttcaaattatgtgaaattttgctggaggcggaattctttttccttctatactatcaaaatgctagcatatggtttgttatgtaatgtagtacatctttcatgcacatttgtatccattatttatgtttttaagtaactttttcctctgattctttttatttttatttttatcaagcatttttctataagcctgaaatttgctttttctgcatttgttttgttttccttgactccttaaaatgttctttgcctgttttaatacatgaatggtcaatagtaaacatagttacgatatatgtgcaatgatgcattatgatccttttatacatccaggatttaagtaacatatgttccagtctagtgttctcgtgtgttacgagtatttcagtcggggatctctttgcatctacggcagaaggtgtctgtcctgaagcattgcatgaatctgctttgcatatttaaatggattccctctctggatactgtgctgatttttccttaaaggaggtatcatgctgtaaggaaaagtgccatcctaggggtcccactgtaatcatgcatttgagagcatgatgcttctacatgtgtggtttgcagtgcgtaccttagggttcatgggttcagcatctctggatttggggaataactgtatgtagtagcctgcctcccctcccccccaatctctggaaaattctggcatcaacctgtgtctcatatgtgtaatattatatttctcatttaaacgaataaaaaggtctggcaccatattcaattttaaaatgaagctatgaaatttaattaaataaagtcaagacatagtcattagttttccttttattagaaatatagatgagttaaaaataaataaataaaatagaagtttcaattggaaataaaatttgaaagattgataaatctttgcagaaagttttattcttccaagagttgtaaatcttgcctacttaaaaaattaagaacatggtatcaggaaaggaagaatgagatgaaggagaatctagattgggtgggttcaagcaaagccattttaaatctagcgttatagaatggagcaaaggtacgtgagacagatcaaagctgggaaattgggcctagtgcggaatataattggttgtgggcctttgttttggtcttccaatgactgtttggttgtggacttcctagtgattcattctagcgatgccaagtgtgaggaccttgatttgaggggtgaagaggtcgttttatgaaaaggtaccagtaaggacacaatgggtgacaggagcccctctaatctgtcattcaggaattttgtctcctttagcgaataattgggtttgccagtacatagttttgagaggaagttgtgtttttgttgagaaagctggaagtcaaaaagggttgtagggtggcagcctcaagtattaagagggggtctatctctgcatctcgctttgaaggttggggtgctaggttaactataatcaatcaagcgaaaaaaaggagttggaagagtgggtggaaattggtctctaggcgtctaggctagagataaggtgaggggatgggagttggagaagaggagaatgattacagtctcttcaaatcttgaaaaggattcacaatagttggtttgcttgattttttttcgagggggcagtagttatctgcattaggctgtatcttggggaagttgtatttgttgaagtgggttgttgttgcttgtgttttgggcggtttgatggccctgatccgttagcagattgtggtcttggttaggtcatttggtagccctatgtttctatagattcatcgggcgtggtttttgtttcgtgttgtggttggttgtttctttttttcacttcacctgccttgcggtgctctttgtactgtgtgtatgttgtgcaccttttccttgcgcttttaatatatttgcttacataccaataaaaaaaaataaaaaaaaaggaaatttacagtatctttcaaaactttttttttttttttgtaaaatattttacaggatcttctaaatacaaaaatatatgaggattaattaaaattttagcaaaattcctcacttagtttattatttcttatgaattttttttgaattgttttcaaatttttctgaaacttattttttagtaaaagtttcctaacttatgtttataatttttttgctggcttttttttttcacactaaactagttcatcatgaaaataaaatttggtctttcttagattttttagcattttagcctctctattttttttttttttgaattttttcatgagtataatttggccattctaagcgtcttctaaaattttctgtagttttttgtcgtttgtgcaatttaatatattttgttactttttacaattagttttagcattttttggttggttaattaatgacaatttaaaatgtgaaaactcattggggacaaccataaagaattgaataaaagcatattcacttgattcttttttttaataggtaaaggaatgtatataaaaattagataaagaagccaagtacaccaatgtacacaggatgtatacaaggtacacttaaagcaagccctccaagaagagcacaaaaaacacccaagccctcaacgagacccccacccactctacaaaatcaaacaagggcattgagtctttccttatatacatgcttacccaagaagagaaatcacaaagaaatgaaagttttaaccattggttattctattccttatcttcaaaagctctttgattccattccctccaaattgtcaagaaaatgcgaagaggagcaatgttccacacctttttcattttcttcccaacaaaggagccttgccaacttaagagtagaaccctcactgaagaagggatcacccaggtaaccctaaataaggaaaacaataggtgtcatagaagccttgctttagagcaatgaagaagtaaatgatcaatagactctccttcctgcttacacagataccatctattcactaagggtcaccctttcttttagaggttatctaaggttgaactcttccccaactagcttcccatgaaaaaaaaagttgactttggatagtatccacgaattccaaatgatgttctttggaaagatgaccaacctccccacatctagaacctcatagaaagatttgacagaaagcaatcctttcttatcatctttccaaaccaccttgttattatcatccctcctaaccaaattccctctcaacatggagaaaaaagtctcaataatgtccagctcccaatcattaaagtgcctagtgaagtgtagggtccaatgtctcattcctcttgtgtcatcccaaaaatccgccacccaagcctcctttgataaagccaaagcatacaaagaagggaaggacatacacaagggctcctccccacaccatttgtccttccagaactttacccttctgccattaccccacttcaaaggaggttctactgaagaaaagatcccatcccttcttgatagctttccaaacactgaccccctattaagtttttatattggttattaatttattttttatttttattattattattgtcaaatatttgcatctttgaagtggctttctagcacttttaaaggaaacaatcctatgggaaaagcaagagaagcattccactgaacggaataaagatgtattctaactatatgagccctttttacattttacatccctgctgttatatgggttaagtaccctcttttctctaggcttgggccttggtaaatcaatctacttaatgctgtacatgacttaagttactttcacaagcaaaacaaccattctttaaattgtaacaacattaggttattattagtttcttacataatatttcactatttccgtttacattgaaggtggtttggtgtgagaaacatggtataagtatcttttgggtcaaattgtgctagccctttactttacaccttaatcatttgggtcaaattggtagcttatcaatgtgccaaatgggatttgagcaaaaatggctagactggattaagttttgtatatctacagtttgtttaatttgtgcagctagacttgctttttctagagttcaagaaggctgagaaagaggaagcctttcctccccactccacccgcttatttgttcttgtaatgcaagttttgagcagctgcatttctagttggagatggtttattgaaggaagaagagggggagaaagaagggagacggttgagatttactatacttgagagttgattggcatttgggattatctaaagtcattataaatatttaggtttatatgaaataaatagaatataaatattaatacaaaaaatttaaattaatggatagaagtataaaaaatatatttatttttaaaacttatttattcaaatgaaaataaaattaataaaaaatcttgttggtttttttatttattttttattatttttattttttataatggttttatttagaatatatttgatatgaagaatgatatttatatttttaaaggtgattcatgattatttaaaaaaaaaattaaaatatttaacttaaacaaatttattataaaaattttattttttttattagttttatctaatatttagtatgaggtgataaatgaaaaaagttttaaatctattccaatatgctcctatcactatatggataatgttccctctataattattaatttctttagtccatgtgcttgtatttatttttgtgataattttaacaattctctaaaaaatcttgtagttcttaatgtagcatattttgtgtattgtcggatattgagaccaatgtgcctcgggaccctccgagtcaatgaccgagaccacaaatttgaaccatgcccctatgattggaaacaaagaaatagacaaacattcaaggaagtggagtaaccagagctagcaatgactgtttcttcctttagacattgtatttgtgggctagtggtttgaaggattccaatttagtatctatgttagattttgtggatagcttgggcttggctgccctttcttttttgccttagtgtaccttgtactacttgtgtgttgagatgcattgctttttgttagactatcaatactttcttttctattgcctgtccaaaaaaagagacctacctcttggcaaagtagggtctgtattttagaggcttctataagtattttaccctccttggaaggggtttggtcgagagcttgagatgttgtagatttttcttttttggtttgttttgcttttgcaattttctgtgatggtatcttgtccttgtttgtattcttttccttttttgagtattttccccccttagtgcatgctgtttctttgcatgaattacatgtgcttgctagtatcttttgattgtccttgtatgtatatgcaacattcttctaaatatgatcattgtaaaatattttattttagcattgttatactgatccccttttcagagagttcttggtacgtttttcatgttaacattctgatattttgcgttcctaccttctaattttctgtctttcttttcatatcatgtattcaaattttgctttgcatctgaggcctggctcaggtggtatggagttggggtggggatgagggaggaaaaaaactgataatttgtctacatctaccatatagcctggttccttgtcaaacaaaaacaacaacaatagtattagtaataaaatgtattaaatttttgcttcctttgcaacctcacatgcaacaatttatctaaatcttaacaggttgggaatattggtgggagagagtttgctgaatc

SEQ ID NO: 11266 - DNA, 5832 bp, Vitis vinifera
  Intron number 3 from transcript GSVIVT01036208001 (locus G SVIVG01036208001) derived from phytozome v7.0 (chr-ID chr1 4; pos 9028519 to 9034350)
acagttttgtggtacgtatcttttgcttagtagagttttgtgtaagagttgctgaattataatttaataaatgtctacctgctactgtaatgaaaagtattcatgtaatgtagcgaatcatgaaattcatggatgctgtatgccaagtgctgggaatttacaagtatgtgatagtatatgtactgttgtgcttggaaattagaacaagtctggaaacttgtaaatcattaactttagatatattttttaatcaactaaaacacggtattaagaatgcctggcaaaaatagggggcccaaccccaatacaccgagagtattcagggaatgcaagaaactataaaaagaaaaaaaaaatcatcccaaaaactagcattgaacaaagacaactatacaacctggctaaatcctaaacccaaacataggtatatataaagcatagtggatttttaagtatttcattggcaaagttgtcaattcgtgccagaacttttggattttccacttggttatcatggttgtcatttatatcttctctattagacatacatgagtttgtttttgttgtaaatagatggggaatattgtacattatacacacctcagttatacttaacaaagcaaaattttattctagattttagaggcaggttgcttggtgtgatcccttttatcaattcaatattttaatgaaggttttgtggctttgattttgtaatatgagggactctaatttgtttggtcttcagattatatgtgtgaaaaagttaaggtcttaaacatgacatgtttgtgtgtctcatgtggagcctaatgataataaatagtagattgtatgtcatacaatactgtttatgttaaccttgattactgcagaatatatagatgggtaagtgccagaaggctatggttgtatgtagggttgagtttgaacaagagttgataagactctttatctttggaacttgctatttgattttcagttatttggttacaaggccgcattttccttttcttttcagtgtcataaggtatgattggacaacatcaactctatattggtagccagtaacaattctcttgtaaagtgaaaggtgggtgtgggggtttggataatggaaaattattaagaagggatgaggcattctcaatagtagagcatcctttgaggtgggaaataggtggagggtcaggttttggaagggtaggtgatatgggaatgaaccctaatgtgtgtctttcctctctctctatatgccttagccttatcaaaagaggcttgggtgacagacatatgggaagaatgaggtgaaggggggcttggaatctgtctcacttgacacttgaatgttgagactttttttctcaaggctacaaggaaaggctatgaagatggaagagaaggatagggtgttatggatggactcaaggaacgtttgtttttttaatccaatttttatattctatcttgtagccaaggtgctcaattcctttcctagtgggcatcatttggaattcatatgtccaatctaaagcgagttgtttgttttttttttttttttttgagcaggaaagagagaggggactagctagggaaagttgttgtctttgaagcaatttcaaaggaaagatggtcattggaaaacatttgtcattgatgtaaaagcgaagtggaattaattggtcacatcccaaaacaaggttagcttttctctttatttggtgttgcttaggtccttccttatatgtttaaggagactcttttaagttggcataactcctttgtgagaaaaatgcaagaaggtttagagagctgctcttttgtgcatttttttggacaatttggaaagaaaggaattgaaaagcattccaaaatgaggagcaaccatttcaatcgctaaagtgctagtacatagtagaatgatcaatacctttaattcattttgttgattaggtgggatctaagggagggagtagatttttatgttttctctctttcaggttatgttttttgttgcatatgcacaaatttcaaaagtcttacaaaaataaataaaatgataataataataaaaattgtttgtattagaataatgtgggcagaatcctttgtgataatattaaaagaatattttcctctgattttatcgcttggatcatagtttaagggatgacgatgtgagtatttccttgtggttgaagttcaatcgaggtcttagagtgacttgttttcgactgattttgcttttgcagacttgcaattgcattttttgctttagccttttggatcccacattgaaggaggcccacctttatttgtaggtggagttggggaattgaatttggactctcaaaatttgatttctcaattcaaggaatttgactccataattttaacaatttgtctcactctaggaaatttgtcagcaagaatatatttcttttttaattttcttttgactttaattaatttgcaatttttttttttttttaaaaaaacttgattttgtagccttccaaattttgtcacaggtcatctcttgaattgcatgccttgtgttcaatgtgtattactctttactagacaaacacaaatttgttatgctaaggtggtgtaggacaaccctaagatggttgcctacactcaagggtaggtggactagggttttatttttttgggtgtaaggagaggaacaaggaattgattttatggtagaaaaaattataagataagaaatagagagaaagaataaacaataaagaaaatatggaaaatcttagagtctcactaaggccttctaggagtctcacctagaagaaaatcaatggagtctcatcattgagggttgcaaccttgcaatgaaagaaaatatagtattattcatattaattcatccatttgattcatattgattagcctatttataggcttctctaagaaattcaaagtctattaggactctaataacctattatgattctaattctaattataacatccaaagtctactaagactctaataacctatcatgactcaaattctaattatattataattcaactagctaatcctaattagattccaacaaataccaatcacaattcaattctaattaatattaatcctatttaaagtttacttaggtcttcactttcttctttgaataaactttaaaaggctttcccccatcataaggagtcataattttgatgatcaatttagtagtaatataattcatcaaatttttatgtctacaaatcttcaaggcgcaacatatatatgtcttgtcatgtgtatgaggtgggacttgaagttagttttctaagtcttcaattttcctttgtgatttctttcttttttttttcaaaaaatattctaattggaaatctttttatttaaaatatttctttttccattatcccaaaacactactttgttttcttcattttctcttgctcggtaccaaaggaaggcttgatgttaataggaaaaatatctattttcctttctttgaagatagggcatcttttttttccttcacttttttgtttggcatcaagagaatctcatatcaaaatggcattttctgctcccagtatttttttggttatgtattctattaccaaaaatattttcaaaacacttttggcttatattcaaacactaactgatttttatagaactgttatcgacataagtgctacaagctgaaagcgcttctacaaggatcgctcccaaacgggtcccaaaaattgtctccaagtgtgggggaatatacaagttacatccaaagaaaaacgagatttttatgacaaaggtcctatccactccgcttcatagccttggagcccatgttgtaggtgactgcatccgctaatttctataggttccaccatccaagcatatggagacctccaaactgtgctatcttgcttaattgctaacatcccagcaccttaaagatcactttttcttttttctttgtaactctctctccttatacactaggctacacagatgggcagcccacacacacttttcctcattttgactagcaaagattaccatgacatgtagcttcttaacaaatttagaacgatgcataggaccccaaacagaggaaaaacaccaaccataacttttggccatcaggcattgaaccagaagatgattttcatgcttctcatccctttagcattataaattactgggcatcctgcccctggcagcttcctacagaaagaatgccatattgtaggagccatgattttctaatctctttgctattagcactgttgtggtcaggcttactcctatggtaagacataattgtccctcgaccctccacaataatctctgccaaaacctaccctctgcctgtctatactgcaagaccaatggatttaatatacatctccaccccctcttaattttcttttgtaatcccttccactaagagccctttccctttgctggagtgcaccatccctaaacctagcctatcaaactccaatcactctctctttttctttctttctgtccacccagcgcaaaccttcacactttcctaacaatgtcttatttagcacatcttgtcttctaagccttatccttgggctttctggtgattaagcaccttagcaaatgacacctttttctctatcccacatagcaagaaactcctaatattttctacaaactgaggctggaatggttgaggatataaactaaattggtaaaatttgacaatgtacttttagtaagcgttgacctgccagcaaaatttttaccactagatccaatttgttgtatggaaggcctctagtggaagacctagatgagtagagagaggttagcagctccatctttcacccagagatgtctaaactctgatatgtttgatttgccccacattgatgatatcagtcttctatgtcttaattgacactcaaggctgtgtcaaagtaaacaaaatgctggacctttttgtctcttgactgcactgtacctgatggggcccaccggaggggacgatgaatgaactgttttgatcaagcatccttttcatgctgcatgtaaaatttcctgtgttttatatatggcaaattcactgctaatgaggctttcatttcaaataggacaatttcatttcactgatgccataaattccatggaaagcaagaatttctgggatacatgaacaaaattgtagaaaaattgaatccaagaaagaaccgggatttaaagtagagagtgtttatggtgttgaaagttgatgtggaaaatgaagaggcacttatatcgatgctaactatgtcatctttcagggatacttctggtctgaacttgcatggttagaccaagtatgcctatagacaaaatctgaaacggaatgagagaaacaattaaagatacagatgatggaggatagtaattcctttttatacttttttatgtgtctgcaagagagataagatttctggactgttactgagttgtcagtgaaagcaaagctttagatactgattggctgatgcctagattgattttcactgtatcatcttttagatccttattatgtatataatttcctttagaatttccagtgaaggttctgtgattcgtgaccaagcttggaagcaacctaattgcctatcaatttgagttgatgatgatttttcgatgcttttgtgcaaagttttgaatttgagtatcaacctgcttcttcgtgattcttttttagtggctgatgtaattcacttgctgatgtcttgatttggtgggacttttgtttagttttcaaaaacagcagggcgagtaaaggaagcaat

SEQ ID NO: 11267 - DNA, 6604 bp, Vitis vinifera
  Intron number 1 from transcript GSVIVT01023099001 (locus G SVIVG01023099001) derived from phytozome v7.0 (chr-ID chr1 2; pos 22606085 to 22612688 reverse strand)
gcggcctcatcccagatctctcacgggattcttaggtaaagtatttcatgaatttcttaccatatgatcttattccatttttttccctgctttctatgattccctttcatccgattgaattttccccgatttctgcgatttaatttacacgtacatgtagaatctgctcttaattacctgttacagattcctgagatgctgttgctgtatgattttgggttttagggttttcttttttctttttcctcttttcaaagagggagatggcgaaaataattaagcaaattcgtcggggaagtgatgagagcgttgggttttaggtgtggcccagaatgggttttacatgtgagggtacttggtccgctttttgttctgtaatgggcagggtgtctcttccgacgaagaattaaatcccgtaaagtccgtctctttcctttgggtgattcagtattaacggatatacggaaggcactcgagttgtcacatacaagtgaattgagactcgcaatatcttgttagttctacagtagtggctgccatcagcttgtattgagcttttgcattggcagagctacatttggctgttcctttttactccaactaacagaaagtccgtgcgaagcaaacaagtcatcagctcccagacagcctcctccacccatcttgaaaattttgtggtcctcccctgccagataattcatatcagagtgaggctacttacatcctcatcaccttacctcttatacggtcaccaaaacccctaaaatgatatgaccaaatgtctgccacgcttctatggaagcccaaacaattctactacttctaaattacctatgtcatagctccaatgataccagataatctagaaaaaagatgattaattgactcgccaccccccaattacataaaaatattggtccctattgagggttttatgaggtcttcttaactgtagcatattgttagtgttaaccttcttataccagataatagccacacaaaagcctttatcttaagtagggctttgaatttccttataaaattggttgggaagaaaaggattgggttcatagatcaggacaaaactttgaaaaaaattaatagttattaaccttgaggaagagacaagaccaaaccctcaaatttgggaaggaaataataaattgtccatatcatatagcattttgtgttaacttcttttgggtcatatttaaagtcaatatagactacttaaacatattcatccatcattaggtaattctatataagagacacaaataaatttgattattttttttttaaatagttttgacagatatcaagtagaactctgaagaataatttagaatttatccaaactaggtataagatatttttgtaatctaccagattcacaggaaaaaaaagtatgctatgctaatcaatatattattttattttatttttatcatcactagtattaaaatcttggtttatacctactgaattcatattttggatagaaagggaaaaacaaaaaagagggtgttgtgaggattttcttgacttcttttgtttttataattctgcatgttctagaactaaactacctttacaattttgtaggctattaaactcttttgtgactctttgaggcaattcactcagtttgcttcaaccatcatttctatcatatgaaattattttctaaccgagggaattgttataattgtgttattttatacttttcatgaatctatgctctttcttaacatatttgttagatttttaatcaataattgttattaactagttatttttagtgaatgatgtttttttggtacacaaataagaatatatgaaagacgccaatcaaggagagggtgctcacctcaagtgaggtgtacaaaggctgccaatacaacaaatagaaccacctaaaacatgcacactaaacactctcccactaatattcaaccaatcaataaaatgaaacaaggaaacaaggccatcttaaatatgttggtgagtaagggagttatttagcgtttgatatgagcattgaattccatcaaaatatcttcggttcctctcttgggaaagaattcaaaataagcaaagaaggactgtccttcaaatcttctttctattttagctcacaaaactcccatgctaacctttgacacatctttgatagaaaaatggaggacccaagaaaaaccaaagagagaaggcaaaaattgccaagggccccttgcctttttataatggattagcatgcgattagctaattcttctgaactcatataaaaacaaaattgattagccaacaatcaaccttgtgtttcaagctaatttaaggttaggaacctttgccatacaacattccgagcaataaaacccacttttaaaggtgttgaagaagcccacactaccttcacgagaaaagacactccatccatctctaaggaagaatagaaaaattcccactcttgctagctttccaaattagcttatcctcgttgcagttcctaagcacttgagatctcctaagtaactcttctatgtaactcctaatcttgaaatttccttgtgaaacctaggttccaaataacctgcctgcttaggacctcctcagcatttaccacccaagcctcttgattagatgcaaaagagaaaagagagggaaaatagtcctttaaaggagcatccccacaccaaacataatgccaaaattttgttcttcttccattgccgaccaaaaatcttgttctatccttaaaggcttcacaacctcctcttattgctttccccaagctaacaccatgcccctccctccttgcaagagagtaccattctccaggttcttccccaaaactttcccattataacccgtctccaaaggaactctctctctctaaggcaaatctccaacaccattttccaagcaagactttattgagagaggactacatttttgaagacccctttattccaagccttgagatcccactttaaagctttcaatttagaatccaagacaaaaccataggaaccaaagaaattataactttcccaccaacctttgaccaaatcctttaaaccaaccactttaagccagatatttcaaacctaaaaggggacttttccctcctcacccaccctccatccaataaaataggagaatgattagatattggccttgacaaaatggtctacaacacattaatgaaatggccctcccaatttcctaacactaggaaactatcaatttttaacgttgaagctttgttcattccatccacaccaagtgaacaaccctccatttaaaaggagatcaatgagggaaaactcttctatgaattctaggaaaggaggaaaacctagcatagtgtcttctttctatagagaatcaaaccacattaaagtcaccaccaatgcaccaaggatccccccaagtccctttgaggaatttcattcgtagaatgttgtggtccgtaccctcaatgcaacatttttactcctcatcccaaagaaaggaggggcaagtgatatccaggatttcaagctaattagtcttgtggggagcctttacaaacttcttgcaaaagttctagttaataggcttaaaagagtagttagcaaagtggtgtcaaatagcctgaatgcctttgtggggggtagacaaatttttgatgcaaccttagtagcaaatgagactattgattggtggaagtgaagctctaatgtgggtttagtttgcaaattggatatagaaaaagcttgcaatcatgtaaactagaagttccttctttcgattttagagaagattagggagacagtggatccacttttgcatttctactatgagcttggttgttctagttaatgatactcctacaaatttcttcttaactgatagaggtctgaggtaaggggaccctctttcaccctatttgtttgtgtcgattatagaagcccttagcagattaatggctaaggctgaggagggaggtctcattaggggtttcaagattgaaggtagaggggaagaagggactcaagtctcacttattgtttgcaggcaacacttttctcttttgtgaggataacgaagatcagttgaaatattagaagtggattgtcacttgctttgaattggtgtttggtttgttgcaaaaaagcgaaattattctagggggcctagaggatgttgatagagtggctgctctttttgggtgtaaagcagggaaacttcctacttcttatctaggtttatcccttggagcccctcacaagtcttatggtgtgtaggatgcaatcaaggagagatataagaggaaattggcttcttggaaaaaatagtacttatctaaaggaggaagacttgtccttattaagagcactctttcaaacttttcgatctattttatgtctttttttccaattcccaataaggtgaggattagattagagaaaattcaaagggactttttgtggggagatacgacagagaggagaaagatccacttggtaaactatttggatatttgtaaggatgggaagcatggaaggtttgggataagacgtttggagggtcctaatcaagtcttgttaaacaaatggttgtggagatttcgccttgagagggagagtttctggagaaaagtcattcttggaaagtttggggaggtggtggggagttggactactagagaggtgaaggattcttatgggataagcctttggaaaaacattagaaaagggttagaaaagttcattcttagaactaatgtccgtattggaaatggtagacatacaagattttggtgggacagttgggatggggagtttaagttgaaagacatttaccgtacactttttagactagcatcccacaaaaatgctatagatgcaaacttatgggagaggaaagagggtggatgtggtcattgagaggttcaatttaaaagactcttccaagattgggagttagaggaggtgattcaatttttggaacacattttttcatcaaaagtgcaagatggggaggacattttaatatacgaatatgataggaggggggaattaagtgtcaagtcttattataattctctaggggctgagaataatttaatattcctagcaaaagagatttggggatcccgtgcccctcttagaactcatttttgtgcttggaaagctgtttgggggaagattttaattgtaggcatgttaatgaagaggggttcatccatggttaatggatgtagcctttgtaaagatagtgaagaattaactgatcacattttgattcactgtgataaaacaagagatctttggaccttgttgttagcaacattcggtttggttggggtgttcttgacttcagtgagaaatcttctcctaaaataaatactcaaggggctagggaaaaagaaaagagcagtttgacaattggctttgatttgcctattttggtgtatttggagagagtccaaccaaaagactttcgaagatgaagaattgtcagattaaattttgaaggatctctttatctggttgcttttagagtggtattagcagtttttggaattggaaaacccctcgattttgaatttctttgatgctcttcttgtttaaggttttttctgtcttaattggtgcttgctttgccatttctgtgtatactgcctgtatatgtagggtgtgcttcctctttttgacgtttcttaatgcatgccttgtctatcaaaaaaaaaaaaaaaaaaaaaaaacgaagtgtaccaaacaaaaaacaggaaagagcgaacaagggaaagagcaggagtcaactatattaactggtgctatcgactattcttgttgtgattgttttataagaatttacttcattactttgatttactaatagatgattaatatgttagtcctttatgtttatgttgaagtaggtataatagcaaaaatatttatttcttttgcctttgttttacaatgccaaacaagggaagtgaatattttctgttttgattccctctaaataccaaacacagtagaaataatttcaattattttcatttcaattccatcaattgaattacattcctctggatttggttccagacagtataccctgaaaatctagttgttttgatcaatagcaccagtgaaacctgtctgtcacgggtgctagctgatcctgtgaacagaaaaaggtgaactccatctcttgtgtacaattcatttaggttcctactaagttttcttacatatcttgcatgttaaaaattgttctttctcttgaagcaattgcccaaaatcattgaaagtacagttctgttgattaattggactggttaggccagcttacaattagtgctatatgactcactgagcagaaagttacactttgtttctgagagatacaggtggtttttcaatttatttttcacacatatctaatggttaaaagtttgacactctgaatataattcatcaatgatctatattcagtcaaatgtgtattttatatttgcctgatactcattgctatgcttgcctccattgatgcttatacaatatttcagttacatttatagctttctggggtttcaattaagat

SEQ ID NO: 11268 - DNA, 3777 bp, Vitis vinifera
  Intron number 1 from transcript GSVIVT01027649001 (locus G SVIVG01027649001) derived from phytozome v7.0 (chr-ID chr1 5; pos 14655115 to 14658891)
ctaagcttggtgctaggttcacccaaggaggttcgtttttctcattctactgttttttttttttttttcttttcaaaatgattatgtgattgtttgtttttgcattgcattttggttactggccctgatttaaaaaaaaatggggaataagtgagattgaagttttgggtgagattgtcgttatttgatgaattgggaatttgggttttgtttattttcctctgtcttttcagcaatcaaattgggtttgaaaattgtggcttgggaattcaaatatgagattggaatggagaattgtgagattttgctgatctgaaatggggttgggtacgttattttcggacaatttgagagctttgacgaatgttaatgggtttgtgatgatgttcattcttgaatagatggaaaacatgaaggggaagtagcaggaattcgtggtcatgaagtagggattaaatggaacagaattcacggagtggtagagttgtggaaccacttgtcttttccttattttggaccttacagggacggaatgaaatcttagattaaagtattacatatgaatggtataaactcccgaacaagatctcttgaatagtgaacaactggagtctattacatagtttatacaaaaagttctaattttttgcttaacggcttgtgctggcaaagcttgttgaatgaaatagctagatctaggtccatttattcatctggtttacaagtgattaatagttttgatggataagtgatgaaggatatagaattatagacattgaaaattggcggtagctccaagtgtgggacctagtcaaattgacagaaggacgtagaaatttatgattgcaacataagggggcacatgaggacatatgtgtggtatatttataaaagaggaaaaaatggggtagtcgaaggtgcaacagactagtggttttgatggtgatatgatcgttgttgaatagtctagaagagtgcattggttttgcatcttcttttgataactctgattgaggtgttgacaaaggggacgcatattgtattgatcttactcttgcaatctcacgcattgtttgataggaattgacagctatgatgaaatgcaattctttcagcatttggatgcatattccccaaatttctatcgtatttcaaccagaagggatggtatcattgttcctgtatcagtgggaagtaaaaaattgcgaagggaggaggcatgatattcaagaaaaagtccatataattcggcaattattccagtgatgattgtaattttgattccttccatttccatgtgtgaatcattactttcctttttgttaatcttgattgcaactcccattctccatcccgactctgtgtatggctctatcgaaggttttggttgttcggaattattgctggagatcccgtgttcgtgtctacaaatctacattgtagtgaattgcaccactataaatggactctgatgcatgccatccatatatgaaccgataaagttaggtgaggcaaattgcctaatttgctgagtcatgatttctttctcacacttcaaggtgtttcagtttgaggctttgcacatgttcctttacgactgcctagcttgatctgatggttttatggccttttttaggtgtctaagcttattttgtagctttaataaacttcttttgtagctttaattaagcttcttttgtagctttaattaggaagtgcatattccatcttgtaagtgtaccattcttttttctttcataagagatatgtttggtgatatcatggagacaattgtctgcaatagtggtcccttccttttttggaagcatgtgcatagcttatgcgtaccttgttgcattttttattttggtgctttctatatataatccttttgccaatcaaaaaacagtgttgtcccttaatataaaagttaaccaagaggatttttaaattgatttgttacttcagagacaagtgaaacaatgtgatagatagaaagatgagtttgatttgctaccctgaatctggttaaacaggcttagatttggggtggatgtatgtggaaattggtatttgcaatgagggaaagcttgctattgtcaagagagcaaaagcatgatgatgatgaagtgcataaacatgtttggtgatgtaaaaatatggtagaggtgttgaagatcatcttaatctccttccaaatttgattgaggcttgagagttaaaattttgccagatatcgactcattatccttgatattgatgagactttggagatgtattgaagattgagaagaatttgaagcaatcacctagtagaatcctttcttttcaagtttggaaggcagcatattgtactttggttcatcaaaataataaatctaatggtagagatagttgctatgttatatgcctgttcaattatcatccacataggctatgtttgccggtaaaaaaattgccatctttctctctctttctctctctctcttcccccctcccctcttattatcataactctttccatgaatatccatagcatgtagaggttcatttcacaaagtattgtcatgctggacatgaagctattttctactatttattgtcactattcagttgcacctgaccaacttttcagtctcacagtgtcattaccatgtcttcacactgttttttgctatgattttttgtttgaggagtatggtggccggttcaatgtacctgcaattgtttctgtttatcaggggctttgcttcttttatataccattttgatgatctggagagttctatttgttctcgcctttggacaaaatatacatccccaccctttttgtttttgttttttttttctttttctaaatagaaaagagcacgtgaaaagaccgcattgcactcttattcaaccttcatccacctcacccaaaactgtaaccataactctttcctcttatcactttcttccattcctagccctaatctcatggttgttgcaattggagcagccatagttgccattcatggcaattcctttgttgtggttcagttttcttatttttttaagtttttacttttttagtcgggatttgatagagcttaaagcaggtggacaagggcttgctagaattggctattacaggagtcccatcttttatcttttttttttttttttttcaaaactaagaagatgagattaaggttgggaagggaaaaaagtgatggagaggaaggggaaagagttagggttagggttttgggtgaggtggatgaaggttgaagaagatggcagtgtggtctttctacatgccctttctacttaaaaagaagaagtgggggtgtatatataatccggtgggggagttggaatagaacaccccctttggatttttgtcttttgaaccttaaggcaagtcgtttcaagtcatttttttcgttcttcttcttacccactgttatcttcggaatctttcctgttgaaagactgttggttcaattgaactttatagacataaatctgaaccatttttgtagatgtaagtttgcggagtgttatcaaagtgtaatttccaatatgtcacaagctgtaacttcagtgctctgtgtatctgctctctttctcttacaggattatcaataaacataggtattagatttgtttcctgatcaattttttttaactatgactcattgattgttattcatagacagctccaaggttcagttggatagtagtttggtgaatgtaagcttttctgatgatatattattatcggttcaggat

SEQ ID NO: 11269 - DNA, 6992 bp, Vitis vinifera
  Intron number 3 from transcript GSVIVT01036821001 (locus G SVIVG01036821001) derived from phytozome v7.0 (chr-ID chr1 8; pos 17495809 to 17502800)
ggcacatcagcattttttcaattgtacattgcgtggtgaatacaagttttcctcatctttatgatttgcttggttttattgatgatttacatagggaacaatatgtttccaaaactcagaggctaagcatgtgtataatcaatcattgttgcctttatggaaatcactacttcatcatgaaattcttcacggcttgctgctagatgatttttctgtttgttatttatgcatacttccctccacttgatttttaggtgattgaagtagcatgtaggtgaagatatctctacattcatgctcaatctgtttcagttgcatattttattagattacttagctggtatgaatattttatcattttttcaatattaattggaaatacaaagcaaggttcatcgggctgatcatatatgtttggccactttcaactggttgataggataatatttcagtgattaaatagggtagttaggcatgggcttttagactgtgtagttgatgtagcgtataaatatggtgaattggaaaaggcatggaatctttggttactgaaatacctcaaagaaaaataaaagaagaaaaaagaaaaaaaaaaacttgttttttaggttaatttcacaatgttgaagacaagctcaacagctgcacaaatagttgtttcaatgagaggagttccaaacatattgttttggttaacaccttgatgtaggacaaacctaggatggttgcctacactcaaaagtaggtggactagggttttgtttttggggtgtaaagaaaggaacaaggaataaagtttttggcagtgaaaaaataaaataagataaaataaaataaaataaaagaaagaagaaatgatgaagaaaagatgaaaaaaccttaagagtctcactaaagcattctaagagtctcatttagaagaaaatcaatggagcctcatcattgagggttgcaataattgcaatgaaaaaaaattataatattattaatatcaatcaattcatccatttgatttacatctattagcctatttataggcttttctaagcaatccaaagtctactaagattctaatgacctattctgactctaattcttattataatatccaaagtctactaggattctaataacctattatgactcaaattctaattatattataacttaattagctaatcctaatttgactccaacaaatactagttctaattcaattctaattaatatgaatcctacttaaagtatttatgtcttcccttatctccttgaatagactttaaaagactttcccccatcacacctttactaaattgaggcaaaggcagaggcagaggcagctaaggcctagagggcacatgcctcctcaccttgaaaatcaaaactagatattatattgggttgggattgatccttggcctcttttggagaggtaaaacaagatttccactaggctaatcatctcaaatacacttcatttcctcgccccaagattgaatttctggatccatcataaataatgctttcaagagcagaaattttgaatgcccgcaacaagagttgctctctctctctctctctctctctctcttgctaggagtcctcattcattagattcagctgatgatgacatcaaatgctttagtactctggtgctaagtcattgtcaaagcaattactttgtcatgcaattaaaattgtgaagtgcaaatatgatttggcacggaagttcagtgtggtgagataaatggaatgccaacttctataagatatgctgtttggactgaataattggaataagaactcatggagccatcaaagagttcttgggctaatggaattctattatcattataccagcagcatggaaaacctaaagttgctatcatgaggactaaaattgaatacttaacaaggagtactacaactaattacatggaatgtatgatagtagatcccaagaatttaaagcagtatgtgtgtgtatgtgtatacacacacacaattgaaggattcacatcatagcaatatgtgaatccttcaattgtgctcaaactttcagattcttcttagaaaagtaaaggggcaaaaaaacttgccatgaattgagttctcgatggagactagagtgagtcctcttattttattgttttgtccaacttgtattttttagctaattactacttgatattctacttgcataaaatttggagttggaagagattggtcctattgttggagagaacaaagtaacatttggttgtaggacgatagtgaacttgtgatcatggcactggatcaacaaatcttaggttcgaagttgctacagctttctgatgtatattcaggttgtggtgagaaaaaaagagccttaaagaatttaggtttcaaaattacactaaactaaaagaactggcttaaagtgattaccttctttttgagcttaatcctggccaatggtggtaatctgggagaaagaaatcaggagaacaagaaaactgaaaaagaaaatgaagggaaaagaaacaatggacaaggttgagcatttagaacatgaagattaaacttaaaaattaacagctataggtttagtatccaatccttgctaccagttagtaatgagccatccacttttactaagatgcgtgccattaagccccgatcatctgaacacacacccagatgcatgtatgtatataagatctcttgaatagtggtcattattacaagccttccccctatgttagtcatatttaagcaatttaattctgatttagatatcatttggcatttatcttaggaatataaatgtctttctaaccaaataacatgggttatttttctatttattaggtgaaaaattatgtcatagtttattaccaagatataaaatgtgaattggagaaaagtagtattgttattgaattctttgtattttaggaagagggcaatttttttgagggagagactttatgattttgtgggatgtcattatccataagtgcatgcttagtcaagttatgtagtctttgatatattctaggagatataagaaaaatctagtttcagaggattagcttgctatttttaggtggattagttttctattcattaggaagattatttccaagtttatgactacaaatacttctttaattgtcttttgtaaatcattggagtttatttctattagccattttagaggaagattttctcgaagcaaccactatccattctctccgcccctccttttttttttttctttttttttctgttttgtttctttatatgaatttctcaaaataggccatgaacagcccctaagtggcacataaaaattggtataaaagttacagccacttgttagtcttatttgaaaaatatttggtgaataaaatgggaatcatagaacagtttattgttgcttagtttctattctttttatttaatttccattcttttcttcttctttctttctttcttcaagtaaatcactatccttcatttggaaaaggattaaaaaaagatttatttattggattcatcaacaaataggaaactagtaagactcactctacttttcattatttataagactcctggtaataaacttggagatatctgtccttataaataggaaatttacctacctaaaaagcaacaaggtaatccaccaaaattaaaccatttctctctcctagaatatataaaagctaaataatttcactaatcaaagaaaactaaattaaatccacttccgagttcgcgcacatgtagaatcattaacatctactctctttaaattacccttgtcctcaagggcgattttgggactctcatcttgcacattcttctaccacatcatcacatccatcttcatcttcattttcttcatctaaccaacattctacaataagaaatagcattttacacatgtggctaggactaaacttctcattaggattaaagcttttgtcctttgattagtcgagagtcaacattttagttgacaatagattttaactttttgacacatagtacctattagttaaataaggtaaataaagccacctctatgtttgttactttcagttgaggagtttaattttgagtataatacttgcttcataaaggtaacctattgcaactattatttagccaaggagcttcctcattaatgctaatattccccttaagacaacgtgtcatgaagcctactaagtagtctctcaaacaaactttgatagtcatgaacatgacctatttgtttaagtttggtgaggttaccaaagaggtctattagttaccgattttcctttaagctgaagctgttagaatttgaacccacaaagtatattatgcttaacacttccctcacatgtgatcccatacatgcatgcgggaagcaaaaatagcaatagctgtagaaatcataatgcaacctcctgttaacttgagctctaataccatgttaagttatcaactttttctaaaagattaacctattaagatttggacccaagatgtgtatcatgctctaacaaagtctttggatcgagtgggtccatgactccataacatgtatgcaaaacctccttaaaaacttaccatgtgataaatctcctcttctttctttaacaactaacaccatgactgggaatctccttctaaaaaaggattaaaatataaaaaataatgaaaatatcagtggttggattttacaaaatattgaatccataaaatattgatagtatagaaattgattaaacatagaaatgttgagaaaaacttcaagaaatgataaatgttgagaaaaacttcaagaaatgatattacaacttcaataatatcatttaccattggtcgattagcccttggtcttcaatgtttgaatttggctcttctaacaagatgttatcttcaacttggacacaatgactgcctcatgcctttcttgggtctatattgataaattaaataaaagagaaagaaatgtagaaaaaaggaaaagaatggataatggctttactttaaggagtacctgcctcccagaaactcagtaacaataaattattttctgacaatctaattcgattgtgaaagactaataggaatgctcaatagataggataatatcactcttaatccctaagaaactaatccactaaaactaaataatacctctctctctctctctctctctctcttaaaaggtagctaactgatcagtcaaaacaaattgcctaatcacttcaaaaatgtatcagttaaataagtgcctgactctgtgtggatgtgggtgtacttgtaattttatactatgattactatttatttgaatgaggacttgctgttgtccagtggctactatattatcaagaacaaacactcttttgtttgcagttatagaaaattgggacaaacttgtaaacttctctgccaactgctactacactgctattcagtaatgtgtattactgtttttcacacacatgcaagttgaagctcctacatgattatgtagctgttttggtttgaaaattgaagagtaccccctccttggcattgaagaaaattattacaaaatagtagtatttgcttttattttgactattactccttccaccagtctgggtagttgtcaaagtgtgtacctcttctttcgagtgttgaaccatgtatctaggatgaaaccacacagtaaaagaatctaacatatgatttctatttggcctaatgctggactcgtagctggtaataattttgctagcaactattgatttgactgtgattgaatggacctaattcatttattgccttggcaatatgagaccttagtgaaggaacaaatgctgcatgagatgtttgcatgcagttgccatctatgccaaataggcagacataggtatgcatgccagttttggtgtttgtttaggcgccagactggtgtaattcccagatcttaggacctagggacactagtgtggcaaactctaggccaacacaaacatgtaaaacaactgttcacatgggtacttcattaactctgcacatatcagctagatctggctaaacatattgttcagctggaaaatgttatcatctttgggacacttgtgttaggtgcatatctggtagtaggtgtctggatgcatatcccatacccatactcatgctgtctcttgtatgaaatgggaatctatctgtgtaacacaagtcgttctcttccaatgtttgatggaaaagaaatcactacatagttacttatttaagcttggattggtttgagtatgatattgtacccatcacctattgccagtttgacagtcagcagaccttctagtccacgacatcaaaaatccatttgattgaatggaaacatcagaacatgagaacctaatagttattctaatacaagcaaatgaatgaaatggttaaagaagagtatagtgagtgaatgagccatgctaaattatatataaaactgcacttatctattggcacacagaaggcccagttcaccatttgcctgctgacttctcatttttaaaacactgcatctacttgcctttttatcctgttagctgccagcagatgaataatgttcttcaatataacaaaaaataaaaaacaattaaaaagaaaaagatgggggagggggtaaacaaacgatgtggcttttgactttctcccctttgcatacactgtaatttctttcaaaattttatttgcttgtgagtctttggctctcctccattgaatttaggtgtctggagataaaaaatttgcttcttgtatttaagaaaaagaaagtgcataaatttggtagccatacacatgtagattctctctccctctcaccctctcttctatggcaacttgataggtgcatattaccatttctcttataaaaattgaccctctcttttgtttgatcttggtataatgtatatatagaattgcagggagggagggaaggagcatttgaggca

SEQ ID NO: 11270 - DNA, 3785 bp, Vitis vinifera
  Intron number 1 from transcript GSVIVT01037839001 (locus G SVIVG01037839001) derived from phytozome v7.0 (chr-ID chr3 ; pos 7307282 to 7311066 reverse strand)
aagcgacaccgtttcaagttcgatagagaatccaggtacctcttcgtcttcctctgtatgcccatgattcttccactgttttatcattgtacgtgcaaaagggtgtgttctgtaccaaaaattggaacaacgaatggtggatattggcgtggattgttaatttttttttcgtcttttttggttatatcattggttaatttgtgggtaagttttcagatcgaagtgggtttctctggatcaggtgtttgggggagaaaagcttcgttcttgtctgctcatctgtttatgatgtgtccatagtggaatgtggaggatgacccattttggttggcttttatcatctgtttttggtgttttcgtggggatttgtttatttcttcgggatgatttgcttgggcttgctcctagtgttttgagaatcatcctaggttgtatgcatcatcacatgaaattgccatgtgattaggactgggaagagtgatttttgaggccgcattacttgcatgaaattgggcccttggaaatttgaaccgaaaataattccgatgtttggttgcattatatgccaatcaattcgaaagggagttaaatgttttagaccttaaatctacaaaatgttacttgggtataatgggaatttttaatcccaatgaaatccaattttctagctcctatgcaacctaaactagtttcttctttttcttctcttaaaaacttatgcaacaaatgtcctgagtcgtcaaaggttatgctttcagttatgaattcagggtttcttaaatagaaaatgaactggaggggtttggagctgccagcctggactttatttcatgattccatcaggatcaaaagtttttccagaatcattcccattatatgcagatgcagaaatagataaatttttatcaggattctattttccaatatttaaatttatgttatgctatctccttactacattcatattagtctttaatttagatttaaattaagagcttttactaaaatagttcatttataatctgaacatgatagaggtttaaaatttatatatttgttgcttccaccgtaaatgtattattttccttgtatattcttattaatgtatcatttaattatagaatttgaactcattattcgaataagcattttttatataagaaggtgcagggagtgggcttttgccttcgcatctcagttcaacagcatatatctgattttttttttctttgaatcaacttggtttaagggtttttagtaattattctctgatgaacttgcatataacaagaaataaaccacagttttaaccaaaaatctgacttttcaaattctctaatgtctttggtttaacatttcaattgtgaaatgtgttcttttatttgtgaattccgatcttcaactgctaacctaccttagctataggcatacacgtgaaacaacttttcctcctttattaggtgcttttcaaaatagtcttcactgcctattagaaaaacacatttggagcagatttgtctagttcagaactccaacttgtatggcctttaattctaataaaaatctttgggtgaaaatataccttgataatcttattaaaaatacaacctggcagaggtacattagatatgtaaaatctgaggtctttccacattttatggaaagtgccatctgcatattgtgtttaaagattgaccatgttatcatcataccaacaattatggcagcaacttgtgggagctcaaccttacccaacctgaatttgggcaactcaatttgcaaattgggttaagtttgggcaaaagaatgtcaagatgaattaaatttggattagtcttggttgggggttcaagcaatccgatagatagtgtatatgagatgcattatttaatatttcaaactcttttatggttgtcttggaaattgattacaaataatctgacatgaatgcttttttttttttttttcttttttttttatttgaaaattttaattcagtctattgattgtagcaaaaatttctaattattggattgatttagcaaactgtggttatgaattttacatgttaatttgcaaaaggttctagagagaatagatgttatttatggtttttctttgtttagtgtagtttgatttgtaaaagatcctactgaaacagatattaaatgtaggtcaatttaatatgattttttggtttataattcagttttgcatgttagttttttgttttgaataatttatcaatccaccttttggtgccatttgtatattttttggcgtacttgggatgtgttcttgattgaatgtatgccaatcatagtgtcagatgcaagttgttagtattttgatttaatgtgattttaatttaataggcaataattcattgttatgtagatgtaaaattcagttacttgtttttgggcttaacccaatctgatttcatggcccatcctaccttttgaacccattcaaaactcacagaatccagccaaaaccaaaagcatgataaataaacaaatcctaccccaaattttaacccaagcttagaaaaataggtttgaattgggaaaggaaaggaagatggttggttgtatagtattggaattgggatattgacggcagacaacaaaagattccctttcccccacctcaaaattttcatatatttttttgtctctaataaccttgagatctcgtaaaatatggtaccggtaatggctgatggggttgtgcaccttattgaccacctttggataaaatcctagctgcttcggtgattgtcttttagttgaccttccaggtcatgcagatttttcttttttcctttttgatcatagacgcaatgttttcattaaaatggattaaaagtataaaagaaggatgagaaatccttcccacaattacaaaatctgatcaaaacagaggaagagataacacaattccattccccattattatgtgttatttatgttagaataagccaaaatgtgttgtttacttattttggagccattttgatagtgtagctttgttagtatatgtgcattgcaacagagacgacaacactagacactgtcttagcttaaagacttgaacatagaattcaaatgtgcttccagaaaagtgcttcctatcttaatttcttttcatttttgtgttgataaagaaaaaactttttggtaagaaaataagaaaagaggaaaacaaggaaaaaaaaaaattcaaaaataaagaaaaagaaaagaaggcatgaatagcaatttgaaattgtttggagcaatggtacttgggttgccttccctctttctgttaggtgaacattaatatatctccctctttctgttaggtgcacatttatatatctctaatttcccatgaaaagaaaccatctggaatacataatgcgggttgtattagtttcttagacatgtttatttcatgaatttaaacatcataacttcattctgcaatccttttaccctaatctcattgggggttaaacttgaaaattctggatgactttcttcatagttgtgtaatttattacttgtttattttgtggcctattgtactggatgaataggtttcttttttcaaattaggttgttgacatgtctcaatcagaatagtaatgacttgcgttctatacctatcaaaaaaaaacaaagtaatgacttgtgttctaacattctagcagcctttcctttttaattggcttttagttattactgtgctcatctatgtcatttggttggttaatagtcccaaaagatctaggaggg

SEQ ID NO: 11271 - DNA, 2015 bp, Vitis vinifera
  Intron number 8 from transcript GSVIVT01023622001 (locus G SVIVG01023622001) derived from phytozome v7.0 (chr-ID chr1 1; pos 8129584 to 8131598)
ctaattgaagctggtctcaggatctgggttttcaggtacatttccaactacaaagtaagaagattcaaaacagtctctccaaagtaattcttaagaaattattcataattttatctaacatatgttataggtacgtgtcttttctaagtgttctaaaaatttatttaacaaaaatattcttcaatttaaaagaggagaaaaaaaaaaaaaaaaaaaaaccaatatgcccctaaagagacccaaattgcaacaatggtgagctgccacttgctacaggcctgtaccaccataagagcacaaggatagagtgaatccaatagagtccaaaaggtggaggcttgagagttttgggataaaatagcccttttattaaaaaaaaaaaaaatctaccaaggcatgttgacaaaccaatgttgaagttatgtaattgttaattaagagtcatctcattaatttttatttttttagtatttagcaaatatagtttcatttttaaatttttttgcacttttaacttcacaattttaaatgttttttatgattttattttttttattttgtcttatttattcatatagattttttattttaaaattattaatttattgagaaataaaatagtaatttattattattttaaaaattatttttattgaaataatactatatttttaagtttaaatatatagaattttttattattaaaacatatatttttaatttcatataaaaaagaatgtcaattgataaataataatatttaatatataactttgtgtgttttatttattttataattttaaataaatgacggtattatttgtatacatgtaacatatatatcttgaacataaatttatatattgcgtatacacaaataatattattaaaattataaaaataagtaaagtatataaagttatatattaaatattattacttaataatataaaaaaattacatatttaaaattaagagtctagtattactttaattaaaataatttttttttaaataataatcaataaatagtttatttataaataaattaataatctaaaaataataaaattatataaataaacaagaaaaaaaatctaaaattgtaatgttaaaaatacaaaaaattcaaaaatgaaatttcaatttaaaataaaacatgtaattgtgaataattgtgatttcaattttaaaatataactgcattttataaatacggtttcaatcttaaaaaataaaaataaaaataaataaataaataaaaataaaaaattaatgaaatgacttttacatggttgaaggggctactttgaatatttatttgtgtaagccttgaacgttagttttcaacgtacccagttaagattgaatttgtttcaacagtagggctatttggcatgagcgggggaattttcatggagttttgtgcacttaccctaacaaaggggagttgcagaagacattggattttgataggaagagccggtctcccgttatgatgattgatgggtcacctcatctatcatttttcactgcactcttaaccaaaaccattcattcttccactcaccctttcggctgtgattggacttttcaaacccaacccatatccaatatcctttctatttgtaaacacagtgaaggacagaaccactaatttgataaatattttaaaagagatatagatttagaatgttttgcttcaaagagattgcgtttgtgacaaattgaagtatttgactccactggaattgtatggcaatctcaattctcgaaagagttgatattccatggttgatactccactggaaatctgaaaacaagtgtcgtgatttaacttcttaccggaaaattttatggtagtggataccagatttaattaaatcccttcaacagcctatattatgatcattggctttatcttcatttcatacgctaatacactactttattaattaattgacaaaacaattttctgttattcttgtgatgcatcaaatacagcggggacacag

SEQ ID NO: 11272 - DNA, 1380 bp, Vitis vinifera
  Intron number 2 from transcript GSVIVT01028300001 (locus G SVIVG01028300001) derived from phytozome v7.0 (chr-ID chr7 ; pos 5896831 to 5898210 reverse strand)
gccgtcttttggaaactcaaacatcgggctcgcatgtaagttgattctttgcttctcttatcttctagccctttttcgtgtctttcatgcatatacacttcgtttcgtagttgagaaaacaggagaagaaaaacaagggtattggtgctttgggttttgtgctttgatctctaagaaaatgcaaagcttgactaactccttcaataattgtgctagattgactgagttgattatattaaaaggagtggaaattgtagttttagatgtttagttgtgtgctttttaagaaaatgaaaagcaacgaactcagccaatagttttgcctgatttaatggcttggaaagggaattctggttttagatgtttcattgtttgggtttttaggaaattaaaaaggttgattgattcagcaaataattgtactggatttaattgagttgattatttcagaaagagaagaaacttgtagttctagataaagctcaactttactcggcaaataattgtactaggttaggttaattggttatttcaaagttcatgaacaaaaaaatggaaaacacaacattatatttttctggaaatctgaaccagttattaggaaattctgttgacattgaagggaattcgattgggtcattgaaaagattgagaagtgtggggtttctcaaaatttggtcgtaaatttggctaatccaatgtactgcgaatgagaattttgatttcaattcatgaattcaaaacctctttctatgataactgtaatgttttaatttatgtgttcttatttgtttactacaaatagatttcagttgcaagaatatggcttgtaaattgcatatttcaagtctggaatttgaggcttgcaagtcgatgatcatgtgttatacatctaggtatatgtaaaattttgggatggattagagctagtatatcttctaattataattttgtttccaaagaaaatgaatgggtgctataatgtctatactggtgaaagaatacttcaattggatctggcttgtcaaatggaaggtgcaattgtagttattaggcttctgatttaaaaaaaaaaaatacatatatatatatataattgtagttattaggcttgcctgtgattttagatggtacctgcatcatgtctccacctgaaggaattcaagtttgtctacttattattgtgtataataattttttcatggaattgaatgttaacatggtttattcttgtgtgtgcatgcatgttggaagaattttttgttgtggttgagcattgagattaggagttaggccttttcaggagttaaacatcttacaatgttcctgtctttttcattttggcatatggaatttcttgcagggtgttgacttgggagg

SEQ ID NO: 11273 - DNA, 6233 bp, Vitis vinifera
  Intron number 1 from transcript GSVIVT01011046001 (locus G SVIVG01011046001) derived from phytozome v7.0 (chr-ID chr7 ; pos 1987297 to 1993529 reverse strand)
tgggctttgttggtgggctcccaagacactgacttgtgggcttaagtttgtttttgtgggccttaagcccttttcttttagcttgggccggatggcccaaggctttttttaatgaatgtagcccaaagctcttttaaagaatggacgtgggcttatggacgtgggcttggtgtaaatagagcccaaagctcttttaatgaatggacttgggcttgatggagatggagcccaaggctctttaaatgaatggacatgggcttcttttaatgaatggacatgggcttgatggagatggagcccaaagcactttcaaaatcttattattattattcttattatcattattattattaattcaaactctcaaaattttatcatcattattattattaattcaactttcaaaatcttattattattaattcacactttcaaaatcttattattattattattattatcaattcaaactttcaaaatcttattatcattattattacaaattcaactttcaaaagtctatgttctcgcagttcaatttccaaaaagtctgccttcaaatgattttcgagacttccaattttcataaatcaactttcataattcctacttctcaaataacttacgattcttatatctttcaaaattcaactctcataatcccaattttcgtaacttaattttttttaagatcccgaaccctcaaatcattttcaaaatttcaacctctttcaaattcgatttctaaaattcacattctcacaattcaacctctaagagtctgatcttcaaataaactctaaaactccaattttctagtgatcttcaagattccaaattttcaattaaatttcaaaagtccaattttctctcaaatagttttaattccgctctagttttcaaatgatcttccactcttcttgattttaataagcgtgaacgaatttttcataatttcagaacaatggaatttgtgagattaagtcatgctaaataaacgggctttagtgggggcccaacatgggtgactttatgattgattgatcgactgattgatttaattgtcatgcatgattgactttattttgctctatgacatgctcgaaattattccttaattgtgcactaacctcacttcttgatagcgcatattggttcgccacccaggtacgtatttactcacccgctcgggtcattttctgtacgcatgtttagattctaacatgtgcatgatcattctgagtattcattgattccctcatcaattaccatgattgcttcattttattagtagagacccgactttagggacttagaggggtgttacggtctttaccgtaccttcccgataagtaacctgacccccgaacccgatccggttttcatagaccgcctttttcaaaataaggagtcacacttagggttttctttcttattttgtttaccctttaaaaaataaaacaaaaataagtggcgactccaagtcattttttttaaccaattaaatcatttttcaaataaaattcgagctcgccatcgagtgggaaacgcatgagccgaaatgcggggtccacaatcacctattttagtttattttaattcttcaaaacaaaattttaatgtaaatataaataaaatcaatcacctaaatgaatacaagataagatataacacatgaaaaaactacctagcaacctactaggtgtaaaataccatactaaataatctactaaatataagaaaaatgcatacagttttacttgatcagatgcactactccttggagttttataccgttaatacctacgtccctaacacaacactcttctatgcttcttagtggaatttttgaaactcttatcatagtttcatgatgagatctcttatatttgttgtaattaaaatgtaatctcaataaagattttgaaagtttgagagctggaggattaagtttttttataaatggttatgttctctatgggtttagaaaaatccactccttctaaatagaatatatctatttatacttataaaactctttttagaattatggagagttttctaattttaaaatagtccaaattttatttttaaaatcaaataccaatttagagataatcataattttaaaacctactaaaaaaatttcaaaaatcaaacactaatttagagataaaaatgatcaaaaataaattttaaaattaaaaatatagtaaaattcacattaggaaataacaagtattcctttcctattttttttttttttgtattagttattctaaaagttcttccaaccataagtacaaacttaccttaaaatttacaactctgaataatccaaatccaaatttcataaatttctaagttgcaaaaaaataaattacatccgttggtaagaaatgaacaaagttacccactaaataaaatactaaattgtgtgaaaagtatcctatagttacacgttgaatattaattaaacatgagtggtaaattaattaatattattaaattctattgtctatgtcatagtggggtggtgcatggtgatgaccctttccacgtaaatgtttcatacacgttttccaattttaaaatattagtcaaatcttagtgtttaaaacgtggtatttaaattatttttatttttatttaataattaagataaaattttatatgttgtcaccaatgagggctccatgcctaattaatttggccttattaggaggaagaaaaagggaaaaggatttatataagacggcataaaataattaaatcattgaccaacctagcatttcatatgtataaataaattaatgaacttaaatttagcttatggattcaatgccattattattattattattattattctttaggagcataatggaaatgagaaatgagtttaagttcaaaatagtgttttggaagaaaaaaaaaaagaaaaaaataaataaatctcttttcaaaacatttaccaatccggtctttataatcatgtaatcatttatgtgatttttttttttagtgtaaaaaatcacaatttatgattatgattttaactttaaatttaaaaccatagttactaatgatagtttttatagattgtggttttaaaataataataataataataataaagtggaacttaatgttgtacgaacgcattgctttgacaaatatttttaatctaagtttagattgataatttttgtttaaaaacaagatactttcatcagaaacttcatatatttttactatttttttttcaaaattttgttcaacttggtggaagttcaatatttagacttttttagacgttatcacattatgggagttgatcatctttcattaccatcattgcaacggtggaagtagaatggttgttttttttattaatatttaaaaagaaaaaaaaaacttagaagggcataatgtaatttttttttaattttttaattattttattttattttatgtagatgaggtagttggggtgggaccaataagtaaagaaggaaaaagattgaggattggttttgagtcttaagaccaatttgaagtgttgcatggccccatgcatataatcgactaaaaattggtagttgccatatttttagttagttacctaacaatcttcaaaccaattattctcaagatggcttctaagggaattcaaatttgaagttgggtcatcaattttcataagttgtctaagcttatggtcatgccctcaaaaggagggtcaacaattcaaatgcatctagggaccaagtagatccccaaatgtgtattgagataaaaataagtgaaaaatatatgtttatttaaaaaattaaatataattaaaattaattaaaatcatacgtttttaaattatttaatttttatataaaggagaaaaattaataaaatatgtttgaaaaacatataaaaataatatattaacttaatttaaaataaaaaattctattttttttctacttattttccttatatttttttctcaaatatttgaaaaaaccaaacataggataaaataccaaggaaactagtcatgataaattactttctcaaaagcttattgaagatgtgaaaagaaggaaaaaaaaaacgttcaaaaaaaatgaaagtgcttttagaccaacctgatggcaagagctaagaaagaaaaagtgttgaggaattgacgaatcaaagttattattttgtttttgaagatgataaacttttgagtggagaaaagaaaaagattccaagtgggtgttttttaatatgcacgatattcacgtaattttaagggtacgtttggctgctaaaaaagtaataaggaaagaataaaaaagttatgattttcttatttttatataatagaagaaactaagtgaaatgggtttgaagaaagatataaaaataatttatcaatttcaaatctattttttttctttccatttttcattttttttcttatttctttttcattttttttctcaattttttttgggagcccaacataatctaagtgtttttagtaaaagtattttatttgaaagtatctttaataaatttatctatcaatttcgtaatgattttaggaagcgtttttaatatttttaacacttagagtatgtttggtagtgattgtaggacctctcataaaatgaattgttgttaagaaagacgcatactctaatcttaaacacttagagtatgtttggtagtaattgtaggacctctcttaaaaggaattgttgttaggaaaaacgcattcacccaagtatccacagtgaacataagaggagttgatggatgcggccaatttttcgatctaccaacaatctttttcccaacgacacccttggggttcgaacccataacatcgacttggacctcaggtgttatcaactctcctaaaagcaattgctattagaaaaggcgcatactctaaccttataatgcattcacccaagcgcccacggtgaacacaaggggagttaatagacacagccaactctccgatctgtcaacaatgattttaggaaatgttttttaatctttctaatacttgaaaaataaaaattttcaagtattagaaatagtagaaacaatttttaaaatcactgttaaacgtactcttaaaatattttatatttccaaatattagaaaaattaaaaatgcttcctaaaatcactatcaacacgtttcatgtgttttttttagaaaacactacaagtgattttccaacactacaaataatttttaaaaattttaaaattgtttcataaattttaaatatcttaaacatgtttccacttttaaaatgtactttaaatatatttatttatttatctatagtactttatttttaatcattcattatatttatataattattttttaaaataagaaaataattaaaaactattaaaacatttttcttgaaaatacttttttttaaagaaaaaaaatcattttctagttgctaaagctttgcttgagaaatatttcaaaaacaattatgaaaaacaatttttaaaaaccgtttttttttatgttttgtaaaagagaaatctggttaaaaacctgaaatacttttaaaatgatttctttatttttaattatattttaaaaataattcttcatatttaattattttttaaaatagtcattaaaacgcacctctttttggcaagcactaaatttgattgaagaaggctttcgaaagtttccaagtgtcccctaacattttttgaaaatttgagaatctattgcgctcaataagaatatcccggtccgaccgacgggcagccgctacagagtcacacatttaatttgcttctttagttggcaaatctattgttctagaagaaaccaatccacaataaaattgaagaaaattctaaggtgctgattcaagaagaacctacccactaccaatcaattattttcggaactgttgaagacctctcctgcccaaagctaccctcaaactgatttcctggaagctgcctgagagggcaaagggtgtcaacactggcttgctgggcttcccaacaaacacctcatctgcaagactgcaattttgctttagcaatgctcatcatcctacccaccaccaaaccctagcatttttcacctctctcgcctcttctcaatgtccctcctccaccccttcttcctcttctccctcttatttttagccttttccttctcctccgcccaatacaacctggct

SEQ ID NO: 11274 - DNA, 7169 bp, Vitis vinifera
  Intron number 4 from transcript GSVIVT01000120001 (locus G SVIVG01000120001) derived from phytozome v7.0 (chr-ID chr7 ; pos 15408127 to 15415295 reverse strand)
gagtactgtctcctctctcggaagggatcttcaatgaaactccaactccaagaactaagaagaatctccgcgcaaggctgatgaagggattaaaaagcgcatttcgggtatctactaatacttctgcatcaaaaggcaacaacattgatggtaaaacatcaagcgggatggatggagatgaagcaggagatgatgaagaagttggaaacgaacaagtaattgttatgaaagagagtccaccttctcacaggaggagcagctcctttgtgtaaaacacagattttctatatgtaggtgtgataagttgatcttatatattgttctctcactgctctcataggcttaccaaccccatagcaaaaaaggcattgtctgctaaccagatatgaaattgagttgatgaataatttgaaatttgaatagaagatgaaggttgatagccattaggcatgcattaaggaaaaaaaaaaagagttaacttcatttacccttgaaactttgactaatcataattaaagtgtgcttgataatgactttagaaaaagtttgtataaaaattttgggtttaatacactttactctcaaaacctattggtgttttggttactcatgtttaaaatcgaacatgatgcactcgagcttcttaaatatcatcactttgcctttttcattgctcaatattagtttcaatggatgaaaatgtctcatgttgtacatgttaattgactaattaaagatagatttgtaaattcctaaatccaaaaagccccaaatagctctccctcccttgttcgtgttcattctttctccagagctctaaccctcgaaaccctagaagcccttaataactaatgcagacattaaaggacccagagttcaatatgacataacaatttttataatttttgtacttatactattatatggaacattttttattttttatttttcagttttttaaaaaaatagtgtcagattctaatgatatcatgcaccatttttacaaagataggcaaagacattttctatttcttgttaataatgtgtctgtcatttatcatctcaattttcgcataaatctagaataaagttttaattaatcgctacaacatgaagttgacttgaacccgcctaaattctccaaattggtggaggctgaattgagattacaacaggcgtgatgataattttgtcacccgtgacaaattattttgaaaacaatattaattttaacatatttgatttgaaaatctcattaattaggcaaattatgttaatatgcccaatttataaaatatgaataaaaagaataccttaaaaattaattttaatggagaatgcatttagggaaaaataattctcacttcacgttcttgaataatgtctaccttatattattcgaaaatgcccttttatgtattttagttttaaagtaacattattttgagtttaaaatacatttgttggttgaataatttattatcttcacgtgagttagaccggtaatgagggacaattcatatatatatatatatatatatatatatatatatataaagacattttcaagtaatgtgaagtaaacactattccgatgcatgaaataattaaaaattattttccccaaaatatactccccatgaaaatgacttttttgagtttccttttcattcatattttataaataatgcatatttatataattccccttaaattttattgtatttgaattagatataatcgtatttgtatcataataatgttaatgcatataatcggtttaataaatagattgtgtataagtttaattgcccaatctacctaacttatttaatcaatttatttaatcaagtgaacatgatttgctaaaagttcatttaattcatataaatttattcattatataaatataaatataaattaaatatttataattataaatattatatatttaaaaaattagactactaattagagtaaaattttatatatttcattaatataaaatattagaaatattttatgtttaaaatattaaataaaattataagcaagtgtaaactaatttattttctatgttagaaatatattataattgaaaattaaataattaagaggtcaatggactttttttttcttttgtgttttttaaaacataaaattaaagtaaagaaagaattctttcaagcttaccttaaaattgttttaaaaaataaaggtattaaaaaatttattacctcaaattttaaaaattttaaaagtgatttttaagtatatggataagttcatattttttatatataaacttaccatttcttatatagaaattactactatttttatttatttatttacataaaaaataaaaattactattagtttttatttttaaaaacaaaaaatagaaaaagtccattcatacgaaaataaaagttaaaaaccactaaaaaatatcttaaaaatagtatttttataaatttaaaaatcttaaagaggttaaacgtgtgttataatcatattaataaattcaagtaatgctaactaattatttgtgtatgacaatctaaaatcttacatggtggaactacctaaaagggtggtgaatagttagtcctttaatatatgtcaaaaatttcaagttctattgctaggatataattaatcaataaaagtaaagaatattcaatcccacaaaagacataatatttatacgaaaaccactcacaaaaccttttagagactttgtaaatgtaaaaatcataaggttagccaactgcaaagttaaatccatttaatatgaagaaataagtacacaattttaccttaggtgctctttattggattcctcaataactcaaggagatgcaatcttgctaccataaactcaacgaattttgatttttctttgtaagactgttgggtcaagtgagtgatgacctaaagcttaggcgcatccatgtgaaattgtatcatataagacatatatatacatgataaaacctaatggtcttagacatgatttaaaaaccttattttgtcaaaaaagagagttaagaaaactagaagaactttagaatctagtaactttgggtaaatccattataaagcaagactaattaaagaaaacatcaaagaaaaaggggcaaattgagccattgaaaacttataaaaaactattcaaattaaacaatagttgaagtaaataagtaaatagtaatgggaagagagatgcaaatgtccccctacgtccactcttctcaatcttcttttcgagtgagggttccactagctaagactttaaaccacactttcacttttgtatgcttgaattcatgactccaatgaacactacacccctttcaagttcaataataacttgaagttttgaccacttaatatttgattgataaatgaagtcttacaactctgaatcctagcacaagttcagttcaatataagaaaaaactaggataaaataagacagtgcattaaatggatttgcaagtgaaagaataaatacacttgaattgagagttttgcatgagagaaaatggtaggtaaacatgctaatataagtgtcatttactcaataaatacatataagctctccaatttatatgtttgaggttaagagaaaacaaccttaagacacttgaaattgcaaaaatatgtttggaccagttgagttttgatgggaatgattaactagtcattagagcatttaatatataataggtgatcatttgtcctttttaaggttcgatcgacccttgaccaagaaagctagaagctctactagtagcactaaggttttggaagagagaaaatattttaaacatacttgttcggttcttgacttggaaaacttaacctatttaattaattcctaattgattcgattcgtttagggtttccttgattgattgagcttaaaacaacgcaaaaatgtttttttttagtcttaactttccaataacttaagcaaaaatgtttttgtagggtatttttgaaagatttaaactaaggtttcaatatgaaaagcatatccatttaattttaaacatttaagcttcttttttaagaaaaactaaccataaatgaatgtgttgcaagtgcttgaaaaataatttaatcctaaatgcactcaaaagatttattttacaaaagttcctataccttatgaattttcacaaatccatctctttccgtcttctcttcttgtcttttgaatcccttcaaggtatactttaagaagtcatcaatgaaacttagaactttacttgatttgaattatttgcaagtctaacctttattttgtaattatcaacacttaattaggagaaaccttggactaacatctactattaagtattggagctccatttaagaccatttaagcactctgatataatttttcatttttcaactctagttaccctatttttttcctttatatagatttttaattaaaattatcttctatattaatttattttttatttttgtataagtctactctataccttttaagtcattattttcaattaattcagtcacacttattcatataatcccaagttaattttggtgcaaccttgagtctttgtagatagtgtaaattagatgaaaatatgtaaattccaaaactacaatgaataaaacaaaattgtccacataattaaacaatatcaatgtcaatcaactcaattcatttattaaatattaaatgaatcatatttggattgagttagattttcagtatttcttacccccattaaattcaagaagataaagataaaaactaaaagttattgagattaaaataatcattaatttttctttaattttctttgttttcttactatttccttttctttaaaatttttgtcatcccaacgaagtcttcaaaaaaaagttatcaaatgtaaaagtacaatgtcaaaacatcaagaaatagagtaaatataaaaataaaaaaataaaaattcaaagttttgataaataaaagccattttaaaataatattttatgtttactattaactcatgttaaatcggagttgcagtcaattttttttaaatatttaatattatagaattttattaaacataaaataatttttgtacctaaattaaaataagatatttaaaatatatattttttatatttatattcaattattatttaagttacaagttttttttttctttcataaaattactaaaacagaaaaaaaagaaaaaaaggaataaattactgattagcgggcgccatgtcagctttcactataatttcaccttcatctgttttcaactcacctaccctaaaaaattaggtattatcatccttccatatacaagtggcaaccacgtgtgtcatatcagaaattaaagtgacacttaataaatatttttaaaattttttaattatataatatattaagttagtagattcttactatattctaacttttctaacatatccacctaacttaacttttataattttgtaacacttacctgccagctcatcatgaacatcgcgttggaacccgtgcaattatttgtgttgtcaataacttttattagaataatattttatttcatccaactcattaatcgatataacaataggtccgtagttataaatataataagctaatcaaacttaaacagtccgtgtaggaacccatgcaataattttgattaaaataatattttatttatctgctcttttgttttataatttcattttgacattcgaacttataatgtctgtgattatcatatttaaggaattccatatgggatttgtcttaaaattgggagtgttatcttggaaaaaatttccttttaatgtattttttaattttttaggattaattgattaaaatggatgaaaagatctcaaatttataaaactaatttcttatgtttttgaatttgaagtataactcaattttgacataaatactcttcaatatttctattattatttattaacatgtgttttaaagtaaaaggttatttttgtaagaaaaagttgaggatatttttgtccaaaatggattttttttttattgaaaaaaagtgaaatgttagttttataaagaagcactccttaatgacataagaatcttgaatagataataattcctaatattttttaaattcccattttttaatttttaactttaagccaaattaatacatatatattttttaacaaataggatattttttctctccttttatggggttgggtaaattataagggtaattttgtaacatatttaaagaaaactaaaaattccttttaaacttaggggattgatagacaaatatgactctcttgctttaaaagaaactaaaaaattattatataaccaaataagtctcattagtttatatagtataaatagttttattattttatatttaaattaatttctttgtctataaaaactaaaactcattttttataccttaatattatttttatatttttatatcattattcatttgtattagaatttgtaataagaaatatgttaaaagacattttaggggtggaggaatttgttcagaaatgatgtggttggtaatatctttttaataggtatttaaaaaatacattttgatattgtaattatactctttcatttgtaataatactgatttttcaatatttttcaataatactgattgatatgctcaaccaaacaggcgtttagcatcacgctccacaaaacgcgtggtagtcattgaggcaaggtctcattcaaaaatagttcgccatgttgtaacctccggaatgcctccttgaattcagtggaaacttttcgtggaagcgaaattggaattaaggatggaggagagatgagaaatcgaatttgccacccaccgttcttcttcaatcccgttgtagaagcgttccgtcggtttcagcagctccaattttataaccgaaaaccgttatcgcaaaaaatctcagtccgctttgccattacccgctataaatgggctgctatatcttagagcatctttttttacatattccgctttgagtttcgttctttctttctttctcctattgactcggaaagatggctgtgattggcgcggccccgtggaggttctgttcgttctcggattctaaacttggatttt

SEQ ID NO: 11275 - DNA, 4935 bp, Vitis vinifera
  Intron number 4 from transcript GSVIVT01010766001 (locus G SVIVG01010766001) derived from phytozome v7.0 (chr-ID chr5 ; pos 22401876 to 22406810)
tggccaagtacgctattgagagaaacaaggagagaaaattggctgctttgtaaagaaaacttcacagagacaactgcattggatccatatctgcatatatatacagaaattttcaattgagagctgtctctttgttgttgttgttgttcatcacgcggagtgggttgttgtctttggccgaaacgcgttgttattatttttgttgggttgtggggccggttgaaattatgtacctgcgtgtgctgtaacgaatttttaaaagtggggagagagaaatacgaccgttgataacggatcttatgattaaagcaggagagagacgttggggagtgggaaacgcgccaaaagttaggaagagggccggcggatgatggtgaccgttggattgctcttttctcaacggcaggatttgtggggcggtgaccttggccggctttgaattaatctcttgttgatgatgcccgttgggggatttaatatgaagagtcgcctcttttactattttagacatacctttagacttggtaaagcttcaatgtcaatgagattgggctataatttataccaaaatgaggatattttacttctcgaaagttgaagttgaaagtgtcttcatagggataatattggtattataaaaaatttcgtaaatattctcataaaacatgaaatttaatgatatgcttttataaaaatgttgttagtctatgatgtatttatggacaatacttttataaaaaatgttaagttgtattatgaggcattgattaattaattctttaaattttaaaatatgatttttaaaattttattaaatatcctcattgttttaagcaaaactataatcatttaaattttattgagaactattttttagaacggttttaacaataaaaaactgttttgtattttttattcttaaaaatagaaaataaataatatactttaattattattattattttttatttgttttctaaggactatttcaagatataattatactcgaatatgcaaaatgattaaaaataaaatgctagatataaaaattattttaaaaacatatttaaaaatattaaaaaatggattaaaaacattttaggtttccaaacaaacatctattctacaaaaattagagaacaattttcaaaaattgttctcaaaaactatttttaaaaacaattaccaaacaaaccattagtaactattttttaaaatagttttttttaattctttagaataaataaacaagaaacatgcttgacaatttaaaaatgaaaaacaattttttatttttaaaataaaaaataaaatattttacaatattatcttcacttatttttaaaaactattttaaaaataattatataaatataaaaaataataataaataaaatatcatatataaaaacattttaagttttcaaataaactcatcaaaattagttttaaaaattttctattaatttcaataaatattttttaaaataccttccaaaagtgggtgataaattttcttgaactttttcaaaagtcaccatgacatgaatattttgggcaaccaaaccctagacagctcatttccagtactgaacttcaacaatgatttcaggcattcaaatttagggtttctgccccaccaaagcgttagaaaaagcctctaaaagtcgttgaaaggccaactctaataccctacttggctacttgagatgctttactctttttctcttttatgatttttgatttatattcatacgttacaactgtcacataccaccctttttgaattgatttttccttcctttttttttttttttaaaaaaaggtagatgatttattttaacatatgggtctacatagcttttaacttatgtgtttagtaatagaagaagtggaattataaataatttagattgttttatgcttaaaaactatattttaaaattacttttattaaatctaagaataatttaaatatttttaatttttttaattaaaaatatagtttgtttctttcattatctttgagaaaaatatcaaggttttgtttgaaaatgttttaaaaagcaattctaaaaaactaatttttggaaacaaatctaaaatttataaaatgaaaatatgttattattccctagatacacatatggggatattttatttcacaatcgaatcaattttaatttaaaaaaaaaaacctaaagttagggatttatcgataggtaatgttgctccaatacccaaccaaagggtcattgtagtaccaatataaaaaacggttgtcgttgttggacgaaaaaatggattttagaatttattaacagacgtcttcccctgatattcttaaatattttatatatatattaaaataaatgaaaataattaaaaacaagtcaaatatattctcttaaaaatatcttatttattttttaaaaaataaaagactatttttgttttctgattgtcaaatatattttcaaaaaatatcgataaattatataagaaaatatctaacccacgagtagatgttatatttgaacatcttaaaagttatatttaatcttcaaatgatatttttcaaattttaaagggatttcttaagtggggttagatggagcaaagaattactttaataaacatatttatagttttaaaaatagtttaaaacataaagactttttttttttttgaaaaaaaaaatagtcctattcaatctaaggggagtccacattggaaaccaatagagggctcttggattggtgctcatcaacttgatattatcttgtccacaaaataatgatctctttgattccaccactcaagatttatgccccattagtatcacttcatgaattctacatccttcaacaatactcatttatagattttttatttttatttttattttgtttcatttttaaaataatttagacttaatatattttttaaaatcaaatatcaaattacatacttgcatttgtcccacaacctaaatttttgaaattaaactattaaagatatggcttttgcatttagcaatggaaggaagtaaaaaataattttctcatatttagtttttctatgaaaaaaaatcaaatataattaaatcagttaaaattttatatattttaaaattatttactctttataaaaaaagaaaaaaaatgttaaaaaaatagaagaatatatgaaatgagtttgaaataatatataaaaatactaaaattatattttatttccttctttctactttttctttttattttctttccctcctattttttttcctcaaattttccaacattcaaacaaaatctaaataaattataaaattaattgattaaaagggatgacatgatccctctaaatctaactcttcccgtatttttatttaaaaaataactcatttttaacataaatgtctgttaccgtttcaagtatttacatataggagtttaaaagaaaattatttttataagaatataataaaggcattttggattaaattttaaatttgggtttttaatgacgttttaataaataaaaaaaaactctatattatattcccatgacttatgggcaaaaagagggatcacttttcagaggacacactcacatacccacatggggttagattcttcattgactacaacacatagggaccaaattttccttccatctaggccaacttgaatttagataatggtgccatttttcctttttctattgaaggtaggatagaataattttttttaaataaaaaaataaaaaaataaaaaaataaaaattagggtacatatgaatgatagtgtaaggttgactaagcaagttggtgccccataatgaagggacaagttttagggtagtgtttggtattatatttacaactggccatacatttaggaaacacaactgtctccctcttttttttttgttttattttagtttatttatttatttatttttctcaattgtgaataaatggtggtggtggtgggtcacatgtttgaaaccctagatctttaaactcttttagtttcctttattttcgtttgtatggttaggtatgaataacattatgggagagatgtcaacagcttgacagcttttattattattattatttattattgaatacaaaaaaaaagttttgagtcattaaaaaaaaaaaaaaagtaattggtatttaatattttttttcttgtttaagcgagagtcaagttcaagtacttggatcgtcgaggtgatcagattccaaattggttgagatcccgctttctattgataacgaagttatcgttttctcgaggttgagctttcaaagcgggattgtccattcatattttatcaatttaaaatttaaagataaataaaatcattttttaatttacaaaatattaaggaaaaattttaactattacataaatgaattttaaaatttcctttttaaggaaataatttattattttatttatttttatactgaactatttttcataccatatcaatgaagtaatataatataacaaagatactaatacttcaataataaattaggacttttaaattaattacgcaaaagcattatagattaaaaatgctttaatcataattattctcaaacgggcttttaatagtcgaaactaagaaagtgacctctcatctatataagtcacgattgattgtcatgcactttagtataaaaaaagatgatcactcaatttatcttattctacgatcttttcaatcagaagatagaaaacatttctttcaacctaccataaatggacattcacattagtatgcattgtagaagctttggaatccatcacatgggtaagtgtttgccctaaatttccaccatgtcctaatatgaaaatgtagccattcaatcttgttagcatggtaaatttttaaggaaccaaaaaaaaaaaa

SEQ ID NO: 11276 - DNA, 8148 bp, Vitis vinifera
  Intron number 2 from transcript GSVIVT01004128001 (locus G SVIVG01004128001) derived from phytozome v7.0 (chr-ID chrU n; pos 15121140 to 15129287 reverse strand)
caggaaccgttctctcaacaggcgcaaatctggaggtatgtttatgtttatctgtgaatctgtgattttcattcgcatgattcggaggtggaaagaaagacggtttagggttgtgtgaatttttgcatctttattctcaaattccatttcccacattggttccttcgttattatttgactcagcacctttactctctttatggtttctgcgttatgatttttcgttttttctctggtaattcctcagtgtgtatgtgttcttgatgaccacttatatttaaattacgcgatttcaatctttttatgcgcgctttgatttccaattttgttgtttctcttgtcttgtcacccatcaatcttagaatcttgcttaagctggctaagaacgttttctcttaattttttattgtttttattttatttttagtttataatattacattgaatagattttcacaagaaatagaaagggcctttcaatatattaatacatttcaaactctaaaaaacttagctttattgataaggaaatgcttcaggtattctccctcgctttgtcctgactatatttttattggtaacgttcttgttaatgcctcctagacattattcatcaatcttgtcttgtgtttagtggtcttatcatggacacacaaacacatgcctatccttgatttattacagcataaattgaaagatattcttgaatttatcgatcaatacaacttatgatatcaaaaaattgtcttcaatcttcaattattagaaaatgaaaatagatctcaaagaagatagattcaattttatggttaagcatttagtcagtttgttcatttcttttgtgggttaatattaagaataatcttaggttatctcaacaacaaacttcagaaaagaatgcctagaggggtataatcttaaggtatacaagcaacaagcaaagtaaaagggaaacacaaaaacaatattattgaaatccatgagacattaaaacttccccccaaactataaatgaaatatatagaagataatcttccctccccataaggaggtgtcaaccatggaaacttattttttaaaacatatcgttcattttcagcttcattatctccaaaccttcaaagattttggaagttatctgcttctagaagcaccaagagaaacatagaggggtcattatccacacaactctcctcgtttactttaggttcttcttgtgctagctagcaaaagctcatttgaagacctaggcaaaagtcaagtaaacggtaaacccaaacatgcctaacattgaaggtcgacaccatcttactctcaaactaaagcaagtcaacgacaattcactagaatcctctttctcattagctagttaatagctgagatgttcttttttaataggcaaacaaccaatatgttaaaagtgcttagcaaataggtgcggtaaagtatacatggtatatggtcaatagctaagatcttctcccccatcaacattcaaatgaagaaactaaaattttttaatgaactcaacttccaacatcttctactctcctcattttccaatggttcactacatttcttttttgttaaatgcaattctgaacatgtccttttagctatccttaagaaacgtttccctattttgggtctttagttgaaaattagccatctactcattccctaataaaatctatgctgacttccaaaaattatatcatcctttgctagtgaatctcaaaatcaccactaagttccttaatgaagccctattaagggaatccaagttagtaacaccaaaaccaccatcttccttggaaaaaggatgactttccatatgactagactaatctttccttgaagtgttccatactctttttttggtaggtccttgaagtgttccataatgagtttcacattgctcttgccttggaggaaacacctaatggcaagctgataacatttggtgaaatttagttaagagtcttaaatttggataataatggtgagtgatgattctaatgactaagtagcatatgctcttctaactagaagccatattgatgccacacgacaatgctcctcaacaagctatggcttgtcttggacttgctagcaatttaaaaataaattcatttgcaattggagatatggccacacatccatttgaaatgggtttaatagacaacattgatacatggttgcctcgttttaatttggaaaaaagatataattgcgaaggataatatgataaaagagaaggatgatatagttactaaccatgtatgaatatgtaattgaatattatttagaagtctatttttacttattttagaactctttgtattatttttgtatatctaatcgtattcatattattgtttgtgtccatgctacatgaggtgatggatataactttaggtaattggttatgaaggttatgatttaattgggcacatttgagagactaccgatattagtgacagaaaagaggtccaaattacaataatcaagattaccactctatgggatgattggaatgtgaaaagtatcaagaaaattggacaactttcagagggctattatcattgaaatgcaaagcatgatagtaaaatactggtaatgccaactgatcttgaaaaggtggctaatgataaatcaatgtgattgacaatgattgaagtctctaaaatactaagtaaacctatacaatagtaaagcaccgcatggaaatatgcaaaaaacaattcattgctccaatgttagaatcattttctttccaaataagacctaaagtgcctaccacttgccatcgccaatcttttgcaaaaatatggggtgagacacaaagtgtctacccccttaccatcctttgactaatgggcaagctaaactagcaaatagtgaaataaagtggatcctcatgaaaatggtcaacgtgacaagaaaagattggtctggtgatacactttaggcatagaggacaacttgcaaaaccaaggatggaaatatcgattttcatggatttatcggtagctggattttatggttatacatatatatatatatttcttttgatagataaacacatagaaaaaatatattaagagataagggcgcctaaagggcaacccaaagcatacagggagtataccaaaggtgcctaaaggcaagaacaaaaagaaaaggggatgcaaaaaactcaccaaccctcatctaaaacccaaccaataaaaaaagttgattaaaggtaaaggtcttacctctatacatggcttagaccaagaccaacgattacatacaaaagaatatttcatcctttgaatcgagagatcctcattttcaaaagctatcctatttctttccttccaaatcgaccaaaataaacaaagaggagttgccatccaagcctttctacgcttcttgcgcacaaaggatccatgccaacctaaaaaggtatctctagctaaaaggggaaggatccacatcacaccaaacagcgcaaaaacaagctcccacaagaccctagccttggaacaatgaataagaatgtgattaatcgattccttttcggtacaacaaaggaaacatctgttagctatgggccaccccccccttttgagttgatccaaggttagaacctttccccacaatgcttcccaagcaaagaaacccaccttagtgggaacacaagggctccaaataatgttccacggaaacgtgactgcacttttaggttcaagagcactatgaagggatttgacagaaaaaatcttgtccttagtctctttccaaagcaccctatcctctaagtcaatgactagcctctttccttgtaaagtcaaaaggaacctctccacttcctccacctcccaatcattgaaagatctagagaaccggggatttcaaccccccttttcccccaaaaaatcccaacaatccgctacccacgcatcttttgaaaccactaaatcatacaaagaaggaaaataatcgctaagggattgtccccgtaacatttgtccttccaaaatctcactcttctaccatctcccatagaaaatacaatatttttaaacattcgggacccttccttcctaatttccttccataaccccaccccatagccctcccttacttcacgggtacaccaacctccttcttccaccccaaacttcctactaatgacaagcctccacaaagactctatttcaaccacaaaacgccaactccacttgcacaaaagggccctattgagagtagaaagatttcttacacccaaaccaccctttttatccgaataaacaattgcgtacttcacaagataagactttttctccaaagctcccccaccccaaagaaagtccctttgaatttgctctaatctcaatctcacaactcttggcatacgcatcaaagacatgagaatggatatataaggaaatatctataaggaaacatatgtattattgttttttctatcattttttttggagccttctctaacatttctgagttttgatcaattttcatttcatcgacatttttttacaaaattttcatcgatatttccttatatatcctttttttactccaaaaaaaaagaaacaaaatgatagaaaaaacaataatacatatgttgaagttgttcaaggaagaaattgatacatgtataataaaatttataacaataggcaataatattccaattttgaaaacgcattatcctaaaatgataatgtatttagtttggatatattgaaggatataaaagaaatgctgatttatataagtatttttattttaaaatgttgataattttatttatcttgtatttaattactatacaaaagacataataagataattaaaattaacttagttacaataatttaattttaattaatttgcaatttataatatataaaagatatttataatatataattccatgtttgtttataacatcaaagcatatttggtacactaatggctaaggccgtacttttcctatgtaaggaccttggttcaatccttggtcttgtcacttgtgtgtgtttaagtgtttttttcttagctttaaggaaaagaatcccacaatataaaggcaaaacaaaacaatgccttatttataaggtggtaccctatatgccattattaaaaggaacattgagttttggatgcaactcttcattatagaacttaggttgatcccaatccaccaaagatcctaaaaaccctaagatcactacaattgagaaacccttgtttactttgatttatactccctaagttggattgtggagccccacattaaatcaattgaagtagaaatctttaactaattttgttagttaattagtttttatttaagttaatcataatttattaacatcaatttgattaatattttcgctgtaggatttagataaaagcaattattttacctaacattgataactttcatagccagtcactgagaacaatacctagaatactacaatagttgtggtaatcctttctttgttttttcttaaccaagattgccacataactaggctataggattttgggacaacatagaactgcaatcaatccccattaacaaggaatgaaaatttggttgaggagctgcactattttatccatcctatccacttttagacaatgctcattctttccattatagcaataaagatattccaattaacatggtcattggttagaggtcttttcaatgccaaacttacaaaaaacgcctcttgtcaaactcttcaatctttagtctatgggctcacttgtagtaagaactgcatctaagatctgtctcccttcccctctaaaaaggcaagttaagagtcatacacaacctttcccacaaccttcttaattttattagccaacacctttgctaaaatcttatacaaacctcctaccaaactgatgggtctaaaatcctatcttatttccatttttcttagggattaacagtataaatgtggcatttagacttctttcaaagatgtttcgctcataaaactctttgaacataccaaacactttgtgtttcacaaaattccaacattgttgccaaaagccaaataaaagccatctagcccatggggtttatcctcacacaagatggataaatccaataaaacctcctcttcaaattatggatcctctagtgtccgtgaatcatcgcttctcaaggacttaaaagataatcccttgattctaggatgccaatcccctaataggcattagacatcccttccttcatatttgactatttggttacgaacattcttcaccctaactttggccatatggttctttctcattcatgcattagccatcttatgaaaaaagctagtattcttatccctgtctttcagccatagtactctggatttttgtctctaataggtttctttcaacatggcccacttattgtaatcatccaaagcctcttatctagcctcaacctcatcagcaaaaaggatcctttccctcttcttcacatcccaataactgatttgattgagggcgcttactcttctaatagcaacgttcctaaatacttctttgctccaaatcttaagttccttttccaaggttttcgacttataggccaaaatgtgactgaagtatcctctagccttgtaacccatcctccatctttttatcagctctgaaaaatcttccactttctaccacacattttttaacctaaaagggttttttctctcctcaaaccacctccatccgacaatatgggtgtatagtctgaaacaggctttgacaaaacactttgaagcaaatcattgaagtggtcttcccaatcttctgaaactgaggtttctcaatgtcaaatcctcaataatctctgagaagcacctcattgatgttgaaaatttactgcagttccttctttcccctgggaatcttaccacattaaaatccccacccacaaaacaaggatcatcccaaagctgtcttatgtcccccaattctgcccacaaaatttccctttcgctcccatcaattggaccatacacaccagtgagcatccagacaaaattatcatcacagcatttaaactgatgagaaatagagaagattcccacctctgtctcaattaaatccaagccctattattccaaaacacaacaaatgcaccccttgccatccccttccttccacagctccccaccctaaaaatctttgaactccttaccaactggattgacatctgattactcttagtttcttgtaagcaaacaatgtcaaatgattgagatctgaccagagatttgataatcttgcttttccagattgtttgacatctgcaatgaaaataaaataaaattttgcaatacgtccaagcagtcccgcccgtgaggggtcacacaatgaaatccacccatatccagctttctatactcttacttcaaaagcttctgcataaacagacctgtttcatggatgaagaaactatgcataggcaaaaaaaagtttgttaaaaaggcagccatagaaaaatggaggtcaatttccattttgaatcagctgatttagatacctgtgaaaataggttatggtatggtatttaatcctggttgtaaagtttggttaagaaaccctaatactagaatcactagatttgagtttaaatttgtctgtttatatctaattattatatttgttcttgatgacgtgactccttgttctccacttttaccatttcttccctttggggtgataagtgctaaactgttcagccaaatttgattctttccattttatgtgatccttatacatccatgtctgtttggtggtgattccatacatcatgccatctgttcatgccttgaaaatgagtatcctagaaaaattagacctgatttatgatttatccatcagaagtggacaaaatgttaaatccgtacacctaactgttagctgtcgtccattacagaataatttgtacatatttgtttgtctcttctcaagtagagggtggatggttaagtgaggacatttaatgctgcatttgttgtgaatcattaaatgtgaaataaattttctgaatttggtggattgaattttgcagagcgttttgatcgaataaacaactcttttgcaaat

SEQ ID NO: 11277 - DNA, 13451 bp, Vitis vinifera
  Intron number 2 from transcript GSVIVT01029120001 (locus G SVIVG01029120001) derived from phytozome v7.0 (chr-ID chr1 1; pos 19416190 to 19429640)
tgtgaagaagcttcctgataaagtcatcgtccatcgtgagtgcttcttttcacatgttgagccccttttcccgcacctgctgattctttataatcttgcgtgattctagttaagaattagctttttcatttttcttttccaaaatcaactgcaatataatttgatacatgaactttttgtttgcattgatgattcgtatttagcagaggagatgctcaagcaaaaagttgtccatatatctagctttctttttcatttaaatgcatatcagtatggtttcattgttcacttgactgctgccagagtaaataaaagtagtaaactcatggcgccactttgtcttgtttgataaatccttggtgttattcatctatgtccttagttgatttcattgattggttggggttggattgagggagggagtatttttgttttcccttttctttttggcagccgtttgtatactctgtgtgtacgttggtgcgccccttttggcgttttaatataatttgcatttacctatcaattttttttttctttatataaaactaatctgttgcgttgtattttaggaattgtgttgagtgcatctggaccattatgcatttgaaagttggaaatatcatgcaaagcttaaataaagtgatttgttttttatgggataaaacatttgaatgaaggcaaaaatatttgattcataacttactgaaagggcttaggataagtgcaacatttaaaaggagtaagagagcataactaactctaaatgcagcaaaaagattctaaaaattcagcagtggaagaagagtaggttgttttccgcttgcatatggaaactcttaaattgctttaggagaggagaacaaagttcaaagttgtgataccttttagactaaaggtcatgtgactctttagttatttctcaagatgtattgactagaggtgacaatatatttcagaacccataatttggctgggaaatgtagtccaatcatccagccatacattaagctaagccattgtgataattcgatttaaatattagtaaaatgagttgagaaaatagatttttggttgagctaagattcttgcagtggacactgaagagtggttggaaatatagaatttgaattgtagaatgcttttgaggaggtgaagcaaattcttgatattttttttttgataaatgaacacaaatatattaaagggcagaaagctacaaagcatacaggtagtatacacaacaacttaaaaacaaaaaacacatgaacaaaaatctcactaccctttaaggaatggcaagccattccaaaaaacctaaaagcgaagaagactcctctcccatatacaccctagcccagctccacaaattacatacaaaagaatttttcaacttctgtatagctaaagagccccccctaaaggctaatctatttctttccttccataccgtccaaaaaatacacaacaggatggaattccaaatctttttcctctttttccccacaaaggggcccctccaactaagtaacacctctttgactgtctttgggaacacccaatgagccccaaacaaggcaaggcgatctcccagaggaccctgaccactatacagtgtaaaagaatatgatttacattttcctcttcacaaccacacaaaaagcaacgattaggaaggtgccagccccgtctttggagcctatccaaagttaggatcttctcccacgtggcctcccaagcaaaaaaagcaactttggttggaaccttatctacccaaatgctctttttcaggaaggtgatgacactaggggctgccagcagcttataagcatccctaatctgaaaagaaccatgactccctcctttccaaatcactaagtcctcttctgaagaaatcctcaagtctctcagcatatgaaacaactctcttatagcatccagctcccaatcattagaatctctggagaatctaatattccaacctccttgaccaaggctagaatcccacatttcattgaccgtagtgttcctttggatcgccaaggcaaatagctggggaaaagtttgggacagcgcctcattaccacaccactgatcagtccataaattgaccttggtcccctctcccaccttgaaccctatgttatcccaacaccaattcgcctccttcaaaatctccttccaaacccccactccaaatgttctgcgagtctcattagtttgccaaccaaaaccctcatggccatacttcaccccgatcaccttcttccaaaggatttcttttttaagggcaaatctccaaatccatttgcccaacaaggccttgttcaagagatcaatcttccgaatgcctagaccccctttctccttttgagtgcacaccacttcccaattgattaaatggattttcctttccaagcttccccctccctaaagaaagtccctttgtaatttttcgagcctttttgctactagcttgggcattcgaaagagagacaattggtaaataggtatgctggacaaagtacttttaatgagggtaattctcctgccctttgacaaatattgtcttttccaaagggttaaccttcttctcattctttcttccaccccatcccacataaacgaggccttgtgattggctccaaggggcagccccaaataaacagtaggaagagaccccactctacaccctaacccactgccaattcgtcaatgtcttcaacctccctaaccggaattacttcgcttttagctaggtttatcttaagaccataggctgcctcaaaccacgccaaaatccagcttagagaggttaggtgatctttcctttcttcgcagaaaataattgtgtcatcagcaaagagcaaatgagacacattcacctccatttccccccccccctcgaagactacagcctgaaatgaaacccctatcaacagcccttcttaaaagtacacttagtacttccatacccaacacaaaaaggtaagaagagaggggatctccttgacgcaaccccctggaattggagaagtaacctgttggcaccccattaaccataacagaaaattttgcagttgaaatgcaccatcaaatccactccatccaacgagatccaaaacccatcttgtgcaagaccttcatgaggaaattccaattaatgctatcataggctttttcaatatccagtttacaaatcaaccctttctctttacgtttatgccagaaatcaatcacctcattagctatgagcgaggcatccaaaatatgtcttctcctcacaaaagcattttggtccacagagaccaccttatctaaaaccttcttcaacctattggccagcactttggccaaaagcttatacaatccctctagaaagctgatgggcctgaagtccccaaggtcctcaaccccacctttctttggaatgagaactaggaaggtagtattgagactcttagcaaaagatttcttatcaaaaaactctttaaacaggtccacaatctcctccttcacgaagtcccagcaagattgccaaaaggccactgtgaacccatccgagcctggagccttatctccattcattttcatcagagcagaatggatttcttcctcaatgaagggctgctccaagacttcagcttcattatggtttagactttgaaggtgcagcccctcaatatcagctttccagcctggctcctttgaaagcaactgctgaaaagcattcacaatcccctctctcacctcctgctcctcctccaaccaccccccattgatcttaattttatccaaggggttgtttcttcgatgggcattgaccatccggtgaaagaaacctgtgttcttgtcctcttctttaagccacaactcccttgacacttgtctccagtgagtttcttccaaaaacacccactttttaaaggttgctttagcttctcttttcagcttcgtctcaccttctgtcagactcctttcactctccaccccatcccagaattcaatttgttgaagggctgagtttttattaacttccaacattccaaacacatccctgttccatcctttgattttttccttcatgaccttcatcttagtagccaatctaaaactggccctccctctccccccaacccctgccaccaatcccgaagaagatccttaaacccatcaactttgagccacatgttttcaaacctaaacggggaagggccccgtcttaacccaccactcttcagcaagatgggaaagtgatcagaagtgggtctgggtaacctactttggacaaccccactaaagtgatcaagccagttctgggtcactaggaatcgatccagtctagcccaagattgattgttcctatccccgctccatgaaaacacccccccttgcataggaagatccaagagctctagctcgtcaacaacctgagcaaatcttctcattgcgccagtcagccttccctgattgctcctttccttttgggagagggtaacattgaagtcgccccctaaacaccaggggtcatcccagatgccccttatagccccgagctcttcccacataatctccctatcttctttagaaaacggctcgtacactcttgtgaagatccaagcattcccattttctacattcctaagcttacaagaaattgagaactgccccatctccatctcaagaacctccaaggttcttttatcccaacatatcaaaatccctcccgcagctccctgagcacccatggcaccccaatcaagaaacctcccagagcccaaactcctcaccaaaccctctgacattgactgaattttcatttcctggatacaaaacaagtccactttctggcttctgatcatggccttaatcacctttcttttagagctatcgttagctccacgcgcattccagctcaatagccttatcttcattggacttccataatctgacaccctcttccttgcacagcacacttcttcttcttcccccctcatgattgatggaacattcaagccttttcaattccctttcgaatctcgatttctctagaagagttttgctatgaactctttccctcctctttctaattttgaccagaaactccaaaatatctttctccaatccctctgttgaaaatcccaaaaacttgctgaacctagccagatcactttcctcccagcttgcttcctcccatcctctaccttcttgtggcatagaccaagcaaggcacaattcctctctgctctcttcaatactgtcagtattgacctctatcaactctcagcacttaactgtttcctgctctgtagacccagtgacgttacacaatcgaggtgtaacccctgggttaagtccaagccagccccagaaaggtcgccaatggagtccgaccataaataggagatggagaaaaaggagaatcagagaccattagtccaatagagatagggacgttttcataccttgcatcttcctccaacaaggcacagtcggtcttagatttcccgtcggtcttagatttcccctcggactgaatctcctcctcagaaagcctccgcaggccatccttcacccagaagggagaaataccagcgtttggacctcccattaggctttggccacttaccaaagagggacaggcctcccccacttgggctctaaccacagctaagggcatagacaggcctcgattgtccagcccagacatcataggatgcaccagagtcttggcccgcttagaaatcttccaagacgacaacccaaaaagaggcggcccattttcgcaaggggggtccgagaaggaaacaagcccaatgggctctgattccttagagtaccaagagggctctactaggcctagcaagctaagcctgcctgatccttgtgacccacccgacgacccatcgaagctccaaatatggtccgtaacttgccccgacccgcttgactaaccccgcatcccatcagcatgcaacagcagggcctcgagccttgaaaccgtccttcgcctccagcatgcgctcgcccgcgcgtgtacaagcttcacccccaacctcctctcccgttgcgacaaacttccctctctttcccgccgtcgccgctatcattactggcctgacctcccaccagagagttagcgagtagcacaactcttcaacccaaacctccaccacattggggagtttctcgccgttacgcttcaccaataaccgggcccactgtaattcctccatcttttccgtttgagagtcgattgcgagaaaacccccgcactgctcccctatccttctcagaatgtcccactcccataaggagacgggtaagcctacaacccgcacccaggcttcactcttgttctcccccttcctcagacatcccgtctcaggcctccatttctccaagcgaagaaagatctccccaaccgagatgcttccaagtttaatggcttgctctgcttctatcaagagctcaaattccatcaataccttgcccttttccagttttgctaaccctaggttgcccttcaaactccagattttcgccaactgagtcccccaccttcgtaggtcgtccccctttgctgcgctagggttccatatcccaaccacatagtgagccagtttgtttaagtttcggcatagctccttctttgtgacctccactttgattgttgctctatctttactcctcgacattttgaccacttccgcgaaggttttcaccatacttggcttcaaacgtgactcttcttctttttggcttatcattcctccattagcacagaccaagtgctgtaacgtctccaccattgaaacccaaccaccctttgctcctctccttttagggatgaatatgctaaatcttttgttctccaaatccacaacatctaaccggaggaagcacccccctttgttatgatcgcgcaccagagaataagccctcccattttcctgccactttcttacccattttgccgttctcacatcctcaatgcacagaaccagacaatcgaggaatagcccaagactcgccggtcccagcctaatccatgaggaaatccctcttttcctctccacgatcgtagcttgcagcctgcctctcttcttctccacctcaaccttaaatgacttcgactccactctgaagccacccttcctgaagcttttcctaggcctcgcaaggacctcgccctctacattctcggtcgctctcgggaagtctcgcactcctccgtcgctctcgctctctctcacgctctctctctctaaccctctctctctctcctccatttcttctctctctcacgcaaggcctcaaaggcaattttaattgctagaattgaaggatggttcttttcctcaagaaatccaacagtagtggtggaatatgcaaatgttctcattgtagtgaatcagtggacttcaaattgaagagattgtggttggggcttgtgtacaagttggatgtaaaaaggttcaggatctcgtggatcaggatttgtgatttttgttaatgaatagggactttggtcaaaaatggattcctttgtgatcaaattctgcatttcgtctgctagagtttcaatgttaatgcatgacactccaagctttttctaaagttctagaggtctcaaacaagaggatttactatttgcttatttttttatcttggttatgaagatataggtttgcttcatctcaaaagcaatggagggggtttttgttcaagggtttagggttagggaagaggtgggttaggtattagacatcctttctcttctatcaatgaaagaaaaaaatcttaacaacctcaaccttctactcaagtcttttgggttagtctctagccttaaggttaaccttgataagtgtgtaatactggggatagatgttaagtaggagtactatgaaagattagcattctctgttggttaggaagctaggacgtggcctttgataccttggtcttcctttggatacaactcaagtgtgtcgggattctaaggcaccatggttggaaaagcgtccaattgacttgatgagttggtatggaagtagcatatgttgcttgagggtagaatagcctgatttaatcttccttggtcaatatcactatttgttctccatccatttttagacattgcttcttggattaggaaaatttaaagggattttccatgtttgaggtatagagaggacaatcagtatacctaataaggtgaaagggtttgtggcaccaagattaggggaaaggtcgtgatgtgagggtttaaggattaaagctctaatgggcaattacttgtagagacctctcaagaagaaagcctcatggtttgcattttcttattagaagcaactaaaagttgtagaataatggataggaatttttggtgagagcctcttaccattgcccatagaaatatttcttgagttaatgatgattcattctacatataagattcattgttagaagtgaatatgatctgcgattttgaagactggcacttgactaattaacattttctattttcctttcatcgcctttattttgtttgttagagtggcaaagggtatgcccattatcaatcttgttttaatatcttatgactctttttggtggaatttcaacttaaatagaagttggattatagtttattttattttgttaagagttattttatatgatagttaatagggcattatcgtaatcttggttaataatatagatagatgagaaattatttatcattgactatgattgcgataatactactaataactaataaataaaataattctcagcataacataaaaaaataaaataaactcttaacaaatactagttatatggtttagataaagaggccccatagaaccacctattagtaaggccctgtttggattgcctattgagaagttaaaaactattttgttagctcaatcagtgttgcttctcatagaacccttttttggggcttatgcgagatgtagtttcatgtttaataatccctttgaaattatggttttagctttagcttctacgaaagccaaaaataaaatgttattaccactttttttttttttttttttcattttcttattttcatgagttttaggacttacattcttcttgatcgatattgtattggtggctcctaaaaatatttcataggtgttgcttatcttctttagggttttgacaagagagcaaggagtaaaatgctgtagcagtatgctgtgcttgtgacttcttaagcaatatggctggaaaggaatattctgactttctatgatgttataggacaaaatttgtctatatatatatatatatatctcttatgattaaagagttcattgacatctctcaggattatctcctagtgtactgggggttgcacccctctttttgtgagtagagcttgtcaatatacactctctctttgtctatcaataaagaaaaggtattatcttaatgggttgcaggcttgttgttcagccaaatctgaggagagcatatggagtgttactggtccctcctctagatggttaccttaagcccaatttttgcaaatacttgttgggaatctgagtgaaataggtgttgggtgtattttgagagatctgatctgatttggcctttcttgaagctgacaagcattgtgattgccaatggacttgaattatttgctttggtgggggtgtaaaaatatcttctttagttaggggtgaggttggataatcaggagatctttcttgtggaagtccattattagtataggtaagcaaacatatgagtttgatattagtgttgttcaagtggcgaccttgtattgtttatagtaggtttctctcttcaatcataactgctgccttgatagcaaaggttgaagagctaagcaagactgcttctcttcttccatgtctgtactcctgctctgccttggttgcttaatacaagcactcttaatcattgcttttgtctcagtgatggtgattaattgatcagcatatgaagccaaaatgtggccaaaacagtaaaatgttgatttcttcttccccaaggaatttggacttgtattaccctgaatagcttgttgatggaaaagctagaaccattccaatagtttttaactacctttttccacttggtcaacaaaagtcctactaggttatttccctttcaccagtattggattttctttccaaattttcattgatctgatatgcactttgtattgcatctctttggtattcaacctataagttgttagtcttgaagctatctgctgtctcaaaccctgccaattgatagcaaatcataaaatgtttattccatgcagaatctgaccgagtagtcaagccctagaatattttttttttcatcagaaacgaacaatgtattaaaagagaaaaatatgagaaggatgagaagtcctccccatgatgtacaaacctgatcaaaagaagtgagtatagtcaaaccctagaattgactaccatgttgtttcacaggcatgcttcctgccattgatcaaatgaagatagattggatgctcgtagttaagaagcatgaagtttctagtcattctgccatcccaaaatccattcccttcttagaactgtggttcattaatccataatatcctagctcaagctgccatcttaagcttagcctctacagagcactagttctgagctgcatccatctcatgccaataagagcaattctctaaaccatatatccagtctttaaaagcgttgaaatggtgatctacatgaaaatctggcacatctgattgtagtcccttgcaaaaatttacttgccttgtttctcaaaaatttcaattaaataattgggatttcagggcgataaggcagaaattcttcatttggggtagtattttaatgcactggaccaatatcctgctcaagcaaatgtgaatgtggatgagtttgttggctccatgtgaaactgagaaaagacttttggttattgttgttaaatttcaatgtgatcttcttcttgttgttgttaattcttcgaatcaacaagatgttaggtgcttgtggcttttatatattctctaagaaaaaatggggttctaaggaagccggtgtcttttcttctgaattaagctagttcctacattcatgatgtttcaggtgaaatcagaggcaggaccttggatctaggccatggtggaagaagacatcaaggccaaggaacaaatatggttgagatgaagtatatgattgaagatttatctttggttgtgagaatgcttaagtgataggaactagctgatgatatggagtgatgaagatagttccatggattaaggttcttaatgaatctatgatgaaccctgagcatggtaatgtgtttgagttatattctttacctctaaggaatgataatgcatttgtgtttgagttatgttcgggtttgaggagatgtaaattttggttttcttatatggactaaaccatgttgtatgggcatatgggcatccttgtttggtagaagagtttagtctttttgtcaagggttttgtatttgtggggagaattcctcatccttttcttatactttgtattaacaattaatacatctttggtttctgataaaaagaaaggttattaaagatatagacgatgctcatcaagtgtttgatgaatgccttaagagtgactattcatgtgactttgcaacctaggaccaagtaggcctagggacatgatgttagtcatctggtgcactgaaccataggacccaacatgtgaatgacaaacaaattatgtggctagcatgatagtcaattagtaaccacttgttcatagtaacagttaaaagaaaccatataaatataaaaataaaaagtctccaattaaataaatgttaatgctagtaaagaaatcaaagatcaatattcaacttgagcttgaggaaataaaataccaattactaagatcaaccaaagtccataagaaataatcaacaattcagaataagctagtaaaccataagtcttaaaatgtctagaaaattctatagcaaatattctcggttctcatccatcactttttcctaatattatctgtaagtgaaaggtggaataatggaaggggtgggcatgaaagcttactaaagaaaatagtaggacaattggaccatgtatctacacaaaaattagatgagatctatcttgtaatttataaataacctataaaatgtgttattagttaatgtccgaagttcatttagaaaaataacatttcagacaacaaacaacttaatccatgaaaactgtttctagatctaatcatatatcacctcggcaaacaaatatatggctcaattccagtgggagtcaccgaagagtggctagcctcatatcctttgactggtggatggaatgaactcaaatccaaggtacagttaaggtccaatattggttggagtttattgatcattgccaccctcaccaagggagttgtcaaattattggaagtttgttgttgtgtttttctgtaatttgtttccaatgaatttgaactgattactaattagtttcagatatctaggtgttctgatagttaggtcccagagttgtgcttgttagttcctagattcttggtagttagttacatgattaggttgcggacttagcctgtttatttccctgttattttttaaaattaattaatcaaaaagcattttccccttctattttgtgtacatggtattagagtgtaggtcgctctttgggagtattccagagggtgtaactgaataatagttttgtttttaaacttttgatgtataacggcatattcaagacacgttactctgttttggaggttgatgctaagaaatgagggagcctttggagcatagattaattccttgagtaggttccctagagtgcaaatgatatgttatttttatttaattattattatcattattatttattatttttgagttttgagtggtatgatatgtattcaggtcacttctaatagaaattcattgagcacgagcccctttttctgttttcattttcatctagttaagcaataacctacccatttggcttttttgatacagacatttttcatcttcatggtcagaattcatggattttgtatctgtaggatcatatcagtctttttctttctttcctttttttttttagtttttttttttatgttttctttcacatgctggtgctgttaagactcacctaaattatcacgtattgcaccatcaatttatgtctgtaactactttttaagaatttccccatcatatatcaaaaagttgtcaaaactgaatgttgtgaatgctgcaatattgctttgttttcatggttggcattttaattaactcgactgcagacatttcactaaaatgatgtgcatttatatttgatgagcaggaagtga

SEQ ID NO: 11278 - DNA, 8973 bp, Vitis vinifera
  Intron number 6 from transcript GSVIVT01010141001 (locus G SVIVG01010141001) derived from phytozome v7.0 (chr-ID chr1 ; pos 16245147 to 16254119 reverse strand)
ctggagctaaccaggcaattaatcaggtataagataattggtttcgtcagtaaattgcaagtgatattgatttgccttcaatgtagtgcactgtatttgttgttatacttgtctttttctttattggtgatattgtctagtggttcataagaaagtcaatactaacaatctgcttcaaatatagggacttcatagagctatcagcttgaattgatatgttctctgcaggcagagtggggattccactggtaacctgttttcttgttgcttatttcctcatgacttgtgctagtacagtttgtctttgacagttgttcagtggagaccataagacagattctagatacgttggtaatcccattctttgatacccaaactccccaacttcaccaagtgtgtttgtgttgacatgacatgacatggtgtgggtgtgggtgtgggtgtgggtgtgggatccttgtgagatactactgagttttctttgtattagttggatgtactaattcattttttgatcaaaaaatggtgcacatatatctaatactgtctaagagcctaacaaccaatttacagctgtcctattccctaattcacagccatcctagtcaatagtttacctaatttgtacatcaattgactaattataccagttaatattaacagttaatatacaccaaatatagctcatctagagctgatcaggccttaagattagaagattctgttgatttcttactaaagacagaaaatagaaactgaaactttatcaaagtcatttcaattagatttacagggctaaataaatagacaaaagcataaaacaaccagctgattttctcctagaaactaggtactgaactcctaaaatctagttaacatactaacttcaaatttgaaaaaaaatggaaaattcagatctccctagctttcaaaacatcacgaaatatattgatttattgcagaaacataaatcaaataagaaaccaaactctatctttatccacactccttaagctggggcaaatatgtttaacattccctactttcccattaacttctcaaaaaccgatcttcctagtcgttttgtgaaaacatcagccacttgttcacttgtaggtacatagggcatgcacaaggtgccttcttctatcttttcctttataaatccacctcaatatgtttcattctgtcatgatgaacaagattgtgcgagagatctatagttgccttgttatcacagaacaatttcactggttgactcattgttgtttgtaactcttctaacatcctcttgatccacacccttcacatactatagctctaaattccgcctccacactacttcgagctaccactctttgttttttgatcctccatgtcattaaggttcttaaaacaaatgtacaagagcctatagttgacctcctatcttctagtgatccgcatttgtgtaaatttccactcctttgttctcacattttttcttcttttttattttttattttttatttttttttttattttttaaagtcctttatctggtgttcctttgaggtacttcaaaattagcgcacaacatccaagtgggattttgttagtgaatgcatatgttgagaaactctactgattgtaaaggctatatttgggcgagtgtgtgagagataaatcaacctaccaaccaatctttgaaaccacctcctttctactggtgcttcatcatccaaagactcaggtcttttgttttaatcaacaaaagttttactaggtttgcgtttgagcatccctatttctttaagtagatctaaggtgtatttttgttgacaaataaaaattccaagtttgcttcttgtagcttccatccctaagaaatatctcaaactaccaagatccttcacttcgaattcatcaactaatgtctcgttcactttattcattccaaggtcatcattacttgtaagaattatgtcatctacgtaaacactcagaattgttgcctttctttcttgagagtgcctatagaacatagtatgatcggaatgtccttgagagaaccctaaccttttttagaactttggtgaatcttccaaaccaaactttaggggactgtttgagctcattgagtgacttctctaatttccaaaccttgcccacatgtagatcatctatgaatccaggaggaagatccatatacatttcttcatcaaggtctccatttaagaagacattcttgatgtctagttggtgtagaggccaatccttgttttttttcttgctaaggatataagaatccttatcaaattaagattagcaataagagccaacgcctccaagtagtctatgccttaggtttgtatgaaactttggctaccaacgtcaccttatgttactcaatttcaccatcaaagttgtatttcatcataaagacccacttgcacccattggtctttttttgttgggtacatcaacaatcttccatgttccatttttttaagagctctcatttcttccaaagcatctgctttccattggggaaccatcatagcttcttgtatatttttggaaatctcttcatgtgaaagattagtaataaatgcacaaagagatggggataattttttgtaggacacaaaatttgagataaggtaaagtgtatttgaagggcaatgggaaggttaagattttcagaatgattttctagagatgagttagaattttcattacttgctgatgtttttatttctggttaagattcagttgaaattggggtgcaatagacttttttatttgaggatttagtcgttgaggataaacacaaagttctttcaattggtggtctataagtagtgaaccatcttctccccttgtgtttgatttttccaatgatactatagattcagatgagcattgtgatggtggtgaaagaagaggaaggtcactttttggtaggttgtatgagatgggaagagaagtttcctaaaaaatagtcttctgttaaattctccccttcaagagtagtgttaaattctcgcccactttaggtttatcatcgtcgtcatcgtgtcgctgttcctccttctttggccgaggtacctgctaactcacttcctatcccttcggcttctcctgccccggctctgcctccttctgcttacttacccattgctcttcggaaaggtaatagatctactcgtgatcctcatcccatttacaattttttgagttaccatcgattatcttcaccctattttgcatttgtttatgctatatcttctgttcctcttcccaagagcacccttaaggctctttcccatccaggctggcgacagacaatggtagatgaaatgactgctttacattccaatgacacttgggatcttgttgttttaccctctggtaaatctacagttggttgtcgttgggtctacacagttaaggttgaccctgatggtcaggttgattgccttaaggcccgcttagttgctaaaggctatactcaggtttatggttctgattatggtgacactttctctcttgttgccaagacaacttctgtttgtctattgctctccatggctgctatgcgttcttggcctatttatcagttagatattaaaaatgctttccttcatggggatcttgctgaggaagtttatatggagcaaccacctggttttgttgctcagggggagtctggtttagtgtgcacgttatgccattctctatatggcttgaaacaatctcctcgagtatggtttaaccgttttagttttgttgtttaggagtttggcatgttccgcagtacaacaaaccatttcgttttctatcatcataactctttggagcagtgtatttatctggtagtgtatgtggacgacatcgtcattacaggcagtgatcagaatagtattcagaaactaaagcaacaccttttcacccactttcagactaaagacttggggaaactcaagtatttcttagggattgagataactcaatccagttccggtgtggttttttctcaaaggaagtatgctttagacatcttggaagaaaccggtatgttagactgtaaaccagtagatactcctatggatccaaatgtcaaacttataccaggacagggggagcctttaagagatcctgggagatatcagtgacttgtaggtaaattgaactacctcaccattactcgtccagacatttcttttcctgtaagtattgttagtcaattcctatagtcaccatgtgatagccattgggatgctgtaatccgcattcttcgatatatcaaaagcacactaggccaaggtgtgttgtacgagaacagaggtcatacccaggttgttggttacacagatgcagattgggctggctcacccacagatagacgttccacttccgggtattgtgtttttattggaggtaacctaatatcctggaagagtaagaaacaagatgtagtggtcagatctagtgctgaagtcgagtatcgagctatggctctggcaacatgtgaactcatatggctgaaacatcttcgggagttgagatttggaaaggatgaacatacgaagctcatctatgacaaccaagccgctttgcatattgcatccaatccagtcttccatgaaaggactaaacacaatgaagttgactgtcacttcattagagagaagatcgcatcatgatgtgtggcgactaattttgtcaattcaaatgatcaactagcagatatttttactaaatctcttagaggtcctagaattaaatacatttgtaacaagcttggtgcatataacatatatgctccagcttgagggggagtattagatagtgtacaattatttcagttatttactttttttttttttttttccttattgtattgtgggtcccactagcatgtatatatatacccaagtccaatgtgtattattaatagtttttaataacaaaaattaaggattctcccttttctctcttttcacaacaacaaaagacttttaagaaagaaaagtttaactctttactgttcaaacctcctttaggattttgtaattcaatggtgttgagggtcctctcttgatcaaataggttttagttctaactactttagcctataacatcttcaaaagccttgcatgcgatctcatgctcctaacacgttcatttagggtcatcttcatctttttcgcttgcttaatcactcccaaaaaggaatctattgacatcattttgttgaggttttcctgaaatggttttcctcatcttcatcctattatcatcacaatattgtttgaattcttaatcaatgtattctcttacattatcaaattgtaagaacttcacctttaaatttgtctcgttctcaaccatggctctccaccttttaaaggcataaaaaacatcaaatttattcttcaagaaataaacctatgcctttctacttgaatcatcaatgaatgtcacaaagtaactggagcctccaagggatgtaataggagaaggtccctacacatcggtatgaaccaactccaatttttttgcttttggtttccttctgactttagaaaaattaacccttttcgacttgtcaaacatgtagccctgacacaagctatgctcaacatatttcagcctcggtagttttccctttgacaaaaccattttcattcctttctcgttcacgtgcctaagcttacaatgccataactctcaattaacattagcatcaataacaacaaccatatccttacaactagaagtcatatatagtgttctagatatatttgcttgagtgacaaccatggctcccttggtgactttccatgtagcaccaataaatgttacattatgaccaccctcatcatcaagttgttttattgagatcaagtcacaaattaactttggtacatgttttaccctttggattttttacacaaacttgtttaacttcttcaatctgacatcaccaacaccaacaatgttaaaaggttctccatcagccagatacacctttccatggtttccaacaacataattttccataattttaaggtgtgcaatggtatgaaaagaggctcctaggtctaacacccaagagtcaatagtaccatcaacgaataaaggtaatgcatcttatacctcttgagtcacaatgttgttagtgtcatttttatttgcattcttctttgatgctttgcaattgttctttatgtcactaggcttgccacaattcaacattccacatttctccaagatctggatttgcctcttccattctttgaattcggtctataatggcctcgattagaatttttttcataactcctacccttggtcccaacatttagactaaagtttgattttgttgcttcaccctagtctttcttgtgaacttcctcaacaagaattcaatccctaacatcattgaactttaattttgagttccttatagaattactaaccattgctctcatgggctcccaactatttgttagtgaggccagaagaattaaggcacaaatgtcatcattgaaatcaatttcaacttcggacaattgattgaccatcatgtcaaattcattcaaatgctctgccattggagcaccttcttccttcttcagattgaataattttttcatgagatataccttgttatttgtagaaggcttctcatacatgtcagacaagacttccattagccctttgtggttttctcctttgccacattctttgacagtgttaatttgatgactcgtaacacttgtttatcaaggagattccaattgacttctgacattgattctgatttctggttgagaagagacaaatacaactttttaccatagagataatctttaatttgcattttctagaatgcaaaatttgtaccattaaacttgctgattccaagcctaaattcatcttctctaaccattgctctcacccaaactagactctaatacctctttttaggagaaaattcctatttacgagagtaaaacacacaaaaaataaaaaatagatagagcaaacacaacatctatagtggttcatgcttgatgagagagctacgtccactttgttgttgcagaatttccactatgatcagaaagaaaaatacaaggtgatcttaggcctaatacctctcctctattttcacatatcctcaccctaaaaaaggtcaccttaataatcccttataaggaaattagggtagactaatacatgtgtagaataccacaatagttaggcttgacacaactcaataacaaaagcattactaagagatggtaacttctcactaccaagtatactacgtttgacttcagcatattcagaatcaaggctagaaagaaattcaacaacctggatctcttccttttgtcttctttgaacctcaatattagtaggtgattgttgatacacatttaattcctctcacatctctttaagtgaggcatgatgttcacttaaaggtttccaattctttgcctcaaagaatcttgatacaattgatagattctcacttttttttttcttgagaatatacctctctaactgcatcccctatttactttgcaatttctagaaacatgaaattaacattaacatagggttccatattgttccacaatcatgttattatcattagtcatcttgttgcaattcatcaaacttttagatttgtagggaagaggatcttccactagatgttttagttttccctttgccccaatatacaccctcacaacttagccccataataaagaattagatccctttagctttcctgaagtaatctaaatgcgaacaccatctctagatgccatacttgttaattattgaaggtagaagactaagactattgtaattaaaaattgaaataaggaagcctgcaacattaatggatacttgcaccacacaacacaaccaatcacataggcactagtggggcaatgtagcagtcgatctgtagtagggcactgtggcagtattgtagcacataccactaggtttttggcacttaagcagcatatggtactgtagctctactgtggcactgtagcagtgccaaagcaatgcaatagtggtactgtatctaggtttatttttttttttttgtatatatatatttcagactgggtttgatcaaacttgctctgatatcatgttgaatgagagaaaaaatagtcttattcttcaagaaaagagtgcaaaaaatatatatagacttataaagaaaaaacaaaatgactaaactaccctttactaaataactactaacaactctttgacaagttactaataaacaatgaccagtgataaaactctcttctactctaactctccttgtaacttcctcctaatatagcactaattatatatgactctcttgcttctaattctaattttacaattcaaaaagactttgaaaagctagtggaaaactctgaggtggtttggacatccatctgaagtggaaaccaagataatcccacttggtgatgtagcacatgatgatatggcacctgttgctgaagggcttgctccccaatgttcttcacatcactttcagtgcttcatcattttatatatatgctacagatgttatctggatttttagattccatttatgtgcactgagcagtctaatttagtgtgatcatatattcctcttcctccctctctcaatttaggggcctgctcaatgttcttcacatcacagtgcttcataattttaaatatatgctgcagctattgtctgcaattttagattccatttctatgcatctgagcctatgtaatttagtgtaataatgtattcctctctctctctctctctctctctctcacacacacacacacacacacacacacacatacacagattgttttgagtactcatacatcacacctttgatttgtattttaggtcaatcattttggttcctttgtgaggtttttctt

SEQ ID NO: 11279 - DNA, 4233 bp, Vitis vinifera
  Intron number 1 from transcript GSVIVT01014219001 (locus G SVIVG01014219001) derived from phytozome v7.0 (chr-ID chr1 9; pos 1608034 to 1612266 reverse strand)
cactgtggaggtgaggttttcggttgggttttttttttgtttgatttgccggttttgatctctgaaatgttggatttttgagttgttatgggtttgattttttgttcttgtgtgtgtgtgtgtgtttttctttcatttcttgtacatttccgagactgagatgagtttgattaatttttgttttatctttatgggtttctttgggtttgttttcttaatgagtttttgtggtttcatcatcttcgattgcatgcagtttattctatgagaattcatgattttttatctctctgtctctatccatatttgggagctttggatatcagaatttcaacgattttagttgataatcgtttggtttttaatctctctccctcttatatatatataatcccttgttgtggttgagttatcgggtttggaaattcacatggaattcctctttccttgtagttggagggaatttgtttctcggatgtgtctaattaaattctctctctctctctctctctctccttctaattctgtggagaaactcatcaaccttttgttggaaaagttcaggctgaaacaattggagcctcattttaaaacttatcttctggtttgcatagaaatatttggcttgtttacagggaactaggaattctagagttaaagttgatgatgcatgtctagaaggttcttacttttctaattattagccaatgcatcattttctcctacgcgtgtctcctatactgcagcttttttttctaacaattgtaggacgatgtctgactcatatcttgttttgaggtttgttgtttgccttgcttcatgatatttgaatgagatctctgattctcagtttcgcttgacatactttgtcagttctaagttgtgcaaagcaaatgaacgttgaatctgactaaaacatgtactcatagacaaaattgatttccaaacaaataggttgagccatttgcatgggaactcctccaacccctccttctctttcccctttttcttgctaggtttactaaatgggtattgatggaaaattttaaaaaaagttgttgttgtttgttctgtttaatattttttttcctgattaaactagatgctttacttaaagaattatattgttgtttgatttttagtgatttattcaatctattatatcaactatttttatttaattgatccatcttcaagtcaggagtcaagtggttttatatcactatttccattagaaaataaaaggagttcaatgcaagatattcgtgaactctatttctatcatgctgtcgctcccttaaatttctgtcattgtaagaaatttgtaacattgaagcatggcaaaaggtggtttgaagcattgcatgttataatttattttctcccatgggatgaacataaaacctgcaaatctatgtcaaaagtatataatctgttttaatgtaatgatcttaccatacaagttatttgaaggctaattattaggttaaattgtttacctgcccttcttaagctaacggtattggtttgaaccacatttgatattattcattaggctttgtatggttgtaccatagtcttactcaatagcgttaagatgtgccagtagacatggatgtgataataatgcggtgaaaattatcatttattctgtctaagtgatgtcagttgaaaaatggaatttgctagctagaattttcttgtcttctgtttgcttctgtattaattgaaagcaggtttctctaggcatatatcattttgataggtttctctaggcatatctcattttggttggttttgctacatacaacaaatgatggaggcaagtcaatctgatgagctctccttgtaaaatctttttctctctctctctttctcactcccactcgctctctctctcttctgccctgcttcttcctgtaccacgtgattctgaaaaactgtttctatttaaagacattgtttgtgttggttatgctaggtatcaagaggtagttttgttgtagactttttatgatatggtttaaatctatccagtgttttcatatgctttccaaaagaacttgcttgttctgttgcagttaagggatgtgggaacacatattcatggaagagtgtgcaattagagatcgagtccttgtaaatattcttgactatcttaaaatttggaagaaatctctattgaaagcaaaattctcatgcatttaatattggctggttttggttcattttaacacacgatggacttgatttagtgtggtaattgacattcatcaaaatccttctcttctcgcccatgaaaagacaaaaagtagtgagatatatacttcagaaaccacttagcaaattgataattgggaggtctttctagttggtattagagatattttggaagtgagaacttgttttcctaaagttaaaagcagatggtttagagtatgattttgacttttcttgtagtcctgaaaagtggtatcaccttatgtgccactccccttttttttttttttgtggggtgggggccctggaagtttggtgtttacttggtatacaatgcctgtatatggaatacactccatctagtgatagttggtctcctgtaaaaaacttgtaggaatatcttgccaattaaaatattcaatttcatccaaatcttatctggtgtttttgcatggtaaggtgcaaagagatatggtgggtcatagatggaatacatgcaatacacacatcgtgaatggcaaatggagtagctttaaaatgttgttgcaagttgctacctttttttttcatctaaattttgtggtcaaactaattactgtatattcttataaatataaacaagttccctaatggtaacttggttttatcaaattattatattttattttttgttcattatagtttttctaaattgaaggaatgtagatataaatatattacttctttgtttcttggcggcctttaaatctggttgactaaaagtgaacatcattattccataaaatttccttttcttgttgtgctctaacttctaacaatttgtatcagtttggaaacaagcatgtctatgatgcataatgggaagcttgagtaaaattatagcggttcaattatgaacctttctagaattgtttcccctgaataataattttcagattggatgaactcgaagttctttttgtcttgatgagcatatatgtttttatctattgatttggcttcgcaaaccagtccaattataatgtttgtatggagttggttttctgtggcatacaaggtgacaatcttaggtagaagcaagaatcacatgatgcattttcatttaaactctttaagatatactgttctcacttagtgcattattgccatttaccagagaaaaatattattattatgttacaatgattataattcttgttaattaattgatgttcttttttctgtttttggcgtgggggtgggttgtttatttaagaatcttcaattcctttcttattcaggacaagacatgtttatattctctatgcgctggtatgagcttatatatgtatcttttaggaaaaggaaaaaaaatataagattgtatattttttagaaagtgaacgaataaaagaaagctatgatattcacccttatgcatgcatcaaaagttaaggtatgtggagcacacatgaccttattaatgcacatttttttttttgatcagatattaatgcacattctaaatggcagagtaagaaagaagtgtagtatctcccatttggtgagcttaggagcattatttgaattcacagtgctgaacttttgtatcgtgtttcttaattggatttattagttggatatattagggcagggatgaagctgtaggagtggtccttcttgctttttgagatttgtttttttcttcatagctgatgaaatgaaagaaacgcaaccgcctgaagcattggaaaaaaaatcctccttttttttttataattattataagtgcttatttcttcatttgacaatttaaaattgtattgcttcagtaagttgagtattttctctttgtggaattatttaatgtacttatagaattgattgttgtcaggaatcaccactctctctctctctctctctcgtatgcactgcaaagatactggaaatggcttagtattttttcaatcttttctacatttttttttgtagcttattagtttttgtcttgcagacttgtagcagtattaaatt

SEQ ID NO: 11280 - DNA, 1512 bp, Vitis vinifera
  Intron number 4 from transcript GSVIVT01024342001 (locus G SVIVG01024342001) derived from phytozome v7.0 (chr-ID chr1 6; pos 1201869 to 1203380 reverse strand)
tggctggtggaacaggttagcataccttgtacaattattatatgtagtctttttgcttggtgttttaggtagatagggtaaatgattgagggagctcaacaaggatggggcaagaagcagagcaaactataaaggaaaataagtgcttttctgattagatttttcttttgtgagttctttacctgggaagcaaaggactttctccccttttcagatggctactgaggtcaaagatttttatttttgtgcttctcttaagaacttttgaacatggacctatgattagaaatgtcttacatttaaggtatcctcaccctgaactagacggttctgatgagtgatgactgccagctacatctttaataagattcaatctatcatattcagttttttggatagagttgacattctaatgttaataacagtaggaggtgtgtagtttatcagttcatttaaatattaaataccttttttttttaactttcattgaccaaaacttgtgcctaagtatgcaatttaatgaattgagagagaagcttttacacattttttggaactatattttgacctttttgcaaaaaaataatggtatgcaacttccctctaaacaactgtatgtgtgaataaaggaaagcttgtggactaagcatccataatgattagagaaagacctgtagacctgaggagataaaatccattgcttcaatggttaatcttggggctttatttatttttaataggaattcttgggtcttttgttgcgggctcaaagtcggaggcagcatttcttaaaaaggaaaaaggaatgagaagaagatgaatcatgtctggcttggctaattctgattaaacaattgtttgtttttatctttgtgacatagggtttgattggctgagaattggccaggacttgtttatatgtgacttttattttctgttattaataattttattccactacacaagcatatttctgcttgactaattaatgttgcagaacaaattttctaaaaaagagtatgaattatgcaactttgaatgaagtttgtttctataaaattgtcgttattaaagaatattagtttattaaatattcactattagaaggtctagtgcatacagtatgcttgtgcacacaaactcacacatgcatcagaatgttcataaaactatatgtgattgagatttgagccatttcacagctatcaatcatcccagacatgttatatgaagaataggatgctttgacagtggtcaaaggcatgtgatgccctttgctttaggtaatagtaataagtaataagtaatgaagttgtggagtgaagagaaatgttattcttttgatgtaaattgacctttacatattctctatcttctctaggttgaatgtgaatttactagctatggtggagcacattctctctccccccctccccccctctcttcctctgtgggatcttaagtaagtcctatattataatcttgacaccaaaattctttatgtcacagggg

SEQ ID NO: 11281 - DNA, 1033 bp, Vitis vinifera
  Intron number 2 from transcript GSVIVT01008728001 (locus G SVIVG01008728001) derived from phytozome v7.0 (chr-ID chr1 8; pos 1488751 to 1489783 reverse strand)
ccactagaccagcacttgaagtccgccttgtgcaggtaaatctcctggcaagaagatattgcggaatcattaacagcaataggtatcttcatgcttttcttttttccttaaattgtggtagccttggtttctgttggttgtttcttttctgcctgttttaaaattgtagaatttaccctttcatcagtttgattctgttgattttacctataaaaaaataaaaataaaaattgatactgttgattttctttattttttccagattgctttttttttttcgaatttgggaaaatattactgttatcagggggacacggtattttcacattttataaagatcaagtgcttgttcagatctagatgtttgtgcacatgcggcaaatgatgcatgaagttcaaatcagtaattaggttgtttatccagacattttcccccttccatgtcctacacccaccaagcaaaataaatatgtagttttgtgacagatgcttttgagagagagtttttcaccccattttatttctcgtaggtaactatttttgtttgcaattgttgattttttatataggtacaagatatgaagtaaatgttttttgttcagttcctacaacttcagatttctcaaagtttgcatacgatttgcatttcttaatttttacttgcatcatctcaacctggttttatgtatcctttactacttgaccatagtttgttgttccattttgtcacatcatatgtaagtttttaatcaaagcgggaggagaatcccataattgtaattgttattatgctaacaggttaattctggtaatctctttgtaggtaaaaactgtacaattttttcataattatatttttgccagttggtttctatgggtactactgttggatgatatacaatctgcacatgcctttcgataattttttttttagttttaccaacattctcattggaggtttgaacctctcttggccaaatgctttttggcaatctctcttttatgcaggtccatcccatttctggtggaattc

SEQ ID NO: 11282 - DNA, 11415 bp, Vitis vinifera
  Intron number 1 from transcript GSVIVT01028458001 (locus G SVIVG01028458001) derived from phytozome v7.0 (chr-ID chr7 ; pos 7898625 to 7910039)
aatacctcttatcgggctttgttgagcctagttttgtttgatctggtttgatgacccgacccgaataatattgcgtggtttttttttaatgtgctatattcgtgcaatattttttgggtccgtttaactcattgtggaaccacattttgtaattagggttttttagtgtggtgtggttgctgtgttttatatagagagaaaatattgtagccgacagaagtactttgtattcttttttgataatagtgatatccctacaactccgtggatgtaggcaaattgctgaaccacgtaaatactatcttgtgcgtgcgattgtttttctttggcgtttgttttctctatttttttgtttcgcacaagttgggaatttggcttaattcccttcaattggtatcggagcctagggttaggtttgagtgggagtaatggcaaaggaagtagaaaaggcgtctggaatagaaaagtttaatgacacagactttgcgtattgaggatgcagattgaagattatctctatgggaggaaattgcatctacctcttttggggacaaaacatgaaagtatgaaggttaagaatgggcgcttcttgatagacaggttctaggagttattaggttaactctgtttaggtctgttgcacacaatgttgtaaatgagaagaccacaacagatttgatgaaggctttgtccggtatgtatgaaaagtcgtccgcaaacaataaggtgcatctgatgaagaaattgttcaattcgaagatggtagagaatacatcagtagcacaacatctgaatgaatttaatacaattacaaatcaattgtcgtctgtagaaattgattttgatggtgagattcgtgctctgatcgtcttagcttctttgccaaatagttgggaggcaatgaggatgacagtaagcaattctacgggaaatgaaacgctaaagtacaatgatatacgagatttaattatggctgaggagattcgttgaagagatgcagacaaaacctcaggatctggttctaccttaaaccttgagacaaaaggctgaggtaatgacagaaattcaaatcagggtagattaaaatccagaaattctaatcggaacagaagaaaatctagatcaggccaacaagtacaatgctggaactgtgggaaaataggtcactttagaaagcaatgcaaaagttctaaaaagaaaaatgaagatgattctgttaatgctgtaacagaagagctacatgatgcattacttcttgcagtagacagtccacttgatgattgggttttggattcaggagcttcgtataataccactttacaccgagaaatcatacagaattatgctgcaggtgattttggtaaggtgtatttggctaatggttcagccttggatgttgtgggtctgggagatgtccaaatattgttgcccaatgggtctgtttggttactggagaaggttcgacatattcttgacctgaggaggaatctgatttctattggacaacttgatgatgaaggacatgcaatactatttgttggtggtacttggaaggttacaaagagagctagggtattggctcgtggaaagaagactggtactctgtatatgacctcatgtccaagagacacaattgcagttactgatgcaagtactgatacaagcctatgacactgtagacttggtcacatgagtaagaaatggataaagatgttgttgtcaaaaggaaaactaccagaattgaagtccattgactttgacatgtgtgaaagttacatcttaggaaagcaaaaaaatgtgagcttcttgaaaactgacaggacaccgaaggctgaaaaattggaactagtacacactgatttgtgggggccttcatgttgcatcccttagaggttcaaggtactacatcacttttattgatgactcaagcagaaagatatgggtttattttctgaaaaataaatctgatgtatttgaagcttttaagaagtggaaggtcatggttgagatagaaacaggtttgaaagtaaaatgtttgaggtcagataatggagaagagtacatagatggagggtttagtgagtattgtgttgcacagggaattaggatagagaagaccattcctgggataccatagcagaatggtgtggttgaacgcatgaatagaactctcaatgagcgtgctagaagtatgaggttgcatgttggactatcaaaaactttttgggctgatgctattagcactgcagctgacctgataaaccaaggaccatcagttcccatggagttcagacttcttgaggaggtttggagtggtaaagaggtaaagtttttacatttaaaagttttttgttgtgtttcttatgttcatattgattctgatgctcgtagtaaacttgatgcaaaatctaaaatatgttttttcattggctatggtgatgagaaatttggctataggttttgggatgaacaaaaccgaaaaatcatcagaagtagaaatgtgatatttaatgaacaggttatgtacaaggacaggtcaactgtagtgtcagatgttatagagatagatcaaaagaaatttgagtttgtcatcttagatgaattgactgaaagtactgtccaaaaaatgggtgaagaagataaagagaatgtaaattcacaggtagacttgagtacacctgtagctaaagttcgtagatcttccaggaacattagacctccacaacgttattcacctattttaaattatctcctgttgactgatggtggtgagccaaagtgttatgatgaagccttgcaagatgagaattcaagcaagtgggagttagccatgaaagatgagatagattccttgttggggaatgatacatgggaactgactgaattaccagtaggaaaaaagactttgcacaacaagtgggtatatagaataaagaatgagcatgatggtaacaaacgttacaaagacagattaattgttaaagggttccaacagaaagagggcattgactacacagagatattttcttcagttgtgaagatgtcaacaatcagacttatactgggaatggtggctgcagaaacttacatcttgagcagttagatgtgaagacaacattctttcatggtgacttggaggaagacctttacatgattcagccaaaagggttcattgttcaaggacaagagaatctagtctgcaaattgagaaaaagcttgtatggccttaaacaagctcctagacagtgatacaagaagtttgacaattttatgcatagaattgggttcaagagatgtgaagttgatcactgtcgctatgttaagtcttttgacaattcttacatcatattactgttgtatgtggatgatatgcttattgcagggtttggcattaagaatattaataatctgaagaagcaattgtccaaatagtttgcaatgaaggatttgggagctgcaaagcaaatccttggaatgagaatcattagagacaagactaatggtacattgaagctttcacagtcagagtatgtgaagaaagttctcaacaggttcaacatgaatgaagttaaaccagtgagcacacccttgggtagtcatttcaaactaagcaaagaacagtcaccgaagacagaagaagaaatggaccatatgagcaaggtgccctatgccttagctattggcaacttgatgaatgctatggtgtgtacaaggccagacattgctcatgtagtgggagttgtgagtagattcatgagtaggcttgaaaagtagcattgggaggcagtcaagtggattctaagatatcttaatggttcattagatacatgtatttgcttcacaggtgcaagtttgaaactgtagggttatgtagatgctgattttgctggtgatattgatagtagaaagagtactactgggtttgtttttactctagatagtacaattatatcatgggcttcaaatctacagaagattgttactttgtctactacagaagctgagtatgttgtaaatactaaagctggaaaggagatgatttggctacatggtttcttaaatgaattaggtaagaagtaggagatgggcattctacacagtgacagttagagtgcaatttttcttgcaaaaaatttggattttcattcaaagttgaagcatatacaaacaaaataccactttagtcgttaccttattgaaggtaaactggtaatgcttgagaagatttgtggatctaagaacccgacagacatgttgactaagggtgtcactattgagaagttgaagctgtgcgtagcttcaattggtcttctagcttgaggataggaggatgagttacaggaatgagagattgtttcttgaaggataacggtttgatattggtgattaaactagtctccaagtgggagatttgtcaagctttgtggagcctatttttttttttatctggtttgacgacctgacccaaataatattgcgtggttatttttttaatgtgtaatattcgtgcaatattttttgggcccgtttagcccattgtggaactacattttgtaattagggttttttagtgtggtgtggttgctgtgttttatacaaagagaaaatattatagccgacagaagtactctatattcttatctgataatagtgatatccctgcaactccgtggatgtgggcaaattgtcgaaccacgtaaatattgtcttgtgcgtgtgattgtttttctttggcgtgagttttctctattttttttttgtttctcacaggtcggaaattcggcttaattcctttcacttctcaccccactgcatccctcatcatcctcatctgcagggtcataataggcttccttggccaacccaaaatcaccaatctttgctttgaaaccattgcaacaagtcggcactagtagaatattatcgggttttatgccgcagtggacataaccatggccgtgaatataacagagtcctcaaactatatcccgagtatagcacctcacctcattcttcggcaaaccaatcccaccaaaattcctgatccgactacccaaactacccccacaacacttctcgagcaatatattgtagtaaagttttccatcattggaccttgtgctttcatccccataatagtgcaccaccacgaactggaattcagaacaccaagaatctccatttctctgcggagggatgacgctttggaggtttccgctgatttcaccgccaattcagagggcatgatgcaactagcgccattatcatcaatgaaaacaatcagtgattttgatctcaattttgtagagtatacagacgcaaagcttccttggtctagcttgtggcttcgaatccaagtcaaaccatcagaattgtctagacctcctccatgaaagaagatcctcatcgcaaatttgaatggaaagcatcttctaatcatccattcgtaattgtcgggatccttatccctacgtcttttccccaaccccatgtttatcttcgtgatcacagatgaagtactttttctaaaagtagagggaagtcttgggtttatagggttcttggaagatccagctgttaataaattaaaatcccaaatgctctttctaacctgaaaaatgtgggattttcaaatccctaacggtcactcaacgcgggatttccaacgatcacataaggcgggagcatagtttttcaggttggattttcaatccctaacggtcacataacacgggatttccaacagacacacaaacgcaagagcatagttttgaaagaatcaagcctaacttctaaatccacccatgtttcaactccaaacagagtttcattatctctaaaccttaatcaacaacctcattatctcgaattaatttttagatttctctaaaaaaatttaaatttttgggtcaataaaattaaaaaatttattaaatttacatcaattgtttttaatttttaatattttgtggagtcaaagaaaaaataatttaaattcgataaattatattttatatataacttttaatttttttattttaatttttctatataaaaattaaattatatttgatttttaagaagtaaaatatttaaaaaatattttttttatatttgatgttattataaaaaaaaaaaaaaatttggatgatctagcatcctttagtcaatttaagttgaactattcaatgagtagaatgatctagtcattactagaattgatgaaagaattacaaattgtaagtgtttagctaagctgacaattttggacaaaattcctaagtgttctctaactcgattttccaattcttcttcggactacttgacctttgaagattaagactttgctaattgatcgaggtttgtagccaagtgtgtgttgaatgaagtgaatcaaccttgtttttcatctttaaaagagttaagaaagctgggagaaatatttttgttgaaaggcttttgttcccttgtttttagattgatccaggtgcagaggtagatcgatctaacaaaactgtttttaagatcaaatttcagccatcaaattaaaggtttcttttgctttttaaatacaaacttttcccatttctagtgccccggaagaagaaggtgagaagttgaaagtgaaaggtgctagtcaagtggtccaagaacgattggttggcttgagctcggtaaaaccttgtatttagtttttattcttcatagtggatgttttcactcgattgtaggctcgagatttttttatctcttcagtggttttccatgttaaaattcagtgtcaattgtctctttctctcactttactctttgatttattttcagtttttgatatcattggttttttaggcatatatgttgaatgaaagatatatgagctgaaataagtgtgattatccatggaatatcttcaataatttttctgttcattttggttaatgatattttgtagtaaattgaaatgagttaaggagataattattcttttgaattaattttgaggagtgttgaagcatttgcatgtgaattacatttataaattattgggagagtgttggtgcatacatacttacttgtggattttatgctttgttgaaaagttgttggaagagaagtttatttatattgagaagttctaaggttaggtaatctttgttgggaaattttttttatagttcaacaacacctattcaccttctctctaggtgtagtccattattgagattcacctttcacaaatgattaaggggattctcaaaaatcaaaagtcaattaatgtagtttcaaaaaacccttccaaatcttccaaaaagaaaagaaagagttttaacaccaatcctagtaattcatctaaatccaagaaatgataaaagatatagtggaaaggtgactaagaagaaacccatggagaagtgtttcctttgtggcaagaaatgccactagaaaaatgagtaccttgagttcctcaaaagaaaggaaggtaatcactaactttcaattattaagtcttacttagtggtagatttcattggttattggtaactagattttagagtcattgaccatatttgtaattctttatataggggctttaagtctggaaatgactcaatgatggaggattgacttgactcttgtctcttctactcaaatagttatttatactatgggaacaattagaccactagttggagggaataatgttctagaactctaagattgcttatatgtgttggagtttagaaagaatttaatttcagtctctaatatgtgtaaaatgagctattcattttcttttatatcacagtaacttttatggaaattaaccaagtcgagaatacattaactcataaaataaaataacctaccactaatcaaatatacctttgatacttaaggttgggtcatattaacttgaataggatccaaagattcgagagtttaggtccattagaaatgttggttccattatgtgaatcctacattaaatgtaaaatgacaaggcggccttttaaagctagagaacgtagatgtggacctgtatttttcacatgcattcccacttgacagcaaggcttttttcttagtgaaaaactgatttttataaaactagagtttccattcatttttatttatttatttttaaaaaataaaaccctaaaaaaatgactcttcatttttggaaaagagtgtttttgaaaacccaattctaagtccagaggtcaagttacttattaagaatatactatttaggcagcacccttctaagccctaaaagcatgtttctactgactagattaaaaggaataatacaatttatcgataaatcatggataccataagatagcaaaggtgattatatctaaaaccaaacaacaccttattcacaccaaaacgaacatacaaagaagttaatcacatgagaagagaagacaaatgtacttgaactcatcccaaagcgctttcatgaaaacgtcaaagttagtttaacaaatataacatacaacatgcattatatccattcaaataatcaaacaataatcaaagcaatcaaaacaatattatatagtagaaagctcataaacaaggtttgcatatttacaaaattaaagaagtagaaagtgtaagagacgtggctgaatagcacacacaactcacaatgcacttacatatagctagaagagggttagcttacaaacagtaataattaacacaatcaaaacctcatctttgacatgatgtatgtacagcttaaattaagatataggaaattcgaatagtatacaacaccaactttaaaatttccaacaaacatgcaattaaaaaatgaaaccatataaaataccaaaagtgatcctaagactcaaataaaagttcatctatcctatatgacatgttcacaacacataactaaagttagattaatttacaagtgaactaaaaatgacaaaatggataacttatttcaaacacttagcaaatactcataatagagacattcataagaaaaaaaatatatctagaagcaaaatctcatcatggaaaaaatcatacaacatcctcattatgtctatgatacaaaaccaaagccaagatcaagttgtgatatacaaattcataccaaattaaaagataaagtaaacattgtacaaaaattccaacatgtagtcaaacaagagtcttcacaaaataaatcctaaaaaaaaaatctagaaggcgaatttaattataaaaaatttttaggaaacatctcctacatgtttagtttatcatctaattagccaaataatttaataaaatttgaataaattccaatatataaaaatatctcaaaaggcttaaaataggatagaatttaataatatgcatatattgattttttttaactaacctagaagtgctataaaattatacaaaaaattatacaatatattcaaaatgtaaaatttacaagaaaaattatgacaaggcaagtatgcacatggattaattttaaaatcaataagcaatacctttattaaaaaattaggatagcatagtgggtacaagggaaaattacatctctcacttgggaaatcatttctcaatcttttatgtatctaaaatcaaatttaagaattctaaattaaggaaaaatatctaaaaaaatgaaaaatatcatttaataatttaattgtgcagaacaattaaagtgtaaaaaatagagtgaaaacttaacctattgaaatattgacttatatcttctaatttgaaaactatttttaacatcaaacaaagttctattgacatgtctaggaagtctaaaatatcataaaagcattataaacattttataaggtgcttaaatggtcatattctaatttacaagtttaaagatgtagtggactatcaacggtgacaatagacaaacaatttttaaaaaactttgtatgtaaggatttactaaatccctttttaatttccacaaattcatccataattcattacctcgaatgatcatggataagctcactagggctatgaatgactccattgattggagctacggatttaatttgtgaagcaaaattgaaatttattttaaaaactagaagatacataccaaatgaaataggtagcttggttttcttaagaataagactttctcactgacctagtgatctaagatgaattttaaagagaaatttaaggattgatttagttaggaaaaagattaaaacaattttaaaatattaaaacacatgaaatctcaaatgttaaccatcaaggaaaaaaatgtaagcgtatgtatgtgaattctctagtgtgctaaagtggaactcaagtgacttaaatatggacttgaagtgtagttgtatagaagatcaattgaggcctaatttttgtgtcaactcaagagtgaaaaaaaaaaaaaaatcctaaactaatgcctagtcaaacccaaacatgtgatcatgcattagtgtcaagtgcgtgtgtgaattgtgaaagatgaacttgtaaacattaattaactaaaatctcaaatcaaagagacatgaattcacatttatacattcattcaaagccaatctttatgtgattatctaatggcttatatatataaaaaagaatttgaagaaaatgaatctagtctcactcctaattcatcaatcatcaagattcaatcatacaatcacttaaacaacaaatctaacaacactcatgtgtggcctttacatccacacccaaacataccctaaaatttctaaattaaaagaaggaaaaaaaatgtagaagatgaaagatataataatagaataaaagacaaaagagaaatttcagcaacttacctcaaaagctcttaaatcatgtgtctttccatcattaaaattcagcatttcaaatctcaatcatgctaccacccaaatgcacgtttccaccataaaaaatcaacctcaagttaccttatgcagtcaccgaaattcgcctattctcttcttagtccattctagatacccaacaaacttgcaaacttttgacttaggttctaaccataattttaaaaggctcaaggcgcaccaaggcacaaagtagtcttggagcctgaggtgcaaggcgcacttaaggcaccgactttagtggaataaggcacatcctaatttacatatatattttaatataatataataaaatttaacaataatttatttgttctaaatacataaatcatcaaatatcactcaaaacttcaatttaatcaacaaaaaatataaaaataaataactctaagcataaaaataaatccaaatccatactgctaatagcctaatacatatccaaatctaaaggtcctaaatttgttaatatgcccacaataacaaaattctcccactaaatactttgtactggcacttgataagtctcagcttgggg

SEQ ID NO: 11283 - DNA, 6709 bp, Vitis vinifera
  Intron number 2 from transcript GSVIVT01004082001 (locus G SVIVG01004082001) derived from phytozome v7.0 (chr-ID chrU n; pos 14660734 to 14667442 reverse strand)
gatcgcaacctgcctgaggctgtatgtagcttttcccttgtccattagtttcattactgagttatatgtttacttctttttagcttcctttggatgcaattatggaattttattaccttaaatcttttgataataatggaggtacttttcattatagatttttgataataacccattaatgctacctattgtaacatgtgatctgtttgaatatgtgatttttgcactggttttatttatttattttaataggaaaaaacaacattagaatatattaaaaaaagctcctaataaaaagaggggacacaaccgatgtacacatgatgtacacaagtagagcttaaaaaatcagactttcaccccattaaactaatcaaactctcacacttaaaaaaaaaggaaaaaaaagaaagaaagaagaataagaaaccattttcttgcaagaaacacatcttttggttccttgcaagaacacttcaatccttcaaacattcttctattatgttttttccaattgatccaaacaattcatgagagaattagcctccaaacaactttctgctgatccaacaagccatgctaagaagagcgcctctgaaagctggggtttggttgggttgggagcattcaagacacgttggataatgagaacgttagagtccacaaaccaaaaattcatttgcaatgaatgagggtgtggattgcggatttaaggtctttatggcaaatcatagcatgaccaaactccatcttctcttcatgaattggtccaaagtcagatttttctcccatgctgcttttcatgctacaaactctagagttttaaatttgcttcgcagggaaagtggaagtttcatttgaagctagagatgggcagcaggatttgatggaaaatgattcttttctagcaatcttccagaccagcttatcctcctagtcactatagacagaaagggttgaaaagctcaacagggaatcaacaacctcagtcaactttcagtctaaaaggttttttctaaatctcggtttgaggtagttcccatcccaaaatctgcctcccaagcatccttatggaccattaaatcaaaaagccttggaaatctattctttaaggaaacctcaccataccaatggtcatgacaaaacatgactctcttaaggccatttccaatgaaaaatcttgttttaaggaaaaattagctccacacttccttatcattttttttataagcttgagccataaatgtcccttcctttatgaaagcacctttccctcctccatttcctcatatttctccactatcacctttctccaaaagctttcttgctcaataccaaatcttctagccacttacgtaataacactttctctggtccttttcaacctgatccgcactacatggctactacaaatttgataggtaattttatcagtagaatggtgaatggtgtctgactttcaaaggacaaagaattaagaagtgggatccagtctctttctaaggatccccaagtaaggggaccatttcttgagggatttttttttttgaaaccattgatgatatggttgggggtttggttttcttggtgaagccttattttaactccatgtgtatggtggctttaaaacagttcccaaagaaaatggtttggtgcatgtgtgctgcctcgagggaagtgttttttttttttggtgggggggttgatgtggggaaacatttatacctagacaacctgatgaagaggtactgatcattagtgaatgaatgtactcttcacaagtctagtaacgaatcagcaaaccatgttttaattcgctgcaataaaccttggctactaggcgacctgttattgacaatttctggaatgcactgggtctttcgagaattcgttatggagctttttatcggatgaaaagttcacactacaggtaagcagcaggaacgtatgatgaataattcccctctgttttggtacatttggaaagtgccctttatcaaatcttttataaagtaatagacaccactaggaatgttgaattgcatatcattgtttttttattgatagtttaaatttgggataggtggctttgtatggttgttttctatgtaggaaacaacttaagacttctatttgcagaatacataaataaggagagggagggtctccttgttttaagccttttgcaactctggaaaaatctgttgtgtgtaccattttcttgcataaataggtgacttttttgagtttatttgccaaaatcatcatcaacagcttgtataatttgctaatcaaattgatgggtctaaaatctttgatatcacaccgcctttcttaggaatcaacacaaggagtgcaccactcaaactctttttaaaattacaacaagaatattacttatgcaaaatatacaaggcgtttgatcaaacaacaccccaacacttttgccaaaaaaccaaggtaaagccatttggacttgagctttgtcttaacccaactcattgagtgcattccctcctcaatgaagggcctttccaatcatccattgtcctcttcccccaactgctcaaggaccctaccctcaatgccaatcctcccccttggctaaaaaaaattgcagaagaagaaaaaaaagacaaaaaaagaaaaagaaaaagaagcacaatgtttaaaaaattggaccaatcattgaattgaaaaagttaccagttcatagtttaatggttagattggtggttgaactgtaatcaaaataatgacgtcataaatattaattaatattttattaaaattaattttaataaattaaaaatatatatgtaattaaagtttttaataatatttcattttttatatttaatatgttaaattaaatgataaagatatatatagatgtattaatacattaaattttattaaatagaatgtgtataatatttaattatgaagatatatttaagatgaaaagaaaattatgatatttaattttatctacaatatgtattttattattttaaaattttaaaatttattatgttaattaattaatattattttcatgcttgtcattaataattattataaaaataaatgtgcatgtaaatatatatattggttgaatgataaaattttgaaaagagcgttaataaataaaacttactaacatttttatcaaaacagttcaatagcttgaatgatccattgcttgttttctaacttaaaggttcatggctcaagtccccaccatgcaaagtttcttttcttatcttataaccgatctcacattagtagatgataaactatatgtgttgtataaattgcataaagttgaaggagtaggctcatcattgttttggtcaaacaaaagttaaccggttcacaagaaatcgagcggttcatccaacttggtggtccaaccatcggtttgaatagtttgatgccggtctaacccatgaatggtttatttctgtccataggactggtttggttcagattttaaaacattgagaagaccgttttggccctattcaacttagtctcatcaagattcaagacatcacaatctctcaatcctcatctttacaatccctttacttatcagaaaaaaaaaaaatctctcaatcctcatcttaccaacctcctttttatatcccctctacatgagacatgttaatcataagttgagatatgtgatatacatatcccatatattataaatttgtgcttctcatcaattttttttcttcattttttaatataacatgttttgcaaaacaaaaatttttgatttaaaattaaatttgtagtttaaaaaaagaactaaaaaaaatgcataaaatatattgtataataatctaatatatgtattatttaaaatatacaatttttttttatatattggataacataatataattttttatgtataaattttaaatatttaaatcatgaatattattaacaaataaataaaaaattacttactaaattttaaattgtagaacaattttcaaataatactaaacttgagagagatttcatatatatatttttttaatagaaaatattgaaatgcaatataatttttattttaaacaaatattgaatattaaaatacaataggttttccattccattttttctttctacaaaccaaaaataagcatgtcataatatatcccattggatataatatctaaggatatcatgtactactaaaaatgatgtgttaaaatatagttatgacttcggcgtatgtggtcttttattagtgttttagtgttaagtatagttatgactttttcggtcaatccgtctattcatcaaataaatagcagttctatatatcaatatgtatggtcttggaccatcaataatgatttttttttaaagttcggctacttgattgatccacttatttctactatgtcaatattaatcactatggttggaattatgattcttatttatagtggcaattatatgtctcatgatcaaggatatttgaaattttttgcttatatgagttttttcaatgcttccatgttgggattggttactagttctaatttgatacaaatttatatttttgggaattagttatcatatcctacctagtgggatatgatatcctatcctatcttttacagccaaccatagtcaaagggtttcgagaatgggaatatgaaatgtggggggacaaccactgcaccaaaccctgctctccttttgtagatgccatacatcttgtcctttacctctcctcacctagacaggtagcttgattccgcaactttcttaccagattcttcctttgccatgcatgaatccgatgcaccttctatatatagcccactacacctccctctgcaattgttttacctttcatcatcactgcattatggggatgagcccctcaaggtgttttcaattaaagaaagaaaaggaatacaagaaaaggaacaaaaagaaaattttgttggtttaggttctttagagtcacaattagtaagtttcagtatttgagtctcatttagaatttggaaactccttttttttttaaattcttcttaaaagaagtttctatatttttaaactctttattttttaaaagtctctttttctaggaacttctatttatgtgtttttttagcatctggaaggacttttattttactagaaactcttattacaagaagtttcttaactctaaaatgatagcttatatcatagtgagaatttaaggcttttctatctttttttctttctcttttttctcatttttattttctttttcttgctgccataatcttaattcctaatttctctccttaatcctcaaagagtgaagttgtagaccatctggtttcattgtagataaccaccttaggttgtcctctattactacatctcttagagacacattttctgagcacaatgtaatggaataaagaccatgctatgactttcactttacctggaaactctcttcagttttttactaaaattcttgcccactgaaatcatgctgatatgcaatatcctcaaccaccaagatgaagcttccacaagcatcacctactttcttaaataacttcttcccccacaagtgaataggcatcctcaagaggtgtgcctaagattctacaaggtgggagtcccagtgaaagccactggctgctggcacccatttgtgtaaggggaaaactttctgctgaaaaagcttactgccttcaaaatccaattcactgcctttgtggaagagcactcaaaaaggacaaaggaattacttggacctgccacctttgcaccatcttcctccattcccaatggtcatgcttctgcttctaagaagtccggcagaggattccctgctgctttccaacacctcatcaggcaacatttcacctcattaactttctcgatatcatccttcttcgtctctgtgctgcactgagtcctcaaacctagccagttgcctcttcacatttctgcaagacttgtgctttcagaaatccatgcagaagatttccccacctttgaggagagaagctcaaaggtgggaatcgtgctggaagaggctgatcgaagaacacacataagttcctgattttgggagcaatagcatcctaaatcagcaaatcaaacccctctgggaaaaatcaagtaaaatctccatgcatcctctgaaaaaacagaacagagttagtacctctctgcttggttttgccttatttcagcccttatccacccccagtatcttctaaccccctggaaagcagctccttctctttccacttacagcaactatctggagagttcagccaccaaactaagccttttttgctcatcaaacgagaataacccttccccctttctataatccttacttcaactttacccttcatctcaccagtagaaaactcaaaaaaaatttgacatctacaagtgatggctcatctatgaatgatatgtgaagattggctactttgatgaactgccaaagaaaagaagatctgatgaacgcagttctattcacaggatttacatcactgaatctctgttcagacggctattcttgatggcaaattaacaatttttttcttcttcttgtttttatctggaagaaaatgcaattcttttcctttattcacatactgtattaataatttatcgtctgataatttttcttgtttctgtaacaggctag

SEQ ID NO: 11284 - DNA, 14494 bp, Vitis vinifera
  Intron number 8 from transcript GSVIVT01012939001 (locus G SVIVG01012939001) derived from phytozome v7.0 (chr-ID chr1 7; pos 13897399 to 13911892 reverse strand)
acttttctaacaagtaagatctttatcctcgtctctctgacattgttatatcattgatttatatttcagtaaacaactacaagaattcttgctgtctatgtgcagcttcacactacccttatttctctgagcgtgctataattatctatttatttcagtaaacaagtattaaaatgggtgcttcttaagtctgcacacagaattgggattcggcttaacacacagaaacaacttgggggagattgatctttatcctcatatctttgactttgtaatatcaaatattaaaaatataagtacggcttaatacacacaaagaccgtgggtggagagagagagaaaggattaaaggacaaagagggagagggagagagataggcttcacctccacctcctgtgctagcctaaatctttcatgttttctgtgggccttgcctgatctccaattggtaattagatcatagggtggagggagaggggcagtgagggagtgggagtggaagggttagagagtgaggggggagagagggtgagagagggaaagggggggtggtgagatggggagggatagagagtgagagggaaaggtatagagagtgagaggtagactaatagggagagagggagaggatgaatgagagagagaggagtgagggcgagcaagggacctagacctcatcatcatcttacgtccacataggatttattttttgtagttatatgtatttagggagttataggtatttagggagggcatgggaccatgagacctcatgatcatcttgcctccacacaggatctatttttagtagttatgcatattttaatggagggagggagggaaggagggcatgggaccacaggacctcatcatcatcttgcctcctcataggatctatttttggtagttatatgtattttaattcttgcctttgcataggaccttatcaaaagcactttatcaagcttgtccatttattatgtcttttcaatattcttaggaggctagaataaatagcttctaccaaaaccctaatattaacgggtgttaactgggaggattttctaaaatgtagtattcatgctaaaataacaagagtacatggctaatataatatacatggctaattacataataaggaagctaaaaaataggtaactaccctaaatcagattgctataaatgtggaatatacaagctaaccaaatctcctaaatatacttctgaccaagtacaactgtacatggttttcttatcagtttttcaaaactccccctcaagttggtgaatgaatgttttccattcctagcttactaactattgtctaaattgctgcagtagacaacccctttgttagaatattagtaagctgtcctctagtagacacaagtggagtgcaaattagtctactgtccaatttttcttttatgaagtgtctatcaacctcaatgtgtttggtgcgatcatgttatatagggttatctactatattgatagcaaacttgttatcacaataaagccttgtaggtgtctctcatgtgatcttcaagtcttcaagaattgtcttcaaccacaataattcacaaattccaagtgccatggacctaaactcaacttttgcacttgatctatctacaacattttgttttttacttctctatgtcattagattaccacccaagtatgtgcaatagcctgatgttgatctcttgtccaccatagatccaacataatttgcgttgatataatcttcaagggtcaacttttttcccttaaataaaattccacctcttagagttcctttcaagtactgtggaatctgatacacgaccaagagatgaatttccttaggattatgcataaattggctcaccacactaaccgcataagccatatcaggtctagtgtgggacaagtaaatgagccttcggacaagcctctaataagtacctttgtctaccgtcatatcttccaatgcctctctgagtctatgattctactctatcaatgtctcaattggcttgcatcccagtttgcctaacttctttaacaagtccaacacatttttgttgagataaaaattccatgccgagaatgagcaacttcaatgccaagaaaatacttcaatctagcaagatccttaatttaaaattctttcacaaggcacttcttcaaagcttcaatcccttctatcttgtttccaatcacaattatgtcatccacatacacaagcaatgctgtcactttccctaaacccaagtgtttgacaaataaggtatggttaccttggctttgcttgtaccccatagagagcataaccttggtaaacctcccaaactaggcatgtggtgactatttcaaaccatacagagccttcttaagtttgcacacttttttatttcccaattgtaagctgaaactaggaggaatttccatatatatctcttcttcaagaccaccatgcaagaaagcatttttaacatcatattattgtaaattccaatcaagattagcagccaatgacaacaacaccctaattgtattcattttcgcaataggagcaaatgtctcaaggtagtcaatcccataagtcttaagtatagccctttgctactaatgtttccttataccttttgagttttccatctgccttgtatttgactatgaagagccatctacaacccactggagctttccctcttggcaattccaccaaatcccatgttgcaagagcatccatttgaactctcatagcttccctccatttcccgtgaccaagtgctttagataatgttttgggtatagacacagtgtttaggtgagtgaggaaggatttatgggtggtagacaatttattgtaggacaaaaataggtatatggggtgatgagtgcatgtcctagttccttttcggagagttatgggtaaatcatggtcatttgtgtcagatatgactttctgtggtaattcagggttagaaacaaggggagaagtggttatttcattaccagaaactggttcaaactcgtaaacatgaataggttgaatgatacgagctttccttcttgagcaatctgcaatggacgagtagaactttgaacttgtttttcctttgcatttactcttgcattaggaggtgtacacggttcagactcatttagaacgagggcaagaggcttagaaacaggtttgatgaccacaatgggcttagaagggaggactggtacttgactcaggggcaaatttgtcacggtacttgactcacaaacaggtgaagaatgatgtttagaagacatagggagatcaagtaagaatggtccctatccttatcttccacaaatgatttttccccttgaagatatggattagtgaaattgttatctttttcggtaaaagtgacatctgcagagataaaattttcttgtggaaggatgataacacttgtaccctttttgaatagaagaataccccagaaaaacacattgaagagctcttgggtctaatttacccctgttttgagaatgaatgtggacaaaggcaaacacaaccaaagattctggggacaaatgtttgaagcgttgaaatttggaaagaatgtagacaaaacttgcatgagacttttaaagtcaagcactcaagaaaaaaaactacttataatatgtacaacagttaaaacaacctctccctagtaatttttaggaacatttttttttgaaaaagaaaagctctcgtggttcttaaaagataaccattttccctctttgtaactacattttgttgggatgtgttgacacgagatgattcatggattatgccttccttttaaaagaatggagacaaaaattgattaacgtaatcccttgcattatttgaccaaaccttttgatttcaacccttaattgatttttaaccatattgaaaaagatgggatgtgtgggcggcgattttaatgtcataaggagaagttcagaaaaattgggaggttctagattaaccccaagcatgaaggattttgatgatttcataagagattgcgaattgataggttcacctttaaggagcgcatcatttacgtggtaaaacatgcaagagaatccagtatgcaagagattagattgtttcctgtactcaaatgagtgggaacaagtatttcctcaaagtcttcaaggagtactttcaagatggacatcggatcattggccgattgtcttggaaaccaatccgttcaagtggggaccaacgccgttcaggtttgagaatatgtggttgcaacatcctagttttaaggagagttttggaagttggtggagagagtttcaaggaaataggtgggaagggcacaagttcatgaggaaattacagttcgttaaagccaaattgaaagagtggaataagacttcttttggagagctaagtaaaaggaaaaaagatatcttatctgagttagctaactttgatcccttggagcaagaagggggcctatcccctgaacttttagtgcagagagccttaagaaaaggggagctagaggagttgattttgagggaagaaatacattggagacaaaaagctagggtgaaatgggtaaaagaaggggattgtaactcaaatttttttcataaagtggccaatggcaggcgaaataggaaatttatcaaggagttggagaatgaaagtggcctaatgttgaataattcaaagagcatcaaagaggagatattaaagtatttcgaaaagctctacgcgagtccttctggagaaccttggagagtggaaggcttagattggtcccctatttctggtgagagtgtgtctaggttggaatccctctttactaaaaaagagatttctaaggccatttttcagttggatagggataaggctccgaggccggatggctttaccattgtagtgtttcaagattgttgggaagtgataaaggagaatctagtgagagtgtttgcagaatttcataggagcggaattatcaatcaaagcaccaacgcttcctttatagttctgttacccaaaaaaagcatgtcaaagagaatctcagactatagacttattagcttgatcactagtctttacaagataatagtcaaagtgttagctgggcgtctaagaggggtacttcacgaaaccatccattctactcaaggagccttcgttcaagggagacaaattttggatgcagttctcatagccaatgagatagtggatgagaaaagaagatcaggggagaaaggagttgtattcaaaattgactttgaaaaggcctatgaccatgtgagttgggattttttggatcatgtgttggagatgaaggggtttagtcctagatggaggaaatggatgagaggttgcttgtcctcggtttcttttgcagtcctagtgaacagtaatgcgaaagggtgggttaaggcatctagaggtttaagacaaggcgaccctttatccccttttttgttcactataatggcagatgtattgagtaggatgttattgagagctgaggagagaaacgtcttggagggttttagggtgggtaggaacagaacaagggtatcccatttacaatttgcagatgataccattttcttttctagtacttgagaagaggatatgatgacccttaagaatgttctgctagtgtttgggcatatttccgggttgaaagttaatcttgacaaaagcaatatctatggcattaatcttgaatagaatcgtctttctaggttggccgagatgcttgactgcaaggcttctgggtggcctatactttacctgggtcttcctctgggagggaatcctaaggcttgtggtttttgggatcctgtgattgagagtatatcaaggagattagatgggtggcaaaaggcgtatttatcttttggaggcaagataacccttattcaatcttgtctcacccatatgccatgttactttctctccttgtttaagattcccgccttagtggtagcaaaaattgagagattgcaaagaaattttttatggtcaggcgtaggggaaggcaaaagagaccgtttggttagttgggatgtagtgtgtaagccgaaatcgagagggggattgggttttggaaagatttctgtaaggaatgtcggtcttttagggaagtggttgtggagatatcctagggagggttcagttatgtggcatcaggttatcttaagcatttatggatcacactccaatggttgggatgtaacaatatagttagatggtcacatcgttgtccttggaaggccattgcactagtcttctaagagttttccaagtttactcggtttgtggtaggtgacggggataaaattcggttctgggaagacttgtggtggggggatcaacctttgggagtccaatatccaagattacttagcgtagtcacgaataaaaatgctactatttcatcaattcttagatatacccgccctttctcttggaatttcaattttcattgaaatctttctgattttgagatagaagatttagaaggccttatgtggtctcttgatcgtctacacatatcaccttcggttctagataagagatcctggtctttatctccttcaggatttttcacagtcaaatctttatttctggccttatcttaatattctgagtcgcctccagttttccctaccaagtttgtctggaattctcaagtccccttcaaagtcaagtcctttgtctggttggtggctcacaagaaggttaatactaatgacttgctacaattgagaagaccccacaaagcacttagtcccgacatatgtaagttgtgcatgaagcatggagaaacagtagatcaccttttcctccattgctctttgacgatggggttgtgacacagattatttcaattagcaaagacggattgggttccccaaggagcatctctgacatgttatctactaattttaatgttttggatcttctaagagagggattgttttatggcaagacgcgtgcatcgcgttaatgtgggtggtgtggcgggaaagaaatgtaaggattttttaggataaagcaaggaattcagagtatcttgggattctattcattttcttgcttctctttgggctttttgttctaaggtttttaaggggatacctcttaacgtgttacaacttgattggttagcggtgtgtaactagagtgtttgctttccctctttgtattttcttatatttgattacttgtagtcttgtttttctttggtgggaggattcctcatccttctattgtaccttctttttatcaatatattcttttgtcgtttcctatcaaaaaaaaaaaaaaaaaagatgggaaatactaaactcacatttgatttgttttgtaaaagataaatccatgtcacacgagtacaatcatcaataaagaaaacaaacgacgagccccataaatatttggaattgttgaaggaccccaaatgtcattatgaattagagagaaaggaatagtggtttttttattgcttatttgaaaagaagcacatttgtgctttgccaattcataaatagtacaatgaaaatgttctatgcttatttccttgaacaataaaggaaacatgagtttaaaaacactaaacgaaggatgaccaggttgatagtgataaagccagttcttgtctttatttgacatggaagacttaaaaagtaatgacaaagacaaactattctcatttctagcacttttctctagtatgctaaggctttttgtagtatgtgcaccctagagagttcatcttaatggctctagataagtttgattgaccattttctccgctacgctgttgattgggtgccatcatttttaggtttgctttctttgttaccaaagtcgagctctcagtactttgagtttcaatcattactccacgtttgccttcttctgcccttattatagcaatagtctcgtttaatgaaggtctccttttcccaatatctgcactcgaacatgatcaaattccatatttagcccaactagaaaatcatagattctatccttttcaatagatctcttcaagagagacgcatcatcggtgcacttcatttatttgttttgatagagatccatctcctaccacagtcccttaaaataattcgagtactttgtgatagaacaagtaccttgttttgcatctgacatcttcgttttgtctcataaattttcgcaacatcattgacctttgaatgtctcaagaatagaatcctagacttccttggtcgtgtcaagaaacacacaagtgtcggtgatcttggatgccatgttattccataaccaggacatcaccattaaatcttcttcattccatgcttcaaatttaggatcttttcaacttggtcctataccatttagatgagtcagttgcctcttcctttcaagaacgtacggactagttgagaccacttgagataattcttaccattcaatcaataggcaacctagatgtttggtagatctctcatggctggatgcttgctttttttttgataagtaagcacaaaattcaataaaaagaggcaaaatagccacaaagtatacagggggtatacaaggctactaaggcctcacaagcaaaaaaccaaaaaaacccaccaccccttatctggaggctaaccactccagaaagcctatgagggaaggcaactcctctccaaaatacaatttagcccaaccccatatattacaaacaaaagaatatttaagtttctgaattgctaacacacccccctcccctaaaagctagtatattcctctccttcaaagccgttcaaaaaataaacaacagaatggaattccaaagttttttcatttttttccccacaaaggatcccctttaactaaataaaacctcctttatagtttctggaaacacccattgaaccccaaacaatcccaaaactaaatcccacagcactctagccattgtacaatgtatgagaatgtgatttacattttcctcttcacaatcacacaaaaaataacgattgggaagctgccactctctcttctgaagtctatcaagagtcataatcttcccccaagcggcttcccatgcgaagaacacaattttagttggaactctctccacccatatgttattttttggaaaaacggccatcaaagggctttccaacaggctgtatgctttctttactccaaactgcccgtttcttccttccttccaaaaaaccgaatcttcctccaaagttatcctgtgacccctcaaaacatgaagcaagttgcctaccatatccaattcccaatcgttaaaatccctaataaacctcagactttggttggatgtttgttttgctacatttgtctcaaactttggtgacttcagttgtttctgacatattttctatggaaggaatgaaaccgagggaaaagaagtggatttgaataacacggattgatttctaaggcaacgaaggccaatcaaataacaaaaaaaaaggttcaagtagaaaaacgatgacaaaaaaggcttgaaattgcaaaacagtcaacaccaacaatcaaaaaaatctcaaagagcctaaagctttgataccatgtcaattgggaggattttctgaaatgtattattattattaaaataataagagtatagggctaaaaaaatgggtaaccaaatcagggatatacatttctaattacatagtaaggaagcttaaaaaaaaaggtaattaccctaaatgagattcctataaatcagggatatacaaggtaaccaaatctcctaaatatacttctagccaaatacaactctacatggtttccttatcactttttcaacaaccgacaatgtagaaagagataatcgatcaattctttgcttctcatgcataaaatgcactaattaggactaagcaatttgttctcaattgtagcatgtcattggtgtttgccttcttatgtgctgctaaccaaacaaaggctttgatgttagatgaggcttttgaattgcataaaaatttagttggaaagaaagaaactggatttgataaattagacaaggccaaaaaggaatgattttattgagtataaacttgtagaggataaagaccaagctcttgtatctacgatagatggagacaattgcacaagagtgagtgaggacatgagtgtttctaggttcttaatttccaaatcaatgaggttatgaacgaagttaaggttctaagaaagataagaagggttactaaggacaactaatacaatgagattttttattgtgataactttgtaaagattttaaaattgtgaacacaatgatgattttcccaccacaaatcttcctagaaactaattcttgctctatcacccaccacaaagcgagtgtgtggagaaaaattctaaaatacttatgtaatggccttccaagggcatttatgtgaccatttgactagaatgtaagcgtctcatccattaggatttctcccataaatactcgaaataacttgataccacatagtagaactttccctagggaacctccaaagccactttcttaagagagcataattcctcaaagaagtcttctaaagccctaaacctccaaactcctttagcttacacactatgcccccctaataataagatgattttttttttaccctcctcaaccccgaccaaagaaaatccctttacaatttctcattctttaaagttgttgttgtcggaatattggaaagggataagaaaaagctagagatgtaagataagcatgattgaattatagttattctaccctttaaagacaaaaagactttttttccacccatctagtttcctcaaggttctttcaactactagattctaaaatttgtttggcttcatattcccttctaatggaaggcctagataaaataaaggtcatcctaaactttacaatcatgcatcaaggccaacctgaagactaaattctaacctatattgataccatagcaaatactcttatctaaattgatcttaatccttgatattagcttaaaaaacaataggattagtttgaggttttgcaaatttttcggagaggttctacaaaaaaaaatagagtgtcatctgtaaattgtgaaagagacattcttgttgtattcgtgcccatcatgaagccctttgataaaccactttcatccgctttgatcatcaccccacttaagacattagctgcaatggtgaaaaggaatagggaaagacgatctcattatcctaaatctcttgccttaacctaacctttgacatttccatttactaggattgcaaaaattattgaagacaagcaacccctcatccaagatctccatattgtgctcaaccctctctctagtacatgatccaaaaaaccctagtccacatgatcatgtgtcttttcaaaatctattttgaagactactctttcattccttgagcacctttctcatccaccatttcattggcaatcagaacatcatctcaaatttgtctccccttaaccaaggttccttgggagatgtagatggtttcatggagatttttgcgtctgtaccttgatgaaaccttagttataatcttatatagaatggtagccaaattgataggtttgaaatatgagatttttttggtttggcactagagtgatggatgtgacattggtactttgatttattattccattagtggaaccccaagagcaccccataagaacctctttaatcacatcccaacactcttcatacataggaatggtaaaacaatcaagcctgggggccttttccttgttcaactgaaaacgacaaaacatatgcctttattttttgaaaaaggatggttcaaccatacatcactctctccagatatgagagaccaattcaatccttctatccttcaagaattgcctggggtttggagtatagctcataaaaaaagtgcactatctcctttgaaatattttcaatcttgcctagagttactacctcttcaaatagtaaggattttatgaacttcctattttacctaccattgaccgccccatggatgtattgagaattgtaatatcattcttttatttgtttgaccctagtttttctctctctaatgaacctctttctttacaagtaactcctccagttacccttaaagctctcattgttgaaaattcagaagttagattccctttttgctcattaatgtcaatgatgacaatgtcaaagaatattcttttttcctttaaatttccaaagggcacctcattccattcttttaatttagaattgcatttcacttctttatgaatttctgacctttccaaccgccaacctaacacccaggccaccaagaactgagtctctccttgaaatctaggtgaaatgaccacatgccctcaaacttgaatgaagctagacctcacttaaatggattggtatttaggatgattgggcaatgatcaaaggttagtttaaaaagcactttttggagggattttcatttaaatgatttgaattttgacattgaaaatgattgtaatcgatgaatataaacttttatttaatatattagtcttgaaaatataacaagttaaaacttcagagatgatcatataaagacatatatatcaacaatacatataaatatatatgcttagtacaatttgaactaaaaattattaaaaatttaataggtatatttttgtgatcaacctatacattaaactcaaattttgttaaattgaacttttcaaagctgtagtattcaatgctttatatggtatgatatagctaaaaatctttaaatcctactatcttttataaaattggttgttcttaagtgctttcaatatatgtgtacatgtatacatttttttctatttaatttttcactatttagaaaactttcccttgagggtttgtgggaggcttcaggtttaagtcttaatggggacaaaatttacttataaaaaaaacccatataaaaaacttacaacacataatatggtacgatacaagatacaaaaccaaaaagaaaaagaaaaaaaaaagaaacaaaaagaaaagacaagacaaacattagatgatacattttacaacttaacaattatgattggggcttggtgttcttaagaaagtagggttagttttatagtagggttgtggaagattataaggagagcttgggatggtatcaattatagaacctcatttttttgtgggaaatggttggagggtgatgttctagaaagatggtgtggtgattcttctttgagcctgtcctttccctcgttggacaccataaatttaactaagaatgcatgagtaatgaatgtcttggaataggtaggtaagggagatcattggaatccttgcttttcaaggactctaattgattgggagatggaaagggttgagtcatatctcttaaggcttcaaggaaagttggtgaaaagggacgtgaaggataagatggagtggatggatgaagggtaaactttcagttaaatgtttctaagaatttttggtgcaggaaaaatcagtcattaccagtgatagttgtttggaattggtgggcctcaacaaaagtggaatattttgcttgggaagcatcttggggaaaactctttactttagattagctgcaaggagagggtaatctttggtgaacaaatgctttcttagcaaagaacaagaagaatctattgaccacattttcctatattatgctaaagtaagggtttcatgttagttggttttctctttattcattggtaagagaaactcttaggttagttttatggtgaaagaacaaaaaggttttgcagagctgtctctttttgtgtgttttggacattatatggaaggagagaaatcaaaggccatttgaaagtattgagaagtcggatcaagtggtaaaatccttgcttctttgtaatgttttatcttgggcttggaggtgcatagatgggaccatgtccatggtagatttttagattggttggggactaggtaaatgggggattttgttttttgttggcccccttttttccctttttttaatctatgcctcttggcatcctctatatatgttctgtggactttgccaagcctttcttttctaggtgctactaatatactcttttacttgcctataaaaaaatgcctgtgtttgatagtgaagtaattcagaattttgctacctttttctctgtgaaagagtccaccatcactatttagccactaatagatgaataaatgcatttaatttatagtgcaagttgtttttcatctgtttgcataacttgctgctacctctatttggtttccagatttggtttgtcttgaagatctaatattttgttgcatctcagttttttttttacagctagatatcagttaatgtgatgctgcttccaatattttattcacttatgccatggatgctgataattttctattttttgccgtatcctcagaaaaccatctgtg

SEQ ID NO: 11285 - DNA, 5012 bp, Vitis vinifera
  Intron number 17 from transcript GSVIVT01033621001 (locus GSVIVG01033621001) derived from phytozome v7.0 (chr-ID chr 8; pos 19198320 to 19203331)
gtgtatctagtattggtggattgacccttgacgaggtaagaaacataacaaaatgaagcaattggccttaactttaaggttttatttggtggtatttccattctcagaaaaaaaactgaggaatatgacattctgtgagatttaagattgaaatcattcagataaaactcttgtaagatcagactattggatttcctttatgatattatgctttttctttatttaagaatacaaatgctctttatgcaattgatgttaatattttttatccgatttacaattggaaaatatttacagtgtggaaatttattccataagtgataagtgaagtggtattgctttgagaaataagaagttttgaaatataattactgcaaccatgcagctatgcacaagagctacagtattgaaaactcttttactaggataaaaaacctgtaaatttctccatattactgcaatgatgcagccaagcacagcagctaaagtattgaagtctattttgctaggataagaagcctgtaaatttccccatggcttgttatcaagtatacagctgtaagtaaatatgacatacacaatttagtaccttattctgctagaaggaggtgggttaaggagaggtccttctcctttcaggttcgaaaatatgtggctaaaagtggagggctttcttgaccttgtccggagttggtggagggaaatagaggtcaggggtacagctagttacagactggcagcaaagacgaaggagctcaaacagaaactgaaagtttggaatagagaggtctttaataacctggaagataacaaaagaacagccttgcagcaagtggaccattgggatggtgtggaatgtgaaagatgcttgtccttggaagagacagaattaaaaaaggaagcaaaggaaagctataaaaaatgggttatgttggaagaaagtcattggagacaactatcaagggaggtgtggcttaaggaaggggacaagaatacgggattttttcatcgaatggcgaatgcccaccgtaacaacaatacgttggatagagtaaaaattgatggggtttggttggaagagaatcaggaagtaagggaggggattgcaaatgcttttcatcagaggctctcagaagaagtggggtggaaggcggatattgaggggatccaattagaccggattagccaccaagaagcagagagtctggagattccattctctgaaaatgagatccattctgctttaatggatatgagtggggataaagcccctgggccggatggttttactatggcgttttggcaaagatcttgggatttcgtgaaagaggagatcttggagatgtttaaggagtttcatgagcaaggatccttcctcaaaagcctcaataacactttcctggttctgattcctaagaaagggggagcggatgacttgggtgattttagacccattagcctcctgggggggctatacaaattgatggctaaagtgttagctaatagactcaagagagtgctaaacaaagtggtagcccctactcagaatgcgtttgtgatggggaggcaaatccttgatgcttctcttattgcaaatgaggtgatagactcatggcagaaaagaaaagagaaagggctcatatgcaagttggatattgagaaggcgtatgacagcattaattggaacttcttgctgaagactctacacaaaatgggttttggtcctaggtggttggggtggatgtggagttgtatctctacagccaagttctcagttcttgttaatggggtcccagctggcttcttcccgagttctaaagggcttcgtcaaggggatccattgtccccttacctcttcgtcttgggaatggaagtgctagatgccctaattaggagggcggttgtggggggctacctttcaggttgcagtatcaagggtgataggaggcacaatctaaaaatttcccatcttttctttgctgatgatacaatcgtgttctgtgaggctaacaaagagcacctaacacacttgagttggattctcttgtggttcgaagcagcctcaggcctaaggatcaacttggacaaaagtgaaatcatcccagttggtgtggtggaggagattgaggagatggcagtggaattaggatgtagggtgggatctcttccttctcagtatttgggcttgcccttaggggctccgcataaagcctcctcagtttgggatggggtggaagagaaagtgagaaggagactagcacggtggaaacgtcaatatatttcaaaaggggggagaatcactcttataagaagcgtgttggctagcatgtcaatctatcacatgtctttgttccgaatgcctaagtcagtggctaagagattagataaagttcaaagagatttcctatggggagggggaagtgaggaaaagaaagctcatctcatcaagtgggaggcgatttgtgaagataaaagcaagggaggactaggcctaaggaagctggtgttcctgaacaaagctctgcttggtaaatgggtctggagatttgctattgatagagatgatctatggaagcaagtgatagtagcgaaatatgggcaagagggccttggatggagagcaaagaaggcttatggaactatcggtgtgggggtttggaaggaaatatggaaggaatctgactggtgctgggataacatggggttcatagttgggaaaggaaacaaaatcaacttttggactgatgtttggtgtgaggatacaaggctagcccaaagtttcccccacctatatgctatggcttcgcataggaatgcgactatggaggagatgtgggattagaattttggccaaggggggtggaatctaagatttttgagggactttaatgattgggagatggagatgatagggaacttgttgcatgtgttgagggatttcaagccttctatggaggaagactcagtccgttggaagggaggaaggaatggtaaatttagggtgaaagaagcctatagattggtgaccagaccgaatgatattggttttcttgctagatgcatttgggtggattcagttccatccaaggttgcattctatgcttgggaggctacttgggggagggtgctcactcttgatagacttcagaaaagaggatggcagcttcctaactgctgttttctatgtggttgtgaagaagaaactgtaaatcacattcttattcattgtatagtagtcagagttttatgggatattgttcttgggttatcaggtgtgcagtgggtttttccagaaactgtaaaggaggttctaactagctggaggggccctttcgtgggaaagaaaaggaaaaagatatggaaatccattccgttgtgtattttttggacggtttggaaggaaagaaataggttagcttttaggggaggagagcttaatatccaaaagcttaagaattcttttgtgtgtagtttgtggagttgggctagattgtatattggtaaggagcgtatgtcccttatagggttcctagaatggttggcgtccaactaagggatggtgaggctcgttgtttttttggctttttgaggggtttgttgctttgtataccccctgtatacttgtaactctttgcccttcattaatatatcttgttttacttatcaaaaaaaaaaaaaaaaaaatttagtaccttatatgttttttcttcaccccaaaatttgttgtgggttctcaaaattccttgagataatgatacacatgtcttcttgcacgatactttgagctaagaaggtattactgattttagagattggttggtcatatgctctgcatagaaaattaaggaactcttagaataattttgtccaagtcttggaaggatctcccatccttctgttttatataacctttcacgtattggtttttttttccttatctaaataaaaatcaatcttgtccaaatatgcagcccagctcaatttttcttgtaaactactaatataaacaatttgtacctccaatctgaccttagaaaccaaggagtccattgttggcctgttcgggcttatagtgactcatgaacttcttggtggatgatgttggtggcctttcatagtttaattacctttgattgttagtagacttattttaaacctttgaactttttcagggggactatttatttgatttaagacaacttaatctgattttgctttaatttgttgacttaaagcatattacttaatttttagacttattttaaacctttgaactttttatcagggggattatctattcgatttaagacaacttaatctgattttgctttaatttgttgacttaaagcacattacttaatttttacttttaactattaaggctgtttggtaaagttaaatttttttgaaaccgtctaaattggaaagagttgacaattgtgggagattttagatttagaaaaaaagaggaaagaactgatggttgtggtagagagatgatgagaatttgagagttttaagcaatgaggacacaaaactatagtggattcagaaaaattattttcttctaacttattacttttaagttaatcttgtcttttagtagtattattaaattatttactgaacatacttaatacctttactggcttaaattaagtcatttgtttatatcaaatcatcaagtccatttaccaaacaaaatctttgtgtttcacatagatttgcttggagaacaatcactataggtaatatgcttgtttctaatcttaacctaggaagggagatgtgaatttttcaattgtattagtttattattacttggtgggcttcttgtggaaataatatacaacttggttcttgagttgtttgtgaatttattttaatcttttaaacaatttttcaggttgttacaattctgttgagttttgaattgtttgatgactttggtctttccaaatcttttctttactacagcttgcaagggagactctatccttttgggtgaaggc

SEQ ID NO: 11286 - DNA, 6606 bp, Vitis vinifera
  Intron number 2 from transcript GSVIVT01031416001 (locus G SVIVG01031416001) derived from phytozome v7.0 (chr-ID chr6 ; pos 18845173 to 18851778)
tggtcgtagagagagtaaacttccacattcacaaggttttattttactttattaccttccactaattgggtgtatatcagaaatgtatgatttataatttatgtggttgcatatatctaaatctctagatatttttccctcaaggcttaacttatatattgttttggaaaacccatgtcactgggtttgtttcagagaagttgggtacattgacactctagttgaacttgatacaatggcattatagtggaactggggactctcttttttttctttggtgattgatctttatgggttgttgctaaagttttgtgccacaaagacacatttattctaaatccttctcttggcatccaatttctattcaaagttgcagtgtccttacattttgttattaacctctaccttatgtagttattcagtcctagttgacagcccttttgcagcaataagtggggttggggggtagcatggcattaagttgggatactcttaccccatcatttaagttggggcccaattttatagtctcttctactttattttggttaaagattgttatttatgtcatatatgataggaatcataacatatttcaattgaagccggaggattcagtggtagcatcgattgctatgttttaattcatttttttgtcacaaatttcatgaattaaacaatgtagcggcacaaacctggtattttttttttcactagataataaagaggttgcagtttaattcatcatttgcacaagcctcttatttttctattaagcaatattgatttattaagtgtagcagcaccaagtgtacagctgcttatcactaaactcaatacttttggaaaaagaaagcgaaatgttttggggcctttgatatcccattgtaaatttgcaatcataacatccttaccacatctatgctttcaaatgttgttgtacaatacttaacatggtttaagcttagttttgttgaccatttaagagaagactagtcttatgatccttactattgttcatatgagactaggaaaatgattttggttattcattatgttaaactgtacctatgcgcatacacacaaagattggcagttagttccctgtggtagtgtgaaaccttgaacttggatttaggtgagcccaaatggcatcgtggttagtttactcattagacccaaggctcaatgaggaaaaaccatcaaagggcaactagttggaagcaaactaatagtacttgcttagattagcaaaactggtcatactaaatgaataacaaaatactacttaaatctcgaagaatctcaaaactaatttaagtactctgtaagattaaaatctgtgattttgataccactttgtaccaaccgtgagagctcaattgctttctaacaatgaacactcttggtaaagaacttttgatagatgacaactttaaactgctcccagactttgagctcttgattcttcataagccttgtcactcttcactaagtctctacctcatccactggcatgaagttggcatcagtgaccttttgtgcctcaaagcaactcaatacttcaaagtagttctccatctaccaaatccaagactttgcctgagaaagattccttcttcctcgaaggacaaaggattcactttctgaagtccttaaaaaaaatcagtagaaaatgtggataaatgaccttgggtttgatttcctacaacttggggctgaatcttagtagctttggtctagcaagccactgagtctgcctacaagccaaaggcttagggcatcctttccatattcaaatgaggcacattgactccctcagcaatcataataggcagatcggcttccttaatatccatgagaggtacccctttcagcctgattgccatgagcagaagtggttcgtcttggtaccaataaaaacctatttatcacatgacacaacagaattagcaacaaaaggaaaacagaaagattataataacaaaacttaatcttctaacaacaaaacttatttttctaaaaatctaagaagtttataaacaaaaaacactataagttatctgttgtagcagtgtactaagtcatctgagtctcatttggcgcattggcctcctagcaattataggaagctaatcatcttccttaatagccatggaaggtatacctctcaatctaattactgcaagaagtggtttgccttggtgccataacaacctgtctatcattcagagcaacagaattaacacgagaaggcttagaatagaaagaacttaatttttttaaataataggagtttacaaaatgtgaacactaaaagttattgattgtagcaatgtatggagttcaatcaagtctcactacagcaatgtacaaaactagatcaagtctcattactgtctcaccatcagatttcatccttcaaacaatcctcaaactgcatagcctacactgaagagccaatttttcaatttaatttgatatcccatcattcctattgtatctcaaagctcctaatttctacatccaaaatcatccaacaaaactaataattgaatctaaaaaggagtttaaattaaaaagtgaaggtctaaaactctctctctcggttaacctaaggccaccaattctattaagatttcaaatgaacattatccaaaaaggatccttagcaacattgttgaaataatcaaaccctaggttcttcaaaaatttatcttttccctcattgttactaaaaggaaatgttttaaagaatttgattgaattagagactaacttcaagatctaagagtacacaaaacacaaaaataaatggacttgtccaacacctagaatcaatccagcctaggtctcttttttttttttttcctttctagactctatggaaacaacttctttgcagagagggagaataatccaaaacccaaaactccaaagggctcaacttcatattatttttataatgacctataattattccactaaaatttcaaattataaattgcccaagctttaggtcaaggtaaacctagtatgagacttgatgaataatgataggtccttgtaattcaaaaaactgcaattcaagagttaaatcagacaatgcttggagaaatcaaccacataagaactctagtctatatgaaggataggttaataagttgaaacaaaaaaaaaaaagaaaaaaaaagtaagatttattttgccccaagtgtaggaaaaagcatgaagataggttgtaccattagtagacaagagtttgttttgggtgtggctaggtgagcgatttcaatcatgattgtccttggaagaatgatattcaagctgactgtcgcaccagaactttcgaagacaatgtttttgtaaagagaggagaatgtaataccttaacttgaagtttggataatttcataacttggaattttaatggaataattttggtcaatcttttgaagttttgattttgggttaggattgaaggccttgaatttcaagccaaaaacaatagagagggattaggttttaatgagttttaaaccatttaatactatagaaattgtgagctttgcatattgcatataattaaggttgtaatgattgattgaaaattcaataaactaataattaaaaggactaaaaaaaaaaaacaaaagaacaaaccaataagcatttttaaaatgaaggataaaaccacttgacattatgcttgtaaattggattctctttctaacaacaaaccttaagacaaaagttggattgatagcttatctaaagaaatataggagctcctcaaaggaaaatttctttttacgaaacaatataaataataataataataagaaaaatgttattcttcatgaaatgtttcttcaataccatctctgatatggggtatagatttgtgcaaaatcaaggactttttcccgtgtatccattgggaaaagctactcatgacaaaaagtattattgttcttgagaataataataataataataataataatgtgtccaccgaaattattctcaaaatatttgtggaaagaaaaatgttattcttcatgaattgtttcttcaataccatctctaatatagggtataaatttgtgcaaaatcaaagactttttcccgtgtatccattgggaaaagccactcatgatggaaagtattattgttcttgagaattggaaatttttgtgaatgccctaaaatactacatttcttagattgacaactttcttcaaacaattattttcattttcataggaaaataggcctattgattcttcatggtaaaagttaaagataaatagtataattaatagcatgaaaaatctaaagataaatatcaaaattaacagcatgaaaaatctaaagataaatatcaaaattaacatcttaaaattctagagataaatgataaaaattaatataaaaaaaaatcaaatttttagcatgataagaaattaaatatatattatattctattgacatctagtgtatcagaagatttttattaaataattaaaataaaattttaaagttttaaactaatcaaaatttgctatgtgatataatatttttttaaagatttttctcaagatcctactaaaatagaagagctataataaataggttcttcatgtacaactagtggtgacatcaaagtaaaataacacttagtagcttattaaaatagaaaaaaatataataaatacattttctaactacaattaattatgtagtgttatagataacttatgcttatcttattgtgcttctgtttagtattaattattttttattaatgctatattcaaatacacgcatccatggttgagactcaagatccttttcaactaaatccctgtgtcctaagattttagaatgcaagggatctaacaccttgacacgtatctacactagacatccatataacatagggagtaagggcacaagctcctttttacccaatccttttgtataatgttgttagcgacaagattcaaattgagttccattggtgggatagggttcatgaagtacaactctcacacacctactcttctacttgagctgttttctcagtttttattttattcttgttcacctttttccctatttctatgttgtgagaatcaatgagcttgtttgattgcaaaaatgaaagtggccatttgaagaaagttgtcaatccaagaggtatagtattttggcattcaaaaaaatgtccaattttcaagaacaacaatacttttcatcataagtagcttctcccaacatttatccagggtctttgatcttgcataaatttataccttgttcactgagtgtattggagaagcatgcattgaagaatagtatttttctccatattttgagaataggtttggttgatgtgttatcagacatgttttgtcacttttgtgcattattttcattttttctgggtttcgaaatggaaatttttcttagcaaggagctgttgtcttttctttggctcaattattagccctacttttgtcttgagctttggtgctagaaatagaatccaatttataagcacaatgttaagcaagttttatctttcgtttgaaagtgcttattgattttttttttatatatataatttttagttattgaatttttcagcaatcactacaaataagattgcctttaatatgaaaatctcataatttatgcaatttaaagaaattagaaaccatgaaatccagtaagaattaagaatatgaattaaaactgaaaattctaggttggtttagtggtgaagttgtatggagcttcgctcaagactggactgactagcatagttacacacaaaggagtgtgatggagggagagcctaaaaaacatctattggtatggggtctaattgaactttgttgtggagtctgatgacggtaaacccacaaaaaagaaagtagtaatatggagatatctagagctgttgcaatgaataacttagcataacattgaaacagatggatttccattggttgaaagatatttttcatacctccaaggacttctttttatatgataattattattagtagcattatattattagaggaaaacctacaccaaattcaaagttggtgcacctagatggtcctggttaggcatctgcatgcttttcagataaactatttatctttagtccgccttaggaactttactttctttatcggttttagatgggttttccccccattttgggcttgacttttacctatggaatatatgtttcactttttcatcatacatcgatgattttctgtggttatttgggcaattaataaggtatcttacatatagcttcatgctgctgttcataaattattttcttaatttgttggatattatgtgcatggtcagcatagtccttctcccattgttatagtggatattatcgtacttatgtgctataggaaggagcttcaaactttattctttatatattgtactgttccttgttttatgttgtttttcaagtaggagacaaaaagctacacattgcttgaccctggatttttactaaaatttacaacaattcctgactttccagtttcctctcatatccaa

SEQ ID NO: 11287 - DNA, 8672 bp, Vitis vinifera
  Intron number 5 from transcript GSVIVT01011167001 (locus G SVIVG01011167001) derived from phytozome v7.0 (chr-ID chr8 ; pos 7627044 to 7635715 reverse strand)
tccaaagcttcgtcttacagcgaagcaagtgcttggtattttacacatcttttatactaatttagagagtaccttgtaccataagttcttgtttaaatgactaccaaacaacttagctcataataaacagaaattctggtgagtgctaaatacaatgctagagagattttaatacagaatattgtggggcttttattatgttttatggtcaatgatgtgtttgttattgatgacttattttatatttaatattgttaatcaacacttatgaactgtttgtaaccaaatgaggaagaacaacaaagaagcatagaaaccgagaagaaattcctacaaaagaatattagttgcactgttagtgaaattgggtgctaaaatccaaaaagataaataaaagtgtctcaagggttccttttaggagacaggtaggaaggcccaacctctttagtagattttataaaataggcggaagaaaggatgaggaagagactcgctttgtggaagaggcagttcatttctagggggggagaatcactctcattcggagcactttggctagcatgccaatttatcttatgtccttgatgcgtattccaagagttgtaagattgaggcttgagaaaatccaaagggatttcctttggggtgggggtgcgttggagaagaggccccaccttgtaaagtgggatgtggttcgctctcataaaatgaagggtggcttggggattagaaatttttctatcctcaatagggccctgttgtgtaaatggagctggcgctttgcggctgaaagagagtctttttggaagcttattatcagcacaaagtatggggaaggaggaggatggatctcttgtgaggttagggaaggctatggggtggggttgtggaaggaaattagaaaggaaggcgttctaatgtttaaaaacgtttccttcactgtaggggatggtagaagggtgaaattttggaaggacatttggtgtggaaacattcccctatgtgaggcttttccttctctgtttgcctttgcggtatcccaagatgcgtgggtagcggattgttgggattctatgggggatgcggggggatggtatccttgtttttctagatcatttaatgactgggagttggaggcggtggcgagtctcctttcggtccttcaaggaaagaggctcaatgttgggatggaggatagagtggtgtggaatgcttccaagaatgggattttctctgtaaaatccctttacaatactcttgattctggtggtgcagtcccgtttccgtggagaatcatatggagcccttgcgtgcctactaaggtgggtttttttgcttgggaagcttcttgggggaaggtgctaacccaagatcaactcaaaaggaggggctggtttctagcaaacagatgcttcttatgttgtgatgacgaggagacaataaaccacatccttattcattgccccaaggcgagggtgttgtggaatcttgtgttttcgttgtttagggttaattgggtccttcagctcacggttagagacactctccttggttggtctgcttcctttgtggacaagaagcgtgggaagatttggcgggcagcccccctttgtttattggacgatgtggaaagaaagaaataagatagtttttgataatgaggctttgtcaatccaaagattgaaaatatccttcgtttgtaatcttttctcttggtctaagtcttgtttagatggagagccccgctccttaattaactttgtagattggttgggttctaattgagggttggtgagtgtatgcttccttgtgctttttatctgtggggcttctcgtgtatacttcctgtatgcttcgggttgccttcttgctcccttcttttaatataatttttctgtgtttatctatcaaaaaaaaaagggcgggctcttgtttttaaagtggttttgtagctactatagctgattttttgtttcacatgcgtatacttttggtatactgtatttgccactttagtttggcatcctttttatagtcattaatatacttactcttatttgcctatcaaaaaaaaaaaaaagtgcacaaaagcttgtgtaaagtaggctgacatgacaatcaactatgcgtatatttttttcttacttagaaaaacagaggaacatagtatattgaatgataaactaaattataaataacatgtaacagattatattgatgcatatcttgtgtgtttggtagtttcatcattgtatttggtaatactatgaatattggcaatatataaatagacatctttacagattttgacattttaaaatgtggaatgaatatttatcaatatccataagtacaggataaagcaatatatttacttgggtgtaggcagtagttgtaagagctacatcaaagcagtagaaagttgtggtttcacctagcatacttgctttaaacatgatggctattttttggtgggcaaaaaaatttgttagaagcatgaaggtagccacaatctaagtagagctggagtctattagttttacacaagggagaataagtgaacaaaggaaacaaccccctctgctcaagagccaagaaccaccaatatggttgataaaattcaaaaagttgcggcacccgtctgcaatagattacgtctgcatgtaaatgattgcaaaacaatccttttcagttctcaatgtggtaggtcttccctctcaaatgatttttcgattacactctttctagatatctgatgccaaacaaaagtgtccctgttctccacacatttgtcctcttcttcctgaaaaacttgcaaggtgtttctcctgctcttcctggcaaacttccaattccagcttgatggctcttcaggcaccatcaggaatccaaagagcacaaaaatcattgtgcagaacccactagtagcggtacaaagtaccagaaggtggtcaacattttctgcatccccttgacacaaattcaaaaatttgtctttcctcacctgctgatcaacagttaaatcctcccttaagtagccgtactaatgaaaaatgtcacctttgaaggacccagaaaacccaactctttttaattgaaacttaacatcttcttttttggtatgaccttgaagagagtgaaaacctttcacctttacttacattatacctattgcgtctattgatatccactttatatcagacaggagtgaatctcattaattcctgatcatggaaattcttgatgaaacttgaattcctgtggtctaatatcttttaatgacaccaatacctgctggcttctctgctttttgcaattttaaacaatttttaaggcctcaaacttgaaggagtcttacttcatccttgttcatgccacacatcaccctcttcccatctccctttagagaatgtgcacttacaaaactattgccatcctcacctaagaccattccaaaccctaccttttacctagatatagttccccatcccactccatgcttccccaacatcactcttccatcaaaatcacctgtttttgtgacaaaccttcattgcaattttttttttttttggtcagaaacagaaggtgtattaattaaagtgaatgaaaaaacatgagaagggtgaaaaatcttccccatgatatacaaatctgatcaaaagacccaaagaaacctccgctttacgaggaggaccatacaaaaggaaccaaaaaaagcttatacaagtataacatctcttaaagctcaactagggacctcaccatgtgggcctaaccctagtgtgtgcataccaaaagctaattaagctaaattacactcaatggaaatggtttaaaaatgttagtatagtaggtccaaaaagaaacatgaaaatgaagcaagtcccacatcatctcaagagtcttacaagtatcctaaaaaatcatagcattcctctctctccacacaatccacaacaaagtgagactagtaatcttccaaagagttttgcctctagtagagtccataaaacacttgaaggagataaccatcgtatcgcaaatactacctgacccacaccatcctagcttgtgagaatatcctatgccataaccccaaagtaatcggacaatgtaggaagaaatgatcaaccatctctccactgctcttacaaagggtgtaccaatcagggttaagggctttggatgacattctcgactgtaacatgtcattggtatttaccttcttatgtgtcactaaccaagcaaaaaccatcactttagaaggctataaccttcattgcaattttcctaaaaaatgatatggcgttggaagttaaaaaaaggcattacacaatggcggatcaatccataaaattcaaagatggaaggtaaaccccagaccgaggagcaattgattaatttgacttccccacctaactactccaggttgggggggtaggtcctggtggggaagttatagacacctttccatactttgtatttggagtacttcgaacgtaagttgtgagaagaaagtcaagatagtacgatagatagtagtgagaaggttaagctcaaagaaagtcttagcagtccgttgcttgttccgaaaggttaaagataacgcggctttggatgacattctcgactgtaacatgtcattggtatttaccttcttatgtgtcactaaccaagcaaaaaccatcactttagaaggctataaccttcattgcaattttcctaacaacactttatttaatatgtctaaactctaaatatgtaattccctactgattctagaagacacatgctggccaagtctacgagcagcaacttcttctctgtctccatgatgtcccacgaaaaaaaaaatccctttgtaactttcccaaatttttcctcaccaagatcaggataataagatagaaatgaaactgacttagccttctctcgaagtggctagcctagtctcaaatatttctactgctaagtcccaaactgtcttaggctcttggcctagtagaaggtcagctcaggagcgggccaaatggccgagtaaattgaaggtggagttctcacttcgcatcccaatactgatgtgaattcatgactgtcttccattggtccaataggagtgagattgctttttctcaatttcacgtttaaccccaaaaagtggacctgaatgcctttgagatatctcaattaatctgtttccatcccataaaatacagcagtgccatctgagcgattgagtttaaacacaaaccctgactactcattcttcatccttgaaccaaacattctattagcaaccacttccacataaaaaattgatctgccttcttccgaagcattctgagaactggaaacaactttcaccattattctcctatgtctttgggctaaaatttttgcaagcactttgtccttccttccactaaacttatgggcctaaaatcttttaattcctctgccttcttttggcatcaatagaagtaacattcaagccttttataactcttttctcacaatgagtccatccccattaagagcatcccatttttcctttcatttttcttatattgtgattaatgcaagtattaagccattatgatatatagcagtgatgtgaaattcaaaactgtctaaggtctcccatcctacaggttctaaactgaaaaaactgattgatcccattgttaatctttttccctactcttcctttcatcactaaggtcccaatgagatcacctttccagtgtaccttttttttttttgataggtaaactaagaatatattgaaagtgctaggaaaagttgcataaatgtacacacaaggtataatgcccaaagggttggggtgggtttatgggaggttccaagttcaagtcccaatagggacaaaaagaaaaaaaataaataaaatttacctattaaaaaaaagggacaacacatgcgaataaaaacatcaccataaaaactgagaaaaccagtagatccccaactgactttcttgccccccactgctcacaacaccaataaacaacccttttcttggcttaaacaccaataggaccaacaactgagacacctttggttcctcacacaatgacagttggtcatgcaacttttttgcaagacggtcttcaacacacatacagaggaagtgcctcaaatatacaaatcaccttatgtatagacataggggttccaaaatgaaaatctaatgaaatagaaatagtttgcaaagaatagattctagataggaatccttatcttttgaggacgtgtgatgtaaagatggagcttgtccgttctcaaagagaatctttaagcttttatcaacccttctcagaatagaatctttcattgtttatcgaccattttcataatggaagcttgctagaggagagaggaacctcaattccatggtcctcattaggcattgcaaagtcttcttcatcctcatccgtttgttttagctaacaaggctgtagatgctttatcatcaacttcttataaggctattaaagtctgcttcttgagcttttccttggacatagagtgttgctaggaatagatagcttttatgtgatgactaagatgggccaacaattgattctaaggctagtggtcttagagggaagagggaaggagggataaaatggatttaatgggatgacctttggatataaggttgaataattgtttcttccttcatctaattgaaatacatctttccaaatatgagctatgatttcaaagcatatcctcattgaacgtgataggataaatcaaatttaatatccaaggcatcttattaaggaaaacaaccaggaaagtagttctcgagtttctatatgcttattagcatacttaaatttgtttagttttattttattttatttttatttgatagataatttttgtttttatttttatttttattttttgtccctattgggacttgaacctgaaacctcctataaacccaccccaaccctttaccacttgagccagacctcaagggcaacatacttaaatttgtttagtgatttccttaaaggagttaggatgtcttagactaatttctatgtcctataaggactacaatctaaactagacgtatcaccaatgagcaaatttgttattcttgggagcataaaacatattcccatatataaggaaaagttcaagagacaagttttgctagcttgaagaaggaagatggtaaacatgcatctaaaacattgccaaatgaaaggatgagaatggaaaagaatttgtagagccttatgggaatgattgcttttgggatccctctcttctccaacaaagggtcctgctagatgtgattgcaggaagatttcaagttttaaaggtttagtaaaagttgaaagatttcattctgaataaggattataaaagttgaaagattttctctgaggagaggccaaatctatctttatagaacatgcaataaggattcttatcaagaatccatcttatttttaaattatgtctatttggtaagattttcatgttatgtcctgtatgtctataaatggggtagtttgtatgattggtactttgcttatatgcatgttgaagagtgtattgtgttccctcttcattttatgttctttcttttttatcctacccaatttgtagtccctctccacataaatttgtttctgattgtgttgaagagtgcgctgtattccctctccattttatgctctttcttttgttcctacccaatttgtggtctctctttacttatgtttaagtttaagtgtgcccatatatatggatacatatgtatgtatatatgtatgtatgtatggtatgtatgccatttgtttaaatcatttcttagtttgtctgtgtaaccatgtcataagcttggtaattgccttattttttaaaatatggtgtatgagccaatcatctcataaacaggtgttagtaaaattataccgtatggatccaatcatctcataaactggtgttagtagaataatatcaggctaaaaaatctcaattacatccaagttgtagagtgcccatgggcctgtatagaatatgaaagggcgtttggaatagaatttttttattgaaaataactagatgaagagagtcttcagagatataggtcttttgaaaacaaggaatagtcagtcaatgccctaaaatgccgattccttagtaatctttttttgtgtgggtaaagatgtagatagatgtaggtccgatgtctttaatagattttgttgatttgttgggttcttactaagggagaatgttttcatccttcagcgctcattgtatgtcttgtgtaccttggagtgctgtttttttggcacttgtttatatattatatataatattacaaaaaggaaaccccacaaatttactgaacccctgaaatctacttagaacacactcagaaagtgcttaggaccactataccaaacttttacttctaattttctgtcagttttgccatcaatggtgtaagttatatttatctcgctgtaaatctaaataatgcttggtacagtaggattttatgcatgatgtttagtagttgaaatatattaaaattgcatgatggatgccaaattatgttttgttcaatttatactttttctctctgcttgcagagcattcttggctccaga

SEQ ID NO: 11288 - DNA, 8244 bp, Vitis vinifera
  Intron number 18 from transcript GSVIVT01009320001 (locus GSVIVG01009320001) derived from phytozome v7.0 (chr-ID chr 18; pos 7367136 to 7375379 reverse strand)
actgtaatcgctactgggagaaccaattcaaaaaggtttgcttttataaactgcttgttatctgtttttcctacttttatactattatgaacaaatttgagcatgagttaatgaagctgatggattttaacccttatacatggtgcaagctgctaaaaatgtgtttttattgttgtttgtctactaatgtgattctagcattttctttcagtgtcttgttttgaattgattgctgatgtgtatgatatcatatccctgaatattcattgtcatgggcttctaaagttgctgagtagataaatcactgagactagtcatttgtcacttgccaatgttgtattatgttgcagtaaggacattcttcttttcatgaaaattgcccttgtacaacaccaattacaagagaattttccctctccctttctaagttcattttcaacattttacttagacaagaaaaactaaattttttataccatggttctagtaggaaaaaaaaaatactgttctaacactttccatcttaataatttaaacatgttgtggtggaggaagccttttaaaagtaacataaagaaggaacaggaggccttttattgatgttcaatagttggatcaagcaatcaaatctgaccatgtattttcttacacaaaggaccactcagtgaatttgatagattttctagattggctgagtgtcaagtaaggagaaggtttttttgtttatgcccttctcacctagtttaggcaccctttatatacatcgtgtgtatgttggtgttcctcctttaagtgcttttaatatatttactcatttgcctataaaaaaaaaagtaggataagaggttccaaagtgtgtgaaaggatgaatttaatttaatcatttagctatcttagaggaaatttcgtggaggcaaaaatcaagggttttgtggctaaagaaatgatatagagacactacgtttttttttttcaatagaatggaaaatgcccaacaaagaattaatttcgcaagtagattaaaggtgaatgggacaagataggttatttgaggaggatgaattaaagcttggagtcttcttgttcctactatctatgttgttgatcgattgatttttcattgtttatcgtattaaaacaaaatttataacctaattcaactatgttaaggtaactcttgcccgatcaaaaaggttttttagcaaaagctacggtagtataacggtttcaggtgttgttcactgggatgaattattctcgataattaaggcttaaatgagaggaaaagaaatgattgtgatcaagtgaaattgatttaacaattcatggtgaaaaaaaatcaaaataataatgatttctaattgagaaaaacaatagaatgtaaaataggataaaattaataaggaaaaaaaattattggagttaagattttctagaaaacaatttccatggtgaatagatgttgagatctatttttcatcaagttagattgaaaacctaaattctcatctaaactgattttaaatttagctttaagtctatacctaatttctcctcaaattaggttattcaatccaagaaatcattttaaactatatattcaattcatcttaaattatcttccaatgattcatagaatgcaactattcgatctcattaaatctagctttaagaatttaatgaatctgcctagtttgcaatgtaatagtcattcaagataatttgatgagaaaaatccccaaatttcaattaatcaatcaattaaatcaaattatctttgcaattaaagctcatttctctaattcaccatagatcttatctctagatcctccttccttcgagaaaaatgagatttagctactcatgcttggagatttggtctcacaagacatgtttggctagtaagaaaatgagggaaaaatgaaagaaaatagagaattctattgagagagagagtttctagaaaaatctaaaatcaagagtatcaaaaagctctttacatgagaaattcaagtttctatttataagtcaaggtcaagtggacgcttgacaacctctcattggtcttctagaaccttccaaattcaaagaaatctggaagtttaatatttcgcatgaaatttggacatttcgcataagatattcacatttcgcacgaccatgcgaaattctatggtgagtggctacaacatgttgaaacaccttctagaccacttcgcatgagtgcgaaattttcgcatgatcatgcgaatctacaatattttgtttttgagctccatttgataatttattccattttcttcttttgactccaccttaactaccgccaaattagcatcaaatctcaatccaattacattactttttctttatcatccatattatttggcctctttttcaattcgattcatctctttcatcaccaatttatcaaaaacatacctcaaaatgactccgaaatttcataaaacttgttagtaactttttctagggcaacaacttgttaattgactattttaggcataattactactcaaaagatgtgaaacttatgagaattattatctaaaaatatgctttttttttttagtagtaatcatttagtcaaagtgtaatttcacaagatggacaattgagagtgaattgttaaaatccattcacgaccttgacagagagtatttggaatgctttatggtgaacaagaagcattgatagcccttagggacttaaggtgcataatcctatagagaagatttggaaagctttgcagaaagggagaggtattgataacccttgcaatgttgaggaagataaaggctttttggcagaattattgttccatagtgaaaagagaggcaaatggtttcttgaaggaatttcatgtaaaaggctcctttgaaaggaacactaaatccactttttagtgctaattccaaggaacaaacgggatgacggaataaagggttagaggccctattagattggttggaggctactcagtgttatcaaaggcaatcgcctgggtcgcctaggtcatcaaactaggcaaggtagataaaagtcgtctcttgaaaagacaaacaaggcggcttcaaagaggcatcctaagtgatcgccttgggataaggcgtaaggcatagaggtggtcgcctttgaccatgagttaagattaaacatatttagattataatttcattcaatataacattggattaaacaaagtatgagatgaaatactgtattatcaatcgtagagataataagatagagggttatcaatctagttttgatggaaataatgacaattttaatttcaatgatgactatgatgataatgtccaaagcttctctaggatgttcattgttttattttgttttttagatgtttgaaaaattagaatatgcatctagacaagatggatatctttaaataatatgatgtttcttatgatgtggggtataatatttaacactttgaataattattaccatttttttaattttacaagacatcatgagggatgaaaaattaataatattgattgttgaagaagatgcatatattggttaagtattggataggtaaatatatgtatttttttattaccttactataatgaggctatcgtcttgttttttgccttttttgcctaagactaaaaggagtcttattgccttgacatcgcctattgcttttgacaaaactgaagccattatagatttttagtagaaatcgtagtgaaaaaggtcattagtaaggcagatttagagccttagaatacttttgtgaatagcatgcaaattttagaggtgactttgattgcaaattaagctatagacttgagaaaaaaaagcttcaatgcggggttggtttgcaaggtgaatgttgagaagacttatacactatactttgaagtttcaaccaagcttccaacatttttacacttggattttggctccaatgggctcttacacaatcttttagagtctctactcacttgaagcttctaacactcaaataacaaatttaaatttctcaacctagctcaacaattgtttaaatacaactcaaatgctaggatgaataataagggtgcattaaaaaatatgcaagcggaggtttaatgcaccaaagaaagaatgagagcttttgaggcaagaataagtaggtaaacaaataaatgcaagtgtttttatctcataaatgaagtggaactttcaatttattggtttctagccttgggagccaaagtgccaaaaaacaggctggaccggttgattagccgttgggtaataaatgcatgacatgtgatcgtcaggccttgaccggtccttgaccagacctcgacctgtccttgaccggacctcgacttgtccttgaccggacctcaaccggaaagacatagcccttgaccaaaaatgcaatgctattggatgagagagaagattttttgcatctttcgattggacctcgactgggaaggtataaccagtcgactggtaccctagctggttgagacgattggctagtgtctcgaccggttcaccatttttgaccctaaaacctatctttttatgtttttttcacttctaaaacttaggtaaggtctttaggtaaattattatgctaattttgaaatgatttgcctaaggttcattcaataaaacttgggttttgatgaaaatgtaactttaatgtataaaccgagtttttaaagatgcatgaaaagatatgaaaattctaagtgcacccatgcattcatcttacatatattcctatgattaaagggttttccaattgtcttgatcttgcatccattgggtcttttgataaatttccaaactaacacctaaaattctttttaacttaaaatgattagcatcttagccatggtttgttatcatcaaaatgcgattaggaaaaccattgggttaacaataacctttggagaaaggctatgaaaggaaaatttggttaggtagaaggtgactgatgcataaaaaaaaggatgtgcatggtatgggcctttggaatacaattattgaaaattggaaggagttttcaagatcaaaacctcgattgaggtgggaaatggttttaagggttagggcaggtggcataagaaagtatggaaattttcccttccttactgttttggtgcttgaagagagagtggaatgaaagggtgaagaagtgctctaatcaaagattaaagaaattcctctccaaacgattaatcttgttcccttggggatgggtaattgctctttggtagaatttatagacgctttaagtgggatgtagtttttattctttttctttatatctttgttcttctttagtgtgcactcctctcctccttccctttttttctaggtgtcacacccataaaaattgctaccaattttttttctaagtgtgcggtgctaagacaccgatcttagccaactttcctaaaagccacacaacaaaagcacatgtaaacaaggcaacaatcaattacgagagccttaccaacttgtgttttatttaaaactacaagattacaaaattgtttttacaagtttcccaacacttactaatttttctcaaagttagagaacctaacccccactagagaatattacaatttgatttttctctttgattgcttacaatcgggttactcatccttggtctttctgcaatgcaagaggcttttatagagaatgtctttccatttgaattttgaattcaaacctttgaattcaaaataggagcctagggtggtggttatgcaactgccataaccacccaactaatcacacccctatagccaaaggtgtttcttcatgttggatgcagtcaacaagatcttatctgacattcccttttgatgctaggccaaatcttactcctcaagttgcctcataccaataggtacctttgtaattgcctttgtcgctcaacccaacaagcccttttttgagtgcctcagcctaagataatgtttggttcaatgttgcaagccaagctcgtgccagtctggtttgtggcccctttgcatgtgagtcagacccacatcaaacaccatgtgtttgtgccaccagcctgcatcggtcatcatgccttggccatgcccatatgtttagccatctttgatgtatcaatgtgcttcaacacattagtgcccacctttgtgccatgcttaggcgcccatggtcaccaaggcttgctatccatgcccatggatcagtcttattacaaggcccttccttaccttgcccatatcaaccatgcaccaatatgtttgttttggtctaattgctacagtggcttcctgtgccatgcctaagtcccttctcggttgcaggatgagccatgacatcgttcctatggcttgccgtccttgtgcataagcattgcgtccttgtactaagcatctgtttatgcgtgtgaggcctccttgttgctgctgcagcagcatcatgccgtatctaagacccttcttggtgcaacaacatacgatggcattatgcccatggctcgccaattcccatgcatagggcattgtgcccctgtgccatgccttggtcacctgtctgagtcgatcatgcttgttgcaacaccatcatgccatgcctaaggccttcctttgtgcagcaacatgccatagcattgcacccatggctttgtgaactgccttggtgcacaaggttgagtgcccttatgctagagctggggaggaagaggttgcaccatgccctgtgccattgcagccacaggtggcacaccacacaggttgtggagcccatatgtgcatattagctactcatctgagtgccatggccatgcctaaggctatgcctcgatgtccccttggtgcccaccttgagtcacctaccctcccttaaagagcattttaggctgtttcaaaattttctagaggaaacatcaaccctgtttgaggaggaataatggatttatttattaatcaaataaataaatcctcataaccctcacattgagtccgcaccattgttgtggctgcgagtatacatgtgacttgcttattgtgcgcaggagtgtgcgtgcgcatgcctatgcatgccacgcactatgccaacaccctccctcccccacccccccacccccggcgcagtgttgcctttttcaatactttgtgatgcttaccaaacctccaacaccttgccactttctcaagtgcccttatgggtgcaaggttcttgcccatgaggccttttgccaaaaagttagggttaatggaccaatactaggcccctttcaatatattgctctttgtttattgaaaataaataataataataattatagtaaaataacgcaaaaactaatgtagccataaacatgtatggaggggttttgcctcaatatgtcttcaatgtgccttttttttattttttattttattggccttcatatattgctcaagagaaggagaagaattgtaaatgatgctggtgctattttctggtctacatgaaagaaacctgatttttttttgggaatataggatcaacaatttttttatggcattggttatcaaggtgaattttttgttactgtctctgaatcttctgtaactaagggtttgtatggattcctttggatgttattgttcatgattgaaccacatctctatacatttccagtactttggttttattcctcatatgtacattttatacattttttttatatttgtaattaccttttctttaaaaaaatttaaaaaatatactaatgcttatgttttgaatttttttttgtttgttttatgtgtatttcttttaaacttcaacaatttgataatcaagagggctgattggtagataatttgaacgttaatgattagacagtgtttaaagatgcaagcatttgttaggtaatttcattgttgttctgggtggtacttaaggtgcaatgagtctttttttattattattattattttttttttttactacttgtggacatcgcatgcacatgggttgccccctattttttccactcattttgtaacatcttatttacttatccaggaaaaaaaagaaaaaatcattgcttaaaatggaatggaatctcacaaaaaattaactcaaagtgatgtatgttgtgacggcatttatcctttattattttgttatccctcattgtttgatgctttgaaaagttaatggcttgcaggttgctcttttggacttttctcgtgatcgcaaaat

SEQ ID NO: 11289 - DNA, 10579 bp, Vitis vinifera
  Intron number 1 from transcript GSVIVT01031717001 (locus G SVIVG01031717001) derived from phytozome v7.0 (chr-ID chr3 ; pos 3770671 to 3781249)
ctgacatagaagggagacacaggctaatatctgaggttcgtgttattgagataaatattttcttttcttaagttctctatttctgtatgttcttagttaaggctagggtaccttggtatgatatatttgacttaaaagtgaaatactgatgctgcttataatttggagttctagatagtagtgtttaggtattatgtttcggatcacaacaggttgcatgggttgatatttatttataattgcttcagttttatccatatgaatttttttcaacattttaatccacataacaaaacatgactgtgtgtcttattgctgctgatgtcatgattgttataaacattcttatgattaagtttgttctgattatccatttctcttaaacatatcttgcaatccttttggttttagaatttggattttaaactttgagacttgccttggggattaaacatcatgaggctttacaagtagtgatctcattgaccatatgcctaaccagtcaaggcttgatcaaaagatgtgcctttatgctcctcaagtcatcaggcatatgcctattgttctgttaaattttttaattgaccaacattatttctctaatccctggtttatctcttttttattaggcaagaaagcaatgtattaatcaatgccacaaaaggcgcacaaagtataaatgacgtatacaagtgagctgcagggcaaagaataagaagagaaaaaaaaaatgcttcctccccttatttgcatcctatccaaacaacaaaatcaatcatagacaaggacacgtcctctaaagagagaacaaaaaacacttcctcccctttttgcatcctagctaattgacaaaatcaatcatagacaaggacacatcctctaaatcccctttgaaccactccaaaaaattacacatgcaaaatgatttaaactcttgctctaacaagtcaatatttctgaaagcctttctatttctttctttccaaataatccaaaacaaacataaagaagcttttcatgctttcttcctcttcttcctggttaaaagtccatgctaacttagtaatgctgttttaattgatgaatttggcacccatacaattccaatcaaggagaaaattatctgccatagaattcttgccttagaacggtgaaggaagatgtgcttaccagattcctcctcgccctttacccataaaatatctattcaccaaagtcagtcttctcctctttaaattgtccatagttaatattttgtttcaaaccacttatcaagcaaaaaaagctcacttttgttggaattcatgaattccagataacatctgctggaaccctggtctttcttgccccaaggtaataggatttaactgaaaagttgccactctttgaggccatccattctactttatcttcaacattccttcttgctaattttccttgtagtctcaaaaagaatgcttcaacactattcaactcacaatcatggagatgtggcatgcccctcacccctccaccccagtttatctcacattttgaaactttttatcctgtgatggtgttacacaatcattgttgttatttgtgttactaatactacaagtctacaactaatagtagtattatattattttgtatttatccatgtttatttactgaactgtgattatgataattctatgtacaattttcttataatctaatctgtgatgactgccaagtgtttctttttttccaattgttttattattattttttaaaattttagttatccccacatgtctaaattatgttaaaatccttttacttttctcatttttaatttaaaaaatacccaactttcaaaaaattatttgtaagaaatttatttatgttttggaacttgtggaacatcttttgaataacagtatgcttgtccacctacccagacatcatctctcttccctcctctccacaataagttgtatcctctttgagagacaactattcactccccatttaagttttaaaattttcagttatttaactctgtggttttaagttttacctgtgtcattttatcatttttcttatggaaaaatgggcaattatatttgttgcagcaaaatccaagaaagaagttgtgttttgttaatatagctatagttgcactataatgatggttcaattcatttgtctcaaaccctcaaatattcttttaaagtttgacctataaagtgataaagttactccttttgtgctgtagttaatatgtaaatattatggtaagctcattctctagctatcacagaatcagatccctggcctgatttagtactatatcataaaaataatatatgcttaaagtacatttatgatgtacataaagtggactcataaacattttcttttgtgaaattacatttctttgctagtgcttgtgggttccataagtgtgtaataattgacttgtgaattttcctcaataaacaaagttaagtaattgccattttagttttatttattgaccttttcttttgaatgattgctgcctcaattctatacagtagtagttttccatcctatttgtgtatcactttataatattccatatgtgagatttttggattaattataatgtattaattacacctttaaacatataatttccttttagttaagtaatcattgacttttaaaattcttagatgaggagttttagagaatcccatcatttagctttttagttaacattagtagtttatagcttattaatgtagcaaatatctttcctgtttgggatcttaaatttcattatcttattcatttagagaaaacaacaccaaggcacctttagttgttagtttttttttaaaaaatttttatctacttttggatgtttttagtgtaacttttcttgtatgcaatatgtaagaaaacataatactttgctagataataaaagacattttttatgtttgctgaatggtggtggttagtcatttgatggttttttgttctattctcaaaggaagacctaaattgacttctaggttaggaaatgaaaactgctatcaaccatattttgatacacttttagctagaaaactagaataaacttttaagggtctattatattttagattataaattcaactagatatttgttcagtttggatatagatcaagtgatagagtttgtatcctatatattaattgctatagtgcctcattaaatatgaaaatgctagatttgtagataacctttttggctatcatattgataggctttgatataataaggtattttgccaaaatgttttgacacggaaaaaagaagaaaggaaaaagcttgttatttattatgataagaagaaaatgatctcttgtttagtggtgaaagatgtgtttctaaagacattgttccttgatttgcacatacgaaggattttgccagactcttttgttgttgttggatctggcgatagctcaaggattggttggttagtcgtttgtggttttttcttgttgatttgtatgttgcatgtgtacatatgtacacatgttttgcccccttcttttgttaggcgcttatactaatataattgttctatttttcctacaaaaagaaaaaaggtaatgaaaaacgaggaaaaatgaattgcacttattgaaaaatcattggtttgtcagtaaataaccaccattgaaaagtatgtgtgatgacttattaagtattattgctttgaaaaagaatgaagcaaatctgatcaactaatcttaaagttgtggaatgtacgagtacattgatcaagaagcatttcgctaaaaggaggaaagcatgctaggaggtgttgatgaagtggaaacaagaatttcagcttactagtgcaaacattgttgcaatagctcattgattgagtactcttctgaaatgcattgatcaagtggccttttgctttagagcgaagagctcacgcaagcttggtgaagggaaagatgttttgttcttgcttctagtttctttggttttccaaggcttcttgtatgctttttgtgtgcttgagttgtggcctttttttagtgagagaccttcttacctttttttttttatttgactattaaaaaaagctcattgattgaatatccttgttcccaaaaatgaaatgaagtggttcttcaatccacaagatgtataaatgcatcaatgagagagggtttcacctctgtgggaagcacttgcaatcaagtgttgattaagtggaatcgagaatgttggttgagtaatgcaaacgttggtgaggctttagtgcctaaaaaaacctaagggttcttcttcattgtttgtcaatgtagggtgagttagggctaggtaaaaggtaaaaagcatagttaatgagtaacaaatttctattctttttgtactatcacctattttgcaaaggataaaagagcatagattaattgcacgatggctatttgttcaaggatgataggtgactttatctttcagggtgagaattgtatagaacatgtgttgagctaatgtttgctttggtctaaccctagttgcaattttgtatccatttaaagcttcaaacttccttagtccaagctctcaagagactcaatatttttcattatgtgcaagatagagcttttcctgttcttctgttgtaagtcacttccctagctctagatccaccaagtgctttttaacaatctatcatgaagaaattatataaatgtataaataataaccattttttcatcttttccttcattatcattgatattttctactacatatgcaaaaccactaaaacaagaaatgcttgggcacctacccaagtaccttttgccataaatatttataatgttcttgagttgttgccataaatatatatatatgcccattaattttttccaaatccacatatctgtcggatgtggtagatttttaagatattcttgtgggatcaaaatattattttcttatctaacaatcttggaaattatttaaacttgatagtgtacaacttttatatcctaacttactcagggaaatctatgtctacagttttttattttggatggtggtgattgtttttgttttcagtttccaagaaaaaagggccatcctcaaatctttgcaagcaaggaatctatgacttttaaattgtcaaaccttcaataactcctctataggatagatgagctttaaccttccattgagtaatgaatgcaaagatgcttaacactctttctttccgtcttcatgatctttaattctcatcctaagaatttgatgttaaagaatttggatataagataaaatgaataaaagaattattggggatggataaattacttacacgttttttactattattgggagctcctcttagatgtttaaagtaatattgtttgtttgtataacataggtaatgacgtttgcaaattatgaaaatactcatcttttaaatcaaataaaaaatgtaacatccaaaaggttgataaataagttgcttcgctcaagatttgtgctagagtttggtaaatggtgattggttggagtcatagaagactgattgaacattgaaattttgatatctatgtttaaatagtgagaaggaaaaatagggaaagtaaaaaaggggacaagggaagaggacattaagggcttgtttggtaattgctcttgaaattagttctctattttctagaacaaaaacagttttctaatttagaaaacacgtttgacaaacttctaacatagaattgttttttttttttttcagagtttgttctaaaaacatgttttttataacaaatttaaggtgttttgagttgttttttgtagagttttctaagtaacaattgaaaagatggaaaatactttggaaacttttgtactatatataagaagagtatcatgatggagtattaaatcaagaaaactatttttcatatttgagttcaaatataattttattcatgaaaacaattgagaaccatttttaataattgttctcaaaatttgtttttttttttttagaactgtttttgaaaacgttacctaacaagccctaaattgctctttttggtactgatatcttcatacactaccaccattgtcatcttcaattgcttctctgctaaaattcaaattaaatctccattaaatccctccttcacaaatatcaatatcaatttcttcacaaactaaaaatatcgcattcaaaaccatttcccactcaaaatcatgaccaaatcaaataataatatttatagtaaaatagattttctggggacattgggtcaaagttggtgttagtattgtatttgacaagttaaaagtgcaaatggttgattggaaaggtcatagaaattattgtggtgatgacatttgatttgggtaaggtttttatgtgggttattgatagtgactcgtcatgatagccatggatgggcctttaagtagggtgatggctataatcaaaatggcggggtgcaagtgtcccttgatggtaagaggctggtgtggggatggggtaggctcttgggttgattccatgtgacaaaaaaaagggggaaagaaaatgaaaaaaatttcctatcaaagaaaaatgatgagcatgaagaagatggaagttgaatagctttaataatcaatgaggtggtgttggagcgaggggaagatgatgtagcatggattttggtggaatttcttggttttgcaatgatgacgtgtgttggggttgacaagcttgtagttttgacatagtgatgggatcttgtttggtagttgtgtgctttggattggagaagaaagtgatgcattaagtgattgtagttcagttctttgttgtttgatcttaaagggcattaaaaagaaaattgctttattaatggtggcaagtgaggaagatgaagatgatagtgaattagatgaggatggtaaatgagtgagttctcaatgatgcagcaaaaatttactctttgcattctttaaatttcaaagtgcatcatgattaatttcatcatctatctattagcttatgggcagagaaggggttgaaaaaagttgatagtgagctaggggaaagcttagtgttatgtcatagtttagttctattatgtagcaaaaaactaaggttaaatcataatttatgtaggttacaagtatcttatgtggcttttgggccaatatatattgtatagggccattttgttgcgtatggcctcatttatggaggttgtgggcccattagtaggaaggaaaaagccatgggtacacgaccacctcccacaaagattgtgcattaggtgattgcaagacttgaacttaggacatcccattcatgagttgaagcacctgctagttgagcaaccctttggtattgggtttgaggggtttcatctttttggcccattatatagtcaagcaggtgcacaagtttgttttgtggtttgtgagattaatatgtcactccttcttactaaaaacaacaaattcattgcattgaattagtaaacaaaatgagggatgaaatatctttccaaaatgcagaaatctagatataaggggagaaaattaagcttagaaaagaaagaaataaataaataaataaaagaaaagcaacctcctctagaagcttcacaagaaatcaaaacaacttgcccatctaaacaaggttgcaaactctatataatcctagaaccacttaacatgacttagggaggtaataaatccctacaagagacacacgagattccttcttagaacaagaaattccttcttagaactagtattcgtattggaaatggtagacacacgagattttggtgggacatttgggttggggattttaagctaaaggatgtttttcctacgctattcaaaattgtagcccataaatctgctttggtggctgacctatgggggaggcaaggagatggaggcggttgttgggaggtgcactttagaagatctttccaagattgagaattggaggaggtgacttgttttttggaacatatttctgtgataaaggttcaagaagggggggattccttagtatggaagaatgatgggaggggaaagtttagtgtcaaatcgtattataggtctttaagggctgagaatagttttttattcctagccagagagatttggggtttgtgtgctcctcttagaactcgttttttttgcttgggaagcaatttgggggaaaattttaacaatagacatgttaatgaagaggggttggtccatggtcaataggttcagtctttgtaaagacagtgatgaatcggtggaccacattctaattcattgtggtaggataagggagttatggactttgttgttgtcatctttcggactggtgtgggtgttcctagcttcagtgagaaatcttctcctggaatggaaagttaaggggctagggaagaagaggagagtagttcggagattgtcttcaatttgtcttttctggtgtatttggggagagcgaaatcgaagaacgttctaagagaaagagttgttagaccaaagtttgaggaacctctttttccgttcacttttaaagtggtctcagcagtttttggatttaggtttttcctcttttctgaattttttcggtgattgacatggtggctagctttctctctctaggttttttctttttcttttttccagcttggtttggctcttttagtatactgcttgtatgcatggggtgcagcccctgttttggcgttttcttaatttaatctgcctttgtctataaaaaaaaaaaaaattccctacaaaagaaacaatttacttggcttcttggtgaaatgatttgccaaattgctatcttagtatggggcctaacaaaaggagtatcctaaatctctagctagaccaatgatttggtgaagccacacatcaaatttccacaaacttatttcctttttagatctccacaaaacgacaatagcataagtgtcctccactccagaatttggtagactgaagggtttaacctacatcatgcctttcataaagctatagattctctaccttgatggtgaaccctcccttgcagatttatataaagcttttaacaccataccaccttcgtctcttaagtactgctttaatctcgctgtcctgggtttccaaaagaagacccatgaaaaatttaccttgatagaacccatcaaaggtgttatgcatatgggattctccccgactgacatcttggagattctgatttcacaatataagcctcaacgaagcacctcacacttttgttggagatatcaagcttggggtttggagcttcaactcttgtcttctgaaggagatggaggccgggactgaatataaggtttgaatgataggaccagaaaactctcttgaatgaagcctaatccattgccttaattgatttaaatcctttgtttaattttttttatgtatattccatttataatttcatcttatttttacctttctggttgggtcctcatcagatcaaattggcctatatgcatttgctctgttagcttataggtctggccaatttggatcatcaatgaatacctggattggaagtcgctttccatgtttggatttatgatatggttcagatcaaaatccactccattgacattcagtgacggctagcagaatgatgattatgattagattgatgatgattccagcaatgtgaatttggatagcaagggctttgttacagcagggggctgttatgggatatggtgattatgatgatggaggattgttgacagctgtagtatgtagccaagcagttgttagtcatggtagatgtggtgttggtggtgagggatgtggtggtagagctgaagattgtagggctagtgatggtggttctaatgggacttggtggaggtgcataggtgaaggtgccctagccatgttagaatttatagatgggttagggtccttttgaaggggttttttgttgccctttttgttgtgtttgttttttttggggcgtcctctgtatacgttttgtatactttgatgcgcatttgctaggcactgtcaatatgtatactttaagttatagggtttgtgttatgttgatatttttcttgatcagattgtgatacattgatcttagtaaaaggtctgtatattgataaaagagcacatttgtcaaagttcaggacacatcattcttggttaggaacttagaaatttagaagtttgtggaaggtattttatatgtagaatttataattttattgaataacaagtgtttagaattctgctgctggaaatttagaatttttagtagtggactacataggttactgttatgacttccaagtagatataagcttttcaaccaattccaaatccagaatatcacattattatgatttggaattattgaagttctttaactgtctacatatataatgttgacatcgtatccagttgtagtttccgtttcttttgccgacaaaattctattcattcaaagtttggttatcagttttctggtggagctaactacttttgttctttatgtggcagattcgtcaggttttgactgcc

SEQ ID NO: 11290 - DNA, 1821 bp, Vitis vinifera
  Intron number 4 from transcript GSVIVT01001512001 (locus G SVIVG01001512001) derived from phytozome v7.0 (chr-ID chrU n; pos 5418667 to 5420487)
tctagtttccagctccctccgccaaggtacatcttttctctttttatttgcttaaggttaaaatatttattagaattagtgaaaaagaagtatccagacaacttctaatattcagttacttaaggttaaatgacctcttttttcttttcttttttcccttttcaagctttgattttaactatttattcataactataccaaaataaaaaacttccttttcaaaaaatatgtgagtatttattctgccttatctttaaaataaattattgaatttagaaccacgaaaccatatttaaattttaaaagttaaaagtatcaaacttaggtaagtatagatactaaatggattttataaaatatttatttattttatatttaattttatttaatgcttataaattaattttatttaaaccctaatatatattataaaaataaattcttaaaagtggtctttttgtattttatagttgatattttagtaaatattttttgaggtgggatatcttccatttgattttgagatttattaaatgtttagattttaaaatttcattgagtagttattaatttataaatagctacataattatttatattatattctatataatttcttttataaaatttaatttaatttaaatatttgatattttattaaataattcttttaggggtggttgttttataactaaagttaagcaactaagttaattaaaaatttaaatatatatatataacttgaaagttaaaacaacacaaataagtattttaaaaataatatttttatatatttaaaattttagattcatgttaacatagtttgataagagattaacaagctaaaaccatgttaacgggttattcttcaacttaacccatttattaatgagattaaagattaaacgaattgtattgtgataaaaaaaaagaaaaaaaagttgtatttatatcaaatcattttgatatgattattaaatgagttatatttgagttgaataaattttaatattcttaggctatatttggttcctaaaaaatttgaaggaaaatgtagagaaaaaaaaaacaaagaaaaaagtaaaaggaaaaaaaaagtgaagaaaaaaaataaattaaaagttgataaattatttataactaatttaaagattaaataatttaaaaatacatatatttctaactagttttaattatattttattttttttgatatttttgatagtacaaccaaatatgtggaaatcattttatttttttaatatttttcgagaacaaacataaccttaaaataattaaatgctccgaacacccctacaaatttcatgttttgctaccataaatttttatgggaaaaagaagatttttgcaacaaattttatttttattgtaaaaaaatacatttttttagagatgaaatttatatttatggcaaaatattatatttaacaatatccaggcaaaaaaaaaattataagattttgatatgaattttatcttgaattacatcatattataagttaagcctaatttgaattaatttaatattaatttcacactaaataattaaagaaaaaaaagggggtcacaccatattataatttaaaatattttttttttgaattttttttttccaaattagagtcaacttccaaatattgatgggaaattctatatgaaattttgtttaagaacaataaaattaaaataaattttaattctaaaatcattctgttaattttgattttttttttttcacattattgaaatgatttttctgtttcaggctctcagctaggcgctcctctctctcccatcaac

SEQ ID NO: 11291 - DNA, 2204 bp, Vitis vinifera
  Intron number 9 from transcript GSVIVT01031021001 (locus G SVIVG01031021001) derived from phytozome v7.0 (chr-ID chr1 4; pos 21054367 to 21056570)
ttgacagtatcgcagaggagaggtaccttatataataactttttaaatgctcctctggtattttttgatttggcaatttgtggttagtaggttatgatgtggcatatgtgaatggaacactcatgattgcatgctcataaaaattttccttgaatggccttagataatttatttcattctgctgaaactttgaaattttgatctcaatgacagtcaccctttatagttcccctcgaagatggtgtctggttgttagtttttagtatagatgcaaattgggtattgcctactaacgatgttttactctgtatgttattcttttctgttaaataaaatatttaggtattgttggtgctaataaataattaatatattaaaatttcctggaattttattatatcttataaatatttcttcttcagctgagatagttcattattgaaatgcactgcttttaaactgcttaccgagtgttctggagttgcttcattaattctcacattttaaaacctttcctgctagaaacagagttaaggtgttgaatacctcagtttttatctactcacctgttgagttttgatggtgagagcattttaggggttagtaagcaaatcctccatgctccagtgaaggtttctccttatattttaatatgcttagttcttctcattccaccatcattgcttttgttaataaacttcttctcttgttaataggcctgaaaaggatcagatcctaactgttttgggttgattgcaattatctgttggaaaattatctgagattcaatgggttttagaaatatagtccagatttgaattcaaatgctactgcatcaccactatgttaatcttctctgatctgaatctatcaatattctataatatagtcctgcttgaaaagaatatattgaacttgtataaaatattatttgtactataaaacgtgtacaacaaaaaatatcttaatactatagaaatatatgcttaatatgcatacacacatatccactctatagcatgtaatttattctgtttaattatagatgatatgccatataaatatgtattttgcagcagataatcagatttaacaaattggatcaaactattttattttcagaatcaagcagatttcagtcttcagatcatttacagactggaacttcttatgagatttaagactggagtccaatccattgacaggcctactatgattgtatattttcaattgggatctcacttctcctatcaattttattgttgagtaaaccaactggattatacttttaggccttgtttgataattgttttaaaaattagtttttgagaataggttttgaaaattgttctttgatgttttgtagagcaaatgttggtttgggaacttgaaatgtttttcacccattttctatgtttttaaatatattttaaaaataacttttatatataatactttattttgaatcattctccatatttgtatattttttttttaaataactcttagaaaacaagtaaaaacaattaaagatattttcttaaacatcctagtttttgttttaaagaatagaaatctgttttctgttttgtagttgttaaatgtattttcctatttttttatttattttggagaacagaaaattgtttttgaaaacagttactaaatagacccctagtttccaagctactaaaaccacctaacctgagtgtcattcctttcagagaaagaataattaaagtgtaaagttctgccaaattctacaaatactgcatcagcctccatcatgatggtataatttgctgaggtgggctttctgactaatgagttctctgtcactatctgtctagaagattgcttaaatggattttttttttctcgggagactgaataatattgctgatgccttgagcagcaaagaatttgtttcgaagccaccttataacagaatggtcctgttctactattatgatcccatatgtcttattaaatttgtctgactgttgactcatgcatcttttatgtgtttgtcattatgttccttatatttgtagttagcagattaagtatttttctctaataactggtggagtttttgtgagggcattttttacactctcaacaatttatttatttttcatatacttgtcctttttagggactcaagaatgatataacctgttttatctattggtaggttgcat

SEQ ID NO: 11292 - DNA, 4179 bp, Vitis vinifera
  Intron number 7 from transcript GSVIVT01014838001 (locus G SVIVG01014838001) derived from phytozome v7.0 (chr-ID chr1 9; pos 10406264 to 10410442 reverse strand)
gtacttgatcaggttagtaactttaaattttcatttcttcaatatgaaagagatctcctagggttcttttgcactttaatttcaaaatcaagtgatgggtcacttgtttgatattatcagtggtttgaatattagcatggcaagctacaaatgaccataagtaggtctggcatgttatactaatagggcaaaccttgcatcggggtgattatcttagttttctatcattataagtatgggtaatattgatgctccttgaagtaccctgcacaatgaagaaaatgctcatgattttggatgaacagaatgagttctttgtcaatgttcactgtattagacagatatctcagcctcctgtggctgatgactttttccttgtttggggcaaggtgggtgaaagctatgggggatgtgaaggatatggagcacttctctcttatgtgcaatgtggtgaaaaaattgagagaaacaaagcaaaagggtcttggaggggttggctatgtgatgatcaaagaggttgtcctttgattctataggagggaatgatatacattgtgaacttaaattctaacagtttaagctattaggaaaattggttgcctaatatggtactagagtcttatttagcgggggatcatgtgtttcagtcccaccacatgtttatttttccaatttattaagactatatgtaaggctaaaagaggttgtctttgcttgtggatatggaactgcatattgtacgtgaagagggtatgtggagggattagggtagggaaccacatgttagggaggatgttagagagccataatatacattgtggatccaaattctaacaatttgaacttctaagaaaattgattatccaaatatttaatagattcactgtattgtgaataaaggatttgacattaggaagcaattatctttgaagaaattatctcttctagatttcaataatatgatgggatctagagttggacgagaatgttgtatatgtgaacaatagggcttgtcaatgggaagaaatcatctaatctagattttgtagatataatggaatcgtagtgttagaagtatgttcatatcgctagtttttctagcttcccttatctttggagaatctgaagtcccatatttagttgttcattgaagacttcatcaaaatttgtgcaccacaggagaaattgacctggagaagtaggtttttttaatttttttttctatttgtataggcaaataagcaatatattcattaaatgaaacaacacctaacaaaaggtgcactaaagtatacatggggtatacaagggcaccaaaagacttcacgtagttgtggtaaatgcctaaaaaaaaatctaccacccactatctagagcttaaccaattaacaaagtctagtatggacaaaagataatctcttatatacaccatcacccattccaaaaaattatacataaatgattgtttgattacttgatttgcttttttagtctttttgaatgttttatcgtttctccttccatatgatccataataggcataatggagtaattctccaagctttctttctcgttcttccaaaaaaggatttgtgccagctcaagagtgctttccttactaaggattgcatgactcactttattctaaacatagtgtaaatcaactgccataagatgactactttcgaacaatgaaggagaatgtggtcaaccattttttaggcataatggagcatctctccaagctttctttctcgttcttccaacaaaggatctatgcctgctcaagagtgctttccttactaaggattgcatgacttactttattctaaacatagtgtaaatcaattgccacaagatgattgctttcaaacaatgaaggagaatgtggtcaacaatttttcttctcctttgcatatgtaacatctatttggcagtttctgctacctttttttgagctaatctagtatcaaaatcctttcccacgtagcttcctaagaaaaaaagagtaactctcaatgggatccaaggattccatacaagacagggagggaagtcctttgtttttctattggacatagaagaataaagagatttaactttaaaaataccactctttgagttcaattagatcattttatcctctacatccctaccaattatctgcacttgcaatttcctaagaggagcttccaccccatctatctcctagtcatggaattgtcttgaaaaacaagggttccttacatcgccatcactttcctactctcacacctcaactaacatgcatccttagtagtggctatggaatacaatgtaggaaaaagcctctccaatgggtaagtcatcacaccacttatccttccaaaatttcaccctcctctcatttcccacgccaatgttgattctgttgttaaaaatctcccatatacccactccatatctttacctaattgctcttaagcacaaatttccctcttcctcttcgtatttctttgtgatcaccttcttccaaaaggagtctcttcaatgttagttacccagaagagctttgttgagcatggacaaagttctaatgcccaaaccacccttcctctgacccacatagactgtcaaccaactaattaggtaagggttttcctctataacatctcccatgaaaggatattcctttggatcttttccaaccttaggctcacctgcctcgagatgacaaaaagatacatgaattatataggtacgctagaaaaggtgttttttattagagttaaccttcccctttttgaaaagtacgatctcttcgaaatggcaagttgtttctaaaatctttcctccactgaatcctaaacttgagtagatttgaggggcttccaatggaagtcccggataagtggtaaagagagttcccaccttataacccagaacaccctcattaagtcctccacatcagtgagtcccccaactgggatcaactaacctttatgcaaattgatttttaactctgagattgcttcaaaccatatgaaaatccagctcaaatgctctatatgctccttactagcattgcaaaggatgagggtgtcatcaataaataataagtgagatacctcttattcctcctcttctactacccacaaaaaagcacactagaaagccctcttctttagccctactcagaacacgggagagagtcgccatggacatcatgaaaaggagtagcgagccgtagaaatgcactagtgaatccactttatccatttgaggttgaaacacattttttctaagagcgccaatagaaaaccctaattgatgtgatcacaagccttcttaatatcaaacttgcttatggctgcactcttagagcacttcagtcttgtgtcaattgtttcgattgctattagaattgcttacaagatttgtctacccaccataaaagcattgtgagatggggaaactactttacctcccacattctttaatctattggctagaacctttgcaagaagcttgtataacccaccaaaatgataggtttgaagtcctccaaatctttggcaccctttttttggggactagcaccataaccacatcattagagatgtaggttatgatgctactaacttatgaatttatttgtgtgatttttcaaagaacccaaaaagtagagatgaagtgcctatgccaataatgattacagacttatctacttattagtggcaagatgggctttggttaaacttatccgttgaggaagtatctcaatcacaggattgtgtttgtgttaatttttcattgtacatgctcatatgtgggaatctaaccgagttggacaggacattcctggatacatgttgacaaatatccaaatttgtcaagaatgtaaatacctttttcatatgatatggatggtccacatggttcattctactgagcatagtgcatgcttttagatttttcagtcagacaggctgaaaaatttacaatgccattttgtttaattattcattaacacgtcatttatttttttttctctggtagtgttactgaggattttaacttagaggttaatgcaatcagattgcttttcagtttttatgcatgttgtatacttcctttaatgttaataatccttttatttaatcttagtgcagtactcaaaatttgtgaagccagcttttg

SEQ ID NO: 11293 - DNA, 3845 bp, Vitis vinifera
  Intron number 7 from transcript GSVIVT01038211001 (locus G SVIVG01038211001) derived from phytozome v7.0 (chr-ID chr5 ; pos 24392684 to 24396528 reverse strand)
cggcaacaggttttatgcttgatccttgacatttctttcatttccttctttgccttcaaataactaaaatgtttctatatttttatttgatttaagattattggggaactcattttgtttcacttctttgcctcctgcctcctgcctcctgcctcctgcatctagattgatgtgtgaccctacatttctttcgtttccttctttgccttcaaataactaaaatgtttctatatttttatttgatttaagattattagggaactcattttgttttccttcattgcctcgtgcatctagattggtgtgtgatcctttgatgttcaacatattgaagtttttttaagctgtgattgtttgactagatatagtatgagataaaataagatatgagataacatatcctattctatatttggttggtgataggatacaataagttattccatcacttatcatatctcatgttcaaccatcataggataaaataaatgatggaataacttatccaacctctttactatatatcctctttatgtgagatataataatcctaagttgagatattggatatacatattctttggatcataaattaacttgtcccatccattttcttcattttattttagatcacactcattttgcaaaacaaaaaatttttgatttaaaaaaaattaaattttaattcaaaaaggaaaaaaaattttaaaaagtgtataatataacctaaaataatattaatacatatttttatttaatataatattttaatacatgcaaaatgcttttttatatttaaccatgtaatctaatatttctttatttgtaaattttaaatgttttaatcataaatattattaatgaagatataaaacattacttactaaattataaattgtagaataatttccaaattatatcatatgagagggatatatttttttaataacaaacattgggtaacaatatgtttttttattttgaatagcaaacattgtgtaacaatatgttttttattttgaaaagtattgagatcaagtgggtccttccttttacgattagggagactcattaggttgacatgacttttttgtgggaagaaaatgctagaaggtctggagagctacttgtgcattttttttggacaatttggaaagaaatgaatcaaagattgtttgcaagtgaggactagtcagttcaagtgctaaagtgctcttttttttagtaatctagtgtcatggcttagcatgtacatagagcaaaactcaatgcttttaattgattttgtagattgggtgaaatctagttgaggaaaggactagttattttagtgttctcttttttggcaaatgccttttggtagcaattatattcgtcttgtatatcttggtgtgtagcttattttttgatatttttaatatttctttgcttactcatatataaaaaaaaaatatcaaacattgaaatgtaatatattttccatcttatttttgttccttctacaagctaaacatgagtatggtacaacatagcccattggatatcttctacaaaccaaacaaaaatatggtacaatatatcctatcggatataatattctagaatatcatttccatcagctataatatccaaggatattatttctaatgtcatatcccattggaaatgatatcctatgatatatatatatatatattatcccatctagtcaaccaaatgtagccttaagttatagaatgtgatgaaagagttgaagaagacaaccacttttagaaagaagacaaccacatcttcaaaggaagcataatagatactaaaagcttttattaaaagtctgttttcactttgaaaggctatagaatcatatatagactcttgtggttctcttccttgataggaattccttatctttgcttactgcaataggaatagatatgggaaagtggaaaaaaaacttatttaggcattaaggctatttttggtgtccgaaaaatactaaggaaagaaaaaaaggccaaaggaaaatgactttctcatgtttggattcaacatggaaaatacgaaagaaaatcacatataattaaaattagttaaaaatttatacattttaaaattatttaatctttttatagaagaggaaaaataagtgaaatgagtttgaaatagcatataaaaataatttattgattttaaatgtattttttattttccttcactttttctttccttctacttttcctctctattttctttccctcgcattttagctcatattttccgggaaccaaacatagcctaaaagaaataaaactgtttttaatgtagcaagagattaaacaaatctaaattggatttctctttaagattgctgtagttcatgtcagattatgtttttctctctactcctgtcaacatctgtaactacatcagcagttgtctttaaggtcattattttctcatcatgcattatgaggtggtgaaaatttgtgttaaagggaaaatgctcatctgtgggcataaaatttgctttatgtcagccatgtattttttttggtaggtgttcttttggtactggaattcatttgacattatcaacctatcatcttgccacctgaacccgcctcaggagctacatgggctgtttattctaagtgtggtttagctaataaactgttgttgatgctctcaaggcccttttttcattattgaaggcccattgtagcctagtttcaggattgggggccatgaaggtcaccttcaatctgtttgaggtccaggtggcaggtccttgttgcccagccagtccaggccattgaaagtccagtttcagtgtttagtcctgtatcattccttcaagcattgataagctaaataggttttgtattgggtccatattgactgcaattcaagtttgagtcagtgaggcccctttcttcagttttggggctccaatgcccttgttcaacactgactaaaatcatgtggggaagtcagcatcttaaatttttaggggagcatctggcaatacatgtgaatggacatggcaaatcgatgtaggttccaatccttagtttgggattgttgacaattctgcatgagaaaaatatgtattaccttcacagaagatcattatgggcttcatggtactgtgatctattcatgttattccatatttttcctttaggatagagaaaaattaactttttgctgaaagtaacttgctttcagatttcaaatcgtttgtttgtttgtttgtttttgctttttgttaacttattacttatttcttatatttttttactgaataaaaaaggccaaaatatttgacttttctgaatgttaaaagtaacatgtcagtttttcattacttcttaatatttagtagaaataaaatattgaaaaaaaaaacaacttaatatttaaccattaacactattaagtattatttaattttaagttctatttagagttaagtaaaaaaaacaaacaccatctaagtttttttctatggatcccattttttagtaattagactgttattgtctttttcactggaaggatgctaataatttctcttattttcatgcttgaacctttctaatcaggtatgaaatatatatttttctttcatttttttaatgggaaaaattattaaattgtattaaaggaaattttgcatgatcaacaagatcaataaatatttcattccaaaagaataactgttggttatatcaggaggaactactaattaattgtcatttactgaagtttgatttattaatatattgaagtcttatcttctctctgcagctccgtgattggttggatttgtctctgaatcattc

SEQ ID NO: 11294 - DNA, 3889 bp, Vitis vinifera
  Intron number 2 from transcript GSVIVT01021183001 (locus G SVIVG01021183001) derived from phytozome v7.0 (chr-ID chr1 0; pos 2346802 to 2350690)
caaccagagaaggaaggtgaaaggaatctcttcaatagctttacaaaacatcattcatgagtattggcaaaggtgccctttttgtagattacaattttagggtgcttttctgtttttggttagactctaaccagtacaaatccaacattgcatattctcttctccaaatagaagcaaattgtcgcagatttcatggtaggaaaatttccccccaaaaaaactcttcttaacatccatttggagtcttgtgcaagttcactaaacaccgaaggattttttagtttatctgagagaattaacaaaatgccttggggaacttctatgtacccatcctccagaaaggctgaagttaggcactcaggcaaggctgtctctccagtgctggggaattgttttccagttgatcaatcaagctaaacacttttggggataagtttaatcaggatttaggtattgaactgcatgaagaaactaggagcatgagattgcagcttactgcatgctgaactggtgattattaagtctcaatgtaaagagaatggatcatgaggccatttctaccataatctgggtattattcttgagtcttgagtggaagaaataactcctggatcatcaggaattcagaaatctagtggataatgataagatcaacaacagtaaaagctagaacgcgatctagaattgaagaatttcagtatctgtttggcataattgatggaggacaaacatggccctgtgtccaatatcccagtgggtgtaaaggagattagtttatatggctatcacaatttcatcaatcacctgatggcccctagaattgtgaagttgcaattcctcagagtgctgtggacaatttctttcccatttaatggcagtgcaagtatttgagacgtggatatggtctgcttgttaatggtctaccgaatataacatattggaagagaccatgaaatgtggattccctgacggacatcttgggaggcttctgttttaaatacaaggagtcatgttgtagcattggcctggttgtatgtttttcttccaagtgctaggcctcttcaaatccatggcagctggaagcagatgaatcactctgttgaaggagaaatcaaaggtgagccattgccatggtttcagggtgtattgcacatagtctgacatgcgtatcttcttggcagccagtcacactatgtttttcccatttgctttggtttctaaccatgaatgtcctcttaatacaactttggtttccataaatccccaaaatcctaaagccactggagaagaatctagtgtctaatgtctatgccaaatatgaattacaattcgaattgtctcctatctgattagatggtggagatgagaaaggtccaactttcttcatattctttgctgactgagaattagagtggcaaatttgaggtgaaatctgttaatagtgactggtttcattatgatagttatggaatgagctgtgaattggccaacagagagaaattaggagtgcattggtggattatatctagttagaccaagttcaatccaaacatgaaactcatttatctaaagcttctaaagctcaatccaaccgtgttcagtctgtattgtctgattcaagtttagttttaaactccgattcaaattagactagattggacaagtcacaaaattaggttagactagttgagttgaatagcaaaacaagtaatcaaatcttataccaattcaaatcatgtaaactcgtaaattttgcatacttaaaggttttgtctggttattgccttttaaacagttttctattccaaaaaaaaatgaaaaaaagaaaagacaagatgaaaacaaaaaatagttttttgtttttaaaaataaacaataggtttctattcttaaaaatagaaaatatttttttaattattttcacttattcttttagagttggtttaaaaaataattagaatgattaaaaataaaaacactgtatataaaatttgtttttaaaatatatttcaaaacatagaaaatatgtttaaaacatttatattccaaacacacatttttttttacaaaagacaatatttttttaaaaatagttcttaaaaatcattttttttaaattatttagttaccaaacaaggtttttatgtttccgaacaaatttttgttttataaaatagtttttaaaatctattttttagaagtacaaaatatcttagaataattttcaaaaattactttctaaaaactatcttttaaactattttaaaaaacacttttcaaataagagtctatttgacaatgattttaggaagtatttctaacttttttaatatttgaaaaaaattataattcaagtgttagaaagactagaaatgttttctagaattattaccaaataaaatatgtttgatagtactaccaaataaagtatgtttgacaatgattgtaagatgtgtttttagtttttttaacacttgaaaaattttatcttgaaagtataaaaaaactagaaatatttcctaaaatcactatcaaacacattattagagtctatttgatagtaatttcaataagcgtttttaatctttctaatacttgaaattttttatcattcaagtgttaaaaatgttagaaacatttcctaaaatcactatcaaacacaaatttaaaatatgttttggagtaattttaaaaaacgtttctaatatttttaacacttgaatggtaaaatttttttgagtgttagaaagattaaaaatattttctaaaattactataaaatagatttttagtatatgtttaatagtgatttcgataagtgattttaatatttctaatacttaaaaatttttaatttttaaatattaaaaactaaaaatgtttctcgaaatcattattaaatgcacttttaattaactttccaaatgagtgtgaacatatattcactaacttttaattaataaacctctaacttttaatcatatatagcaaaagttccaagacaaaaagaaaattaaataatatacatgtcgatattaaatttatatataatttaaatttcataggcataaataatcaagtttgaatagaatttggattctccaagcccaaaaccaaattttatacggatcaaagattcaattcaaattgaacttcgattctcaaaagctcaaaaccaaacctaaccattttaagtaccaattcaaagtttcaaattcaagtaacaactggagcaggttcgggattgggttgcgttgaaatactcacgtcaaaatggacattcttcatatcagagcacctttttcggaggagaagaatcctacacagggaagacgattgttttgaccaatattccaatgtgacagccaaaacctacaggcatctcgcattcagtgtcttattaattgtaaatttgtacaacgcatcctctgtttcagattgattatttaataattgaacaaagtgaaggtgcatctcggcgccatcgctttgctccccctactttgaaactatcatattgaaggggaaaacaaaacggttccttcttggctaccaatgggcaatatctaacaaaattgtagcaaaaaaaaaaaaaaaaaccccaaacaaatgaagaaacaaggttggtggagtggtgcaggagcagtatggaaagcgggggacgtggaatccgggtataggtgggtcgtcccaatttgactgatataatggcttggctttgagtgaacggcagaaagcgtgtccattttaacctccctatgtccccacacccagaatatatggtttagtctttctctttctaaagagtggtagataaacataaaatatataaacaaggaggaagaagaagaagaagaagaagaagaagaagaagaagaaagcagaagcc

SEQ ID NO: 11295 - DNA, 7355 bp, Vitis vinifera
  Intron number 1 from transcript GSVIVT01018178001 (locus G SVIVG01018178001) derived from phytozome v7.0 (chr-ID chr1 5; pos 13514047 to 13521401)
attttgtgaataaatctgctagattatcacttaagcgtatttgttgcacatcaatttcaccactcttttgaagttcatgtatataaaagaattttagtgaaatgcgtttagttctatctcctttaatataaccccatgttatttgtgcaatgcatgcaacattatcttcaaataatattgctgggtcatctttgatagaggagagtccacgtcattcccgaatatgttggatcatagatcctagccatatacattcacgacttgcttcatgaattatcagtatttctaaatgatttgatgatgtggtcactattgtttatttgacagatctccatgaaatagcagtaccattgcaattaaacacataccatgtttgtgacctacctttatgtggatttgaaagatatcctgcatctgcatatccaagcaattgttgttttgattcccttgagtaaaataaactcatgtcagtagttctgcaaaaataacgcaatatatatttgataccattccaatgtcttcgagttggagtagaactgtatcttgctaataaattgacagaaaaagcaatatttggacgtgtacaattgacacgatatataagtgtaccaatagtactaagatatggtacttcaggaccaagtaattattcatctttttcgcaaggacaaaatgagtcattttttacatcaagtgatccgacaactattggagaacttaaagaatgtgttttatccatgtaaaaacgattcaaaactttcttaatgtatgttgattgatatactaaaacttcatttggaaaatgctcgatctacaaggcgagacaaaattttgtttttccaaaatctttcatctcaatttcttttttcaagtaatttgttattcttgtgagctcttctggaattccaacaagatttaattcatcaacatacactgcaataattgcaagtctggtttttgatttcttaacgaaaatgcatggccacatagggttattcacatacccttcttttagtaagtattcactaaggcgattgtaccatatgcatccagattgctttaatccatacaagaattgttgtaacttgattaagtacatgctacgaggctttgtactatttgcttcaggcaatttaaatcctttaggaattttcatgtatatatcattatccatggatttgtataaaaatgttgtaataacatccatgagacgcatatccagtccttctgagattgtcaaactaattaagaaatgaaatgtgattgcatccatgacgggaaaatatgtttgttcatagtcaatactaggtctctacaagaaaccttgtgctactaaacgtgctttatatcttatgatcttattgttctcattgcgctttcgtacaaatacccatttgtacccaataggttttacatctttaggtgtttggactacaggtccaaaaacttctcgttttgttaatgagtttaactttgcttgtatagattctttccattttggccaatcatttctatgtcggcattcttccacatttcatggttcggaattttcatcatttcttatgatatcggaggccacttggaaaacgaaaatattgttaataacaatattatttcgatcccatttttatcccatgtatacataacttactgagatttcacaattttcaagtacatgcgcctttttaagggcttctcgttcaatatgtgcctcttcaggggcttcttgtttaatatgtgtatcttcaggggctttctgcattacttgtgcctcttctggggctatagacttatcaattttgaactaatcaatcgttttgatggtctcttatagagtgccaagtttttctagggttctcctcttctagggagttacatcttttgagccgacaggtctaccacacttcgggtttatattagattcatttgttaactgtcttacagggacataaatctgtgttggagtatttgcaactaggatatgtgactttgtcactttctttgtatcaattaatgcatttggtagttgatttgcaagattttgtaaatgaatgatcctttgaacttctagttcacattgatttgtacgaggatcaagatgagacatagtagatgtcttccaactaatttctcgtcgttcttcaggaatcgacttttctccccctaatgacgggaaaacactctcattaaaatgacaatctgcaaagcgaattgtaaaaacatcgtctatcaaaggttcaagatatcttatgatagatggagaatcaaaacctataaatcccaagtcttaatttgatgacccattttagtgcgttgtgtaggtgcaattggtacatatactacacaaccaaagattcgtaagtgagagatatttggttgttttctaaacacaagttgtgaaggggagtattcatggtaagttgtaggtcgaatacggactaaagctgcaacatgcataatagcatgtccccatacgaaagtagataatttggtttttattagtaatggctgagccattaattggagacgtttgatgaaggattctactaaaccattttgggtatgagtttgctcaatatttattcctactgacatgcaatagtcaatgaatgtttgagaagtaaattcgtcaacattatcaagacatattgtcctaattggataatctataaattgtgctcgtaatctaattatttgtgcaaggagtctatcaaaggcaacgttatgtgtagaaatgagacaaacatgtgaccacctagtagaaacatctattaagattataaaataatggaatggtccacatggtggatggatagacccacatatgtccccatgtattctttctaaaaagattggtgactcatatatgactttagtaaaaggtggtctgactatcaatttaccttgtgaacaagcagcacatgagtattcattgggtgaaagaatattctggttctttattggatgcccatgtgagtgttcgattattcgatgcatcattaaagaccttgggtgacctagcctatcatgccaaaggataaaaacttttgggtcgttgaacttctggttcacgacaacatatgattcaatagactttatagttgtatgatacaatctagagaagaaagccgagagtttttccattataagattctgaccatatataatggaagtaatgtaaagatattctatattatcttcgttcatagttttaatatgatatccatttatgcagatatctttaaaactgagcaaatttcttatggattttctagaatataaaacatcatttatattgaatcttgttccagttggtagcgttatgtttgcttttccaaagtcttcaactaagtttgtagtaccatatatggtacttacattagcttttattaatgtcaattcgaggaaatatcttttatctcgaagaattgtgtgcgtggttgcatagtctgtgagacatacatcatcctcattcatcttgagaccaaataacatatggatttcagatataactataaaaaaaatacataatgtaaataacaaaagaaaataatatgtaaatataagacatactaatatattatttgatatgtaaagtaacattaatcaatgttaatcttctcatcatttattaaatgatttgttttttcattaagacctccaaagaaatcaatatcatagtaggttaggtccaatccatcaccatcggtaaagttcatctctatctctcttccttttgcttttattgatgcttggtaaagatcgaccaaatgtttggacatatgacaggtatgcgaccaatgtcctttcataccacatctataacaattattctcatggttcttggaggtttatcttgtaaacacttcccattttcttattttgcctcagtattgttccacttttggtggtgcaatgagactttccttttctcaaaatttgatgaattattactataaaaaccatagtatcggggatttcttccatgaccacaaccacgttctcgtcctcgtccacgttcacgagtttgggacgatattgcattcacttcagggaatgcttcagatccagttggacgagacttatgatttcttatcaaaagctcattattttgttcagcaacaagaagacatgatattaatttataatattttgtaaatctacactcttgatattgctgctgcaagaacacattcgaaacgtgaaatgtagtaaaaagttttctctaacatgtcttattatgtgattttttttttctccacatagctttaattgtcaactgattttgaaaagtgcagagttatattcactaatagatttaaaatcctgcaacctcaggtgaatccaatcatatcgagcttttaggagaatcacagttttctggtggtcatatatttctttcaaattactccatagagtaaaagggtcatttactgtaagatactcattttttaaaccttcatggaggtgatgtcgaaggaaaattagtgcttttgcgcaatcgtgcagggatgtttgattttcttctttgatcgtagctcctaggttcattgcatcaagatgtatttcagcatcaaagatacaagatagatagttctttcccaaaatgtcaaatgccacaaattcgagttttgtgagattcgacattgtcaaataactttatatatatgacaaaacaatattattagaatcaattataataaattgatagcattggtataaccttgattataaaaaaaatcaaataatttgtttataacttttaacaaaacaaattaacaataatataaatatgtaaaattttattttatataaataacttcaagtttaagatatgagaattaccttcaaagcaattcgtgctgataacgtgttgtaaaacgataataaatgtgactcgaataaaagtagagatgactatatattactttaatagtatatataaagaggataaataaataaaaaaagagaaatgttgagagaatgaaagaaagagagaatgagaggaagagtgaaagtttttttttactctggatgttgcttatatggggtgtaagaagccttttataggtttcactatatgaactctcattactcatcttaaagatgagtaaatggagttcataaataactatcaatgtggtcattcaccacttcatttataacaatttatactttattccgattattaaataattagaaaatttgggataagagaaggatgaaaatacttgtaaaatatgtgattaattttattttatttttgtttaaaaattctaaaacgtgttttatttcatctagcaatattagttgctatttttttaaaaaaaatttactcaataataataaaaatttactttgcaattataaaatattatataaaaatccgatttagaaatgatttgattaatagcttgttgaaaagttattttacgagggattaaaaacacttcataacatttgaaagagttcccttatagaaaaatttaagtgaatgaaaatatatatataaaaaattataattaaaaaagcaaagttatgcctggtttcgacaacattaaggaaaaaaaattgttaagaaaaatgttttattttatttttttaatatttaaataccgaataaaaacaaaatataattaaaaatattagacatttatgcatttttaaatcatttaattgttacatcacattgttaaaataagtaaagttattttcaagtagcatataaaatgaataaatcaactttaaattatttttaattttcgttatattttttctctcaactttctttcatttgcattttccctcaaaacttttaggaattagataaaacctaaaaaaaaaaaatttaaatatattaaaaatcaatgaattatttttatatgatacttcaaaaattatttatatttacattcaaaaaaattatttatattaattagaacaattcttactttctatgggtatatctctatatatccaccaaaaaaataacttttctaggacgaaaaaggacatttgatgaaataatcgaagtacaattaaagtgaatatacatggatctcctcttcttagtcgttcttttattatcttctattttattcatatatgtaataaaaaatttaaaaaaatttatgtttttcaataatagataaaggttttgatacactttacttctcgacttatcccatgttttgcacattacacctttagagtatatgcaaaacacaagataggttgaagaggtaaaatgtattaaatccatagataaatgaataatcaggtgcattgatgtaattttttacgacatatatatattgcatttctttttgtatttcttgagattaaaaaaataaagtttcatgtttacgaggttgtaggatgggacagtctaacatcattgggaactataattttggacatacttttgatgttcaaccttataagtttggacatcatgaaactttttttttttttttaaatcttttgtttccacttttctataattttggacatacttttgatgttcaaccttataagtttggacaccatgaaactttttttttttgtaatcttttgttttccacttttcgaataattttcacttctagagcatttttaaattattcattgatttttttaaaaaaaattatttttactataattttttgccaagatttacataatcataagaccttaaaataggttcatatgatacaaatataatattgatgtgtggattaaaaaaaaatgtataaaagataatggaattagttttgaacttatctcaaatatttttttgctaacaataaagctttgaaggagatggtttagatttggttgttgagcaaaaaaaaaggcgaaaagaatgacatgaagatttcaacaacacagatctcggaactaaattccatgacatggatttcaagcgtacaaggtggcacctctttaattattattactttttttttttctaagtataaaataaattagattttagaccatgatatctaaagggccctaagattgaacagaagaagatattttgccaggaaattaaaattttccattgttttgaattaatattttagattaaatcaatggatttaaacactattaacattttttgaactggaattggagttcaactagaaacgtaaaccaccaaatcatagagtgggccctaagagattttttttttttttttcagaataaaaagcacacacgtgagatatccatatcaaaataagccgtacgtgtctcaggaaatccccatatggaaacgctcgtctggaacctgatatgtaagatacacatggctagtgcttgaaactcacttttttttctgagcgattctc

SEQ ID NO: 11296 - DNA, 10027 bp, Vitis vinifera
  Intron number 1 from transcript GSVIVT01033098001 (locus G SVIVG01033098001) derived from phytozome v7.0 (chr-ID chr1 4; pos 25694349 to 25704375 reverse strand)
aggggttggtgaggtcatttttggttggctgagaagtgggccattctgatacttaggtaatttgttttggtgtttctcctttgtgaacaattttaatagcaacattctggttcttatactttccttcatacactttggcatgaacaccttctccaattctcggtccaacgaaaggtcgaccaaccacttggcatttaattgaacttctccgactcatagaacccattctcagatcctcatttcctcctcaaatcaatagctgaattaacatctactcactacccaagccaaaacccttgtgttcgtcactcatttgaagcaaaccaactacaaagaaattgtgaaacagtggagtataggaagacatgcactgctcagttttacagacccatctcattcctgaagattttaaaaaggaaaaaaaattgagacatgtttttgttgaggaagcaaagaataaaaccccacatgtttcagaaacacccaccaaaaatcctagaaaagaaaaataaaacaaagcaaaacccaagaaacaatgtcagaaacagagcatttaaagctttcttaggaacggagggagccaggaaaaccgagaagggaaggtagagatatagaggaaaactgaaaacccggattggaaaagagatttggagaagtgggtcacatgcaacttttttctctgtatcatgcccataatctgagaaactccctaggcgatgaactgttcaagctcgactccgagaatttaaatttgaaaataaatttggagagaatggtgcatcactttctaatgtaataacatgtagtttcattgcaagtgaaatttggatcatgacaaagatcatatcccaagaagaacttccccattcagttttgttgatgcaaggtcaactgcagtcagatcctccttacgttgtgcctcttagagctcccgcccagtgatgggaaactaggtgggcttcttccctgcacaaaggatgtccggacaggtggtccgggcacgcccctccgaagctttagttagacaaagataggtcatgctctttcaaggaaagaatgagtaggtcaattttaacgagcgtaccttgtttatgctttagaagggtttttatagtgcttaggaggaagctattgtagtgctaattaagcactttgaccttctttgtaatgatgattgtcctgcagatggcaggataatcattacagctttaggcagctagtaggtgccgtcagaagatatggcatgatgcctgattgtgtagttacccgtcccctcaacttgatggaggtgtgaggttgtgtgcggtaattaattgacattgacttaggggttgagggaggtcccatcagtcattcccctgccagatactaatgattacataggtcaatgggccttaacgactgactgggtggttccatctgttcagggagtccagtcgtgcttgttgtctagcctcatggttcagatggaaaacttcggatactgtggccgctatccgagtagtattgatggaaggtgacacgtggactgacatgtggagaggagtccctataggtttcctaaactacaacccaaagaaaatcaactacaatcaatacgtggtctaacaaacgtacttgaaaatgctcccctctagtggacctagctggacttcaagctgctctgtttattctcctaagcttacatcaaaaccacagcaaacccaacccttctctccttctgtccatcctttttttcctctgtttttgctctaaatcctcccctatttctcatcggtctcactctgtttttgcttccagtccaagtctccacctgttccactgctcatcgttcagccaaaggtctctatcctcaaccaccaccatgccgaggtggtgatgtcctcgccacacgtcccaacaggttgctcctatggaagtcgtcccccgtcactaggcttcaacccaaaatttagatgagtaagatgattcaattaacaaagtaggaacaacatctaagaaatgtcgattcttgcgcttagccaccccattttgctatggggtgtacgggcaagagcgttgagaaatgatccccttctactataagtagttttgaaaattgtgagacatatactctctccctaaatcagaacgcaataccttaatacaagttgaaacttgtgtttcaattagagcaacaaaggtttgaaacacagagaacacatttgcttcgattgaagaaagtaaacccaagtgaaacgactataatcgtcgatgaaaattacaaaatacttttactgagcatgtgaaataactagattaacaccccaaacattagaatgaatgatctcaaagcattttgtagcacaactgttgtgcataagaaaatgtaaggtcttgtttttgccaagtttataggtagcacaattgaaacacaaactaagagatgaaaactgatctttattccccaaatgaccatgcttcattagatgtgtcaatactagagaatttggatggcacaatcttttatgccatacctcgttttatttgctattgtagtacaagccaaagacattaaattaggaatagaaaaatgtagagaagataaatgtccccctttaggtcctttcacaatcaccgtcccaaacacttgatcctgcacaatgcaaccaccataagaaaaatgaacatcacagttagtggatactaattggctgacataaatcaagtttgtagataaccttgttgacacaaaaacatcattgaaatcatggccaatagtgccaacagcagtaataggaagtgtactaccattggcaatttgaatgcgagtaaatgagttattcataattggtttatggacttaagcaatccattttgaggttatgatgcactaccttcaaatttgaaggatgatttgtcttagtcatcaagatagatttttcatggttggtgcacaagtgtgtctgattacacattcataagacctatgatgagttataacattgacaattgggtagttatcaccttatcaaaatgttatattgtattaggtctcaaccttaaaaggatactgaattaatgtgaaagtcttcaatgattttgacttatgggtaagacattgaggtgtcaatatattttctatgaattaagttactatcaattaaggtaggtgacaacaattatactcaaattaggcaccatgacatcttaaaagtttgagacaatgtattcctttaggtgattttaaagacatgtgatctgtaaatttatggttgtactaatttcttaattaaaatttaacattgttcttagagagttaacatatatctaatgataatataatataaagatttaagactcaaagatggtattggtaaactagagagattgatagcatcaaccctcgttagattacggacattagttcataaagagtttgcatataatggatagtacgttgtagaccaaaagttagtatctcgttttaatatcataggatattaaagtacagttaacttcttgtagtgggatattaagtcaaattcaaaattaaattttgagagagttaatatttttttatgagactagtagcccttactaatactcattccttagtgacacatttattaaaggatatttggtttttatattcattgcataaggacattttgataaaaacacaacattacataagaatttattaatgatattttaggattaagctaattaattaattggagtcccataaaactaattaattaattagggctataaaggttggattgagtgacccaagctaatatgtttgaatatatggaagtgattattttttttttattttttttttgtagcttagatgagttgtagactccataaggagtataagatttttattgaagatgttaaaattcagttttttattcataggcaagttgtaagctccattttataggagcataggatttttttcattgtaaatatcaagttttcaatccatctttgtacccaagagaaggaaaatcgcattccaagcgttaaggaacatccatgatggagaaacccatatgcaatagtgagttttctagtggaaaaaggtcgaaaaagtgagaaaaaagattctctgatgcagagttacacttacaacaatagcactcgagcgtttagattaacactcaagcgtgtccttaaggactcgagaggtctaagagtgcttaagcaccctttccaacattgctggcagcgaaggaccatttttagcaattttaggattttttttttttttttaggcttctttattactaatttgagtagcatggacttttttgataaattaggatttttgaaattataagttttgggcttactaacttgcaataagatccctaacgccatgagagagttatttttttggtatccatttatatttccttgtttatgcatgtatgctttgagaaataatatggttaaaattatttaaaaaggtcattttgatatttcttataagaagtaaatttaaaatgcaaaattacttcatttgtcatttgtgtggaaaatgcaaaaaaaaaaaaggaaaagataaactaaaaaaaggaccaaatccaattcttcatccttcactcaaccacttaatccagatttttttttttctgtcaaatttttctttcgtttttgttcggattctcaacaaccaaacaaacctcaaataatacaaatcagaaaaattcacaaacaatacaaatcggtaattaatgacaaataatccttgaaaatcgtcctccaaaatcaaaaggtgagaacaaaagcttctaaaagtaactaaaaggaaagacttgagattgttcttggcaagatcagaagaaggtctagatgtttctagaaacagagatggcctagctattaaagaaaaagaaaaaacatgtaaagatgaagaagactttagagccctcaaaaagccttctcaggcgaagtaactaggaagactaagcagaagaggtgcaaatgatgtgggctctacgcgaggtgtctattcttattgtggggaaaggggcttggagttgggtgtaattacaacaaatatgataaatattcagaaaaaaaaaagaagaaggataaaacaggaagaaaagttacaataaaactaacgtctgggtttttataggataaagatatgttattatttaaaaatgttgacttttatttttatttttttaacatttattttgaaagtgtctttactgtatattttaatgagctctccaacgaaaaaccgcatctgttcatcctaccgtccaacggccatacttcagggtcatggcacaactaattcgaaccgacctcaaatgcgcccgccaaaaccaccctccttcacaaaactatctatcctcacatctgttcttcatccaccgccgcctccgccaccgcgattctctcttctcgcagacaaatgtacctctatgcatcaactcaagcagatccacgcccaaatgatagtctcggctcgcatccacgacaactacgccgccagtcgattactttccttctgtgctctctcggagtccggcgatctcagttacgctttgaggcttttcaacaacacccaagagcccaactcctttatgtggaacaccctcattagagctcatgctagtagccttaacccatctgaagctttacttctttatgttgatatgagaagacttgatgtcataccaggtaagcacacattcccttttcttctcaaggcttgttccaattttcaatcccttcaatcttgtattcaagttcatacccatgtattgaaatttgggttagacttgaatttgcatgttgttaacgggttggtgagggcctactctgtttcttgcgatgtgaggaatgcccgcagagtgtttgatgaggtttcggagagaagtttgagtatttggacgacgatgataagtgggtatgctcagaattattgctcaaatgaggccttggaacttttcgatcaaatgattgtggaagggttagaaccgaatggtgcaacgctggcttctgtgttgtcggcatgtgctcaatccgggtgtttggatttaggggagaggattcatgtttttatggaagagaaagggattgaagtgggagtgattcttggcacggcattggtgcacatgtatgcgaagaatggagcaattttgatggctcaaaagctgtttgatactatatctgaaagaaatactgccacatggaatgccatgatatgcgggttggctgttcatgggcatgccaaagaagcacttgaccgcttttggaagctagagaaggagcagatcgttccaaacgatatcacgtttgttggggttttatctgcttgttgccatgctggcttgcttagcgttggtcggaagatattccatttgatgaaaagggtatatggaattgagcccaagatagaacattacggatgcatggttgatctacttgggcgtggtggggagttactagaggcggaggagctgatcaaaggaatggcttggaaagctgatgtggtgattttgggagctctgttgggatcttgtaagaaccatggaaatattgagattgccgaaagagtggtgaaagaaattctcgttttggaacctcacaatcatggggtttatgttgtgttgtccaacatgtatgcagaggcagggaggtgggaggatgttttgaggctgaggaaggtgatgaaatcaggaaatctgaagaaaacgcctggatggagccttgttgatagtgataattaagcttgtatacacatcaagtcacataagacccatttcattggatggccaagacaaagcagatttaagcacgcatcatggtggtgacttgagacatggcctgggttctgattaaccctagaaaaatatcataattttgcagttcctatttcacctattccaagttttttattgagttcttcttggtaagaaaggaaatttggtgggaactcttctttgtttggaaaaattcaaatttggatggcttcttcagaattatcagtcacaataacttaatggaatttgaattgcaagtgccgcacattgttcaaacatggagcagcagaatggttgaaattttggtgacataagattgttatagaggaagggtccagatgaatttgaggatctgaactgcagttttcatgctatcaaatggcaaacctctttcaacccactaagaaggaaaaggcagagctggaggtatttttaatttttttttctttcattcctcgaacaaaattattaattttctgaaaactgtattgcaatccataaaaattgagcatgtgattttataccaacgaagaggacatggtctatgtacatttgcttctgctggcaagttgttattgtgattattatcatatggtaaacccttttggcaagttaataaaattattatttattcatcattatggtgaacactgctggaaagttaacagaggccaatttgagatttattcagctgcatcgcatatctgatggtaccaggacccttatggacggatctggatatcacagcctggtccggggaagagtggatctcacctgcaagaaaccttcattactgagcgttttggagaaaaacaactgttcaccttcccacacaaaagcagaccatcttcaagccttatgtcaatcccttcttttgtttgtggcatcattccctcatctccttaccttactaacttgattgtcagacgattgtagctgggcttaccctctacagtctaccctttgtatgtaggagttcaacttgaagctattatgcggagctcgtggtcacctaccagtgagacaaggtaatgttgggctcgtccacaaagttatccgaattagatatttgtataccaacaatattcatttcatacattgggaaatttcaaacacgtgtatatttatttcattagttgattatattgacatgcaagaacattttgaagcttaaaaaatgtcatgttcacagcattgtgaaccgtaatgatgatttcaacaaaagaagacatggcctgtgtgctaaactgcaatcctgctacaaattctaatgaaatacatgttggaattttttatatgtgaacttacttaatcaatgtgataatgtcataaatcaatgttattttatttttgcattgtggtccataatgggattgaacatatattgttgcttgattttttttgggctcatcttaattcacttgattgacccattaagtgaagtggtctaaataatgtgtataatgtgtgatatatatatatatattatatatatatatatatatatatatatatatatatatatatatatatatatacatatataagtgcaaaggaagacttcttcttcttgagctaaaaaaaaagggcacgcactgcacactcgtcttgaaaataccatcacgaactgagcatattcttgaacaccagtggagcacaaaaatgactttccatggcattaatcaaggtaatcatttcatttattgtcatttaatgcatattttaatggctacatgtgatcctatgtcgtttaaaatttcatcaatacaaccctattgtctaggaagagagtggtttcttctttccgattcttctttctcatatgaatgatatagcttcaagtagttaatgacacctaattattgttatgtacgtagagaaacaaggacataaaagatgcactggtcggtttggagaaagtggagctaacaaggtagacccagagaaaacatttagggtgtgtttgataattattctttggtttttaggagataaaaaaggcatgcaaatatatttggttttaaattattctcaaaacaaatttttgagaaaataagatgttttatgataatatattttaattatttttaattgtttttataggaccgcattaataaataattgtacaaatatgaaaaataattgaaaataaaataagaaatatttaaaaacacaaaaaaaaaaaaaaaaaaaaaaacaggtagagaatatttgatttttccaaaaagactttaattctaaaagtcatttttaagaagtatctttgaaaaagttctcaaacatgtccttagcaactattcttaactaattcagaatatgcacttcttttcctttttgtccttcgaattaacactaaaatttgggggagtcagcaacgaaacaatatctttagttggactatgaacataacgcgggtctaaaaagcagagctgtagcatgttattcaaattcctaccatgccataggccttttaaacttctgcttgcttgtcttttcttaacttactggccccttcaaacctttggaggcctactgtaattgggtgatggtaatttcactgggtttacacccactttccaacacaaggctaattcagttcatcccctgaggccctattcctctccccacgcattttagacgataatgcacaggttcagacgctcattttggtagtcaaattattttgtgtcatggaagcataagtaaaatacaatagctacctccgtttagtttattgtgggctatctgttggagaatgtgggctacatgttgagaacttctgacattttcttttccactcacatgccccagtggatcgtatcaaacaccctccgagtggcatgatattatgcttgtgaaacccacatgcttcaccgagtccatgggtttgctcccccactctttactccagcgcgtggctttgtcaaatatatccgtagtcgaaacttcaaagaagcttttctatatacacacatatgcatgtaaaaccagtctattaaatatctccagagtcaatgctatggcgctctctccttcgtctgagatcagaatgcaactgggtttatgcctcctcccaattctcttcattgctctggcatctacaggtaacttcagcattttcaattcccattaagttttcccagttttcaatcaagcaaaagatcaagaaacaaacagagaaaactgatatttctgtttaacaaacgtccgcagccgcagatctgcagaatccagattttgaatcgccc

SEQ ID NO: 11297 - DNA, 14547 bp, Vitis vinifera
  Intron number 7 from transcript GSVIVT01027211001 (locus G SVIVG01027211001) derived from phytozome v7.0 (chr-ID chr1 3; pos 18214082 to 18228628 reverse strand)
agaaaggacagatctggaaatcgagagaagcctgagtaagaacctacccttgactgataatgctgttccattaaatggggttcaagatatcttagcaaatgatgcagataaagttggcagcaaaatatctgaatgcccagaatcatcacaaaactacttgtcaaagtcaggtgatggggaacaaaaacaagagacactgcctgtagctagtgaaacagtttcttgagagaacccatcatctactgctgaatcttttatggttaggagtgaatctctaaagagcactgaagatggtgattgacaaggtaaggaaatcagggggtggaaagaagcatcacaggagagtcgtctgcaccaactagatgctaccatggtgactgtctgaaggcttagaattgtttctttgatgtatatacaccttttttttttttctcattttgaagcatctgaaaagccttaaccccaaaagaggttaaggtgttagggaatggataaattatatttagtgtggaaattttcaggtgcctattaatttgaatattggaaaacacagtgccttgttagtttgatttcttatacagcttgttatggtcctaccccaccaaaaggatgagttaaaatgagttcagtttgtgtgtgtgttgaatctgtggaggtgagggagcgaagattatttgattttgattatgttggttattgtatgttaccatttatattatgtcatttttgctgtagcggggtttaatacatgatccagttgggtaaaatgtttctagttttctcaactacattatatatattattattaatattcgactttttggatttgagtggcggtcgactttattttattttatttatttatttatgattattgttatttattagaactaagagaatgaaaaggaagaatcttaaggaaatttccatgattttattgattccactgtttagtattacaagattaatatatatatagagggaaatgaggattttcttagggtgattagagacctcatctctatgcatgactgggtgatcttagtgtttgttgagactagaacatgtggtgatagggctgatgaggggtcttgaaggattgggttctctagtttgacgcaaatggaaactcaaaggtttagtggagacatatggatcttttgaaggattgagcgtgccactaactttcttacatgtgtaaaacaccatatgacaaactaacttcttattttataatcctaacatccccccttaaattcagagtaaacaaaggaaacttggtattgggtacaactttggtaaaaatatatgttgtttgatcactcgaaggaacatgccttacatcaataaccttttgaataactttctcatgcacaaaatacaaatcaagctcaatatacttagatctagcatgtaaaactggatttgcagataacaatactatactcagattatcacaccacactactggagctcttagtaatttgatcctcaacccgcttaataaggcagctagccatgtgatcttaatcattagtctaactaagcttctatattctgcttctatagatgacctagaaataatatgttgtttcattgagtactaagaaactagattgttcctaagataaacacaatacttagtggtagatctcgtatcatctagacttgattttcgatcaacgtcacaaaatcccatcaaatctaaagtggttgaaccaatcaaatgaagtccatactgaatagtgcctttcaagtatccaagaatcctctttattgcttcccaatgttcttcttgtggatccttcagatattgacaaactcaattgacataaaaggaaatgttctttttgtggatccttcagacattgacaaactcaattgacataaaaggaaatgtctagctagtgatagtgacatattgaagtacacctacaacattcctatagagttgaacatccttcactataccacttatagaggttgcaagttgttgaccactaatcataggagtattatagccatttgcattgtgcattttgcctttgaataagagatcatacacatatttagtctgagacaagtgtagacctttagtagtgtatttcacctatatgcctaaaaaatagtctatcttaccaagatccttaagaggaaaactcttgtttaactatgaaaataactgttgaagtacataaggatagttgctagtaaccaccatatcatcaatatgtactaagaaaaaagtagtgtgatgtgtagtgaaccttgcgaacaaagactgataagatttagtagatgtaaaaccaaaacctagaagtgttgcatagagtttctcaaaccaagcacgtggtgtctttttgagatcatagcgagacttgtggagtttgcataccaaataagaggtggacttttcaataaaacctttaggttgttctatataaatttcttcctgtagatttccatttagaaaagcattgttgatatcaagttgttgaattttccaatcaccataagaaattgcatttcaatcacagtcaataattgtcaccatatgttacaaccccatgaataaaactagtgattaaaatatcacgatatttcgacgaaatatcgccgaaatatcatgtatcgatggagttggaaatgatatttagggcggatatatcgacaagggacttgaaccctcaccaaaaagtagcataccaccaaggcgagtttgccctttaatatatatattaaaagtatcgtatcaataaaatattaaaaaatactttaaacaaaaaataaattataattattttataattaaatgaaatttttttcatttagtagattagcaaaaatataaaaattatcatgataattttcttcatagtgtttttaatattaaaaaattatacatttatcatcatttattttttatcatttaatacaattgaattaaatttatcataattttaatattaaatatattttaaaattagacatattataatcaaatatcataatattattattgaataatattttatttaatttaataatcaatatacacttatatatatcaatttcttcaacaaaacaactttaaaaagtctattatacttttaatttaagagttatatatatatatatatatatatatatatatatatatatatatatatatattatattttttgatcaattttagattaatcgatattttttgtcaaaatatccgtcaatatatctccgatatatttgtaaaatcgaagtaccgatatatccgtaattgctaatatttttatccttaagtcaaaccaagtgtcacagtcttaggaaatcgtgatcaagcatcacaatagtagatgcaggtaaatgtattggtcatggtttttttacgtggtcgtaaccttatggtttgttttttgtgacgatcgtaaaaaccataacaaaaagagagggacactttattgttttccagatgatttggtcatggtcaagtaagtgaccatgactaaatgtagaattattaagtgaccgtcaccaaatgtagacttttggtcatgatcaactaaatgaccgtagctaaatgtagacttattgtcaacgtaaacttgactacatataaacttatggtcatgatcatatagtttatcgtgatgaaatatagacttatggtcatgtatttaatgactatgactatgactaaaatttgttatatttaaacagttagtcttttatagattcacattttccaaaccttcataatctccaaaattctattgccttggttgaaatttttgtatcatttgcatcatttgttcttggagttgtgtttgcatttgtctctacatttctatcatttttccttcaaacttttctttcactttttcttgtgtctttctttgaacttttatcaaccgctctttaaatgtttcttttacatgtgagagttcttcaattgcatttgtaaacttttgttccgcaactaccagcaactcttgagcattttcaagttgtgttgcaagagtgcttactaatcgtcttctactagtagaaccaaagattgtagtaggaccaaatccataccctcgaacacatccatgcctctttggacctatcacttgggtatatatcttggttacaaatgtagatgtaatagatgatgtagaagtaaaagaaaatatcctctcaggttgggatagtagctgctgaaattgatcatgaaattataaaaaacaaaaataattgttaaacttataaaataattttgtatgtggctatgattgaaatacaactatataaaatttatttacttcattagcataatttccttagaacaatcatcaacaagcatcacatcatttttttgtatgtgtcaatacaaacaactcaattctattaggctcgatctaatccttccttttttatgtctattcttataagtgaaacaatttagtttttttttttttttatgaactatctatatacaaacagatcttacaataataaattttcaacctattcatattgaatttgagcataacttttttatcttgatgtatgttttatcacttactttgctctgtttgctttgtttttttgttttttttttttctgatatatcttacatcaaataaaaaataacatgtcacttatatagatactagaaacttaataaaagttactatatatgaagtagtaggttaatataactaataaacattatcttatgtcaaggtgtgtatcacaacatacattatcaagaaaacatcattatgtttacctttgcctcaggggtaccccaaaaatgaatgagccacctctactcatcgtctgataagtgtggaagtcgatggcacaatctttcctcatctatatcataagaggcataatatttggccttcattttgttcctatgacttctgaataaatttccttagcaactaataatatagttcttacatgcttcatctacttcatatttctcctatgttttattaaaatatcatgtataaataaaacttatcaattttaaacaataacattaaaatttagatgaataatacttgatatataccaatactaaaacccaaatcttttcatttgcgttgtcactaacatgattccaatcttgaacttggatgggtacattatgttgagatcgaaccaatgtccccatataacttgaaagtttttccctttttctatcataaacaatttgccctttgttattaaatcttacaaatttcttttcctttggttttatactcagtaaatctaagttgcatgttagcccacatgtcttttttttgctagaggaggaacttgttaaaagtaataatgagattataagaaacaaaatttatttatcttatataaagttataaacattaattttttttatttaaaaaattaaatatatgtaaacatatttatcatatataaagcgaaacaaaattctcttaatcataccaatagtagaaggatatgaagaatcagaaggactagaactactaggagtagtagtcataggtggttgcatgtatgagagttgttgtaaattcttcaactcatcttttggagccactatctgtactcttccccttcgatgtgacatttcctacataataaaataaattataaaataaaataaatcatacaaatagtgtggaataaattacaacttatagaccaaataaatatatatcatgtgcttaccaataatattattagctatacatcatgtatatcatcatcattaataaattcattctctttcaacaatgtttccttatggtgatagtagaacatttgtgtagatagtttctcctacaatatcatttctatctcaattgattaaatcattctcgaccaagtcatgtacataatgttggctatgaagtgttataggttgttgatatgatctaggggtctccaaaaagcccgcggcccgcggcccgctttaggcccggcccggcccgtaggcccgcctttaatttttttttaaaaaataatatactatatttttatatatatataactaattcatttaataagcacaaaagaaatgtagctcagttggttagagccttgaaatttaagcttgaggggaggggttcgaatccccccctcttccttcctttatttaaaagccattttggcttatttaaaaaagcccgcggcccagcccgtcggcccggcccgcgggcccgcgggcccgccccccagcccgccagctcgctagcccgcgggctcataggccgggccgcgggcctcctatttacggcccggcccacccgttggagacccttaatatgatcatcagtagatgcttcccaatttatatcataaacccctcaagtttgtatctctacaacggtgtgctattttgtgtcatttgaattttgaacatagaagacttgttttgcttgagatacaagcacaaattgttcatttgtgtatatggttcgttcaaaaatcaaacacatgaatccatattaataatttttatcccctttccaatattgattacatcatatcaatcacacttgaataaaataactttatttccattgagataatatagctcgaccatgtcagttagcacaccctagtaggaaacacgactagagattgtgttcatatctcttgcacttgcaaatcttaatacctctatggttacaataactccaatattttgaatttttttttctcttgttcttttgtgtagaatctaaacccattaagtgctaagaacatgagatgttggattttctattgtatgtctcatgcatttgaaaaaggttaaccctccatttgttatgttatttgcaatgatgtaattcatttcttcacaattatgctttgtttcaacatcatgcaaatatcttaaacaaaatgttgcacattattctactatgcaccttttagcaatagaaccttatggacgattcttattacacacataaggcttcaatgtgcgtaaacacttgttttttcccaccatgatagatatgtgtcataaactatttaaaaccaaatagatataagattaattaaatgataacatacctcttgataggatacatccattgatattgcactggtttagcgacccttgcctcacttgcaatatagacaagtaaatgcaccataacatcaaaaaatgatggaagaaatattttttctaatttgcaaagtgtgattattatgtcattcttgaggtgctttaattgattagtttttaacactttggggcataattgttggaaaaagctacataactcaactataacagcagaaacatttttatgtagtactccacaaattgcaagtgaaaaaagttgttgtatgagaatataacaatcataagacttcaatccaaaaatctttctttcattcacttgtacacactgagagatgttagaaacataactatctaagaccttcacttctttaaaaaatttacagaattcttttttttcatttgaagttagtgaatagcatgcaacaggcagtgtaactctattctctctttgaatccggtgaaattgttctttaatacccataacttgcaagtcaaaacaactattcaaattgtccttcaatttaccctctatactcaataaggtgtcaactatactatcacatatatatttttttcaatatgtattacatccaaattgtgacacaaaataagagttttccaaaatgacaattgaataaaaaaatgttcttctttttccaattatgcttaagttcagcatgctttttttttttttttttacatcttgtttttttatgtctttcccaaagcaatatgttccattccatcaagttgatgtataacattttccccaaacaattctttaggtgttgctttatgttcctcacttccatcaaaataccttttatcatgttgaaatctatgatcagttggtaaaaataaacgatgacctatgtaataccatttctatccattttgtaattgatatgaacaactatccttgttacaaatagggcaagcaaattgccctttagtactccaaactaaaagattttcatatgcaagaaaatcattgatagttcataatatagctatatgcatacaaaaattttgttttgttgaaaaatcatatgtttcaacccaacctcccataaatcatttaactcatttatctatggttacaagtatatgtcaatgtcatttccaggtgcaattagaccaagaataagcagtgacaacaagaaaaatgcttgcttcatacacatctaaggtagtaagttatatggaataagaaccatgggccacatgttgtaggaaattgacatattttaaaaaggattgaacccatcacttaccaaaccaagcctaacattttgaggttctaatgcaaatgaagggtatacctcatcaaagtttttccaagctagagaatccaccaaatgccttattatctcacctctatgcgaccatcaatatgttatttcatgtgagaagttgtcttagatgacatgtataaccttgaagtcttggttttagaggaaaataacgcaagaccttagcaagaattttcttcttctttgataacttattgaattcatctatagaatgaacatcacttgatttccatctagagacaccacaaacaacatactcatttgcatttgcatgcttttttaatacaacatgcaatttgaagggtatgcatcaatcttaatataatgaaaaccaaggtcacgaagtttttttttttctttataatagctacttgataatgtcttaccctcaggaagtgtctcattcaacaattcaagcaacattgtaaaggacttgctgctccatccattaagacatttcatatgaaatagtcttatgataaaaaacaactttgtgaattttttacaccatggatatagttcatgctctgcatccctcaacaaattataaaatttgttcacattcttatttagcctttcaaactcatcatgaacatgtggacttattttagtgtccattgaaacactagtatttgacattccaaatgcatcttttaacatttcttacatctcagcatgtatatcagattcattagtattagtatttgtaggttcataaaacttgcattccccatgcatcaatcttcacacataatttctagctatcctattgtctaacaaatgataatacataatttctcaattctacataagacaattgttgtaacaaatgcaaggacatgggaacatttcctttcctgatgcattgctaaagccaaagtctaaaaacttgaaaactcctttatcatattcattacttattattgacttttgcatccaactcttatctattagcatttttcttgtaattctataaattaaaacctttaatcacataacaatgaatcttcatatgaacttacaatgtatgtgatatgctttctataatctcaaactcctatattaggtagtggttcctatcccatttagaaatatgtaatacttaagaattaattgcccatatgcttagtttcattttgtcaaaatttcgataatatttttcgatagttttccaagtacatgaattggccaaggtgtgaacatactattagttagcttaactttaataatatgtcacattgtccaaatatgcacctagagaacaatgagcattgtagtaaaaatttatcaatatagtaaagcataagcgagatatttcatagatattatatatttctaaactgtccaaacgaacaattcaagcattatttgcagaaaatttcaccaattatatgcaaaacatagaggttgaaaacttaaatatgatcacaataaataatcatattcacatttttataacttatatgttttcaatatatgataaaagagacatttgtcttgcaaggatatttgaatgggttatctacggtttcctaaattgaaaatgagtaaatttgaatgaggaagatgctaacattaaattgaatattataatgaacagaaaagaaaaattaaaaatagaaacacctataagagaaaatctaaataaaaattgaaaaggtaatcaaaataagtgaggaaagaaaaaatggatatataaacttaaactaacattaagttatattattatttggaagtataagagaacttagaattttatgtataaaaactaaggtagtaattgcacataaatattgtgctaaaatatgtctcaatttagctaataaaatcaaattttcataatgattcttaaacaacatatctttctaacaacttcactctcgtagcatatactattttgctttaagacttgatttctctctttcatatgataaatatcgtgctaaaataaactatcaatttaaggatgaaaataaagaaaaagttaaagttagaatggaagaaaggctgagagtattatgataaatagagttaactaactatattgcctctaaattatttatgctttatcctatcaaagctaaaaattttaaaaaaaatatccaacatttttaatagaatttccatctatgcttaattcttaagtttcccataaaaatttactaaatattcatgttttcacgaaatcaaatttgatatgtaagctttggatctctctctctctctctctggaggtggaagatgactaattgaaagtcatacataatccttaacccataagaggagtatttataaggttgccctctaggcttaagtcacttgagctcatcaaggcttagatcacttaatctggcccaaaactgagtcccaattgattaattaaccatataaggtcatctacttaattaattagcccaatccagagaccttgttcattattccttgtgcaactttacgtaattaccaaaacacccttatgcacaagaatgaacttagaggtaatctaaccctcatgaaccgtgtcatcatggtatatgagttcaaagcggggaccactaaaacccataagaatactagatccctcataatccaattttgaagttgattcaacactccactaaagagaatcaattgcattccaataccttatgtaaataacaatgagataaagcttaggtctatgacatactatccactacatgcaaactccccatgaactgatgcttgtaatctaacaagttagtattatcagctatcgagattacctctcaaatccttgaattacagatcttacttattatgtgattagctaacatactctaactctaagaagtatatgtcaaatttcactaaaggaattactgtgaccatatatttcataatcacatgtcttttggatcacctaagaggacacactatctcaatcccatgagatatcatgatgtttttattgagaatacttgttgtcactagcctccatcaacaataacttaatccatgtggatgtatgaccactttaaggtctcacccatagttcaaagcctcttattgattttggcatagattcaatatattctcaaggttgagagtccatgcagtatagtagcttggtgaatcatgacaattgatggtcttgcatcatgattcattataggtcctgtccaatgtgcatcacatacgctgatggactcaccatagaaaacctatcctaacaaccaagacaagtcatccctccaattgggaggtggtgtactaaaatttttattggattgcctaaatccatgaaccgactataaacagctcatctacttataaggaactcatgacttgtattttccgtacaactcctaatgcacccaagtcatgtacaatgtaagaaacatggattgaatgttcaaactaatgtcaatacactaaaaggatatcaaagggatagttaagtctaactttgttacattatatcttacttttcaaggcttaatcacaatagtacgaaagggaaacatgtgttttttaccaaaacaacaagctcctaatacacccaagtcatgtacaatgtaagagacatggattgaatgttcaaactaatgtcaatacactaaaaggatgtcaaagggatagttaagtctaactttgttacattatatcttacttttcaaggcttaatcacaatagtacgaaagggaagcatgtgttttttaccaaaacaacaagctttacacaccaaattaggtagagttttaatgaatttggaaagtttacatagactcataacgatttatacaattttagaagatggatggccaagtctattatgccagagactaactatagaattactatcatgaggtttgaaatctaaaacatgtacaaacacttaactgtttacactaagaccatataaactaggttgataagaagatttttgaagttgaatctatgatgactcaaatgtatgcgaccacctttaagtttaccttccaaaaccatagttttggaaacctgatctttgataagacaaacattaggatagaattcaaaaaatacattattgtctttagcaaatttaaatacactcaacaaattatttttgatttcatgaatatgaaaatgatgatttaaagacaaaaactgagaagtgaaaggggaggaaagaaaaattgtgaaaaacaatatgtttaatagtgagtctcataccattgccaacatgaacttgctcattgccatgatatgttgtgtgttcaaccaaattattagcatttgcagttacatgatttgaggcacctaagtctggataccagttggtatcacaaacgttttctagtgtagccattaatgcttgcatattaggcttgttaccatcctgactcttaagtttgagtaaccaggagtatgaagaccttgaaagttaggatcatatttgtagtcttacttacctatctacaatgtgattcaacttcatacaaacttgacatattgacttttcaacattattgttccaagtattctaggatcttttaccaccattgttaaaaccacctataccaggaaaaccatctttgccaaaattggggctaaattgattattactagtaaaacctttgttgtgagtaaaattgcctctaccaaagctatccagactttgtgcaacattaattgaagtatttacaaagtctaaactcctactgtgtttctcaatcttagctttttatgctaaaaaaaaaaaaaaaaaaactaaacttctcctactaaataatcctaaaattttaagcagatatatattcatacgtaaatattcctttttggtgttctaaagcaaggtttagactgtgagactttagcacttgtttgagaagcaaaatatacctccaatgtcctctaaatctaaaatgcaaagttacaatttacacagcttataagaactcatttagacatgaaaaaagccaagaaaccaagggttgatcttgttgttcccaatcgagaaaatcccgattcactattccatgagcttgatcttttgaacttggacactttaatagcggatcgtgaaccctagtgacaaaatgttgaagattgtaaccacaaatttttgagaaaaattgttttctccatataaaaaaattatgattttcaagcctatttgaggtcaaatgattgaacgaaatatggatgaaatgactagaagaagaagattctaaggtttgttgtgacttatccattggtgaagttgagagctctaatatcatattacaactgagagaatgaagaaaatgagagagagagaagaagaagaaaaatctagaagaaatatggaagaagaagaatttggaataaatttttgtaattttgttgattcccttatttggtattacaagaccaatctacatgtacatgcccctactgttttcttagactaaccactaacaagcttacacttgtacaatactattattattattatcatcaccatcattattattattattattattaaatattcatgtacattgaaattattctacatcttttattgttaaaaataatttatttatgagtggggggtgactttttatttatgggtgggcgaggaaagattcatgtatatttttaattgcgatgtaaaattcaattacttttaggcattaataaacactttcggcattttagaaatgactttcattcgtactcaaagctagatcattcttattctagtgaatgtactattatttatttatttatttatttttaattcacttggcttggctttcacattctttaccatgatgtagattattataagacttggtgggtagttattttttgtatttaaagtttgaatgtgcttatatatacatcatacttattttatttgtaattatactatattacattaaaaatataaaaatgatagaaaggacttcaacaatttttactttttaatcatattggattaaaaaatttattaattttctttaattgttaattttttttattgaagctcgggttcacaaatacttatttatattaaattaataattaatgatttattttatgattttcaaacacttagtttgttttagaaaatagttaagtaaaacagttttttgaaaacgttttataatgttttatagaatagaaatctatttagaaacctaa

SEQ ID NO: 11298 - DNA, 5807 bp, Vitis vinifera
  Intron number 1 from transcript GSVIVT01018060001 (locus G SVIVG01018060001) derived from phytozome v7.0 (chr-ID chr5 ; pos 5939083 to 5944889)
caggtaatgctatgccttcttcaaatttttccatctcttcttctttttccaattttcttagggattttgatgcaagcctatattctaaccaaacaaactcttttaattgctattctgatgtttctccatggcaatctgcttgtttttgcatgcggaattaaaattagggttgtgaatcttgaagcatggttggcctgggtttcttaaaatggtaactagttttagaaacatgggtagaagacgggggattttggtgtaaacatgttacaatatttgttttggcgttttggatctttgattggttttatatggtaagtttcaatttttctgggcctaatgttttgggtttgcttctagctttgatatgtagtctagtttgagctaaattcaggactttggcccaacacctttgatgtgcatattgttacgctcctctgtttcgtagttctgatagtatttaggatcgttgggatcaaattcgagtaacgtgttctggaaattatggttcagtttgcaatttggttggcaaaattttggcctttttgttggctgaatttcctttcttggcaacatggaaaatcgctggcctgacacggagaccttcccattcctgagcagaagtgtctgcatttgcctaatttctcaaataaattagggactagtcactctcttttttctgtgatcaatcctctggaaagagtgatggagatgcaaaagcaacctccctatgagagaatttgactgaactgatattttcagtccttctaattttaacccaggctttggtgagacttagcatcctccaaacaagaaaaattaattccattgtcattataaaaaaaaaacatatttctcatattgtttactgtttatattttctctataatacatatcattatctatggttttgcctcctagataatctatggctgcttacgtgttatgccatttatgagtgattgctcatttttcttgcgtaacatggaagatatacaagccattctataactaatttcagctctgagatattgtgtcacttattgccatgttcttgttgctaatgtcaatgctccatcatattgatgcccacatctctgctataagagttccttgacggtagtaagagacgtaattattgtccaggaagtccatgtatgctgagttccattctctatttcaaagttttcataccttttggatcaacttggttcatttagcaaaatcatattattcagccattggatagtttcttagcatgaaagatgtcttacatagtatgaccatttctccttacactttacatttgatctaggcatgacgtgtacatacatttatttttgggtacttgtcagatacctttgaggctgtttgctcaaatgaggtgaggcataaaccttgaggtgcaacaaggtgtaagcctcaacttaaacaaataaataaataaatgatgaaaaaggaaagaaaaatatttttaaaaaaggaaaaaactaataaaatgacatgaaaattgaataataataaaaattgaacaataagaaaatcatacaatttgcaataaccagaataattgtttgtcattgtcgatattttctaatttagttacttttgttctcttctaaaatccaattttgtctcatggcttcaacaaataatctttagcactagatgccactattatatttaggatcatcctaggaatcataaacacatctaattactttattatccttctcatcagtgttaatgtgtatccattcttcttcttcatcgatcaattatagtagtgttttcatttatctattagtagtaaaataattattatagatgagctcaaccgttacaactaagaaatgtcactagcccttttagatatatgtggctgaaggtggaggatttcaaagatctttataagggtggtggatgggttacaactttagagcttcttatagcttcattgtggctgtgaaactggaggtgttgaaatctgatttggaaatttggaataaaaatgtgtttggtaatgtctcaccatggaaggagacgactttcaatgagataggattttgggattcaaaggagagggagggtggcctttctcacaaggtgaatgaggcgagaaggacagctatagaggaatagagcaagtgggctctttttgaagaaaccttgtggaggtcgaaatctaggaaggtatggtttaaggagggggcaaaaatacttagttcttcaataaaatggctaatgctcatagaagaaggaattgtatggctaggattaaaattaatggggcttggctcttggggagaataagataaatgaaggggtggcaaaggcctaccagattctattgtttcatccaaaaaagtggagacgtagcatcaatggtctagattttaaagttttagaggggtaggacatagaaaagtttgaggatttgttcttagaggtgtttggtgctttgtcagagttaaatttggatgaggttgtaggtcggagaagatgggtgtcttgtaaagcattttttttcacttgggaggctagttagggaaaggtgttgaccctatatagcttcttagagggtggtctcttgtcaagagatgttttctttgtaagttgggaaagaatccatagatcacatctgtcttcatcgtgccaaggttagggtcctttggcagttgctttttgcttaggttggagttctttgagtgcaagcttctgtcgttaaactctcttaaggtggcatggatcgtttgcaggtaaatgatgcaggaaggtttagagagtggctccattgtgcatcttttggattgtatggaaagaaaggaatcaaaaggcatttgacaatgaggagcatttggatcaagctttgaaaagctcttttcttagaaatttgttttagttggtaaaactgtagatacataaagactatatgtctttaaataatttgtagattggttggttcttgttaagagagggggttgctttttgtgttctctttttttggttgcgctctttggtgctcattgtatatgtcttgtgtgaacttagtcattataggcttacagtgggaaatttgtttctttttctcaatagcttttatccctcttttatcaacatgttaattggtagccaactaagctgttactttgtaaaaggtttaaccttacccttggatttaagacaaaacttataaatctatgtcaaaacctcacgaagtacaactcatcaaaactattgaatattgaggcctaagcctcttacaaaatatatacgaatagcccataggggtcttaaaccaatcaaaaccctttgaatatttggactaagcctcaatagcttcaaggctatagctcaagattgtaagcctcaacaagttgaaactttagcctcgattgccctatagtaaggttataaccacaagactaatttgtatagcctcaccttgaggttagccttttaaaacactggccaaaagtattgtcctggttcatgtcaactagctgtttggctgtgtatagacatcccaagccttggttcttttgctatggccatgcaaactgatttgttgtgtactttctcactcattttgtccttgaagctatttggaaaatgaatttgaatttcatggtccaatcttttctgttcctcataaggaacaactcctatgctaaacttaaatttctttcaagtttgtcttcccctttcccttttcctggcactccccatgtcaagtttcctaccttgttttgggcttgaagtttaacattgagtggcatactggtatgaatagaagatccttcctcatcaatcagcactattaggagtacaatgcaaacactacttgaatctattttttgctcgagttactgtttgtagtgacataagtatacaacttatgaattaagaattttcaagggaagcagatttactttgtcatgaatatgttgctaattaggcctttaggaagctgtgtggaaggttggaactacttgaagagtatctaactcagtagtctaagttaacagccaaaaaaaggaagggatacagaacctcactagaattgagtattaagttcaactaattcttttatccgagttatgggataagcttgatctaggccccagcagatagtggatgcaataggccaattcatccacataaaatgtttcaaagacaagtcaattacctagtctatgtgatttagatcctatctctcctttaacatagcatggaccttgttcttgcagatgcttgaactcacaagttcatgcaaaatgagcatagtgatagttaaatcaagcaaattgatcttaccattcaatttaccttgcaaaaagattggtaaaaggcatgcatgatttaaaattttattcttggtaaagttttctttatgtttgctttaagaatttgtttgcacttgagatgtctaaccagaacttttgagtggatgaggccaatacttatttttagtcatgtgcattgttaatcttttcaccacttaatcatcctttttaccaccttaatgaggggacaagtggtgcttatatatatatatatacacacacagagagatagataggttttttttttccatctgattaccacctaccacctaagaaagtgatgaaaggaaggaggtaagagaagcattttcattttagtcatatgttactctgcaaatgagtttagtttgtttgtaatttagccaatccatttcctactaagtttacacagtatgtttacatatagaaagcctctaggcttattagggtcagtggaattgaagctcaggctttgtccctatgggcaacccatctggcaggtactcctgctcaagaacaggtgtgaggttgagtttgtgcttctttgtaatccttgcgaagtgggctagtgggtttccactttgggggggtgggggtgaagtcctgtgaaggtgaggagggaaggttgttgatgggaattgaaagttaaagttatatttggttcccagaaagcactaaggaaaaaaaatgttaagaaaaatcagtttctcatgtttgattgtattatggagaatataaaagaaaagcagatataatttaaaattagtaaaatatttatgtatttttaaattatttaatttttatataaaagtgttaaaataagtgaaatgagtttaaaatagcatcttgaaatttattgattttgaatttatttattatttttcttcacttttttttttctactttttctctctattttcttttccttgtattttccttcaaattttccatgaattgaacatagcctaaattctcgttttagttacaaagttgttctccactatgtagcaccatatgatcagctttactgttattactaaaagttcaacgatttgctctcaatatttcttttcaggttataagtacattaatgttatgaatgccttccctaatggcagctagataagctgatgatttttattatctgcaagttaatatcattaatcttgtttggtagtatttttttcttataaaagaaaaacttgtacatgtatatatatatatatagagagagagagagagaaatatatcgatattttaattggagctttccaggtttcggcacagcttttcctttgctagtggcaaatgcttttaaaccgaacagaactttgcctagtcactattgttcatctctgttttggtaatatagattattgatgactttttgttgaattttctcctctcttaatatggaagctgactgtttgaaacttagtttagttcttatgctggcaaattaactatcttgttttggaaattcag

SEQ ID NO: 11299 - DNA, 1468 bp, Vitis vinifera
  Intron number 3 from transcript GSVIVT01036188001 (locus G SVIVG01036188001) derived from phytozome v7.0 (chr-ID chr1 4; pos 9311576 to 9313043 reverse strand)
aaaaggtcagtttatctctcagaatccttctctttttaattcttatgattttaattttccttttaacattgttatcaatcaaattattggaggaaaataaagaaaatttagattgagctggttcttgtttctctttttttattttcatttttcgcctaaatttaacttaacggttaataatagagtttaatataattaaatgtttgatttatttgtttttattcaggtttgaatggtggacgttgaatgtagtttgtatatattaaaatatttgtaaaattaattatgatatttcttcttactctaatttgaaaaaataatattcaaatatcctaaaatatttgaattattaatattataaaagttttataataattaattatataattattatgaaaatttgtattggaataataaaataatttctaattatacttcattagtaaaaaaatgctagaaaattttctaagttaacaattctatacagtgtacatatctttgcataatggttttataattgaagtatatgtttgattattgaaattaattcactaacttttatatttttaatttgggaaagaatatcaaattctattttttgatttacaaaatttatggaattatttactctaatgaatatttagatgaatgtaaattatgttttgggttcttttttaattaagaaatatatataagaattagtggtagtttatttttattttgttgtgtgataaatgtatagaattttatggatttattttttattaatttattatctagataaaggaattttttatagacaaataaaaagtatttaagtagtatttttttataataagtttttgtaatttataatgaattcactctcatccaaattacacgagattgtggtggtttaattttttttaagacgattagataaaaatcaatcaaaacatttaaggtttaaagtaatttgctttaacaattaaataaaaaatggaaaaaaaaaaaaaaccaaacagacgactcttttggaacatttcaaatgtatgagagttgtgttaaaatgaattccatggaaactgtgctatttcttgactgattttttccttacaaattcttatagttttagacaatgaaattcaacttgtttaagcatgtacattttcctccacccttctttaagatgtagtttattgtgttttcctacacatggattattttcttttttcagttagtcaaaatatataaataacaaaatggtgggatgaactctgcaggttgcatttcctagcttggatttcttatatatcgagggactggataatgtgaaaaaaatatggcccaaccaaattcctcaagattccttctccaaactagaagttgtgagagtattcttatgtggagaattgttgaatatttttccatcttgtatgctgaaaaggttacagagtctggtggtagagaattgtagttcattagaagc

SEQ ID NO: 11300 - DNA, 2648 bp, Vitis vinifera
  Intron number 6 from transcript GSVIVT01017597001 (locus G SVIVG01017597001) derived from phytozome v7.0 (chr-ID chr9 ; pos 11141111 to 11143758)
gagatcatcttactctacaagctgctgctgaccgagtgagttaaaacctccttttttgattagcatgcaaccttagtgcataaacctcatttacagcatgttggatgcacgataaaaccttgagagattcagtagtttattcttttccatgtcactctttcatggtcctgattttcaaaattcttgctcctataacgtttaataatcctctctttcccagtatataaaattttgtcacagtttggtttggactagtatatatttgtcataagttgaatttttttttcccaattagagaatgattgttgaatataggctaggcatatgacattatcaaagtacaagctcatgggataatgaagggaaacattctttggtctgacccaatatttcaactgataataccaaacaacattctctaactttgtctggacttttttaatgcttaggaattgaaatgaatcatgatttatgtcgattttcgatgaagtgtgaaagtcattgagatattttacatacatgagagaaactattgaccttagcgcagaaagagggaaagtacccttggagtaccttatgatgtgctgccttgggcattgtctcagcatttttgctctctctctctgtctggcacacactcacatacactgcagaaacacttgactaattctgtactaagagcaacataagttttcttgtatccaacatactccatggtgagtaatgttgtgttttgcttcctgagcttatctttggggaattggaacaacgttgatgcatagaattctttttggcttcgcagttctatgacgagagggtaggatgttttcaatggcatgatcaggataggatgcttttaccaaatttgagatccactggaatactctgcttacaagcaacacccaatcactgaaaagggtaaagattggattagggttttgattttttcataaatctgggtaaggatttgtattatgaccacagggctttttgaatgaaacttctctctcaaggtttgaacgaaatcagccagagaaaattaggatgaaaatatatctcaaggattcaatgtaggcagccagagagaactagattttcagcaatctaaaaaccctcttacatgttattaaaagttttagaaggattggagaacttgataagtgataattgtcatcaaattaggataggtaaaaaagggctgattttttatagattgattgaaagtggagcttgaagaacaaatttattgttcagttgatctgtatatagaccctgaatagattgaactgaaacagcctgcctatatcaatcttggatcaatccaagagcaattatccattcttgctttttccaaccccagttttctagagaccatctttagatgttgcaaacattatttcaatcttctataaattagataatgttatcgaggtcactcacccatcttaaaaattgtcttaacatttatgaatttttctgatgtgcggacagatgcaacaaagttcttagtatgaacagattggatttgatgggtttggcaaaactttgatttgattacaaacagtttgggacagaatttgccaacatacattttaacgcataaatttctaataggaagtttgaaatttacaatagctcatatttctctgatcttcctgaaaatatcccattcctgaagttccaatttctcttttgtgagtactttgaaatactcaaataaattatcaattaagataacatgttccttctgtagatttgctatataagtgtactcaatatcttctatcctagggttagtagtgaagattgtttttttttttttttttagcaaactttccagtggccctgcagtttttctagacttgaggatgaaattcgctgaatgtttaattggcagtgactatctctgaattttatccttcattctactacggtttaacaagttgaacaattatggttttgccatctttcccaagatgaatattgacataatcaatctcccgtttgctatagggaatcttgagaaatgttagaatcataactgataactacgctacatttattttcaaaaaattgttcacatcacatgaaagagtaaaacagattggctttttatatttttattggtaccaaggaataaaacctcctattggatagatttaggccaaagtgcgtgtattttttcagatatggctttgtaagagccctatagtatgtatctgaagaaatatgctcgtcttattcatgcatatagagacaaataaaaagaaagtgggggtatgtagtttaaatttccattatttatttgaagggtgctgtcaagaggatgtgataaatttaatattatgatggaggacaattttgtcattttttttccataatgataaaaaaggtggttcacttgggaaaatgttgctaaaacagcctatccttttatgtcatcttttacttgagaattgttttatatgcaacttctatcttattattgtgatttattttcataattttcatgctcttgatgttttgttgtttttcttttctccctttctgttctttttttggcaagatctagaagtctcagtttctgataatttgatgttgcatttcttgtagtttggggccaaaatctgtttaatcacatcttttcg

SEQ ID NO: 11301 - DNA, 10180 bp, Vitis vinifera
  Intron number 3 from transcript GSVIVT01016427001 (locus G SVIVG01016427001) derived from phytozome v7.0 (chr-ID chr1 3; pos 4025421 to 4035600)
tggttcttcacaccaatccctcgagagcttgattagttacctctcatctttcaagggactccttcataattaagttctagatggtcttctgttattgttaggaattctcctgagcgaggtttccaaataggctggttctgtttctcacaaacgatccgttgtcttgattacttctttaagattgtgcttaaatattatttcatactattaccacattgatgatcactatactcctacgtaaaaaaaaaatttagaggtgatttctagcaattctccgattaattaccctcagtttctagtaccactattttataataactggatacaaatatgtcagattgatgactgcttcttaagttatccttaaatgtataagagctcgtttgatagtgattttaggaaaaacttttaatatttgaaatttttattattcaagtattaaaaatattaaaaacgttttataaaattactcccgaacgcgctctaagtcaaaattgttgttggggttgttggttccattttaacttttttaaattatattgtcaagtcaaggaagcgcactaaaatacttggaaaaccatgtttgggctccttcatttattggattgtgtatgttcattcacatgggttgttggttccattttaacttttttaaattatattgtcaagtcaaggaagcgcactaaaatacttggaaaaccatgtttgggctctttcatttattggattgtgtctgttcattcacatgggttgttggttccattttaacttttttaaattatattgtcaagtcaaggaagcgcactaaaatacttggaaaaccatgtttgggctccttcatttattggattgtgtctgttcattcacatgggcttagatccaagttgtacaaaaattggtttagttggatttgcagttttccacctaactttcaagatattgagtgagagataacaccaaaactgagcagacaatgctcagctaagcaccatggagtgattatttcattgaactaatatgtacataccactttcctatgaatcttgtctctcacaatttaactttagatgaaccctaggcagctgaaaggaacttctaattcgattactggtgaagcaataaagttggaagaaacatacaaataattataatccataaatactcatatttaacaaaataaagactcctaataataaaacatggaaaccttctcgtactctaatatttgaatatagaaactaaattaatcattcaaataaaaatgttctctttgatttttaaaaactaaatctagttctaattttagaaacttcctaaatcaagtttaactttctatcatgccctgtaaacttgatttgtaactccaagcaccaagcaccattcttaaccatttataatcttcaaatttgaaacattttgtaaaaatatccacaatttgattatgagaatttgcaaattttaattacactttctttttcatgatggactccttgacaaaatgaaattttgtatcaatgtgattgctttgatcatgaaaaatcaatgacttcttaccctcttgttacttgtaactctttggtatcaaatttgctttgcatctccctatttttccttttacgttcttctttgtttccaatacttattttaattgtttttttttccttttagaagggattttagtttccatgtgtcattctttctcattgcttttatttccataacattttgtcatgtcttatcttaaattactgctttataatctattggttcataatttgtagaaagataaaagagaattaaattattttgaatattatatgttaccttattaatattttcttactatttaacatactttgagcgatgtcaagagtagtttcatttttttttttctctctattatactatttattgtggaggatatgaaatcgttaaagtcgacaaattttataagctttacaatatttttcaaattggaccttatatgtctacatggatgaatttaatttagaggcttttttactcttgtaattatttcctttggaaaaattttttgagcatgtttttcaagtaagggtcctttacataattgatccataaaaagtaattctttcaccagtttcttctctgttagcaacttcaatattctaaaactaagatgtctaaatcttaagtgtcaaatccaagaggaataatggacataagattttaaacattttacaacaacaatttcaatgtacaacaaaaaacattcaatttcttgttatgagcatattaacaattaaattggcatattattgacctcgtactgagagactttgaatttcatatgaatatcataacacttttctacgagttgacccaaacttaatatattatttttcatgttgaacacataatagatgttcaaaataaattaatgtctttcatttttcaaacaaattcagattttacctttgccttttcatcaaaactcatccaaatatgacataaccatttttggattcctcaagtgcttcaaaaagatatttttaatatctacatatgattgtttatttcaatgtcaagataccaagtgtttttttccttacttttctcacttatataccaacaataaagtaggttgttcttgattttgcttttcataatatatatatagactaacattaaatttgagatttatttatcatacatgattataacttatatattgtgtcatcttccacatcctcatgaataatatgagtcttaacttgttccttcattgtttgatgaattcaaatcacttcttcttctataatcttgaccataaccatgtatacgactatgcccatgattattttgacttctttcattatcaaaattttcttcattctcctttaatataagtttaatttgtttatagaatttgctcaagtttttgttagttctcatttttaatcttttcatgaacttgcaatgacaacataagttactcaatggccatgaaatctaaatctttagattcttcaatggccacaacaacataatcgaattttgaatatgtatatgaatatggaagtatttttttcaataacatgaatgtcatttaaactttcattgtgtcttttaaatagaagattgtttcattcttttacattcaaactttgaaatttcatttttatatgctttgtaatatctcacaagcttcttttaaggtggttgtatttgaaatcttctcaaaagtacattcatccattatttaatagatggtgggaaaaggtttcttgtctttccttatgtcttttaaaaaagccttttgatttaggaataaagttgttttgactcttataacctttttgttacatgtgtaaaattcccacacaagttttcgtgtctatgtagcgctttgaagctctcgaagctaacaacttttccctacaagatgacaacaacatacaagatccacatgaggtttacaaggcaccaaccccaacttgtattttattaacttactaaataagaatacaagactttagccagactcccacaataacttcagtgagttgaggcttctctcatgatcttcctttttagatctctgttatgaggctctttgtagtctttatttaaagagtggctttacccactctttgttagactaagattacacatcttagttctaatgggactcttactgataggttgtggcactaaccactcctacaagggctcaaagtcccacttttacttagactacaattataataggcattaagactcccactcatgcttaatttgtaatcccactttgagtccaactctttgtgctactaccacgtacatctatatatatggttcatgtatacgccagaacctcttttggtatacatatctagattgcattcgtatcgaggcaacatgttcttgcatccgtcttgttgttgctacaactccataccttgtctaagttctattcttagtgcaacaacatgtcatgacattgtgctcatgactctccatgcacaaggcattgcgcccttatgtattgaatctgagttggcatcgctacttcgtatcgatatgcctatctatgtctttcttagtgttgcacttgccatgacattgcacccatggctcaccaagtcgtcttcctttacaagacgttgtgcccttgtacaactttgttgttgtcataggttactcatgaggctaaggtgctgccttatgagaccttagtgttgcatggtccatatcaaggggctaacaaaccaccttcacctaatgcagttgacgttctcatcgacatggactatagttaggcctatactttctttttaaactgccataatgtcatatctcattcccaacttgctgatgatttaggattgactttccactgaactagataatcaacatttcaatttttcttgctcattcccataattcgatgattcaatatttcctctacctcatgatgaaactattttttgatcataggtggagctcgtctcacctatatttttcttgggtctaggtcctcatgataaggttttaaaaagcttacatggattatgaggtgtatctttaacctattaggcaactttaatttgtaagctacatatcctaccttttgcatcacctcaaaaagtttgtcatatttgggaactaacccctttgcacagtcttgctactaacatttttccatatctaaggggttaatatgaaattccaagggtctttcgcctttgcgtttgcatactttttcatccttcttgtgactttctataagctctcacaagcttcatcgagcatctcctacctagaccttgcaaatttgtattttgtaggacaactaccacaagactttggcttagccacatccaagtgcataattggctattgctctgtggccaactcgaaatgactcaatcatgttgtcgaactcttctacaagttataggataactgagttatcttcattatatcaacccggttcttttatgttgtagaaagatagcgtttggggtactcttcaagtaaaatgttgatatgctttgtttggcgtctgtttgcagataatttgtagttgaaaacttcaactctaaaccgaggagtttgaatattttggtctaaaactagctagtgaatcagacatcacgatcacttactatgtctttaagcaacctgaagtacttgaccacatggttgaaaaatagcctagttgtctcttttgcgagacatgcatgtggtgtaggcatgaagacaacatatttagagaatctatcaatttattataataaaaatagatttgaattcccccacatttggaaagccaccaatgaagtctattgatatgctttcctaaggtctctctaggatagggaaatgttgcaacattaaccccactactttcttcttctctgtcttgtctaagcgacatgctaaataagaacgggcatatgcttggacatcctctctcatttccgacaagtaataggacttggacaatagtgttggtgtcctttctttaataaggtgacttgtccacttggcctcatgggtcttttttaacaacttcttacctaagcacttcctagtacatatagtttgcttcatttaaccactaagaggtcatcttctagttatattttcttgttgtcccatctctgacttgttatttcattttctcataagtagaatcaagcttagtagcctacttgatgctttcattaaaatctaagatcacatgtgataaaacagttacatactttgtcaccctcttctggcttaaggcatctacaactacattatgtcttcttggttgatgcaaccaatcaaacttgaagttggtcaggaattcttgccatctagcttgcttaaggctcaactttttctaagtcttgaagaaggtattagtcgcattgtttgtgactatagtaaatatactcccaaatagataatgtttccattgctgcaagcaatggataattactgtcatctctttcgcgtgagtgaagtatctttgctttgcctcattgagcttctgactctcaaaggctattgggtgtctttcttacattaggacttttcctaaggccttggctgatacatctatccggaccttaaaaaacaaatccaaattcagtagatgtagcaccgactcagttgaaataaccactttcaacttttcaaaatctttatggcataccaagctccaattctagaggatatcattctttaaaaggttagttaggggagctactatcttggaataaccttttatgttcaatagtagtttggcagttccaagaaggatcttaattttgtcaccttacttagagcatgccaatctctgatgacttggacctttgctttatccatcttaatcaaaccttcccttatcttgtaccttagaaaggtaatatgtttttgtgcaaactcatatttctcctttttcacataaagtttgtgttctcttaatctttagaatagtagtttcaggtgatgcacttggttttcttattctctctaagtgcaaattcccacataagttttcgcgtctatgtgatgcttagaagctctctaagctagtttacacctttccccatgagatggtaacaacacacaaggcacacatgaggtttataggtcaccaatcttaacttgtattttattagcttactaaataagaatacaagactttagcagcttccctcatgatctccatctctagatctttattaggagggtctttgtcctcattttttataaagtgatgccacacactccttgttaaactaggattacacatcctagttctattgagactcttattgataggttgtgacatcaaccaatcctattatgactcaaagtcctagtcctacttagactacaattacaataggcattaggactcctactcatgcttgacttgcaatcccacttcaagtccaactcgtcgtattgctgccacatgcatctatatatatggctcatgtgtgtgtcaaaccctcttttggcctgcacattcaaattgcattcatgtcacgacaacatgcttttgcatccatattgttgttgtggcaactctatgccttacccaagcttttttcttgatgcagcaacatgtcatgacattgtatccatgattcctcgcgcaacaaggcattgtgcctttgtgtattgcatttaagtcaacatgctccacattgatgcctcattcgagtctctcttggtgctccacttggcatgatatttcacctatggctcaccaaattgtctcattgcactaggcattgtgcccttatatatgccaccttgttgatgtcataggttactcatgaggctaaggtgctatcccatgagacattagtgccacatggtctatgtcaaggggttaacactttccaaacaagacatttatccttatactcaaattatcgtaattatttttattgaatttgaggagttcaaatgaatacctcctatttttcattttttttttgtaataatagagaagaatttaaaatttattgttttcattttcttattcatagattatataattttttatttttaaatactcatatctaataaaatataaactcataataataaaaatataggaattcccaacaataaaatataaaaactttttacaagtcaattacttatatataaaaactaaatccaattgtttaaaataaaatattttcttttaacttttagaagttaaatctaattctagttttcaaaaattctcaatcaagtttactttccaataattacttaaattaaatgccacataaaaaccagataaaagactttcacaaatctaaacaggaaaaaaaaaatataaaaaaacaaacttgcatccaaaccaactatggtcctcttaattatcatatcctgctctctggggtccttttaattataatatatgctctcacaacgtgttgaaaaaagaaaaaaaagaaaaagaaagggagagacatgaaggaaatattcccagaaaaatgtcaaaagagaggtagaaaactatcccaagcacccaagcaagaaaaatacgtacgggctattttattttctcaccatgttgaaaagttttaaaaatagaagggaaagttaaggttttgggctggtgatgtgaaaaatatatgattttaaaaacacaagtatataaaatatgagattcaatatgagattcaattattaataggtaaaataatatccaaaatgtgcactatctcctatttacttttcttcttcctgtattacccctaaatttctctgtgtcatgagcaaattttccccatgtcagcagaacaatttcaaactttgaactcattctcaaagttgaaacataaagaaacccaaactgagaaccaaaagtagggaatctttcttctggtcattttgccctaacccccatatcaggaaattcccaatttctaaatttctcgtcttcttcccacaagccccttgttgaatttgcttgctaccttttcatgtcgcgacatttcggccgaaaatatcgaaagcaagacaaccctttcctttggaacgtgattatcaaatctttctcatatttcagatacgtgggttttcaaaaccatatatgttccagcctataaatacaacttttcctttttaatacgcttgcttcacttgctccaattttaaagtgcccaaaaaaaatttcacttgcgtaatttcctcatgaaaatgtcttccatcggaacttcaaagggaatcctggaaatcggaaagttcgctctctatgtctcaatcccgattggtctgatgtatactttggcaaacaattccgagaatatgaagaagctcatccagaaggttattctctttcctcagcggtgctatgaaattggtgtgttctggttattgaatccatgattacatgacacttggggattttttgaagtacaagagaagaaaatggaccattctgaagcattttctttttctttcatccgaatggtccttagtttgtggagatattctcgatagggatgaactagtttttctttagaagattgaatcgagatttattacgtttttgtggtttggaaaatccttattaataatttatttatttttgttttttgttttttatttttttattttgtttagttagtagtataaaaacatagaaaacataactttgaaaacataaacaacaatgccaaatgcctttttcagtattttttttttaaatagaaaataattattgaaagcacttcctaaatatcctctaactataagttattttcaataattttttttataaaaaatatagaaaactttaaaaaatataaaaaacaaataaaattgagtatgatatcattctttcactctcttcacgatccattactaaagaaaaaaaaaaaattcttcatatatgatattgctttgaattacctatttttaaattttttttctaactttaaaatttttcattaagcaaataattttaaaatcaaactatacttgatacgtaaaatttattaatttttaaaaataatttgaaactcaaaaatcgatttaattagtactaaaaaatcatgaaacttaataacattagaaagtcatgaactcaatttgaatgacttaattggctagtttcttctttacatgtaatcatatttttacaattttttcacaaagaaaataaattctaaataaaacaacaccaaatatattggattcattacaagtttagtaatttttaaaaataacttgaaactcaatgatccaattaaaactataaatttgtgaataaaaatcgatttagaatgacttgattgtttctcttctccatagaatcattttttaaatatttttttattagacaaataaactctaaattaaataagacttaatgcattacatgtgttaattaacaagtttagtaatttttaaaaataatttgaaacttaaatagtgatctaataaataccaaaatttatgaacaaatattgatctacaatgactctgttatttatttattttacatataattatatttttataaattttctcaatagataaatgaacttcaaatctagtgatattttgtattgaattattaaccgtgtttaatgatttttaaaaataatttagaactcaaaaactatatagattactaaaaaaaatcaaaattgataaattagaagtc

SEQ ID NO: 11302 - DNA, 3485 bp, Vitis vinifera
  Intron number 3 from transcript GSVIVT01037656001 (locus G SVIVG01037656001) derived from phytozome v7.0 (chr-ID chr1 9; pos 6595520 to 6599004)
caaagttctccgagctgtagatataaggtatgaatttttgaattttgtcatcctttagctacgtctaaccaatgagccaactgatggtttagcagagattatcaggatcaaagatattaagggaaagaatctgcctttgcacatggtgccttctaggatatgcagcacaaaccttgttacctttagagaatacctatcattttaccaagtaaatatagaaatatatatagaaaggttcatatgcagcacagtgggattgcaagtgtaacatgttgcctttctagatgtgccacttttatgtttattttttgtgatagcaaaaaggaatatataatagcacctaagtgaaggacacatgaaagtacacatgatatatatatgatagggcaccattaggcaagcaaaagaaaaaaggaaaaaacagctcactcttcttacttggagcttagccaatcaaaaaagtttatcatggttaacgaatgatcaattatatacattgtagcccattccaaaaaattgttcatgaaagcaaattcgattccttggttagactattcaacacatgtgaaagacctcctatgtctttcttcctatagagtccacaacaggcataaaagagcgacccttaagtctttttccatttctttccacaaaagatccatgataactcagtagggtttctttcactatacaatgcaacaaccaagctgctctaaatagagaaaaaaccagttggcattagatacttgctttaggacaataaaagagcatgtgatcaactaattcttcttcatttttacgcataaaacatctattgagcattattcattcccttaatttgagttgatcaatcatcaaaatcctacccatgctgtttcctaagcaaaaaaaactcactttctaggagcttagggattccaaattattattgtaggaaaagacccccttctaacttgggttcaagagtacaaagatttgatggagaacttgccatctttggattcttttttacccattctatcattaccaccccttattaagtttattggcaatctccataaaaagttcatcacaccttcaagttcctaatcattaagctgccttgagaagttggaactccactgatttctctcccttgcatgctctaacacttctactataagaatttttagcaatgtttataaagaatagtgttaggaaagactctttcaaaggtaggtcttcacaccatttatctttccaaactttaatcctttttccattgccaactataagtgagatatccttttaaagctctcccatccatttccaatattcttccatagccccactccatagccatctctcactctcctagagcaccattccctctcttctccaaactttttctactataacctgtttcaaaaggattctttaactgttatgaatctctaactccacttgcaaaggagagctttgttcaaaattgatagattcctgatgttgagaccctatttctttttattagagcaaacaatggctcaaataacctaatgaggttttttctcaagcacctcatgatgccaaaagaaattattttggatctattcaagtaagttcacatttcttggaatgacaatagaaacatgaaataaatttgaggactaaatagtgtatttttaatcatagtaagtttccctccttgtgagaggtattgtctcttccatatagctggccttttctgaaatctctaccatactacgtcacataccatcgttgttttgtgggagctcccaaaggttggcttaagtatgtagtgggtagatctttgtagacagttttttgtttcagatgttagggggcgagtgtttccctttttgttctatacatcttgagtcactattttagcacctcttcgtaatactatacttttccttataaaaaaagaagtatgcagtgggtagatttcccaccctataacacaacacaaaaagctaatttccctacatgagcaattgccccaaccaaaattagtttgcttttctccaagttgctatttaaactacatattacctcaaatcacatgaaaatccaacttagacactctacttactcttgattagcatcatagaaaattagagtatcatcaacaaacaaaagatgggttaatttgggcccttccctgtactacccaccttgaggcccaaaaggaagcctccttctctagccttaagtgcctccgtagctaatatgaataaggggataagggaactccctacctcaatcccctagggctctaaaaaaaaaaaaaaaacaaagagtgtctcattaacaaaaacaaagaattttgcctaggaaatgtacaatttgaaccatatgacccatttttttgaaaatccatattttccaagaccgaaatcaagaagttcaaattaatataattatacaccttcttgatgtccaactctcaaataaccccaccattggcattcttttaccttgaatctttgtcttcatttgcaatgagcattgcattcacaatttgtctaccctccatgaaagcatgttcataagttgatgtcacttttccaccacattttttagcctattagccaggacttttgcctagagcttataaattgagtaagttaatgcatctaaaatctttcaagtcctctgttgcctttcttcagaatcaagactaggaaagtgatgtttaagcttctcttaaaagagtcattatcatataaatccctagaaatactcatcgcctcgtgctttacaaagtctcaacataattgccataatgccatagtgaaaccatcaaaccatggagatttgtcctcacataaattggacaaggtgccataagcttcctcctcataaaaccaaatctctaggctcctagaatcctcactccccattgcttcaaagttcatctcactaatgggtttccaatcccttgatttaggcaagagagtataaaaagcctagacgcctcctcttttatatccacatccgcatttagccattccccatttactttgacttcaaccgataagtttcttcttccacacacattagccgttgtatgggaggatttggtgtttttatccctgtcccttagccatatttctcttgatttctgcctccacaatgtttctttcattacagcctacttgctaaactttccacttaaattaaaaaagcaatagctccatggttcactgtgttctgaatagtagaagtatttgtggacaattttaaaagcaacctgcatgtggaaaaattaaatcattttggttagtgaatgtagatttgtgtatttgagggtgctagattatgcctggcaaattgctttgttattgaactgttatttgagtgttgattgcttcagctactgtgtaattgtggtacttttaagctactggctaatagcatacctgtgctctcaaacccatttcaaaatcttcaattatattgctgcaaatgctatgcagccg

SEQ ID NO: 11303 - DNA, 8766 bp, Vitis vinifera
  Intron number 4 from transcript GSVIVT01020175001 (locus G SVIVG01020175001) derived from phytozome v7.0 (chr-ID chr1 ; pos 9412518 to 9421283 reverse strand)
gttagtggaggctacctacattgtcacaatcccaggtgctgcatttttttttttctggttaccattattgttaatattaatttttttgttcccttgctagtgaattgctggttcatgttcctttcagagcatggttaactaatttatgccaatatgctttgttactaattttagaaaatctggttcaaagtttgtgtatcgataataagaaataaaaaaaaggattcctatgtaaatcctaaatgatatgagtagactggaattaatagcttatcaaaagaaagtatagactaagtcagtggtattatgaattattatatgtaggacttctttctccatcaatccatctttgctcacttaaaaatagggttaaagtacatttattttatgccattttgtcatgggttctactattttcttcatcttttattgtttcatatataccaatcttaataacatgccactctattacttatattatggccaaaagtataataggacatgtacacaaactcaataacatatttaactatgtgcattccatataatattttttaaaaactcacatgtctagcatattttaatgcctgagttttgagaataatattacacagagaaccacttgccatagtgatctggatattccactcatgaatattgtaattcttgtttcctccaattaggtgatattgcattatacctcttctccgtcagaaattttttaaagatcctacacttggctctgtcaaagttttaaatgaacaaatttcgaggcatttggaagtcagtgaagcctaattttgaagattatcatgttgccataagctaaaccttctgtgaaattggtcctgcttaaataagattgatatgaaaagttttcatagcaggaaatagttataaatttatgttgtaggccatggactaggatcttgacatgacatgtcattaaaaacctgatgtcaacatagtaaggatatgctccacacacacacacacaccaacacacaatcaaacatatttgcatataaaagggcccaggattttgataattggctatacatttttattgtactcacatttttttgataggaaaacaaaaagatatattaaaaagcaccaatcaaaaagggggatgcatcctatgtacatagggtgtatacaagaggagccaccaagacaaaaaagaagtggcatcgaaaacaagaataactaaaaaccactctccacagttcaaatcatcaataaaatctaacaaagaacattctcttcacaacagggttgtagaccattccatgagacctaaaaagggtttctttaagcttaaggttattgagttcttccccaatgaagatccttctatttctttaccaaccacacacactaaaacaaagacagaggagccatactccacttcctcctttgccttttgtccatgcatttcatcttcaacctaaaaggaacttttttatagaatctggaaatacccactgtagtctgaagattgctaacaacatgtcccacatatttctggttctgtcacaatgggtaataatgtggtttgttgattctttaccatacaaagactgtttctattggtcagcgggtcatcttctcctcataacaacatcaatgacaaggatttccactatgcaacctcccaagcaaaaaaggacaaattcttgaaggggcataagtgccccacatttctttggcaaggaatagggcttgattctcatcatgtgaagtgttatagaaagatttcacctggaaagtcaccttctccccccaaagtaagctatcctcccctgattctggcactctcaccttgtggattagctccataaattgcatcacagctcccctcccagtcttcaaatggttttccaaacaggagggactaagagccttctctattgccacccaaaagtcagttactatcgcattcctattagaggccatcctgaatagctgaggaaatgcgtatttcaaagggaactcacctacccatttattcaaccagaatttggttctgaggccattcctaaccagtatagaagtcctaaggctgaattccttccatcctctcctaattgctttctataccagtccaaaaacttctctcacctctagagtgcaatcccccctccaccattgcataatttgccttggattttcttccttcatgggttattacactcaagggtatatctccacaaccttttccctaacaaggctttattgagaacattcaacttactaatcaccaatcttccattcctcttatctttgcacattgttctctaattgatgaggtgcatttttttcctttttgggcatcacaaaaaatggacattaatatatgggaaggcttgagagggtactctatgagggtcaatcttcctccctttgatgaggtattgcttcttccaagggaccaacctccttttaaacctctcctcaactgaatcccatactacatgagttatgagatgctcccaatggcagcttaatatggcttgaaaggtggctcccaaccttgcacctgaatgaagaagccaacatgtccaaatcttccacttcaacaattagaattatctcactcttttgcaagttaactttcaaacgtgacataagctcaaaaacatgtaggacccatttccaatattttagctgcttaacatttgccttagttgcaaacaatagatgttagatttccaaccctactccccttcaacctcaaagccacttaaaaaaccttcttgaaataccttagagattaggcaattcaaagcctccataactagaacaaattagtaaggggataggggatccccttgctttaaacctctattgctttggaagaattttgttggagacttgttaacaagaattgatattcttagtgaagaaatgcggaaacaaatccacctcaaccattttggaccaaaccctttttttcctatgactaaaaggaggaagttccaatttatgtgattgcattttggaccagaccctttttttcctatgactaaaaggaggaagttccaatttatgtgattgtaggctttttctaagtctagattacctaccaatctcatcctaaagcttctttttttcgagtttgtggtctcattagtaatcaaggctgcatcaagaatttgtttaccctccaaaaatgcattttgatgctttgaccaccttggtaatcaccttttttagtttattcacaaaggccttggctaggattttatagaggctcccaacaaggctaataaacctgaaatccttcatatcttcagccccttccttttttaggaataagaaccaaaaaggtggtgttgaaactcctcttgaaggtttcctttaagtagaattccttgaagaccttgctataggttgacaaaatttccaaagcgctaaggagaagccatctagacctagtgctttatctctgtctgactttgaaagggagaccatcacatcttccttcctgaaaaggtttttaaaacattccttatctgagctttcaatgcacttgaatagatctccctttagcttatcaaaaataaataaataaataaatctccctatagcttagaattcttgagatgggcattctccaacttcgattgaaaataggtcaagattcctctctttagttctaccttctctaaaagccaaatcccattcactttaaacttgcttataagattggctttcttgtgttgagggagaaagcattcagatccaatgaagggtcctcaccttccatgttagtaacaaggctaataacactaggcctaactaagataaaaagatggtaaatggtttgagacctagcctcactcatgtcaacattcttagacctagcctgatagctcacttcatttagccttcctatagtggaccaaaattattggtttggcctacttctaagcaaaccacttataccatatgctccttagatttctttgacttcttgggttcctttagtgctctttcacaataagacccatagcccttagaaatgtccaacctctcatttatatatggcccattatctatgtgttccagagattttcctctacaagttcaataggctaactctactaggccatttgctactttgggctaacacttgtagctcctaccttccacttacccactgccttaaccaacttttttaaagaccttatgagaggctatcgagtctcatccaccataaaaaacttagagaaagttgcaggggccgatccaatcttatcatacatcttctctaagttagctatatgtgctccttttctgccattcctctaccccactcacatcaaggcacatgaatcaacctcttcttcaatctcaagacatcctttctctttcttgaatggctttgaaggggatctcattgtttccattgcctctgatagagaaaaccatactatttttttccaccataatggaatagaaaaggacacgaaacctgcaaccacctttagcttgcttggcactttcctgccacaatcttttactaggattcttgcccatgacaaattctgacttatcttttgtatcttcatccactgccataaaaccaccacaggcatcccttgcttccttgaaaaattgtcttcaccatagttgtagtggcaactctcgaactctctcccaacacttaacgaaattgagttggattttgttttggtttgaagccgctttagggttaagaatcaatttggctaaaagcgagatcattctaataggggaggtggaagaggtggatgagttggctgtggagttagggtgtagggtggggtagctgcctgtagtgtacttggggctgcctctgggggtgtcaaataaggctgtctctgggtgggatggggtagaagagaaagtgagaaggaggcttgccctttggaaaagtcaatacatctcaaagggcgggagaatcactctaattaagagcacaatggcaagcatgccagtgtatcagatgtccctctttcgaatgcccatttttgtggcaaggagactagaaaaactacaaagagattttttttgggggggggggggggaacttggagaggaaagctcatcttgtcaaatgggaggtggtgtgtggggataaggagaaaggggggcttggaataaggaagctaacccttgtgaataaagctttacttggcaaatggatttggagatttgcttgtgataaggaggttttatggaagcaagtgctggtggcaaagtatggtcaagaggacaaaaaaactacaaagagattttttttggggggtggggggaacttggagaggaaagctcatcttgtcaaatgggaggtggtgtgtggggataaggagaaaggggggcttggaataaggaagctaacccttgtgaataaagctttacttggcaaatggatttggtgatttgcttgtgataaggaggttctatggaagcaagagctggtggcaaagtatggtcaagaggactacggatggaggactaaaaaggctgtgggtgcatttggggtgggggtttggaaggagattttaaaggaaactggttggtgttgggataacttggcgttcaaagtggggaaaggcaataaaattaggttttggactgacacttggtgtggggatatagtgctgtcccaaaggttctcgcatctctacatcttggcaactcatagaaacgcgacggttgaagaaatgtgggaccagaattttggagaaggaggctggaatttgagatttattagggattttaatgattgatggaggactaaaaaggttgtgggtgcgtttggggtgggggtttggaaggagattttaaaggaaactggctggtgttgggataacttggcgttcaaagtggggaaaggtaataaaattaggttctggactgacacttggtgtagggatatagtgctgtcccaaaggttctcgcatctctacatcttggcaactcatagaaacgcaacagttgaagaaatgtgagaccagaattttggagaaggaggttggaatttgagaattattagggattttaatgattgggaggtggagatggtaggcaatttgctccaggtgttgaggggtttcaggattacttgggaggaagattcggttttttggaagggagggggaagtgggcagcttagagtgaaggaagcgtatagccggttggataggtctttggaggttgtcttcccgaaaaacaaaatttgggtggagagagttccaactaaaattatgttttttgcatgggaagccacttgggggagatattgactcttgataggctccagaagagaggatgacagcttcccaaccgctgttttttgtgtgcttgtgaagaggaaaatgtgaaccacattcttatacattgtacagtggccagagtgctgtgggatttagttttgggattagttggggttcagtgggcttttcctaaaactgtaaaggaggttttatatagttggggggggtgcttttgtggggaaaaaaaggaaaaagttttggaactccattccgttatttattttttggacagtttggaaggaaaggaatagattagcttttagggggggagttagcaattcagaggcttaaatattcttttgtatgtaacatttggggttgggctaaattgtatatgggtgaggagccgtattcccttataggattcctggagtggttagcctccaattaaggggtgatgagtttttggtcttttttgcttgtaaggccttaactgccttgtatacgtcttgtatactatggggcttttttgccttctttgaatgaattctgagcttacttatcaaaaaaaaaaaaaaaaactctagaactctctcccaatattttatctctttggaaatccacttgggagcattccactgtgggaacccaccaatctaaagcaaacagttttcctttgagcacatgagcaccagtttccaacaccctacatactgcccaatggaaggccaactcaaacaaaaatggcgagtcattaggatgcatttggtttggaaaatgttttctagttttcattttctgaaaattgtttttattttattttatttttttttatttgcttcaaaatgcatttgattatataaagtgaaaactgtttttagaaaatgaaatttgcaaaatcttgtttggttttaaattttcattaatgtaaaaaatggtgaaaagaaatataattaaaattttgtataatacacatgtgatgttacaagatatattattatggaggatgatattactacatttttatgatctatatactataatttatatttatgttgtcatatcttattatatattatatgcattataattcctttgaacacatgagcaccattttccaactccctacacattgcccaatgagaggccaacttaggaaaaaataaaaaaaagttgagtcatttaggttgtctggtttggaaaatggtgtctagattttgttgtctgaagactctttttatttcgtcaaaatgcatttcattaagtaaagtcaaaaatgtttttagaaaatgtggttttgagtaaaaaatggtgaaaagaaatataactaaaattttatataatgcacatgttaggttatgagatatatttttataaaggataatattactaccttttatgatctatatacagtgatattatatttatcttgatattatattcatattgttatataatatatattaccaagtatatgtgtttgttcactattttttttcctttatttttatttttaaatagtttaacaatatattctaatgtggttataattaaccgtctaaattattctaatataaaaatatatcaacttgtaatattccatagtttaataaataaacaaattatttatactgtattttaagagaatatttgttttcaaatatatatgttataatgttttatttatattaatatttatttcatatttgtaatattcaccttcttttatatcattggtcctacaagtttttttttttttcattttttgggctcaattttccagaaaatgaaaatggaaaaaaactgtccaaacatgtggacttggtttctgttctttctattttttttaaacatgcaaacaaagcagtctaagtctaagcaaacaaggccttgattttgccactttcactgcttgagtgtttgaaatccaaatcaagaccttagggcaggttgtgtatgcaggcagcaggggaagtattttgataagagcgtttgtgcagcttagtgacaaagttagcattcactccaaaaaactgtgtggccacttaatggagaaatgctgaaggttacggccatagctagtctactacctgaaaccttaatgttgtttcgcaagtgttgatctgtttgacacatggtagtggcccttgctattgttattattaaaaaaaatgaaagagaactattgtttccagtatgggtaacttaactttcttcgtcagtgatgcatgagattgttacctttaaataaaacctcactaatcattgtttctaatgtgggtaatctgacttgctaatgcatgaggctgttaccttaatatatatatatatatatatatatatatatatatatagttgtttaataccattaatatattaggatccactgcatatttgctcctttgatggtataatggatttgattatgcattcatgttagtaatgtgctatttctttttctccagattggagcagaagtggattgaagtcacagttgata

SEQ ID NO: 11304 - DNA, 11296 bp, Vitis vinifera
  Intron number 5 from transcript GSVIVT01035030001 (locus G SVIVG01035030001) derived from phytozome v7.0 (chr-ID chr5 ; pos 1027093 to 1038388)
aggttcttacctgcgccgagcaggaggctttcaacccgtcatcttcttcatcttcttgagctgtaaaaatgcccgtgttctttggtattctattttgtttgttatgtacgtgagaaagcacatattcgagtccatatgtatgtataatcttcttctctgatttctctgcaatgatcaggattgcttttgaggacttcacaattctaattcgttatttcttgatgccattttcacgaccagaaatttatataaatgtctcttaatccaaaaatttgccttgcacattgtttaatatgaaagcttagatgggcttgagcccattttgggagcccaattagttgtccaatctcaaatcacatgggggaagcccgtgaagaccccttccgcagcctcaactttccgtatgctttctaaaagtcaacatttgattcctcagcattgggatttggactaatcctcttgatctaacagatgaagccaaaccgtccatctctgatttacttaaaaaataaattaaaaatgtaacttcaattttgatgacctccattcttccatttttaaatcaactagaatcttcttctcaaaatgaccataacaccctttcaattttttgattgagactaaccttaggcgaaagttttaaggaagggattttgttttttttcccttaggaaaactttatcattaaatataatacacaaatattttttttttgtttcatttttttagaaaggttatattaaattacatgacatttattattataaagtaatgtgtaggtttgtcctttgcttaattagttaggcatgtcccgtaggcaaaaattttaattattttttttcatttatttcttctattttccttttttttttaatgtcccattttccccaaaatttaaaggaatataccataaaggagtgctaattttttttatataaaaaaataaaaaaaatttatataataaatacatggataaatcatactcatccaaacatataacataaaatatcatataaatgtatatgtgattgtcatttccaatgtaaattagagtaattttttataacttattcttatttaattaaccttttaaaaaattaaattagaaaaattatccaaaacatatttaaaattactttaggctacatttggtcggttctctttttgtcctatatcatattatatcgatcatttaaatgtaataatttaggctatatttgattgacagaataagataaaatagaataagatatatatatatatatatatatatatatttcaagatattatattaaatatatatctaataatatgattttcaatgagatatgatttcatttgtatgcatattttatggatatgatattttaaggtaacatatctaataaaatatgttatgttatgttatgttatgataggttgctaacttaggaagaaatgtcaatattgttttagcaatcctatccatattgatgctatgtgctttattggttataattgcatgcatcatgtttaataataatatcttgccaattgctaaatttctctttatgctatttatgtttgattatatcattttgagcatccttaatatactccttgaagtttataaacttgaatattttctaaatttaaaggaacatatattgagagggagcttgtgaaaccaaagtttggttaatctcagttttgatgataacaaaacaaggtttgaaactaatattatatttcaagtgtgattaagcaagaagattttcaaagtagtaatcacaaagacaaaatcaagtcaaagagaaatcaataagaaaaagaagacctcaaagagaacacctgcatttatttgtctacccacttgttcttgccttaaaagctttaattcttttcttggtgcattaaatctccatttgcatatcctttagtgcacctttctgattcatcatagccttaagttgtatttgagctattgttgagctaggttgagagattcattcttgttaatcgagtgttaaagccttcaagtgagttgaaacttgaagagattgtgtaagagcccattggagccggaatccaagtgtaaaggtgattagaaacttggttgaagcttcaagttagtcgaaccctcacttggttaggagcttgaggagagtggacgtagacaaagaagtgtcgaaccactataaaatctgagtttgatatctctaattttatctctttatatttgcttcttttgtgcttaaatttgttgtgtttaaaaagaatttttaaaaaacccaattcaccccccctcttgggtgtttttcttatttaagattagcctttattatctcaaaaccatttctaaattaaaaaatcttaccaataactgagtagttgctgttgtactatgatacctcatccgatctatatggagagggggtgtgattaaacgtcgtgtaatatgtcggtaccactccgtatatggatcatgaaactgcatagctctcgttataggtggtgtcattgcaatacgctccgcatgactagcccataaggtaatatactgtgcatggaatgccccccaatcatacttatgtcgtccttgcctatccacagaatgaaggtcttgctctatggaacaagatggaggtatcccttgttggaggctaaactatcacaacactcgctctagttgatgccactcgacaatgtcaaaatagataagaggtgacatcatcccccaaatatcctggtctgttagagatatcattggaagatggacaactaagtcttccatgtaaggctcccataaaacctgttaaaatcaacatttgacattaataatgttaatgtttatatgcttaacaatagcacattacatcttatatgtactcggtcatgggtttgtgcatctaattggtctcgataaaatgtcaatacacgtgatgggttttgagcccatgataaaagtactctccacccatatcctaacggatcaactagtaaaccctcgtctaacaatgcctcatcttgtaatccctggtcttcatccaataatccatggtgtacttcaataggaccctcaactggtaaatcatcgactgcatcatgatctaaatgttgagctgctggaggggttggtggtcaaccaaaattgggtcgacccacttagagtatctcccaagaccacaactagaaaaaatgtaacattaaaattttacttaaattataaacttgaagcaactagaaattttaatctaatgtgaataattaattatacttgtaatagtgtaacacatccagcaatatcggtggcaccatccaaactcattcgacacaactccgtatataggtgtgctaatactacactgccccaactatacatagatgtttgagtcaagtctctaagtagtgggagataacacatatggatgtgggtacccttcttatttgtaaatagagctgaacttatgagtgctaatatgaaagctcgtgcatactgctctaatatggcctcatctgaatcaattggtggacgagagaactagtgacatagccatcgtgtcgatatcattgatcctttaatctcaaatgtagggggagtcatacctaaaagttcataacatagcagtgaccaatctatgtcacatgtgccagtgatgagaagcccatgaatacgaagtcctaatatgatagcaacatcctataaagtaacggtcatcttcccaacaggaaggtgaaatgtatgtgtcttaggatgccatatctcaactagactattgatcaatccccaatctagtgtaatgtgtccaatacggtatacaccataaaatccagatcgaataatataagatcgaagatgaggatccatctcctattcccatataaacctagatatatgttgtcgacaagtcaagaccgaagcaaactgtaaagatacaaataaatcatttagataataaactccatttcttttcattctttaaagagatattatgtgctttcatatacatacctgaccataatcaactaaatgagacttgtgcctatcctgtagaaccaaaacagacttatctaatggatctgaatcaaaactatgttttttatactctatatctgaaacaaaattgtaaagataaataaacaatacttattgtttttaaataaaaaatatttataatggaaaaattttaaaattttatggagttttccctatattaagtatatatcaatttgataaatttaaatagatcaattcatttattaccaataaacaagtcatattagtttaaattaaaattagagatgcaaatacaatggaacattttgttaacatctttaatagaaaatttcaaaattttgacagagtttcccctatagtatggacattattccaaatataaataacctgattatgaaaataacatcaatatttataatcaaaccaaagccaataattgcataaatgtagtatcatagtagcttacatcacaatatccaagaaaattacatgcatacatcacatggtctaataaactatattactattttgacaagaatgacgattgtggccactttgtttgcataacccacatgtaatagaagtcttgccctctctaacatccatttcattacgtaaatgacttgatttaggtcgtccacttgatgcacgtttcatcgactcagaaggcacgataatcagaccatcataaggagaccactcatacattgaaaatgggatggaacaagggtacccaagtattatagtatgattgtgtactgtagtagtattgaacaagtggtctaaaatcaactgaacgaaaatgacatgctgttagaatatggctacatgggaatccatatatgagtgttttatcacacgtacatgcatgctcatgtaagttgacgcgatatgttcgaccaccagttgagctactcttcgtatccctactagtcttcacgtggaatcatccttggatgtgatcatataaaacaatctcatgagatcctgtcttaactacatttgccttaatcttagcatcgacatatgaagtgtatttttcatttgaatcaagtcgattaacaccttgttcccttctcacaacaaagtaactatttagccaaaaaaatgtcaattgaaccaaagcagttactggtaagctacaagcccttttaagcacactattgaacaccttcaacatgtttatagccatgatgccatactttcgaccttcgtcatgagagagcgcccatttctaaaaagggattgcttccaaccattattgtgcagctgcattaatcctcccaattatgttcatatgtttattgaaattttcaatcttggttgctaaggctgctctgcacattagatttttcaacattttatccttgagtcgagtcataaaattgctgtcaagatgatgtatacaaaccctatgatatgcgtatggctcagaccaaccaagatgaacatcactcattgtagttataatgcctggatgtcgatttgaaataacacaaagtcccctcctatgagttactctagttctaatacatgccaaaaaccatccccaactatcaatattctcatcccctattagggcaaaagctaatgggaataactgattatttccatcataatcccgagcaatcattaaagtgtctttatacttcccatacaaatgtgtaccatcaatattgagtacgagccaacaatgcttgaatccttcaatagatggatgaaatgtccaaaaaacttgttgaaatatctttgtattctccataataccgtgaaatgtttttgaaattacaacacatcctggatttgcctactctaaggcaatgaaaaaatgtggtagctttgcatatgacttataaaaatcactaaataagtttgtaagtgttttaagcttttctttagatgtcttcttgtatgatatttggtatccaaatttctccacaatacttgcttaaatagtagctactaacaatgtgaattgtgccttaatcattcattggatatgaacaacaatcaagttggaatctaattgttgatggtcccgattcaaacaaggatttacacatttgtgtggaccattgtatttattgattgcaaataaagttgtaccttgtacaaccatagcacagagtttccatggacattgagattgctcaaccttcttgcatcttaagactaacaactttttagttgacaaaacaacaacatactcttgttgtgcactaatagagtacaacttcacagcatgttgtaaatatgcttttgaattaaaaaattggccaaccatgaactctccacctgagtttccaatattagtgttccctcatggggtctagtcacttgaaacgacattaccaatgttttctacattttcaaaatgtaataatggtgctgagtgatattgaacagaggaaaaatccattaagtccttaagatctaggttatttgacatatcacaaccttccccatccacggagatatatctcccttgttcactttccattgcttcgtgaagagttaagaaaaatgaaacaacattaacactattgttttcctcattaataaattcgaataccccatgaccatcatgttgaacatcttctgctttctcactttgatcatcactttcttaggattcatatttttcttcatcttcatctgctctacactcataagtcattgcaattggggcactactaggtccacaaccatactcaaattcctcaacattatcattttctcagagtaataaatgtgtaaagttacctaataattgccctctgacttgtggttgtattgacacttattcaatatacaattcaatttcgttcattccaaatgagttaaccaattttagcatttgggataaactattatcatcccatattggacaaagttgaaacctgttttccatttaaaggatacctacagttgaagactaattgaaattgttttttgtcaatgccagttctcgagtatattatagataacaagtgttcataggttgaactaacagacacatccaaaggcataattacaacttgatccccaatatactttacatttgtttttgtcatcaacatttttcctttacaaaagcaaatcacaggaataatagattcagacatgatttacctacaaaaaatacaatatcaaatggtttaataatcaatgaaaataataagtctttgtgttttgaacttaacatactttttattaaaataattacaaaaacacacatacaagaatgttctagagaaattgcatataattttttaacatgtgaatacacaattatataatgaaacatcttcttacacattagggggaaaaatataaatcacttcataataataatattttttatttaaatagttatcaatgatacaaatatattcataaataaatgtttgataaaattttaatttaaaacttagatagtgggttttaaatcaataaatgtttagttaaatctaaaaggctaaacaattgcaagaatctcaaaattaaataaaaaataatccaccaataaatttttttgataaaatatcatatattaaaataaaattaaatgttatcaaccattaaataatatatactttaaataattatgttgttattcataaatcaattgatatttgattaaacctaaaagtccaaaaaaaatttaaatctcaaaatcaaataaaagataactcaccacagaaaaatatattaataaaatatcaaatacacaattatagaaaaaaattatttatatatataaacattatttgaatattaaaagtgaaaacatataaacattttataaacctatttaatattaattttaattatagaaaaaaaatcatttataaattaattttaatttataaatcaattgaatattaattttaattttaataaaattgatgtcaataggatgacccttctcaaataatccaccaataatttttttttggataaaatatcatacattaaaataaaattaaatattattaaccattaaataatatataatttaaataattatgttgttattcataaatcacttgatatttgattatacctaaaagtccaaaaaaattttaaatcttgaaataaaataaaagataactcaccgtagaaaaatatattaataaaatatcaaatacgcaattatagaaaaaaaatcatttatatataaataaacattatttgaatattaaaaatgaaagcaaataaacattttataaatctatttaatattggttttaattatagaaaaaaaatcatttataaattaattttaattttaatttataaatctattgaattttaattttagtcttcaatcttctcttcttgtttaattttgctttcttgcagggagccattgttgatagaaaggtatagaaagagtgattgttgttatgtagagaagtatgaggataatggtgggctaatttgagtattatctagtttttatttttatttttatttttgtgatttttccagcattacattgtttatatgggagatcactcgtactaggattcagaatatatggttgcagctaaccatgagatgctagcttcagttactggaaggtaagagactatggtccctaaaaagaataggctactagttttcagtgtcctgacctaattttgactgtgtggattgtaacagttgatttgtttttctatgattctaaatgttgtggtggattgttttcagtgttgataaggcacagacagtaacacttcaccattacagtaaaagctttagagggttttcaaccatgcttacacccgagcacacttaaaaacttgcaggtgtgccttttttcatattataaaacattgtacatcattcaaaacattctggcttactaaattccttttgattttcttgtgttgcagagagcgattaagttattttagtgttcaggagcaggatgaactgagtccatataactcattcttgggattttttgggaatagactctattgtccagtataaccaactgccaatgaccttgtcttctcatagttttgctcaatattttattttaacttcaatttttttgtttatttgtccatgcatccgtgatttttttttttttgtggaatttataggacatcaaaggcgaagttaacttgggtgctactaaaaaatctttgcctatggatccatcaatttatgggctaacaattttggaatcaaaattaggactaggtggtgcaggtaacattgcctcaccctgcataaaaactaggagatatttttatatggacatattttttgtggtactatgagaaaaataatgtttgatgttatttcctcttttgtaaagaccatattggtcaacagtggtgttagtggaataacatagaataaattgggcaccttctatttttggttgagacaaatggcaacaactaaaagttaatataagagacgagctaatggccttgatctaaggcttgaaaatctcgtatgacagtttcaagattgtttatggctttttattaggaagttttctagtcacttagatgtgtttaatggccttaatacagtctcatagttgcttttatcttctaaatcttgtcagtactaggttttatgtatttaatacaatatcatagttgcttttatcttctaaatcttgccaattttcatatgttccactcatgaacatcgctagcttattatgagcctaacaaagaattaaagataaagtctccaacttatggttacagcaaatcaaatcccaagaatagccaagcagagtctaaatcaagtagagttgaagtattgaaaattttaaaactatttagtttgagattccttaaaggatgcaaataatgtcttaaatctttggaccagaactagcccatgatgactctgttttaaccatatctcctaccactggatcatattcctgaattttaaggtcaaccaaacaacaaggaatttgaaacccaccaagtaagaaaaagatcagaatactcaggaccactaatgaaacccaccagctttattttattacagaggaatgggtccatggagtgactcacattgtagaggaaattctgatatcattttctagagttctaccccacccaaatgataggtcaaacatgcacattttagcattactttcctctattttctgggcaaccaaacattcctagaatttggagaataatgtagaaactgaaaacaaccccacacctcaatctcctaacttaagataaaaccttattcattggcccttgaaaagtggagtactccgattttttctgttcctataacaaaaatcaaagctcatccccttcatttttggggtttttaacagtggtcccctccatttttggagttcttaacaatggtcccctccatttttggtatctttaacaaaaaaaattcacggtggctctccattccatattcgttttcttcactaaaacaaaacctttttctttttgtcaagctagctcacaatgaaaataaaattaaaaaaaaccgaacacatctttaccaagcacaagatgaaaataaaatcagaaaccaaacacatctacaacaataaactaaaatacgtgaaaactaaacagatttacaaaaaaatatttaaatttacgtaaactgaaaaactcataaatcttacctgatcaatgatggaacaagatgaaaatttggaaaatattgaatttgagccaaggatgaaccaaagacaaccagatgcaacgggagacaacggaaatgacgaataaaaagacaaaaccctaaaggtaagaaacctaaccgaaaagtgaaaggaactcaaaactgtaattggtgactacggtttcttgacctggactcctacgtgataaagatgcactaaattgggcattattttggaaatcagtttactttttggttttttttctaaatatctttttttgggtcaaaactcaataatccaagcgtccaaatagttgaaatgcaccgtaaaagctataactagagctcgtgtggttacagttaatccccaccgtcgattctcacggcggtgggtcccatgtgatgtaaaaattaatcgtggtttgtcttttggacctagttgggcccaaaaattaagttttggtccatgtaagttgcataattgatgatgaggatattaaatatgaaaataccaatataccctttaaaactattttctaccataatgtttgacaaactttttttttatcttaaattttttttaatcattattctgaaaatttattatttttagaaaaatattttttttaaaaaaatatatcattttta

SEQ ID NO: 11305 - DNA, 6404 bp, Vitis vinifera
  Intron number 2 from transcript GSVIVT01038339001 (locus G SVIVG01038339001) derived from phytozome v7.0 (chr-ID chr7 ; pos 13245015 to 13251418 reverse strand)
gaatttgagagtttcagtgaaagatagggtgtcacgccccaaaacccactccaagagcatgacgatcatttcacacctcaagtccaaaggctcaaagtggaaacgacacaaacattcgtattgtaactgaaaatttaccaattaccaaattcctattcagagtagtaggacaaaattctaaaatctccaagtatcaactttaaaaaaaaactaatacatcaaccaaagtgttattgtccaaataactccaaacttaaaataattcaaacgagaattaagttttaacatttaaacaatgtccaaaataaagagagtttaaacaaatgttctaatgaagccaaatttcactcttaacaatcactcatcgctcgaactaaggttacttgaaagattatcaacaaagggggacaaactcaaagcccaataaggaacattaatatagtttcatagatcaaacatgcttgcaaataggagatataacatatacttattttcataaaaacttttgagttccaaatactaatacattcaaacttttcaacaaaactttctcatatccatttcaaaataatttctcatcaaaaccaaatcaaatgcattcaaaatatctttactctagttatcgtatgaaaaatagtgcccaattaggcgagacttcacaattgagtaactaatttcaaaatttttccatttaaggcgaacaaaaccaaatgtcaacaattataacccgttgactagggccataaggacaactattataactcgttaactagggccatataatatcaactactataactcattgactagggccgaaaatgtcaacaattataacctgttgactaggtcataaaattcagagtcaaacactttatttcattaattcaaacttacaaaacaaaaaatcatatctcctcaatttttcatttttcataaacaaagaaaattctcaatccatacaaaacacatttgatccatgtgtaaaaataaaaataatattttaacacatttcaaaatacaatataaaaaggaaattattattattattttttttataaaaatttgcattaatttcccttaccttgaagaagcgctaaaaaacttgaagtatttagcttgacgaatttccttctcacttaacataatatcatacacaataatctaaaggtaatgctaaaaatattttatttagtattagggatcttaattaatttctcatgctaatattattaccacctgatattattttcaacttcttaaacaacaacaattatataatttaatgaatttccaaattttttataaactcatatttcttcacctaatattattttcaatttcttaaacaacaacaataatataatataatgaatttccaatttttttataaactcatatttcttccaaatcttattctaaaaaattatttcttttgtatacttaaactaaattaaaacttttattaaaaacaattactattattattactatatttttcaatacctcgcatcatctaaacagccccattgtatgtcactcacaagcatccaaatcacataattcttactattattattattattattattattattattactatacgtcactcacaagcatcaaaatcacacaattcttactactactactactactactactactactactactactactaataataataataataataataataataataataataatatcattattatcattattcttactaatcctaatgtcccctcttacttaacaaaataccctatgtacttttaacaactccaacaaccccaccaactctactcattattattattttaatttattccactaccaccctttgcctctcatagttacatattattttttttttgtcaccccaacatagtgcctcaaatccaaaatccaaaaacatgcaattcttcttcttattattttccaatcccttaagccacatataatcatatatttatttactcatttaatttttaaaatttcattgtttagatccattcatttaattttttttttttgaattttcctattttcatcaatgaaacaacctatatttataacttcaattttttgatcttaaaataaattaactaaactaaccctaatctaaattaaaattttctaaagaatatctaatttgttcaaaactaactaatgaatataatatattaatatagggttagaatcttacttggaaaaatttgaacttcaaactctaaaccttcaaacctttagccctacgttttccaattctctgatttttggttaatagagttttcttaataaagaagacaagaggaaaatctaatttataccaaggattattaattgtaaaaggactttttttacctttaatgagtttaattaattaattaattaattaatttataatttactatgttgcccttaaagtttattttggggtgttacatcattcccttcttaacaaaagtttagtcctctaaacttgacgtacataaatcttcaaataatggggatgcttttctcttatctcattttctaattcctaagtgacctcttgaatattaagattgcatcactaaacctttattaacttggcaataatagattgtacctttttttttctatcacgtaccacataagcataaaacccttaacaacattttctaaataaggaactagcccataaagctaagatcatacacaatggtctaataacatgttttcccttaaaactaaacgcatgttaactaggaatgtggatagtcacccttttttaccaaaataattaatatagacatagaaggaagctaaccaatccatctccaaaatcacatcaaaagcctaatggtcaagaatactaagtcaactaacatctccatataactagtcatcataagataacctctaaacattatattatccacaatagaatgtcccataagaaaagcaacagtcaaatcaaagtttgggctaccaacaaaccaaaaaaagctattgaaacaaagagtgtgttgagtttaggtcaatcaaggctctagcaataaattgcaaattcaaatagtacatgtcgctacatcagaagtggcttaagcatcttgatgagtcatagaaaacatctgcccttggactttgggtttctgtttatacttcttattctcttccttaggcttcccaatcataaacttcttattctctggacaatcccgaatcatatgtccatgcttgccacaaccaaagcaagctctagactctttatagcaaggcttaccccaatgtttcttaccacaaatggaacaagtcaaatatgaattttgcattgtttcccctttattctaactctcaattgaaacaaacctttttattcttgattatcatgggcaccatcactcctactcctcttcctttgttgttctctgtactattgaagctccttattattcttttaagggctctatctacaacctctgtagcaatcaattgtggagcaaaacgtgaaaactttgtaaatttagcctcatactgggccaccgtcatatccccttgttccaaacaaacaaactctcctactttttgtcatctaacactattggggaagtactttttgtaaaatgcctccttaaattgtctccaaactataagtccctgatcatctaaaagccttttggtcatatgccaccagtgatctgcttctttatctaacataaatgttgcataagaggctttttgctcctcacaacaatctataacatcaaagaatttctctatcttaagaatccaagcttctgctttcgttgggtctaaagtactagaaaagtaaggaagacttaacttcttaaagtcatcaaatgagctacccttagaagatgagtgttgcccaagagcttgagtctcaataactctagcctaacgctcaaccaaactagctaaagtctcaagatacctataaagtttttctacattcatgggaggcaaaccctcaagtggaggaggtacattgttattagcctgactgttttgggaagatgttgttcttcttagtgccatgttgtcttataaagcattaggtataattaaattagtcactaagaaaccaattagacaatttagattcataagaaagaataggaatttatagaagatgaaactaaaacttaaattaatgcgtcactcatctatccccaaagtaaattaaaacaagtttccaataaggtcataacctagtgcgctgataccactctgtcacgccccaaaacccactctaagggcatgatggtcattttatacctcaagcccaaaggctcaaagtggaaacgacacaagcatttgtattgtaactgaaagtttatcaattaccaaattcctattcagagtagtaggacaaaattctaaaatttccaagtacaacttaaaaaaaaaaaaactaatacattaaccaaagtgttattgtctaaataacttcaaactcaaaataattcaaatgagaattaagttttaacatctaaacaatgtccaaaataaagtgaatttaaacaaatgtcctaataaagccaaatttccctcataacggccactcctcacccgaactgaggttacctgaaagattatcaataaagagggatgagttcaaagcccaataaggaacatcaataccatttcatggatcaaacattttcaatcatgcttgtaaataagagataaaacatatacttattttcataaaaaattttcagttcaaaatactaatacattcaaacttttcaacaaagctttctcatatccatttcaaaacaatttctcatcaaaacgaaatcgaatacattcaaaatatctttactctggttatcgtatgacaaatagtgcccaattaggcgagacttcacaattgagtaactagtttcaaattttttccatttaaggtgaaaaagaccaaatgtcaacaattataacctattgactagagccatataatccagagtcaaacactttatttcattaattcaaacttacaaaacaaaatatcatatcttctcaattcttcatttttcataaacaaagaaaattctcaaatatactttccatacaaaacacatattgatccatgcgtaaagataaaaataatatttttacacatttcaaaatacaatataaaaaggaaattatttccttttataaaaatctatattaatttcccttaccttgaagaagcgctaaaaaacttgaagtatttagcttgacgaatttactccttacctaacataatatcatacacaattatctaaaggtaaaaatttcacaatcctaaaaatattttatttagtattaggtatcctaattaatttatcatgctaatattattactacccaatattattttcaacttcttaaatagtaataatataatttaatgaatttccaaattttttataaactcatatttcttccaaatcttattctaacaatttatttcttttgtatacttaaactaaattaaaaattttattaaaaacaattactatttttattactatattttttgataccccacaacattcgaacaaccctactgtacgtcactcacaagcatccaaatcacacaattcttactattattattattattaatatcattattatcattattcttgttaatcctagtgtcccatcttacttaacaaaatatcccatatacttttaacaattccaacaaccccaccaactctactcattattattattttaatttgttccactaccaccctttgtctctcatggttagatattaattttttttgtcaccccaacaaagtgtctcaaatccaaaatccagaaacatgcaattattcttcttattattttccaatcccttaagccgtatataataatatatttatttactcaattaatgtttaaaattttattgtttagatctattcatttttttaaaaaaaaatttgaatttccctattttcatcaatgaaacaacctatattcataatttcaatttttttttatcttaaaataaattaactaaactaaccctaatctaaattaaaattttctaaagaatatctaatgttttcaaaactaacgaatataatatattaatctagggttagaatcttacctagaaaaatctgaactttaaaatctagaccttcaaacctttagccctacattctccaattctctgatttttggttaatagagttttctgaataaagaagacaagagaaaaatctaatttataccaaggattattaattttaaaatgactcttttacctttaatgtgtttaattatttaatttataatttactattttgcccctaaagtttattttggggtgttacatagggtttagtaaaattgcattggatcctatttagttt

SEQ ID NO: 11306 - DNA, 2712 bp, Vitis vinifera
  Intron number 10 from transcript GSVIVT01017972001 (locus GSVIVG01017972001) derived from phytozome v7.0 (chr-ID chr 5; pos 5195005 to 5197716)
aaataatctgtgctgcatcaatcaggtatcatgcttcatatcttcagcttatctatcttgctatggaactcaaaatttcttgcaaatggtattttgggagttttcattcttttttttttttgataggtgttttgggagttttcattcttgaaggaaatgatgcattgacagttatatttttccaaagccttaagagatatttgataatactgaaaattaagtaatgaatacttaagttctgaattagaaattgaagtttttaattgctaaatggatcaaagtaagacatttattggatcatccaagttttaaatgttgaatttaatcaaattttttgatgaataaagaattgaagtttgaaatttatttgtttacatttacccttgtaccctgtattctttcggtaatattatccaagtaaataccataaatatgaaaataaaacatataaccattgagcagaaaaaaatgttcttgtcagtcttaaaaaacaaaaaggaacgataaaattaaatgtatattggtagcgttcaaaatgtggataaagagtaagaccaatgtttaaattatccaaaaatcttctgtcacgtataatgtacacaatagttaacataagaaaccatttacagttgaatgaacatgaaatcatgcttctgaaatggggaagggcatgattattgggaaaggaaaattgcaaagtgcccaactaagacacaaacctcatgattccaagttttctgcttttcacaatttacttcataaatatgaatcttgtctctaaatatcttgaatcaatctcttagcaaaatgcaaaagttgcattattttttccattttaggaaatttgcattcttagtaattatatcaaactttagaaggctgctaattcaaactttaggagggaaggatagatggaaagaaattgtctctagctcgacaataaagaaaattttccatagagagagaggagagtggagggagggagagaggggaaggaaactttgggtttcttcaataactgtttttgaaaacagtttactattctctagaataaaaaaaataggaaaatgtgtttgataaccaaaaaacaaaaaactgttttttattcttaaaaacagaaaacaaggtgtttttagagaacatcttttagttattttcacttattttttaaaggttgttttaaaaaataattatacaaatacgaagaataattaaaaataaagtactacatataaaggttatttttaaaacatatttaaaaatataaaaaactggttaaacacttctcaggttttcaaacaggcatttgttcttcaaaacatcaaagaatagttttcaaaaattgttttttagaattattttttaaaacatttactaatcaaggcctttatctctagctccatagtcaaggaaattgctttcgacaatgggaggggagggaagataaattttgtctttaatttacaatcaagaaaattgtttttccacagtgaatgggggagggagggagaaattttgtctctagctctacaatcaagaaaattgttttctaaagagggggagggaggaagggagtgatatttcagctctagctttacaatcaagaaaaaaaaaattcacaatatgcaatacttgtctccaagatcaaaatggtaaagagtacaatcaagaaaactgtttttcacaatagacaatactcctctaagatgaaaattgtttttcacaatagacaatactcctctaagatgaaaattgtttttcacaatagacaaaattcttccctgggattaaaatagtgaggtgtacaatcaagagaactgtttttcacagtaaacaaaattcttctctaaggtaaaaatactaaagtgagaacctagaaaatattgtctctagctgtgcaattaagaaaactgtttttcacaatagacaatactcttatccgagctcaaaatagtaaagtgagagagtagagtggccagaaaaggagggagagagggagggaaattttgtctctactcctaaaatcaagaaaattgtttttcacaatgaatgaaactcctctctgagatcgaaatagtaaagcaagagagttgaaaattttgtctctagctgtacaacctagaaaactgtttttcacaatagactcttctctgtgaccaaaatagtaagggaaagcatagaaaattttatttctgactgtaaaatcaagaaaactgtttgtcacaatgggcaaagctcttatacaatatgaaatcactaaagtgagcaagtagagtagccagaagagggatggagagagggaaggaggggatttagtctctaactaagaaaactgtttttcacaatagacaaaaactattccttgagatcaaaatagtaagctgagataatagaaatcacattgatggtcattaattggatctagagctatgtagcatcgttgcgtctgttcattttttctctactttataattgttaatagttggtgcaattactgatatcttcattttgtaggttgagtggcataactattttctggagctttgttggtcccttgattttgttcattttattgaagttccctttggagctttccttttttggtagtgggagtttctgttaaatgggactgtgttatttatggtgtgtgcatctatgttcttttttgcaaataagccttaccattatatgctctttgcctgtgtaggatcc

SEQ ID NO: 11307 - DNA, 6862 bp, Vitis vinifera
  Intron number 3 from transcript GSVIVT01022385001 (locus G SVIVG01022385001) derived from phytozome v7.0 (chr-ID chr7 ; pos 19479449 to 19486310 reverse strand)
tgcagctggttattatcattctgctgctattacaggtttggtattaggcatacatttctgacagagctagatgaattatcatttttctttcaattggtgcacatggaaactcctttttaatagggtgggggggttgttggtgtagtaagtgtgggagggtttggggttgttttgggatgaaccgaaaacttacaggtatggcagattacagcaagtttccttctaaattgtggtggcttatgagaggcatggatctgttgcacacgggagctatagaagactccaaaaaaaatgtctttcttgtggtgtattggatgatctcaaagaagattatctttgaatcctgacaattcgaagtttgaaccttgtctgtcagatatcatcaaaagcatatcagagaaggctttttgagaaaaactatagtctgacttaccattacctcctttaatgtaaagctgttggacattcctccagaagcaccaataaactacagtactttcaaggcaataagaaagttcagtttgttttatctcagtgagacatatgtgccttcagccactttcagtttttggcgaacagccataagaactctttcaagaactgtatgggtaaaatttataccctgaatctggagttcaagttgaatcttttttttttttttttgataggttggagttcaagtagaatcttcaaggtgatttcattgtatctgaaattttgatgaggagaggaaagtgcgatataatgataccagaaggacttatggggtatagttggaggagatatctcctgtctgcccaagtttgggtttgctagcatgcctaataccagaaggatctaagttcgggtttttaggctcaatggcaaaacttaatgcagtcttcttctgtatgaagttcacttgtcgcacttatccatgatttctaatactagtgattaaggtatcataattgtccttgatacttgatcataatatattcaattggtgtaatttctttttgtagaacccattgcattattttcctctctaggggacctgatcatatatatgtttttcccaagttgaaaagtgctatatggaggtctctcttatgttctctaaacctgtccatgaattgcctatctagcagcttcaattgtaatatgaaacctagttttttttaagccaatatttgcttaattatgcccacaatttcatagcattagtaaattggagcaattgggtatacatcatgtgtttactttgttacacgggtttgtgtgaggttatgtgtcggggccttcaatccttcacaatccaagaattttaggatacggttaatcggcttaaaaggatcttaataatgggtacaaagacttgcatatgatactgtggaaaaattgaagaaaatcttattcacatctttcaatagaatacaagaatcaacttttatattaaaagctatgcaggctatactttaggcatattataagaagagggaactatcctaaattagatccctataaatcagggatttaactaccaatattctattttgtagaatatacaaagtcaaaaatcctaaaataggaaaaccttgttttcccacactctccctcaagcttgtgagtgaatgtcatacatttccatcttgttaattattgttcggaacctagtattattcaatcctttggtcagcacatcttcaagcagtccatctgtggagacatgcagtatgcaaacgaggccattgtccaacttctccttgataaagtgcccgtctacctccacatgtttagttcggttatgttgcacaggatgatgtgcaatattgatggctgacttgttgtcacaatagagtcttataggtgcctctcatttaatcttcagatcttctagaattatttttaaccatagtagttcatgaatttcaagtaccattgacctaaactcagccttagcgcttgatctctcaacaacattttgctttttactcctccatgttactaggtttccaccaagaaatgtgcaataacccaatgttgagcatctatctacgatcgaacgtgcataatcaacatctgtataggcttcaagtttcaaacttgtccccttcttgaataaaatccctttcctcggtgttcttttgagataatgtagtattcaatgcactgcttgaaggtgagtctccttaggattgtgcatgaactgactgactagactaacgacatatgctatgtcgggtcttttgtgagacaagtagatcaatgggcccactaagctttgatagtttcctaaatccacaatatcatcttcattactatctccaagcttatgattaggcttaataggcatgtttgttggtttacacgctaacttcccaatttctttcaacaaatcaagcacatacttttgttgagatacaaaaattccttgttttgactgtgccacttcattgcctaagaagtactttaacctgctaagttctttaaccttgaattctctcgctaaacacatcctcaaattgtctctttcctcatcattcctagtcacaattatatcatccacataaaccaacaaggtagtaactccctctcaagctgagtgcttggtgaacaaagtgtgatcaccttgactttgttcgtatccattagtaattaatactttagcaaatctttcaaatcatgcacgaggagattgttttacactgtacaaggccttcttgagcttacatatttctctgctttataggtttttcaaatctaggaggaacttccatataaatctcctcttcaagatcaccatgtaagaaggcattcttaacatcaaattgttgcaaactccactcaaagttgacaaccaaggataataacaaccttatcgtattcatcttggctataggtgcgaaggtctctaaataatcaactacataagtttggctatatcccttgacaataagctttaatttatacctttcaattgacctgtctaccttatatttcatagtaaagacccacttataccttatcagatactttctttttggcaactccactttctcccacgttctattcttttctagtgcttccattttagtactcatggcatgtctccactcttcacttttaatggcttagacaaggtgttaggaatgacaatagtgtttatttggataaggaaggctcaatgagaaggtgacaatctctcaaaggtcatgaaatgagcaagcggatataacaagtgtttggtgcattctcttgtgcacttcctaagagcaatgggcaaatcgtgatcaccattatcaatggtaatagaaacattatcatgagaagattctggtagagaaattacctcatttctaggggctagttccaactcttggatttgcatgggttctacgatgggtgctttcttccttaggtatacctatagtggtttagtaggattgtgagttgatttttccttagctgaagataggggatcaggagaggatatttcaatagtgggcaaagtagctagagtggggctaggtgtggaataaaaagtggggttggatgaagaagattaggaagtggagggaaaatcaagtagaaaaaaatctttatccttatcttccatgaatgatgtctccccctaaagacaaggacaagtaaaataaccctttttttttaaaaaaagtcacatcgtcagagacaaaaaatttcccacaaagtggatggtaacatttgtaacccttttgtgttgaaaaaatacccaacaaaaatgcatttaaatgcttgtggatctaattttcccttgttgtgaacatggatgtgaacaagggaaacaacaccaaagattatagaagtgagattattcaaagtatgaaagtcagggaaaaaaacaagaaaactcttgcataggacttttgaaccctaatacttaaggaggtaatctgttgataagatgggcagatgtaagaactgccccccctaatggtgttttggaacagaaaggcatggtaggtgtaagaagatgatttttccttttagccaccctattttgttaaggagtactaacacaagatgactcatgagtaattccttctttctaaaaataaggagacaaaacttgattaaaataatctttagcattatcaaatttgaatttttttattctcacaccaaattgcgttttgatcatgttatgaaagtttgaaaagacattactcacaccaaatttttgcttgagaagaaaatccaagacacatgagtacaatcatcaacaaatgaagcgaaccatctggcccctgaaatattaagaactatagagggaccccaaatgtcaccatgaatgagagaaaaagaataaaagctcttttattgctaattgagaatgaagcatgacgatactttgcaaattctcagacttcacaatgaaaattttctgcatccaattctttgaataatgaaggaaacaagactttgagaatactaaatgaaggatttcctaatcgaagatgatgaagtcaaacatgtctttatttgagatggagctttccgtgaagtataacaaaggaaacttattctcaatcctattttgatcacctagctcgtcaaggtagtagagcctgtctttttcctttgtaggttcaatcaacttccccaaaaggatgaaaaatcacactgcaattcatgtctttggtgagttgatgtatggaaacgagattagttgaaagctttgatacatgaagaacaatttttaggataagtgatgggtttatatggatttctccttgattggctatagtggttaaggaaccatctgttgtggaaattttcttgttggttggacatggtgtgaaacaaatttatgagaagaattagtcatatggtctatggctcttgagtcaatgacccacgaacctaaaaaggatgagtctgagacaaaacaaataagaagcataatacttatctgagagtgctaaggagcaagcaccgagaggtttctttgaaaactccaacaaacttttcatcctcttagtattttctttcttgaactctccatgctcttgaatctcattctcattgttcagttgattactgctggtcaaattcacatgtccttgacctttttgttgttatccattgttaggcctccaacccctactgctgttgttggattttgatggtcttccatgctgttttcaacacatatgcttagtgtgccactgttttttgtagtaatgcaccaataggatttttatttgtggttcgggaaaaatctggccgctagttattagcaccgggctgatgttccacacctgaattcttcatatttctagtagttgagagtaaagatgaactttctatggcaggggtttcattcattgtcactcctctgcttgcttcctccacacgaatcatagaaatagtcttgtttaacgatgacaaatcctcttttcccaaaatctgaactctgacctgattgaattccaagtttaaaccaccaagaaattaaaaaattctctcttttttcacaaacctcttcaacatagttgcttccttgccacacttcatttgaataccttgataatgatccatcccttgccacaaattcttcaaaatattggaatattcagtcacagatcactcaccttgtttggtggctgaaatcttgctcttgatttcaaatatttgtgcagcatcacatacctttgagtaaatttgtctcactaccttccaaacttctttagctgtggacaaaaacatacaagtgccactaatctcaggtaggatcaaattccacaaccatgtcagaatcatgatattgtcctcgtcccaattttggaattttggatcactctgctctagtctagtgcccaacaagtggcggagcattcctttccccttcaagaacgtcttcacaacttaggaccactacaaataattttttccattcaatcggtatacagcttgaatgtttttgagttctcctttggattgatttgacaaagcttcaatcagttgcgttgtaagagtggtagtggctttaaatatctcagacatgattgattctattaggttgtatgaggatcagagaaccaacaacgggtataaaggagaatgaatgccaaaaaggaatatgaataagattaaaggaaagattgggtaggcaaaaaacaaagaagaaccaagcaaaacgaagcttgaatcttgaatctcgaagggcacagagtgccaaaaaccatgaaatccaaagagccaatggctctgataccatgtggaaaaactagagaaaatatttttcatatctttcaataggatacaagaatgaaaagctatacaggctatactttaggcgtattataagaagaggaaactatcctaaaccagatcccaataagtcaaggatttaactaccaatattctattttacagaatatacaaagtcaaatatcctaaaataggaaaaccttgctttcccacagatgcttatgactctctgaccattgtcttcaatccctcctttccttacccttattagataaatgttaatgtaaaacttttagatttgtcttatatttttttgtttatttctagttatccaagatttgggttgcagaaaatgcaaatcattgttaaccatgagatgctcatttttaaaatgcttagcattttattgttgatgtacctcttcatgtgatcttttagcgtggaagatgttaatttggcatatgcttatgttttttatagcaacaaaactatttattctagattcatcttcttgtttaactgtcaacatcctgtttgtgttattttttgtttatttttgccagttttgccttttttttcttcaccccttttttttcccttcttatcatagttcattttcttgtagcgg

SEQ ID NO: 11308 - DNA, 4322 bp, Vitis vinifera
  Intron number 10 from transcript GSVIVT01031756001 (locus GSVIVG01031756001) derived from phytozome v7.0 (chr-ID chr 3; pos 4080628 to 4084949)
cattattatcaaatcacctcccaccaaaggtatgaaattatattgatgtgcggatgtataccactataatttgttaaatcttggataatttcgttatgtcagttgacatgggattttatttcttccacaataaggcagtcagtgtgcatatgcataaattcgtacatacacaaattctcacacttctgttttaataattgttatttttcagttgtttcctgagttttgataaagtggttaggtcctctttgctctctttatgtaaagtattatttgagaaaattttaggttaaggtcctttgcaattaattctcaaaacaaatttgtaacatttgtttttttttttttttttttttttcatcacttgatgagaagctttatattggtgttattttcaaaatctcaattgtcttgccacctcatcaaacaaatcatactaagtctcaaaattaaaaagaaaaaagaacaaatgtttcttctaaatgttttattctttgtgtttgttgctctaataaatatttcttatcctagtctcttaaatgcatgatttcttttttgatagataagaagataaatatactgaaaagggtcgccaaaggagggatccacagtatacagaacatctacaccaatcaccaataggcaccatcaaaagccaaagctacaaaacaagaatggcttaagcaacaccattctcaacaagatcccaaccaattgaaaaactaaaaagaattgttggaacatcgtttataaacattttaatctctgccataaaaaacaaacaaaagaacattttaaactttagagtgaaaattcatccccatcaaaggaaattctattccttgccttccaaattgtccaaaataagtataagggacttgctctccaaaccttcctatgctttttgttcacgaacgaaccatgccaacctataagtgtctctctaatcaataagggcagcacctaagacaccccaaaaagggcaaaaagcaattcctataagacccttgactttacacaatggacaaggagatggtttgtggattcttcctcaatatggcaacgaaagtatctatttgctaaagaccttcacctttttgaacttgatctaaagttaaaacttttccctatgtcacctcccaagcaaaaaaactgactttaggttacacccatgccttctatatgataatcgatggaaaagaaaccgatgtcttcagctccaaacagtattgagcaactttattgtaaacttgttgttctttgtctctgtccaaaacaccctatcttcctcatccctatacaacctcaacccatgcaaacacgccggaaacgtctccacacttcctatctcccaatcattgaactcaaccccttctcccttgaatagaagaattccaaacattgtccactcatgcctccttagaaactactaaggcaaataaggatgggaaagagctacccaaagatgtagtcctacaccacttatccttacaaaacttgaccctccacccattgcccaccaagaaggagatcctaccatagttttaaaaggctcaaggcgcaccaaggcgcaaagtagtcctggagcctgaggcgcaaggcgcacctaaggcgtgggttttagtgaagtgaggtgcaccctaatttatatatatattttcctcaatttttctcctattttttcttgattttttttcctatttttcctcctcttcttcgtcttcttcacttctccactacatgattgaggctagggcaaaatttggaagagttgtcaagttgaaaacaactagaaaagggggctggaaaggaaattaaggccaaaatggcgttgttttggcctattctttttaaaataaaaagggccaaaacaacgtcgtttcggaccctgctcttttaaaagaacagggaccaaacaacgtcgttttggtcccaaaaaagaaaaaaagaaattagggcttctctttgccctttgcaacctaacactggagaagaagggaaagagaaaaagaagaagaagaaggagtaggtaggggatcgaggcgcaccagtggatcgcgttgcgccttgcgtgcctaagcggcgccttcttgaagggatgtcgcgccgctcggagcctaggcatgcctttcacaactatggatcttactactcacaaaatgctaatccttatgaatttctaaaaggcaacaccaaacccctccttcacctccctgaaacaccatccctttcttctttcctatacttcccattgataacttgattccaaatggcccccctttcattagcaaagtgttagttccatttgcacaatagagccttattgagtatggagagatgcttcacacccaatccctttttccttttgtctaagcaacaatatcctatcttactagatgtggttttcactcaagagccccatcaccccatagaaagtccttctaaatccgctctaacctcaattaaccgaccttgggacacacaccaatgacataaagtaaataggcaaattagacaagatacttcaaatcagggtaattctccttgctttggagatgtatcgtctcttccacatagccaaccttttccaaaacatctcttccaccctgttacaaatttaaacggggcactcaatgggagacccaaataagagaaagagaggcttcccaccttacaaccaagctcaaaatccaaatcatcaatatcattcacctctcacattggaattagcttgctcttatcccaattaattttcaatcccgagatgacctcaaaccatataagcaaccaacttaagtaagtcatatgatccttaaagccttcatgaaagacaagggtgtcatctacaaacaacaaatgaaaaattttaaccccttctccgcccctacccctcacttggaaatccatcaaaaaacctccattgactgccctctttaacagccatctgagtgcctccatagcaacaacaaatgaatagggtgaaaggggatccccttgtcttaagcctttagagctctagaagaaaccagctggggtatcattatcctctttaaacacatgatttctagcacattcaagcctttattggtcaaaatttgttttgagatgagaaaatttcctaagttttaacattaatcatcagtgagggtagatatccaccttggtatccattagttcaaccatctcataatatctaaatatattggaagatttcattccaaatcaactatcaattttgggtgcaaaaagtgcaaattttgaacctaccttgtgattatttagggcttttgtcttttagggtatgcaaagtgatatctggtgaatcagcttattaagttgccaatcaaatgcatttacttgtaaaagaggacctctcattgcagtaggatgaatattatgtttatacgagtaagatgatctttatgtgttgtgagcggaaaaagtattggaccgattaaatgcattatgaatgaagttctttgtattatttttcctcatgtctgacagtatatctgaagtttgtatcataagcttttgctacctaagcagcagcatctaatatatgtcactaactaaaaatgctataaccttgtatggttaaccaaggattattgttttcatcatttttctagtttgaggaacattcttagttaggctgataaataaaatttgattcaaatgcagagttacttatgttaagaaactgagcaagaaaccataaacttaggcagtgtggcgtgtgttttgaagtggccaaaatgagagttacatcaaatgaaatgttatatatggcaaaatgcaaaatattagaattcctttcgcaattgctatgcaataataaatatgaatatacaattgggttgtcagaagctggcagatgaagtacttaaaccttattgaggaagtaaaagattaataaaagcattgctacttgcttagcggcatttgtttaaaaataaacaataaaatctgttggttcttagaggattgagtcagaccagataacaaacaaatattggatccataatacttaactaggtcactgatgttttattatccaactaggaagactttaaaagttctagcagataaccttgttgtccatgtgatcttcccataccactgtcagccaaaagtgctggattgtgaatcacattgatcaattcaaaatttggttttgggtaacttctgaatatcactttcaccttttattcataggaatacagcagtggttatttgaagagttttgctaactgaaatctactatgactttgttttcatttgcagatagttgaagttgtttgttgcaggttatctcctct

SEQ ID NO: 11309 - DNA, 12808 bp, Vitis vinifera
  Intron number 1 from transcript GSVIVT01036941001 (locus G SVIVG01036941001) derived from phytozome v7.0 (chr-ID chr2 ; pos 17222608 to 17235415 reverse strand)
aggtgtgtgatttcttggatttttcttggtattttcggttagatttctgttgttttgcggtttgagattctggattttgtcgagaaagtataggttcctggtatttagtgttggttttttttatttcttttgttgtctgaaaatttttagaatatgatcgaaaaagattaggtgcttggtgtttgtcgttgaatttttactgtttattttttcggaaatttcagattattatcagatagctatgtgttcagtattgaatttgtagtccttgttttggtattttgagtagtacaaagaggaagtctaggttcttgatgtttggtgttgatttgttactattttgttgtctaaaatatggaattttatctaaaaaagagtggttagttggatgttatatattgttgatatgtttgttagagtacagtttaggaaattcgttgattttgatgtaggaaaagtaatgtaagcgtggaatattatgaaagatagggattgaaattatttggttcatgaaattaagtgggggttctctttctctgtaataccgcccagggatcgcaatacaatcgcttttacctatattaaaaaaaaaacccgcacagggatcgctactaagtaagcaagctacctattgccttgaatggaatgggttgccatgactttccattgattttgttgcggtttttaggtagtttggtttatactttatctacaggatattgaatattggtgtgggtgcaagtgatgctcaacaacttttaggtggaaaatgttatagtctgaactcaaagccttattgaaaactatcttattctcatttacatgcaccattacatgacaacaaagattctactcatcccaattcctttattatgactaaatcccactaatcaccaaattgagtttcctctatagtagtttgacaatttaccctatgagatatcgaagtacttggtggagagttttttggtgtgatgttgggcagcgcataaattcatgaggaagctacaatttgtgaaatcgaaaccgagagaagggaataaagagtcttttggaaagttataggaaaggaagaagagtatccttactaatatcgctagcattgatgctattaagcaagaagggtatcctatttcatcatagagtgcttcttggatggaatgcccctttatcgaagaagagatttttattgccatttttcaattagatagggacaaagttcctagacctaatggtttcaccattgatgtgtttcaagattgttgggatgagattaaggaggatttagtgaaggtgttttcaagatttcatagaaacggggtagttaattagagtacaaatgtcacctcaattgctctaatgcctaagaagagttggaccaaattttcgattttagacctataagcttgacccttttttttgtataagttcatagccaaagtcttatcaaggtgtttacgaggtgttcttcatgaaaccattcatgttacataaggaaggaacttttgtttagggaaggcaattagaggtagttaggagtccttcaaggataaaacaggttttaaggttgggtctgagagcaaggtgaagttttggaaggacaagtggtgtgggaatatgtctttgaggtaatcatttccgaagctctattctatagattcttcaaaaaatgcttgggtgggtgacctttgggatggtagttgtagttcaaggtttataagatagttgcataattgggaattagatgaggtacaagtcttttttggaaggttgtatgaagtttgaacactccattactttggggactggcaatactatggtagcctacaaagaatggtactttttcaattaagtccttttattactctttggaaaataggagagtggagttgttcccttgtggcatagtatgaaattcttgggtgccattgggaatatagcttgtttgcttgggaaacaactcaagtcaggattttgactatagatctactcaaaaggaggggcttgaatattactaatggatgctacatgtgcaaggaagaagaagaaatgagcaaccatcttcttattcattgtttgaaagcacacattttatggcagttgatttgtgctttttggtgtgcagtgggtgaggtacccttcaattagatgggaagaagtcggtttgtggtggagtccaaattgtttgagattgtggttgaggagtcgggtggaaagttgaaaggatgcatatgggagagaagtaggggctttgcttcttggattagatttgggaaggctagcctttgttgtcttttggaaggcgttgaaacctgttgtagagaggtggatgatcaaagatgggctattgaatggttggagggaaatagaaagtttagaatggagcgacggttgaacaaggcagggaggttcatcgtatgctctgtccgagatatggaagcaaaaagatacagcattatcttccctaaagggaagggtcaggccagtggatgaaactctttggctgtgaggttgagaggtcttggagtggcaccgttagaaggattaaagttcaccaatgtgccagaggctccgttgaagccgaagggagtcctgaaggttcagtggaaggaaaagggggtggaaatgaagtcttttgcaaaagctgttaaatcgaccccgagaagggcgggtgagtcagtgtggttagaggtcggggaaaaagaggtgcgtggtagactagagcatctaaaacattgcctaatagggaggtggggttctatctcaactccattacctgagttggattacgttaggaattggactcgccaaaattgggaggttaaggggaagctgtcgattgccgcgttgggcaggggtattatgttgttcaaattcgagcaggctcaagaggctgagcgtgtttttggccagaggcaaaagaagcattaaggaaaattggcttatcttggacaaatggaatcctaaggtggggtgttccttcaagaactccattaccgtagagacatgggttagggcggtcgggcttccactccatctctggagtcttgaggtgtttaaaagtattggagatgggtgcggaggatttgtagcagtggatgaaggaaccaaatccatgtctgagatgcaatgggcgaggattttggtgaagcgtgaggattgggaggtccctaactctgttcatatagttttggggacggggtgcttttcccttcatctgtggtgggaatctacaccttggttctcgtaggtggtaccggcgggaagctcctccgggaagagcgggctaagggcaggcgaagaagttgttgggtctcatcgggtggcttgctgtggaagtcaaagggagggggtggagcagttggggttgcaggtgtaggtacaagacgtggcgcgtaatggaggaaaatttctcattccttctgatgaggcctctgcagaagggactgttgagaggagatgggctggtggtccaaccgacctagtgggagggggtagggagtcctctcccatcagtatggtcaactgtggaagtgggctggcaggcccaagcagtgggccgagctgtggcccttcagctttaagctgtggggaggcccaagacttttgtcttgtaagctgggtggttttgggtcgggatccaaggccccgtcccttttccttaagagagggggtgtcgggtgaggcctgtgggcctgttcaagctggcgctttggaagatggggccttttatggaaacgagaccccaatctcgcttcctagggctcggtttttgcagtcgcctcccatatccaagggcgcaagtcaagatgcaagaggagaagccgatcccctcgtcgggctgccgcgagactcgatgacgcgagcttcctctcagatgatggatcgggggctcttgactgacgaagctctatgcgaagaggcttctaggtacgtcgatctctgttatattcctatggggggtcgggatctctcttctccttctccttcttcttcttccttcggacgggtgacgttgaatgaggggtccatcggtgtttcggtttctgagttcaacgaagaggagcagactctgttgagtatcattctagctgacggtagcaatggggtgctagcctctaagggagagaagccaatggctggagaaggttcgggtgggaagtttgaggggttgcttcaggatctggatgggtgccgatgggacgacagttacctggcgaggtttagcaaattcttgggcttctccacggatggttttgaaggcgaaatcctgaatttgctcctaaggactaagaaaagaagagagcaaaatttgaaaaagggcacgtcaaggaccactaagtttgatcgggagttgaaaaaacttgagtggtctatcaattataatggggcaagaaaggagaattctgtggtcagagaaggtggggttagaatctcgacagttagatgaagctaaagattctatcttggaatgtcagaggggctaatgacagaaataaaaggaaggttatcaaggccctaatcagatcgcaaaaggtggatttggtgtgcttgcaggagaccaaaatccaagaaatgtcccaaggggttattcacagtcttggcgtgggaagattcttaggttggggagctgtgaatgcaacaggggcagctggaggggtggtggtgttctgggataagagagtgttggagttagtaagcctggaagtgggaatcttctcaatctcgtgtcgattcaagaactacgaggatgggtttatgtggttcttcacgggggtctacggacctactatgaagaggtatagagaacctttttgggaagagttaggtgcaattcgaggtctgtggtctgatccctggtgcattggtggggacttcaatgttattagatttcccagtgaacggagtagagtaggaagattgtctagttctatgagaaggttttcggaggtgctagatgagctagctttaagagatttacctcttcaggggggtccttatacatggagtggggggttaaatggccaatccaggtcaagactggatcgtttcctgatttcggaggattgggaaaaccattttagtggagtgtctcagtgcatactcccaaggcctatgtctgaccattccccaatcctgttagatgggggtggagttaggagaggtcctattcctttccgttttgagaatatgtggttgaaggaggagggatttaaggagcttctgaagggctggtggcaaggttttaatttcagtggttctttagctttgtcctcttagaaaaactaaaggccttaaaagttaagctgaagaattggaataaggaagtctttggtagagtgggggtgaacttgaggatggctttaggcaaagtttctttttgggatgatcaggagaggcagagaacgttaaacgagcaggagttagaggctagaaaggaggccaaggaggagtttaaaaagtgggcgattatggaggaaatcttgtggaggcagaaatcaagacaaatatggttgaaggaaggagataagaacacggggattctttcataagatggcgaactctaacagtagaaggaattgtttgaaaaagattaaagtcagtggcatctggctttcagaagatcaagaaattcaaaggggagtggtgagggcctatcaggacctgttatcggatcctggtggctggcacccgagtatgagcagcttggagtttgatagaattggaagagaggaggctgccaggctggaggagatgttctccttggaagaggtgtctctggccctttcggagctgaatggggacaaggctcctggaccggatggatttcccattgccttctggcagttttgttgggattttgtcaaagacgaaataatgggcttctttaaggatttttttgagagagggaaattcgttagaagttttaactccacgtttctggttttagtccccaagaaaggtggggctgaggatttacgtgactatagacccatcagcttggtgggtggtctgtacaagattctcgccaaggttctagccaataggctgaagaaagtagtgagtaaggtggtgtcttcttcccaaaatgcctttgttgaaggaaggcaaatccttaacgcagcgttaattgctaacgaggccatagactcgctgctgaaaggggatgaagctggtgtgttatgcaaactggacctagagaaggattatgaccatattaactgggattttctgatgtcagtgatgcaaaaaatgggttttggggagaagtaggctggttggatcaggtggtgcttctctattgcttccttctcagttttgattaacggttcgccagcgggtttcttccagagcactcgagggttaaggcaaggggaccccttttccccctacttgtttgtcttaggaatggaggcccttaagctgcctcattaacaaagcggttagggggggcttcctatccggctgcaggttaaggggaaggggtggaaatgggattcaagtatctcatctgttattcgcggatgatacgttggtcttttgtaaggattcccaagaccaaatggctgttctaagctggcttttaatgtggtttgaagccatttctggcctgaacatcaatttggaaaagagcgaaattctgccggtgggaagagttgagaatgctgaggtcttggcttctgaattgggttgcaaagtgggttctcttccttccacttacttggggctgcctctaggtgctcctcacaaatcggtggttgtgtgggatggtgtggaagaaaggatgaggaagagactcgctttgtggaagaggcagttcatttctaaggaggggagaatcactctcattcggagcactttggctagcatgccgatttatcttatgtccttaatgcgtattccaagagttgtaagattgaggcttgagaaaatccaaagggatttcctttggggtgggggtgcgttggagaagaggcctcaccttgtaaagtgggatgtggttcgctctcataaaatgatgggtggcttggggattagaaatttttctatcctcaatagggccctgttgtgtaaatggagctggcgctttgcggctgaaagagagtctttttggaagcttattatcagcacgaagtatggggaagaaggaggagggtggatctcttgtgaggttagggaaggctatggggtggggttgtggaaggaaattagaaaggaaggcgctctgatgtttaaaaacgtttccttcactgtaggggatggtagaagggtgaaattttggaaggacatttggtgtggaaacatttccctatgtgaggcttttccttctctgtttgcctttgcggtatcccaagatgcgtgggtagcggattgttgggattctatgggggatgcggggggatggtatccttgtttttctagatcatttaatgactgggagctagaggcggtggcgagtctcctttcggtccttcaaggaaagaggctcaatgttgggatggaggatagagtggtgtggaatgcttctaagagtgggattttctctgtaaaatccctttacaatactcttgattctggtggtgcagtcccgtttccgtggagaatcatatggagcccttgcgtgcctactaaggtgggtttttttgcttgggaagcttcttgggggaaggtgctaacccaagatcaactcaaaaggaggggctggtctctagcaaacagatgcttcttatgttgtgatgacgaggagacaataaaccacatccttattcattgccccaaggcgagggtgttgtggaatcttgtgttttcgttgtttagggttaattgggtccttcagctcacggttagagacactctccttggttggtccgcttcctttgtggacaagaagcgtgggaagatttggcgggcagccccccttgtttattttggacgatgtggaaagaaagaaataggatagtttttgataatgaggttttgtcgatccaaagattgaaaatctccttcatttgtaatcttttctcttggtccaagtcttgtttagatggagagccccgctccttaattaactttgtagattggttgggttctaattgagggttggtgagtatatgtttccttgtgctttttgtttgtggggcttctcgtgtatacttcctgtatgcttcgagttgccttcttgctcccttcttttaatataatttttctgtgtttatctatcaaaaaaaaaaaaaaaactagcacgagtccttcgttggaaaaaagagaaaaaagtcttggaagtttgctttgttgtgcttgttttagatcatatggagggagagaaataggagaacttttgataattgggaaaacatggaccaaataattaaaaattctttcttgtatcttttttggggttgggttaaattatatattgaggatagttctttgtggctgttagactttatggattggttagactctctatgtggcatgattgctggtttttgtgtctttgtgcctcttttttggccttttggttactttgtatatgtcgttttcttgcctatcaaaaaaaaaaagaaatgtttgtttggttgtactaaagccttcaagcaccctttgttactattagacttttccacattagtcttagcttctattcttggtacattggagtctaagatgttttagagggcattgtagggtttttagtagtaaggattcaagcttttagcaccatcatgaaaaagtcatgtttgtacactaccttttcaaacctgaaatatgcatccacctgatggcaattatagtagcatggcacatttctgtctttttcttttcaagtcctaaaaaaaaaagtgagaggaagaaacaactttaaaattgcgtaaagaagagaaacaattacaagaaactaagatgcaacatatgacgatgtacctagtgaggagcctaggagtgggaagattctttgaatggggagcaggcaaggcgagaggatcagcaggaggtgttttggtgtttttggacataggatgctagagttgattgatatggaagtgagtttttctatattctgtcaattcaaaaactgtgaagacggttctgtctagttgttcttaagggtgtacaggccagtttggagggaggagagaggacttttgggtggagttgggtgatataagaagtctttgtgatgatccttggtgcgtatgaggggacttcaatgttgtcagattttctagggaagggaggaactccccaaagatgccctcagatatgaggctctttttgaagactattgaggagctgaatttggggattttgcactagctagagggcccattttgtgtgacagcttgaataaccagtcttcttcaaagttggatcatcatatcctagtattggaagagtaggatgatcattttacgagcctgattcagagtgtcttattaaaaacagtctttgatcgctctcccattgttttagacaatggagggataacaagggttaaatcttcttttacatttgaaaatatgcagcttaaaatggaaggctttaaggacctggtgaggaacttgtggagtgactaatgttaggggttcataaggccatattttggcaacaaagttaaacaccctaaaataggatctaaaaatttggaataaagagggatttgagaatatcagaaccaaaaaaattgaggccttaaaccatattggctcattttttatttattttttaatcagaaacaagaattgtattaatatcatataaagatttcataatagggatgaggaatcctccccacaaatatacaaatctgatctaaaaacctcctctatgcaaggagatttgtacaaaaagatagatcacaaaagaatgtaccagaggaacctctcttgaaaagatagctaggctactctcaatggtggcccaactgtagtgtacatactacaagccaactaagctgaatgaggtttaaaggacatcctttaaatttgtcaagacgaggcccacaaagaagtaaagaaatgatataaatgccataaagtctcggacgtccttcacttgtccttaaagatcctaacatttctctcttgccacaccgtcctgatcaaagtgagataaacaatctgctaaactgttttgcctttggtggagttcccagaaaccatataagaaacaaagatcatatcacaggaactcctaggctgaacccacatcatcactgtctataaaaaagtttgtgccacaaccccaaagtgaatggacaatatagaaattggtggtcacttgtctcttcactcctcctacatagtatacaccacttcagactaagggctttggaaggtcttctcatatgaaacaagtgattgttatttgccttcttgtatgccgctaaccaagcaaaggccttaaccttagatgagacttttgatttccaaataaaattgactggatggaaaggaattaaatctgataatttggacaaagcaaaagaaatattttattgagaataagcttaaagaggtcaatgcccatgctcgcacatctgggacagctgtgaacaagtgtacacgagtaagagaagtcattaattcttcgagatcctcaatctccaaatcagttaggttgcagcgaaaaattagattccaagagagagaagaggcatggccacagatagccgaaatggagaggtttctgattgtgacaactctttaaagtcttggaaattgtgaacataacggttgatccccccactgtaagtcttcctagaaactatattagcttttaggattcttaagagatcaaagtagtcctctttgttgaagcaatcaaggctagaacgatggtggtggattagaagaaacaatatggaggtagaaatcaagaaaaattggtttagagatggggataaaaatactaacttttttcataaaatggtccatgtgcttagaagaagagacttcttggccaaagttaattctaggagtgtggatattcctttttctgagaagtatttgttaccttgtctagtttgtgtgaagataaaactacaaggctggatgactttactatggtgttttagcaactgtgttgagactttgttaggtatgaagtgataagttttttttagggagtttttgataacagctcttttaagagaaagctgaaaggccacctttttggtatcaactctaaagaaaggtggagcaatgaacttaaagcattttaggcccattacctgagttagggggtggtttgagtttttggcaaaagtctagctaaccgacttaaaaagtggcaggaaaaatgatcttttagcttatcagcacactttgaatgattttttttttatcacaaatgaggccatagatttaaggaggaagagtgccaatggtgggtttatttgtaagatatattttaggcatatgatcatgtcaattgagactttttgcttttagtcttccaaaaaaatggattttggtctcaagtggattatagatgaattaaatgatggatatcctcaattaaattttccatcttagccaacaagtttaattatagggaatgaggatgatagaacggtttggatggactccaattatggcaagttctccattaactctttctattcttccttggcctgggaaagaagagagccttttcctgcaagcatagcttgggacccttaggtaccagtgagcatggccttctttgcatgggaaatagtttatggaaggattttgaagcttgatcagctcagaaggatggaatgggatggtagatgtgcaaaggtgaagaagaatcgggtgatcataagctctttcattgctctaaagcaagaaatttgtggcaattagtttattttactgtttggagtagtagcttaggtggcactcttctatatgtgaggaaacctcataggttggcaagggtcctttgtggtgaataagcggaagcaggctaggatgacctctcccttctgcttgttttggactttatgaaaaggaaaggaatagaaggtgattgaagatgttgaacataaatgattattcattaaccttgatacttggttgattggttgagctccaagtaaaggggaggacacctttttttagatgatcattcaataactaagatactcggttgattggttgagctccaaggggaggacacctttttttcctcttctctcttctcttttgcttgtgtaaaggtgtctattgtagacattacactgttgatactccttgtatattttagtgtatccttgtatattttctgctttgccctctcaaaaaagagaagagaacaaacttgtctggctgaaaaggctatcaaatgtagacattcgtcaaagacatgaacaaaatgttaaacaaaacctggaaaatgtcaatataaatcctttttggccccattacaatgaagggtgtcacatgaatcttcaaaccctggagagagaaaattcaattgaataataaaataaaaagtccaaaaaataaaagaaaatcaaaatacctaagaaaatacatatgtagcaagagataaaaaaagtttgggttttaagccttagtttcttttcctgaactcttgttagtaaagaggttatcaggcatgcagtggagggaagaagtttgttttgtgataatgttagaagagattcaaaggaacctgttgtaacaagggcctaaatgtgaaaggtcttaagagaaggtttaagttgctaatagtggtggctcccttctctggtgctagtattgtttagtgattcgggcttctcttcttcctctctggcaggtgaggcgacttcttg

SEQ ID NO: 11310 - DNA, 6969 bp, Vitis vinifera
  Intron number 6 from transcript GSVIVT01036598001 (locus G SVIVG01036598001) derived from phytozome v7.0 (chr-ID chr1 3; pos 18985597 to 18992565)
tcagttgcagcaggttctgtattgccacctgggaagtaagttctagctttttgtctgacttgctttcatattttgcttgctgtaacaatttgttcctgcctttgtttgcttctcatattcaatttctgaagttcatggatagaaaaatgctcaaagtttagactttgttgtgactagattttgattttgaatcggaattttttccatgctgaagaatgatgcagacttgaaattgaattaatggatgtataatatcatgaatagtggctcataagcttgaagtttatgttttgagtccacaaagtaaaccttttttttttttggggggtaaattttatgtttttagtgaagttatttacagcatctgttcaagaaatgaaaagacacagtctatgagtattttgaaaactgattctgccagcaataaatgtttagaacaccaggcactatcagttttaaggattagtctgtgttctgttttttctgacaagacaaagtaccattaaactgttgccttcttttttaggtattttctttggatggttaactattaatatggtgaataatatttggttagatggttggtatcatctgaccacaaatttctattttaattaaaatactaacgcctaaatacatgataatcttagccaagaaaaccagagatagggttaccacaactttgtagtattccagattatcgtcttaattgtttttagattaaaaggattaattatttgctatggataaaaaaaattaatttataaaatatggataaagatttcctaaaataaacttatttaaattattcaataattattgattttaattcaattaattaacccacaatccaactttaggcatagacctttagctgaaacaagatatataatttgatagtcttagtgtaatcaaaagatatggtctaatgaggtcaacctaagttcgacaccttagaattgatctgtattctaacttctaatattttatttcattgaattccataatagatgaataaatatgaaatctgagtttaggtctaaggtttttaggcttttaccactctatgtagatttgcctcaaggtagataacaatagaaaaaccttaggtaactagggatcaagaattaccaagaatccttagtatcaaggaatgtgcaattgtaccatctcctaagtcaaactaactttagagggtattttgatctcaatactaatatcataacctttcattgattccattattagtccaatttcacttattatttcccttttgatctaaccctatgttttcatgtttcactccaagatgactttttagcctcttatgggtgtgttttcacatacacatgccataaaagaacaagaaagaaccattcttaatttcaagaaattaaaaacaatactttgttgaataaagaaaagaaaaagaaaacaaaccaagaaaatcctcaaaggcttgttcttcctctataattgtgaagaaatctctcctcctccctccttctaaaacctaaaattggagtttttatagaaaaagtaaaaaactaacacatgacatgctcttgttggtcacttatttcccagataattacctaaaaataactaaactaaaatcttgatttccaattgtgtggggcctacttggggttgatggagtgccaaagatgcaattcccgaggtggaggaggcgaaatatcgaagttgtagtatgtgatttcgaaattggagttaattcggattttgaaatcatatgttgaatttcgaaatcccattttgaattcaaaatgctcctttagttctgtccaattttattccaatgaccataacttcttcgtttcagcttcaatttgtacaccatttgaagcgttggactcttgacttcttgagctttgaaatgatatatagcatgcccaaaaatgaccttaggaagtgctctagatttgaccttaaagtcatagtatatgtttctgcttcaaatgtttgaacttcaagctatgtccttcaaccttcattcttgtgtttgcttgctttccaaatctttctataaccgtgatttttcgtctctcatgctatgaattgctccattttcatttggtgaaactctcatcatgcttcacacccttggagctccttttaagcatatttagtcctttctctaccatggctgaaaaatgactctttcaacttgcatcattttcatcctttaaatctgaaatttagctcaagatatatattagatccatggctaaggtcttagcaacaattcaagttaagttagctgagttgagcctttatatttgcataattcattcctatatgtgccattggagcacaaattatggctttaatcatcatcctatcaggatggtgtatattttatttataaatttctgtaatgtttagaagtttctgttccacagatgtaaaatacttatgccccttgagtaaaaacaaaattacatggtttttatgatcaacttcataattttctgaaagtggtctgaatcatgttacatttttagtactataagaatttagggaagtctggcatgcaatactattcagggtgagcatgaagaggggttgacacaatatgtaaaaccttattcgggatgagtattcaatgggatctgcttcaaatttctttctttttcataatgagcagggaaatttctttaaggaagaaaggaaatgcaaggagaagatatctttcaagcaaaccacagatgcttctacacttcatttacatagaagaagaaagcccaacaaggctgctgccaaatcaggaactgaataatggaaaaacattgggaattggatacaatccagagttgaatctcagaatagaagcctcatcttaaacttttacaacttaaagtctagatcaagaatgaattgcaatcttaatatcaattcaaatctgatccctatgcctaacttttatttaagtcatgaaaggattaataaaaggtcattaattgtccaattcctgttttcatcaattcatctcaacattcagaatcacttttgcacagaaatgatcaagagatgttgtttagagattacctcaatggataagcatctatataacaattccaagcatcatatatgccttgttgaagggagctacaaagagaattccatactttaagagtagaaaactaaaaaacggaggactaaagtgaagttataccatagaatcagtcttcattccctaaatccaatttctttcttgatcctctttcaaattagaaaagaactatccactcatgattgtgagagaaggctcacacaccatgtttagctgtagagaaaatgaaggaaaatgaagaaaaataggaaaattctctaaaataaaccagaaaatgaaaatacaagaatgaatctcaagttcaccaccaaaaagctctcaaaagcatctactaaagcctatttatggagaattatggcccatggctacctttaattggtccaaacatgccagtcatcaagaatgttttagaggttttacaaaaaaaatgagttaaaaacaataaacaagtttgaattcaaataacaatggtttggctcctttctgcagtaagttgcccagaaggccttttcacactgtagcctgagtgaaatttcactacatttgagaagctaagaaagcgtccttgacagtaatcagcacaagaccgcctactgggcgatttcataggaggtggtaaattgctggaaaatttgattgggaattggtacgtaaatcaaaaggattaaaaatgaaatcactcttagttggtgacacccaaagcagctggggataggaggggtgattagagatcataacggtgttgtggtctgagctttttttaaaactggcaagagcaggattagccatcaaggtagagattttagctcttttatagggcttgctacaagaaagggctcttagcctttctaatctacaggttgaacgagactcttacatgactaaattagaaagacggccttggaggtatgatgggtggctccatcaaatattagatattgcaactgtcctgtattgctccttctctgtcttcttgttcaccaaataatgttactgatcttttagtgaagagaggagcaatgttttgggttcatttcctaggagattatataccctcttgaggagttaaatcacttctccttgtatagttgtgggtgacactcaatgtataggtacccttgctttcttgcagaagtcttctctatctcttcttttgatcaaactctgtaaattttgtaagaataataacaacaccaacaacccaataaaagtagctgaaaaggccttgcaagtatattaatctctttaaaaggtcattagaaaatatttaagtttagaagttgatcaacactcaatttgtctcttcaaacaaacttttaacctcaaagcatgttcataattgactgttaatcggttatgtgatttgggtgaggaaaggcaaaagagatcatcttattggatggtaaggatgtggttttcaggaaaaaaaaatggaagaggtttggcgtatttaggcttgaagcattgcatcatttggtaattggttgaggagatacctatgaagcaaccttctttatgacactttcttacaagaaacagatacagctctagaacaagggatgtgatgctaactatctggtcaagaatttctaatagtatccttggatggtatggacgaggtttggtggattttaggcctgaagtattgccttatttgttgaggagataccctacgaagcaaccttctgtatgacactctcttactagaaatagatacagttctagaacaatggatgggatgctaactatctggtcaagaatttctaatggtatcttcagaaggctattttttaaggtcatcaagcatacttcatcctgttcgatctattacatggaagatggattgaaggtcatattttggaggatcatttgatgaggagattattctcatgctcagatttattctctttcaaggtgtgcaaaaatccatattcccttcttatatcgttgttgaataaatttgtagagatctcaatgaatgtgaaacactgaaaccagcgatttttcttctttcttgttttccctccacaattttaccttatactcttcttcctctagatcaaaggtgctagtcattttatactcttcttccattgccctcttctctctggaagcttgcattagattgttgccaatcttcctccaccaaatgattaaaagctctcaacagtttttaacctttttcagtcctagtaaagctaaaatcgctaatttagagcattatatttatgcaagacttctagatctccagtaaacttgatatttggaaagcatgataagcatgactgggacattttatctaatggctgccttcacaatatgtggatctacacaattttattgaggggtctaggaataagaagttttacatcaggtacaatttgattatgccatatgcatatatgagcaatagatacatatataaatacacatgcatatctaacaaataatataataaacatgaatatagacacacaaacacatgttatatatatatatatatatatatatattagaaacaaactattcgttgatatgaatattgattacaagcgaaggataagaaagccttccaaaaatacaatggatgataaaaaaaaggaggaaatacttgataagagcagcaagatagctatatagatcaaggatgaaacaagaacatactatgtacgaacatgctcacacgtgctgttttattttattttcctgattaaaagaaatctattcgttgatatgaatattgagtgcaaccaaaggatgagaatgccttccaaaaatacaaagtatgattaaaaaaaaagaggaaatacctaggaagagcagcaagatgcctatacagattaaggatgaaacaaggacacacaaatgtatgtatatagagtgcaaggctgttggttcaatccaactttggttgggcttttgttgatgtattgacaaaatagtatccgaaagatatttggttgtcaagaaaatgatggaaagggagagcaaatgaaggaaaaggagagggaaaaaaatgtttatatatagagcatatatggagggagacctctttatctccagtccttttagtaggtgtgatggacgtaagtgggccaactcatccaaaggtagtttcttgagatgtgaatcttgcaaaatgttaagagtaggtggaagaacaagaagttctacactggatgtaatctgagccggactcacatgtatccttgtgggaaagccttaaaccttgctgctttcttgcaggaaattgacaaaaaagttaggaacaagagaaatgttctctagatagttaatgaagaggcacatgataaagttcctaattgaggtgtgagtttcaagtaagaaagcaacaccaagaaaatgcatttacttcatcaaggaatgacaggatggcagtgaggcaatgccagatctcacataaatcatccttatataatgttttcctgcatctattggctgtttgagtgatttagcatgtggaccttctgggtttgaccaacaactggaaaacctggatggccagcacaagggaaagaatggcacttctattgttatttcctaagaagcttgagctcagttcaggagcatgtataaaaataaattattgtaaaagtggatcaagtttctcatcctgctagttgaaatcttgggtattgtatcgagtgttgatggatgaggttccttggtgtatttattgtatttatgtatttacttttgttttggatgatgtatatgtatcttagttaaagaatgttaattaatgtttctctactggcaaaagtttgcccccttacttttgtttcttatatgggcctcatgcatccatacttttctcatggttttgtgtttctaatcaatattttgtcaggtac

SEQ ID NO: 11311 - DNA, 5681 bp, Vitis vinifera
  Intron number 5 from transcript GSVIVT01017407001 (locus G SVIVG01017407001) derived from phytozome v7.0 (chr-ID chr9 ; pos 8088210 to 8093890)
caaggtaaatacaaagtgaagttttggttatatatatatatcatgtaagaacataactaaaatcaacattctttgcctatcaatttgtgcatgactattatttagttattcttcgtaacataattgaaagaatgtttaggtgtataacatttaagaattttacatggcacaatgaaaaacatggtaatcaatgtatgcaataaaattctaatagttgaaaaagaattttcttgtaattttatgttcgtgtatagtaatcaaagagaaaatcatgaaaatgtatattagttagactttatatatcaatagacaaaaaagaaagaaaaaagattagttccttaacttatcctaaaattttctagataacaaggagtttttttattttgggctataagatttacaacctgaaaagtgaagatgattaatattagtaatataattttgaaatataaaaattaatgaaataatgttctctataactataactgcaactgcaactattaataaaagataataaaagtactttagactttgaatccatggttaggtttgcaattttttgatgatcaataaagctacaacttatgctgcaaaaggctatacaaaatgtattaggagcattgctaagctcatttatcaataaaagaaatccagtaatactttgattggaaaaaacctagaatcatgtttgatatatataataggagaagaaacaaaataacaattccatggtattagttagtttgatatcccttttgttatatggaataactattccattttaaaataattatttcatcttatcgctagaacaaaaaatttcaagcaattatatgcgcttttgggtttcttaagaatttaagcatttatgggtcacccatatatacatatatatatatatatatatatatatatatgtaggaagaataaaaaaaaatattatacggagacaagggtagacacccatatatatatatatatatatatatatatatatatatgtaggaagaatataaaaaaatattatatggagacaagggtagacacccataaatgtacatataattatttaaataaaaaatcaataagaaacaatatacaacaaaatagaaaattttaatcttcttaaattttaaaaataaaaactaaatgaaaaaaaattaagaagtaaaaataataataaaaaggtcaagaatacaaatagagaagtaaacaaaaaaaatacataaattaaaattaaaatttaaaagaaaaaatacatagattaatatgaacactaaatgaggttttttgagatagacttagttagacctgaaccagatggatattaaaaaaaataaaaaaaaattgaaagaaataaaaactaattagatgctaaatattggattaaaataaccaaatgaataaagagtaattattaatttttaacattttttattccctagaattattattttgtgtattaaatgtattctgagtgtagtggtataaaaaatgtagttaagaatactatgaagaataataatggtgatgataatggtgacgacacttaataccttttattgtacgtttagaaaaaatgaggttcttgatctttatggagattatcattactcatccgcaagcatgttgatagttgaaactactcaattatcaaaaattgaatttctaaccttcaatttttctctctcaaatgtatatgtgggtgagaaagcactaggaagattataaggtctcacatgtatatgagtcataggataaaaaatatagagacaatactagcatttatttgatctagtggcaaatagagaaatataaaataaccataaccataatgttctaaccttatatataccagaaccatgtttccttcattcaatgttgcaactttttcttttcaaattagaatgtaacttgtaggatccattgcccatcaaaattttgaatcgaatattataagatatttcacatttctacctactaaagcatgagcttcaatgttctcatgcacttttggctactaagttaaagaaccctttgaggattaatggagtttctatgagtagcaaagcattataatcagaaagtcttatcagtgatatgcaatttgaccaagaacttattcccaactattttatgaattttatgacttttcttggctacttgtaggcaagctaaagaaattttctggtttgttcaagtctaaaaagtggtttcaagtttagggccaagcttgggctgcacctaggtccttgggccttgttcagctccacgtttaaaccaaccttgagtccatctttgtaatttttctcccaattcattgattaatattaggattttatagagcctataaattgaccaactaaataaagtaggttcataaacttttaggtgaaaattttctctttaataaatgttaattcaagagtctccgtaatctttttatattcatattaattggtatttaaaccgaccttactatattaaagtcaaataccaaatagtgaacactatatctactactaccactatgatggtcacaaacatagaatgctccattttttagagtcaattgatgcttataaacaactttgtttgaaaataaaacacatcgagtgattgcatcaagagattgatgtaataattgcatacttgatctagataatgttaatatgagttgactaaataaatgagtatttacttataaggtagcccatagaacattatttgtggaaatattcatgcacctctacatatgttcatgataacttaggttgataaatttaagaagaacaaattcataaccttgggcatagttagtaagaaatttcaccaatagagtttggtatcatgattctaattgttcaaattgttttaaaggagtattttaaattgcatgttaatttgcttctaataaatggagagaaaccaattcaagaagagaattgtactcaagctatgtatagcattcatgaagatgtagaaaatattgatgaacttacttttgagcaagttgaaatcataattaaataaaataacaaacccaagggttaagattgtcaagtaaaactttaattaaaatttattgattttttaaatgcctattagaggagcaatagaagttctagatagaaagtaagaacttttctaaggaatcacttgttagattttaagtgatcaataaatataatgtccaatttaaaacttttataaaagcaatggttctaaagaataacttgatttgaatttaaagttattattgatatttatttataatggatgtagttaatcaattgaacatagtaaaaaacacataattttttcaaaataccttctaattgttgggtatatttaagtagttattcatatctcattatctttttactcacatactaatctccttattgagtatttaccaattacaagtaggttgaaagttacttgaatttaagtcactaatcaatgttaacttgatgacaaataagtctccctttgaaacttgttttataacatagcgaaatgtagtcgatcaatcatcaaaacaatgtttaagcattgggatttagttgttaatttttattttttattttttgtgcttaaacaaagacaaaaattataaaaactcctgaaaagtacatattaattgaatttaatttatacatcaaacaagaacaaactagtcttggatttaaaattcaataggttttgtaattataattcctaaaaatttgtaagacaacaaaattattggacactaggctattgggtgtgtatgactaagaggtgaaggagggttcatcttatacaaaggatgatttgattaattttaaagattgaataaacaataattgcatattcaagtaaaaataacattgctaaaaaggaaaataagtattttagtcctcaaacctaaaatggctaaaaaatttaattaatacaattacaacttcacctacaaaaaaaaaaaaaaaaaaatacccaaaacttttcaatagcacaactaagtccatttatcaaaagctctatgaacaacaacaactatcaaatcacataaatcatgttgtttacaaagtgcccttgatgttttaaaacataagatattacataaaaatcaaccaatagtgtatgacattataaaaaacatatccaaatccattgtcgaacttaaactaaattcaactttatatacatagtcgcaagtgggtctttttgtctttcaatttgggtcaaattcagatgttagttttttacacaacaagggattatcaaggtgataattcatgcatataaatagtattacttatataaaaaaaatggtaaatgcaatttttttgtattcactcaccatttggcatatcaataagaaaaaaatatatacaataggtgctatcaataatattatgcatcactagaaattataatttttcatttgttatcactacttgtgcactttggaaagcttgctaggtacaacaaattagctcagtgaagaaattgatcaattccttcatttctaaataaatttgcatatacactagaataaaaacaactttttaacttaacaagttgactgagtctcagaacttagtaggttgaaggcatagacttccatccaagctcatttactggcaccacatgttggaaaaataaagaaaaatcaaaacacttgagtatagttgcaaaccaatctaaatatagagtgagatctacctttctttgaaagtttagaacaaatttttatttttatgataagactatgcagtacttatccctctctaacaagtctataatcagtccaaagcatgggatattgcatatttcttgaactcaattagcctttaatccatgcatttcaagtaaatttaaaacctggtgtacttgttcttgattcacatccttgtcactattatcattacttgttcttgaatatagaaccttattgtccattaacaagcgggcctatgttcctccatgattcaagagtattatgttttgttcatcatcagttggtcttgctctaaagcttcttttttatgactatcaataaccagacttagataccaaaatttatgcaagagagcatgtactttatacagtcaagaacttgtgagtctagactttgttatctaggtaaaagaataaattggtttgttaaaatagctagcattaggtatctattcaattcctatcttagacaataaagatacaaatgatcaaatacattcttattaagaaacatttgataccaaaagtgatgtaagacaacacagttcctctattcaatcaagtttaaggcttagatgaacctatgaatttatattaattaattgggaaagagaataaataggctaagtagaagtgataggattgtaatagcattaagttaatgatcttgtttaggtcttctactaaattagagaagaaacaaacaaaagtaatcaaacgtgttagtgataattatatctacttaacattgagacaatagttgtactaatggtaattatattatttcttgagagtttaaacaatatatattgaaaatatttttaaaggtttagcaactaccaaggttataatcaactacgagctttttatttttaaaaatatgaaatattaatatctttactttctttgatcttcttgtaggttttaaaagtttgtctaagctgaaaaagctggaa

SEQ ID NO: 11312 - DNA, 8730 bp, Vitis vinifera
  Intron number 11 from transcript GSVIVT01009556001 (locus GSVIVG01009556001) derived from phytozome v7.0 (chr-ID chr 18; pos 9365271 to 9374000 reverse strand)
aatgttattctcttgacagtcttaataacctgtttttttatatttttttatagtgtattaatgaatgcaaaatgcgtataaaagtacataggtcatatacaaagagcaccaagaaaagaagcaaaaaaaggggggacacaaaaatactcactccctcaacaaagacccaaccaatctatgaagtccactaaaggcatatagcctctgcccatgcacaccttaacccacatagagaaagtgttaaggaagatgttttttagtctttgatctgataattcctcatttttaaaacatctccgatttctttccttctagcttgtccaaaaaatatataaagtagtaaccctccaggctttaacactccttttgcctacaaaggagttgtgccacccaagtagagtctccctaatcatcttagagataactcattgaatactgaaaatagagaacacgaactaccattaaactcttgccttgtcattatgtaggagaatatgatcaatggacttagactcctctttgcacaaggcacacctgttgactaacgtctacccttttctcttctttgatccaaagtaaacaccttgccttagcaaacctcccaagtgaagaaactcaccttagaagtaatccatgagttccaaataatctttcaagggaatggggtggtacaatctgtctccaaaagagaataaatcccttttatagagaaaactcctttgctatcacccttacaaactactttgttctcctcctccctcttcacttcatgttattggattatataaaggaaccgttccatgtcaaccaactcctagtcatttaaattcttagtaaaatggaagttctaacttccttcttcccttctttgctcccaaaaatagctaccacgctgctttcaaatcaaataagggaaacaaggatgggaaagtctcacatgagggttcctcactgcactacatatcttttcaaaacttcaccttgctcccactgcctactgcaaaagaaatctttgttttaaagaaatcccattgcttacctattgctttccaaactcgaacatgtaggaatctctcaccaaacttgatctccaattcccttcttcctctccatactcttctcttatgattttcttccgtagcaaatctctttcacaagagtaacaccaacagcaccctatttagcaaagaaagagaacgaacacctagacctcctttcgctttaactgtacaaacaattgaaaacttcacgaagtgtattttgttctctaaggtctctcttccccacaaaaaatccctttgaatcttctctaatctcaattttacaactcttgggatggtgaacaaagacataaagtagattcgtagattggctagagtactatgaagtgacgtgagtcttctctcctttgagagttgttgcctcttccataatgaaagcctcttgtgaaaccgctcttctaccttataccagactaccattgacttgtatgaagcccctaagaggagtcttaggtaagaagttgacaactttcccaccttacaaccaatttcacaatccaactctttcaaattgtccacctcccccactaggatcatctcactcttttccaaatttatcttcaaccctgaaatggcttcgaaccacatgagaagccaacataaattagtgacttgctcttgagaggccccaaataaaacaatcgtgtcatcaacaaaaaagagatgagatatttcctcaccttcaccttcccttcccctaaccttgaaacctgaaataaacccccatcttgtgctttcaaaagcaaactgttgagagcccccatagcaatcacaaagaggtagggggatagagggtccctttgtcttaatccccaaagcttctgaggaatcttgtaggggagccattaactaaaatagagaagctggctgaagagatacaccacttaatccaatttatcaatttttgcccgaatcccattttcccaagaattgctaataagaagccccgattcacatgatcataaatcttctcaatgttgagtttgcattacaacctccaatctctcatttttagcattaaatcaattgtctcatttgctatcaacactgcatccaaaattcgtcttcctagcacaaaggcattctaaaacttggaaaccactttacccgaaccttcttgagtctattggccaacacttttttcaacaattttaaaaaacctcctaccaaacttgttgacctcaaatctttaagatcatttgcacctttcttcttagggatcaaaactaggaaagttgcatttaggcttctaacaaatcttccatgctcatttaactccttaaaaatgttcaatactttcgtttttacaaactcctaactaaaatgctaaaaggccatcgaaaacttatccaggcctgaggctttgtcactattcaactcgtcaacacactaaacacctcatcctctgagaaaaccccctctaacttgctagcctccaaccctctagcacctcaaaggacaaagcatcaacacctggcctccaatctccttttttagagagaagggttttaaaagcattgaccaccattttatctctctatcttcggtaagccattccctgtttactttaatcttagcaaggtagtttcttcttctgtgagcatttgccatcttataaaaaatttagagtttctatttccttccttaagccatatttctcttgatttttgtctttaagatgccttttctagcaaaacccatttctggtattcctccattgcagatttccttgctattgcctccgtagttgacaaaactccttccctctccttagcgtcctagaaacctatctggttccaagtctccattttctttactgagatattgcaaaacacctctttattttaacttttcaagtacatctttatggctttctgtttagatggtagaataaaattggcagaacctgaaaactccaatcccaatcaccaacccttcaacagattaggaaaccttttccaccctcaaccacattttctcaaacctgaaagggctaggaccatttctaaaacccccaccatccaacaaagcaggggaatggtcagaaacaaactttgataagatcctttggatgacccctatgaagtgactttcccaccccctcatacactaggaattgatccaacctagaaaagaggagttgttctgctctccacaccaagtaaacggcccccttaccagtggtagatctctaaattctagcacgttgatgatatcataaaatctcctcattggagtagtcgaccttagacactgttgcattccaaggaaatcttacaacattaaaattccctcctacataccatggattgccccacaaccctttgatagcccccaattccacccaaggaccctctttgtccttcctagaacaaggcccataaacccctgtaaaaacccacacaaaagcatcctcacaattcttaatcctgcaagaaatggagaactttcccacttcccacttgaccaactctaacaccttactgtcacaagacaccaaaacccttcctgaggcacctcttgcattcactgacccccactataagaatctccccacccctaggcatttgacaatcttcattgtcatcgattgaattttggtttcttagagacactacatctgctctttgtgacctaatcaaggactttattaacttccccttctttgcgttatttgcccatctcacattccaggacaaaactttaagaatcattgatgaaccagaatcatatcccacgatgctttctccctttctcctcttttgggaacactaccaccatagtttattgaactttccaacttttttaagttccttcttaaacttcaaagaagcaaaaaaattcctcccttttccacgctcccttatcttcacctctcttatccacttcatctttttcaagagcttcaaaatattttcttcaaatcccagggtcggcatgcctaagaagtttctaaagagctagtggactagtcttcacactggtcctctccttcttttagagccccctcaaatgactttgcttcttgtacccactccttcgtggcaacttcatcatctggaatcaacccaaccatttccacatctcttccatctgctagaaccactcttagaggattccactcaagacaatcagacaaaaggtccatcttcccttttgtagacctagaagccttagcttttccctccaaagacttggccaacaccccacccctagacggagaagaagaagaagaagaagcccttgactcgaaaggaaaaacaaagctagatgaagtacttggaaaccttgaagcttcgtcgaggagggctttgtcggctagagagataggcgctgacaacaccccaacttcactgtctaaggagaagccaaaacggatgtcttttacccctaaagaagcccatcccaaattgggcctagcttcgaggccctctttcctctccaaaataggcccatctactagatatgatatacaacccctatgttgtattgacttacaaaatcaatattgctgtaatttgcactagtgatgcctgctgctgaacatgtatcagacaagtacacctgaataattgaagggagggattctttactaggtttcactagatactttttgaattcattactattgtatgatcattttaaattagttgactgttaaatgcccttgtagaaaacaattaatgttaaatagatacttcttttcatcctgttttgtagaagcaaaagattgttcactataattaagccatgtttccatgtccagtgatatggaggtttgatagatatgaggcctatgcactgttcacctaacatacatgcccaagtacatttaatgccttaaaagtgttctggtcttgacatttatattttgtgaagaaggagggaatgactatattaatatcctaatgaaagtttataggtctagtttagggagcacctagaggtggtgaataggtgtttaaacccttttagcccagatatcatgttcctggagaaggcttcttttggcagactgactattacatcatgtcaagctgttaccattatgtatgctttagtctttaatgtttcttttctttttctcttgcttcttttttttcttgctttcttcattttccttttttcccctttcatttttaaggtctgcactgaaggtggtaacaatattcataattcaagaaagtaaactaaaaatgtaccaatgttctctttctcttagactggatggattgacaaatctcttttcccttttactagttttgttccatgtgcaaggcacgtgagcaagataggtaataaagttgatattatatatatattttaattatctaataaaaattacaaaaaataatttaataaaaagtaaaacaaaaattttaaacttttaaacatttttaggtatttgtgtttaaaaaaatattataacatcatgacaactctgcatatatttattttataataaaaaatctagatatgaaattataattaattattttttcattatttaataaataagcatacattattatttgtccaatgaatatgaatttaactagaccttgaggaaaatgtaagtcatagcagtaacagaataaaaagtgcatagttcagtatcataattttgccaacataaaaacctaattacttaatacgccttggaaaatatgacatatactaccgcattttaatgcctggcactcttatgaggatcaaaacttaaaatgcagttaatgataaaccaagaccctccttttttcccctttcaaaaatgtcctctttcttgattaagctaatatcagattattagtacttgtaaacatgtatgaaatgacataagtaaaaacaatgtccatagactaaattttaaaagaaatgcaatgtgaaaagaggaatgaatgcttggatcaaagacatgatagaaaagagaatcccagcaggattgtagagctcaaagttcacaggaattgggtggttaccataattgctcagccaaccatcaattgttggctcaaatgtaacgaagaaaaataaattaaagttttggatcttaatcttggcaatgttcaaaattctaaaaaaacaaacttcttcacccaattgagcttaaataagttatttgacctattttacataagcttttcaagatatatcttcatttttatttcctctagtttaacgttgttaatgattttagtctaaaaatgcatacatttcattgaaaccaaaattattccaaacaaattagaatctaatccgaattgctaaaccataactcactaattggtgctcaaaaaaaaaaaaaaaaaaaaaaaaagagggcgaaaaaaacaaactaaaatcttcaattgtagattcattgattgttcacaagcctagcttgctcacttcaaaattgatatattcattttcagttttttttttttttggaaatcaacagaaaagagacctcaggattcaaaatcatcttttcctatttttcctttccttcttccatttaaaaacaaaaatgctagcacttcacaaaaagtgatctgaattgtgactaagaatgtccacatcttgattttactgagctaatcatttcagtacaaaatggtagcacttttactaaaaaatttacactatataaattgcaattcagtcatgaatagttcaaccctaattttgtgtttgattgtcacaaaaacatatgcaaaggaagaaaactaaaatctttggttcctagattatttgttgttaacaaccctacaaaacaaactctcagttcaactgaaccataaaggcttagatcaaattgaactgtttattttcttggacatcacagaacaagaatgagaagactcaaaatcctcgtcctttctattcccttgccttcatttcaacacaaaattgctaacactttctacaaacagtgatccggatcgtgtattaccaaatcctaacgctctgtacatgtctaagaaaacacacaaagaaaaacgagttcaaactttcagtccttactcaacgtcattcagaaccctaaaacaactgagaagaccagaggaggaaaagaaaaactgaacttaattcaacaactttactacgtaaactccagtttttgttctcgtttttctttcaaaatagtcccagagatgtgaaaacaagagcgaaaatgcaatcttccttccatttcccttcctttccttccttccgctccattttctcgacaaacaaacaatgggttaagatcagaaaaaaaaacgcagaggattcctacatttaacaatttgaaggtaaaacatagaagaatctggcttatattactgcaaaggaccaccgattgttgtcacttctccctctgaagatcagggcttgtacagctgtttgtttgtcaaggtgggacagctgctgcaacagcagcaatccaactcgtagcaaagcatcaatggcaatttggtgaataattttaaaaagagaggataaaacaggaaagcaaagttacaacaaaaacctcacattccggcttttatagtataaagatattctatttaggaaaccagaggtgtacagtcttgccattccaacccctgatcttttaattcttccacttgttctatagcacaataaaattgaaccaaattactattgcaatgtgattttttcaatgtgatcaactgttctcatcttgtttgaattagaccaatgtgattttttacctggtaatagttttagttgtcagtttcaagttccataaaccttcgggttatgtctcaatttctgtgggcttggtttgggagggtggatggtgaacttgggtgtgtttgatagcaaaaaggagaactgttttctgcttacagaaatataaatattgagaatgacttaaaaacatgttaccaaaactgtttttaagaatatttcctgaaaatgggttatttttatgaaacatcaaaaatacttttttcaatgttttaaaaaatgcaaggtcacaatactgttttccatgttttaaaaaatgcaagtttgaccagagaaaatggtccgaattaattgttttcattttctaaactgaagatgtttgtgagaaaagtgttttcatctacaaacaagcttgtatccttgtgtttgtagaatctggtgtttgctccttcaagagtcatcactagggggagggaatttatctttcatgtcatagaaagttcagcgctgggctgatttaattggccttaacttttgctcttatttctttctttcttttttgagtgttctatggtatacttacatgtatttcccatgcactcctgtatcctaagcttgcctgctattggtctggtcttttaataacattttatttgccaaaaaattctcggaatttcttttcagcatcacataaacatgttcaccctaactttaatattaatatgtaaaattctctttgctgataactccttagagccaactgttagatcattggatatgtgagctttaacctgtggatactgcttcttattggttgaagccgactccatttgccaaaaaaatgatcttataacagatcttccttatctcatttactgggactcctacattattattctgttcttatttctgtttttcttcattcctaaattttctacttacggacttaacatcttcatctcatgatatttaactcaggttggagaaa

SEQ ID NO: 11313 - DNA, 7199 bp, Vitis vinifera
  Intron number 3 from transcript GSVIVT01025624001 (locus G SVIVG01025624001) derived from phytozome v7.0 (chr-ID chr8 ; pos 13500823 to 13508021 reverse strand)
ctcaagtacttgcctgctagactgcataaagcttcgtcttcttccactaaacgaagaagaaaagatgcaacagccatggaaggcaatgcaacatgacagcataattttggtgaactcgatgaagactccaaaggttaggcatgaagttcacacacctcttatgtgaaactacctccagtctctattgccacctttggaagattacattaggtgtctaacttaatacagttcacatgcagataggttgggtcaagcagctgacttagttattgaattaggaaaactatattaaatcggctaaacagtatttcttctaatgaggtatattttcacttctcttggcctttagaaaaggtttattgttatcagtaagtcaggttcatttgtgttttaatctctctgctttacagaactatcagaagcttggacctcctttgcttcgttggttttctgtgataggatgtttagatatcgccatctctatgcttatatattttgcccgtcttgcatatgctgacattggtaattagactgttaagatcatctggttctcctatttaagcttcgtcttgtggtcataatggttggtatcaaactatcttttctgttgatttttgtgaagtatttatagactactgttgagttagtgcgactatttttttttttctataagtaaatttttatccccatcaggacttaaacctaaaacctcccacaaaccctctccaacactttaccacttagcgtgaggccttaacggaaaatgcagctaagcctccttagtcacgttgtgtttcgcaaagaaccaatccaacttcccaatggggagtatcaagcagctaaaccagaactttctgatctaagatttgcagtgtgacttgttttaacttgtcctggttaattattgtgaatctgatgctaaagcagccatcctagcatttagctttgcataggctctagaatttgtgcctttccaaggcaatcttcctttttttcatttacccttgtgtaagattcatatggggtcccaaaaaaaagaaaaaaaatcctcatatttgattttcatttcagtacttctcttccgtgatctgtagttttcacccattggaaccaaccatttttaattatttctttctttgcgcatgaggcatcacacactctttgcacttgtttatttttgggatgacgtttctggagtgtactgcatttctagttccttgtataaccactagagcaattagaagggcagggttgaatgttgcagaggatatttcacccgatcagacatgttttgcagtcaaggacttagaattcattgccctctttttaggtcatgtttggaatactagaatagaatagagaatgagaaattgatttcatttattattccttaatgtgtttgggttgttttctagaataggaatatgaattaaaaaattcattgttatgaaaaccaaatcttagtctcccaaaattttaattctctcttttatatggtattatgatttatttcaacccctatcatactttcattcctatttttccatactaaacctatccttagagccccaagaaggaaagagaaggaaagaatgtcttctaacaaagtttgatttaaaacaaaaaatattttaaaattgtgttttgttattcaggattgccacgtggccgtgctacgtggcctttttttatttgtgtggtaggtcaaaaaccgtgtttactcgacgcgattttaagattttttaaataatttgatattaggcgttatgtttgattggaagcatcaacatgtttactagatagtagaatcaggagcacgcatttcagttgctaagatcactagtcttgatctgccaactcatttagttctggagatgaggatttggtaaaacgaggccagtaactttggtttattgatattttgatatggggagtttcccttgagattgccacagcattctgcaatgttagcatgggtttcatgtgtgagtaagaataaaaaaaatgggggtgcttatgataacatatggaattttcataagttcataacaataattttataaacttatttcaatttctattaggcattatgaaaatgggaagcagttctttacatttcaacatttcagaacatgtcctgccaactttgtgaacactaaggggtcagttctaagttctaataagatattttagaagtttttacttcttaaaaagcacaaaccagagattcagagaatcaccaatcattggttattaaacttctcatgctgcttggtctgcattagagaagattttttcaaccttatataagggcttggattatgctactactaagattagaatttcaaacaagaagaaaaggttctctctctgatagaatatatgctcaaagcaaagaatcttgttgatataatttggcagctattggggaacttgtaacaggaagagatcaaattctacaacttcttggaggtcttggagctgactacaactccatagtagccttgcttacagctcatgaagatgatatttctcttcactctatacacggtattctccttactcatgagcaaaggttgtgctttcaaaatttagtagtagaaaatgatgtaattgctacaaatattgctacctcacaataccaggatcactacaacaaaaagaatcaaaattgtaataatttcattcccaacaagaatgactatggacacaaaccaagtagaaggtcaaatggtggtccaagtcaaggtattcaaacaatcatacaagaggtccacaatgctaattatgtggaaagttcagtctcaccgttatagttatcattggtttgatattaattttgaaagatttacctccactaacaactctactgccattcataaatctaccaacaacaacacccaaatgcaagctatgcttccatctccttccactccaagcaatgacgcctggttctttgatactagagctacgcatcggctcactcaagaggtcagctctctcataaacgtccaaccatacaagggaaaaggtcaagtgattgttggtaatggtaagcaaattctcatcctcaatattggtacaaaatctattccttttactctttagatctttcatctaaagaaggtatttcattttcctcatcctaccactaatctcattagtgttcttaaattttgtcttaataataatacctttttttaatttcatcctaaattttaatgtctccccattctcctcatttaatatttttactcattcctcttattcgaaacaagagaggtatttggcgaatttttaaatcaataggagttagttgtatttagataaaacattaaaaaaggcaagtgaaattaatccataatttttttaacacgaaattttagaattttattttgcttaatcaagaattttggttgaaatcaaacctttaagtcaataagatataaattattggtaattttttaaaactaatgtttgaagtaattttttaaaattattttaattaataagaaattatattttaaatgtagtattaaaatacgacttttaaatgtatattaaaactattttgaaatattttaacagcaaaaaggcaagtttgaaccaaaactccctggtcaaagacagaacaaaaatggtaatgcccttaacggcttctttctactttctacagcttcacaacgtaccaaaaatacaaacagttgtaatatgaaaaacagtagagggctacctttgtcattttgggtattcaacactgtttacaactaacattcgtctaagaccgaccagaaccttccatatacacgatctgagccatccattctgcataccgataacaatcaggtcttcaaattctgaccaaactactttcctaggtcccaccttaaccaagatggttttgcgtccacccaaaccctggcgcgcctcaaaaatacatatccaacggttcaaatttttttcctatgggtcccaccacgactcaattgactgaatactcattatcaagtaccgctcttctggtccatcggcagaacacccaagacgctctctatcttttccaggcacctatatataatatcaaataaaaatatcatttataatttcaatttctttgatgaacgtttttatttgaaaccgccgcttctcaaaagttcaaaaaaaaaacacaaaagttactcttctgctgttccatataccattcttccttttcgatcgtttatcagatctgtgaagctgcgatatggatgcggtgaaggagcgtgatgatgaggtcaaagggcttagcctcatcgatgtttgcttcgaggacgattctctcatctcccaatcttcaggtctcgttgttgttgttgtttttatttttattttcggttcgaatcagcagattcttgttctatatgagttcattcatcataattttgattttgatatttgttctttattttggacgaatgctcagggatttgagtgcttgtttcgtgatattaagttgattggtgatttgtttcttttgggtgaaatttagggatttcaattttatagactgcatgaaatgccacagaaaggggaatgtgaaatgagattggttgtctgattggaagcgatactgtggcttagcgatccatttagatggtgtttggatcttgaaaacagaggaaataaaaaggttgaaatgaatacatttttttttcttatttggaaagaaacaatgattggaaattaatcggaacttgtatgttttgaatcttcttattttcaggaaagttgaggggaaaaattgaatgaaaaatttattactctcagcttataagcgttttgttttctccttctctttttgtttcctttttcctttttcctttttccctatattattcccttcacattttcggaggacctgaacagagatttaattcatttctgcctagccagccattcttttgaagttgaaacagaagttaaaattctcattgaagtagcttcaaccattgggaatgaaagagtcctgatcagtcgcaatgttttgtggctcatctgaagaataacgatttttcaaaattggtaaattgcttccttttcagatcaaattttggataatgagataatggttgcacactatcacagtactggatgagtagttgaccactttcagcatgctcataaaatgttttaagaaattttctatttggaaaaaattgatcgagtgctcaatgaggaaggaaatggaaatggaattggtgtgatgttgtgttgttatcagttattgcaactcaaagaggtgcacaacttatatagttcttaggctctcagcttcagtagcttcacacttccataagccaactggtggcactcttgggaagaaactactggatcataaagctgatttgttcttctgacatgtcctaatatttgatattaactattgcaataacccaaattcagtgtcactaatgttgcatttaacaagctttcttcttcccacatttttttgataggcaaaatatacaagatattaaataaaaagcacccatttacatggaggcacaacctaagtacacaggaggtatatatggagcagtaaacctgtaaggaacaaaaagggacaaagtctacaacagccacaaagcagggctcaaaccctctccaaattatctattaaatctgaacatgacagattttcatctaaggatcacagccaagcaaaacaatatttgataaaaaataatccttcacacccaaatccaaatgctttagtccttcagaaatccttcaggtccactctttctctcttccagttattttgaaatgcttaggttccatagccatctctacaataattgttgtgtatttaccccctaacccattaatattgccatacaacaccatatcatcataggaaacataatgccaaagaactttaattggaatacaagaaattcatatatcattactattgcaagagtttacaaatgtgaagatgatctttcttgcttagcttatttacctaggacttctctttttgcaaactgattggattatctgtgaaagtactttatcttatccctgttcttagttgtgtatattatgggcgaaccttttttcttatccctaaacttccccatggtgtaaaactaagtttcttgacttgttctctttaaacaggattcattcaattaagaaaatgaattagcacagggaagtttattttgtagttttcttgggtgtaatttttcaactctctgtaagttctagtgccttgttttgtttgcctactttgtttgtccttttttgtgacaacataagttagaaattttcatttccatgttggatggattataaagcttaaaatgttttcacatatctttgactgcccccataaacattattttttgtaatcttacttctagttgatcatttcaacagctgcaattctaaagcttattccactttggctgcaattgtaaagatgtaaatgctttcacatgtctttgactgtctcaataagcattatattttggctgcaatcttacttccagttgatcatttcaacagctgcaattctaaagcttattccactttggctgcaattgtaaagatgtaaatgctttcacatgactttgactgtctcaataagcattatattttgtaatctgatttccacttgatttttcagctgctactacaatttgtattcatttttgtgtcacaatattacagtatctggattgttcatagaacctgagaaatctgacccaattgatatcttggaataaaaataatcagagccaacctttttaattcagtgcctcatattacaaaagccacagaatagtctttattatgaccatgtggatgctgtgttctctcacatcttctaatagcttttaaaaggccctcgtggcacactgaatccaggtgggtgcatggagcaagtctgttgggtttctatcttataaaccttccctaatatgactaaaggctggccatgcataatcattctgtttcaacccatttgcattaaagaatctttatttatttttggatgttttttaacttgatacttatgttctcagataacaattttccatcatttcattttcatcttatcacttctatcattgctactgaatttccagtttgatttaattaaaattgatcttcagaaaatcagcaagagcacagaatttttgagtttccag

SEQ ID NO: 11314 - DNA, 5529 bp, Vitis vinifera
  Intron number 6 from transcript GSVIVT01014829001 (locus G SVIVG01014829001) derived from phytozome v7.0 (chr-ID chr1 9; pos 10276185 to 10281713 reverse strand)
ttcatagtacaatcttccatacattgtagttgctcgtcatggtcaatgttacttttctcctatgttttatttgtgtttgtgagttcatttacatttcatgccctttttgtctatgcacagaactgcgtttgttcaattggttcagatggtgatgctcatcaaggtagctagctgtaggtttggagcacacatttgatgatcccattcaagtcctcaaaaggggaaattttgaccactttatcaaagtggtgaagatgcatataaggacagctagtattcatgcagaaaatcagcatcacaattcgtaactgcatttgatcatctagtttagaaaatctgtacagcacattctttcctttattttcacatatgttgttatacgttagcacaagtttaggagtaattttagtttctcaaatctgtatttatacctcttcttctaataagaattgtgtgaatcattttgtctaaacctctttatggtatcagagcacacctcaaaactccaacgagtatttcttgtctttcttgcttctgctatggccacttcttcctctgatagttttccaatagccatcaatgccacccaacaaattactgcacgtctcacaccaaccaacttcccttcatggcatgcccaatttgagtctctcctcctcggctataacctctttggctatgtcgatggcactcatacctgcccacccctaccgacgtcaactgatgcagctgccactacatctcatcacctttggttccgtcaggataaacttgttctaagtgcaattctgacttcagtgtccccaactatgataccactcatagcaacatcccagacgtcatatcaagcctggactaaactaacaaaactgtatgctagtcgatccaggactcgtgtcatgcagctcaaagaggatctcaccctcatgcaacgtggcaatcgcagcattacagagtacctacactctgtaaaaaccattgccgatgagcttgctctcatcgatgccccattatctcaagatgacatcaccctatatgttcttcatggcttaggatcagatttttgtgacattgttgcctcgattcgagctcgagagtcttcactctcatttgaagaattacatgatttgctacttggtcatgaggcatatcttcgaaggcttgattccactgctcaatccttggtagttactgccaataccactcaacgcagggactcacgctccttaaagaatcagtcttcatcaacttatcaacaatccaagaatgactccagatcaaagtctcgacagtcgaaacaatacaagtaccctccaaggtgtcaatattatgatcaacaaggccacattgcaaaatactgtccgaaattgaaaccctctgaagccactgtgaactgcacaactactacttccagtctagacaaacgttggctcattgattctgcggcttcccataatatcacttctcaggtttcaaatttacaatttcactctgaatatgatggtactgatgaagttattattggagatggatcaggtttgcccattactcattctggttctcttactctttcatttccaaacagaaaatttcaagttgaagatactctatgtgttcctaccattaacaaaaacttgatatctgttcaccacttcacaaagcaaaacaatgttatcctggaatttcacccaacttattttcttgtgaaggatcggagaacgggggagattcttcttcaaggaccgtgtgaaaatggagtctaccctctgccctcatcgcctgctgctactccaattgcttttgtccatgaacgcacatcagtagctggttggcatcagcgccttagtcatccatcattcaaagttgtcactcgcctcattagttctttctcccttcccaccacttcatgtctttctggttctaataattgtcattcgtgtttgaccaataaagctcatcagttacccattcataaacacagtctaactagcacaacaccatttgatttactttacactgatgtatggggaccttctcccactcctagtctcaatggccacagatattatgttatttttgttgatcactttaccaaatatgtgtggttctttccattgcatcaaaaatcagatgttaaaaccatatttcctcatttctacaaaatgattgaaactcattttaacataaaaattaaaggagtttattccgataatggaggagagttcactgttcttcgaccttttttcacaacccatggcattagtcattatacgacagccccttatacaccccaacaaaatggagtgtctgagcgtcgtcatcgccatattgtggagacaggtcaaacccttctaagtcatgcctctcttccatcagaatattgggcttatgcttttgcaacagccacatatctaatcaatcgacttccatcacctgttcttcatcataaatcacctcttcaagctcttttcaagcaacaacctcggtatgaaaaattacgttcctttggatgtctctgctttcccttgatgaagccgtataacacaaacaaatttcaaaagaaatttgttccttgtatctttgttggctactctactagccaaagtgcatatctatgtcttcatctacaaagtcagcgcatatacacttccaaacacgtaacctttgatgaatctgttcaccccttcaaacaggtttccatgcaatcacccactgactcatccccaccagaaatctcttctttttcaggaccaattttgcagcttgcttccaaggagcttccaacaatcacacaggctcaaggagatatcccctctgcttcttcgactccaagtgaagatccagctcttgtgcaacctcaagaggcaccactctccacttcagatcaagtaactcttagaccttctacttctatttctcaactagaaaattcaataccatcctctccaccaccatgtccacgaaccatcatcactcgcttcttgaacaatatctttcggccaaaacaactccacaccaccaccaagcaccccttacctaaaccacccgaaccaagttgtgtaagtcaagcttttaaagatcctcactggcgcaaggctatgtcagaagaagtgacaaccctccttcaacatgggacgtgggaactggttcctcccactcctggccagaatcttgttgggtgtaaatttgtgtttcggaagaaacaaaatccagatggaacaatcagtcgatataaagctcgacttgtcgctaaaggatttcatcaacgaccaggtattgactactctcaaaccttcagccccatcgtaaagccagcaacaattaggcttcttttaaccattgctgtcatgcatggctggctccttcgtcagttagacatcaataatgcattcttgcatggtaatcttgaaagtcttcatgcatcaacctccaggatttgaagatccatctcaacctcagcatgtttgcaagctaaaaaagagtatctatggtcttaaacaagccccacgacagtggtacaaggcccttcgggatgcactcctcagctttggttttattcactcggccactgacaactctttgttcatctataagtctcatgatatcttgtgctactgccttgtttatgttgatgacataattgtcacaagcaacacactcagctttgtgaataacattataaacaagcttggctctacattctcagtcaaagatatgggctccttgcattatttcttgggaatagaagtgattccaacaccacagaggttctttctatctcaacatcagtatatacgggatctcctttcacgaacctccatggaaaatgctaaagaaacactcactccaatgtccactacagccaagcttacggttcaagataattctgaatgtgttgacaacactgagtatcgcaagatcattggtgcacttcagtatttgggactcactcgtcccgatattgcctttgcagtcaacagattatctcagttcatgtagaagccgacaacaaaccattaggtcgcagcaaaaagactactcagatatcttaaacagaccatgtttcatggtatccttttccaaaagcatgatcaattccaactcaagacctatagtgatgcggactgggcatcaaatacggacactcgtgtttcaaccactgctttcatcacattcattggtcctaatccaatctcatggtctgcacgcaagcaaagggcagtctcaagatcatctacagaagcagagtttcgggcactagctactgccacatcagaaacagtttggcttcattctcttatcaaggaacttggtctcactctcagagaagcccctcaaatgttttgtgataatattggcgccaaccatttcagtttaaatccagtccaacacacacggatgaaacacattgaaattgatctcctctttgtacgagatcttgtcaaaaagggaactattcgtgttcagcacatccataccattgatcaactcgctgatctccttacaaaatcactctcacgtcaacgctttcaactattaagatccaagattggtgttgcagatggcacctccatcttgagggggcatataaggactactagtattcatgcagaaaatcagcatcagaatttgtaactgcatttgatcagctagtttaggaaatctgtacagctcattctttcctttattttcacatatgttgttatacgttagcacaagtttaggagtaacttaagtttctcaaatctgtatttatacctcttcttctaataagaattgtgtgaatcattttgtctaaacctctttaatgcataacacacattctgtggtcatgagtctgcacaagtgcagtatgattcatcgtattggcaaatgaatcacatctacatggtcatgtgtaggtttccaatgcctccataatgagactatgttataatttcagcttctacatgttgatggacaaagtctccatcacaaaagccagggcagcaaaggatagaactggactggggggtatttggaaccctacatgtaactgaatcagttattgtcttcatagtatttttaagaattctagttgttactatcatgtaccatgggcattggctcatgtgttggtcttcagctcagatgctaggcatctaacttacaatcttaaaacaagattaactgctataccgatgcaccagaaatatcatgcctttgcttccaaatgatgggagtgctgggtttctcttttgaagtggtagattatatatcaaagatacaaatatgtagaagaaaattttcattatcacaggtaaattaattatagacatcatcatctgataatattttctaccagtgtgtctgacaaccaaaaaaaaaaaaaaaaaaatcaaaaggaatacgagtatctttgatgcattgttttctgctgatttcaaatggttcaatctagttgtacctaaggcttttatagaatggctgatttctttattaattctgtgtggattgtacttatgttgtcatcccatcttatgctacagt

SEQ ID NO: 11315 - DNA, 1344 bp, Vitis vinifera
  Intron number 6 from transcript GSVIVT01007540001 (locus G SVIVG01007540001) derived from phytozome v7.0 (chr-ID chr1 7; pos 12481393 to 12482736)
gcgccattaggagccccaacttcactttcatcacagtatccttatttttcttctgctggaaattttctgggtttctatatacataaatttgatctatttgtgaaagttgaagcgttgaactctgtttaacagtttatatcaacatgacactttcacaaatccctgttcatgtgttggattagaacatatttaaatagaatgtttaacttctaatgtcactagtcatttaggaatgatttaataatgcatgattcatacataatccttttttttttttttgataaataaagggtaaatattataagtgaacaaggatgctatacatcaaggtatatagagggttccaaaaagcacaacactagagggagtggacaaccaaaaaacaaacactctcactcttatcaagaacccacccaatctacaaaatcaataagagacaatgaacccacttctatgtgcatgctactccaagacaaaagattaccaaggaatgagtgttttaatgcttgaaccggttgctccttattgtcaaacactctttggttctctccttccaaattgtccaaaaaatgcaagggagaatcgctcctcaaagcttcttatgttttcttcctaccgaggaatcatgccactctaaaagagtgtcccttactgacgaaggaaggacccaaccaatgccaaatgaagagataaaaagttgccaaagcaaattctctatttgccccaactagcttgaatctaatacaagatcaacatcacaatgaatgagaatgtgatcaaccgattcctcatcatatttgcaaagaacacatctatttgccaaagcccatctctctcttgaatctaatagaagatcaacactttgccccaactagcttcccaagctaaaaatgacacttttaaaaagactaaggaatactagatgacgacaataggaaagggagtcgcataccttggctccagaatggaataacaagatttaactgagaagaccccctttctagaacccatccacaccactttatccttcacacccctcttcacagacttttgaattcttaagaaaaaaatcgtttacatcgtttagctcccaatcatttaaatgtctaatgaaatgacgattccaatgccccccctgacccatgtcatcccaaacatccgccacccaagcctcctttgatgcaactaaggcaaacaaggaagggaaaggcactagctaaggtttcatccccacaccactcatacataatcatactccattcttttattccttttgattcattgtttattcttcacaagagtatctcagtttcttcttcaagcagattgccattcaacttcttg

SEQ ID NO: 11316 - DNA, 6222 bp, Vitis vinifera
  Intron number 12 from transcript GSVIVT01007683001 (locus GSVIVG01007683001) derived from phytozome v7.0 (chr-ID chr 17; pos 10474583 to 10480804)
cagagctcagaagtcaatttgaaggtcagtggtatatattccatctctctctttcacttgctatgggtattttttttttcttaatgttaagcctgcactctacatgtttttgctgatggcttctgaagagtgcttctggttggcaatgactggccgctcaaacggactgatatgcccccaaaaatcggttgacattttgattttgaattttttttctttttgaatgaggaattatatcatgtatgttctattagattatatggaaaatatgtgtatacctttggaaaaagagaaaatgcagtatgttgtcattacctgtatttttatccgagcaactgatcttgagggaaacaaacaataagtttgacgaaaagagacttacgagttgtatggagagcagccatttgtattcactttcaaaaggaaacctgattcattttttctcacttttccaatgcatgctatgctccaaattctgtttgttcttttcattgttgaagaatttctgaactcctttattgatgttaatcggtacacaccatacacatatatatacacaaataactgaataagaaaaaatcaatctagcttaattctcttctaaaattaggaaactaaatcataaggaaatatcctaaatgatctctccttttttattcctaaattaaagtcctaactttggcattatttcaacactccccctcaagctggagaatatatatcatataatcccagcttgcaagttaagtcttcgaagttaggcctaggtaaagctttggtgaggatgtctgcggtttggtgcttggtaggaacatagtttaatttgaccgtctcactagtcaccttctctgtgataaagtgtctgtcaatctcaacatgcttggtcctgtcatgatgcacggggttctttgctatgcttatagcggcctgattatcacacatcatcagaattggagatgaactcgtttgtcccagttcactaagaaccctttttatccaaatcccttcatagattccctgtgcaagagctctgtactcagcttctgcactacttctggctacaactgattgcttcttactcctccaggtaacaagatttccccagacaaaagaacaatatccggaagtggaccgcctgttaatgatgtttcctgcccaatccgcatctgagtatactttagtgtcacggttctctgtctttctgaagaataggcctttccctggtgtcatttttaaatatctaagaatcctgtagactgcttccatgtgttcctcagtggggctgtgcatgaattgacttacagcactcactgcaaagccaatatctggccgagtgtgtgagagataaatcaagcgcccgacaagccgctgatatctccccctgtctaccggtgtactttctttctcgataccaaatttcttctgactatccataggagtatcaattggtttgcatccaagcataccggtctccttaagaagatcgagtatgtattttctttgagagactacgattcccttccttgatctagccacttccataccaaggaaatatttcaaatttccaaggtctttaacttcaaactcttctgacaaatacttcttcaaattctgtaactcccccatatcatttccagatagaataatatcatcgacatagactatcaatatggccaatttcccggtatgagacttcttgacaaatagagtatgatcagcctgaccttgtttgtagcccagcttcaggactgcttttgtgaatctatcaaaccaggctcgaggagattgtttaaggccgtacaaggatttttggagtttgcaaacctgattctttgccatactttcttcgaaaccaggtggtatttccatgtagacttcctcttctaggtccccatttagaaacgcattttttatgtccagttgttgcaagcaccaatcttgattgacagccaatgagagaaggatcctgatagtgttcagttttgcaacaggagcaaaagtctcctgatagtctatcccataggattgtgtaaaccctctagctaccaaacgagccttgaatctttcgactgatccatctgctttgtattttatggtgaaaatccacttgcaccccacaggcctcttcccaactggcaaatctgtgatagtctacgtcccattcttctcaagtgcatcaatctcatcttgtactgccttcttccattctgaaatttttaatgcctcttgtattgtgttgggaacctgagtatcatcaagagaagtaacaaatgctctgtaagatggtgataacccttcatacgtaacataattcccaattggatgatctgtacatctcctaacacccttcctcaatgcaattggcaaagtagaatcatcaatgctgggaattaacacctctccagccctatcctcacctatgttctcttcaggaagacttgaattggagtcaatatattggccacatgttgactgtgatccgtgctctaattcctgtcttttcctccttctgatgtaaacttgtaagttctcattagcaagttgtggggctataggttgaataggcatgggagactggatggtcacgggagaaggaacatttgtgtgctgggctggctgaactgatggcggcatgggtgtggacaactcagtgggcgcgaattgggaaggatttggtgactctgagtgaaaagaaggtacgccctcaagaaaagactcccaaacttgatgttcattcatgctctccccctgaacatgagatttgggatagaagaagacatgttcaaagaaagagacgtccatggtggtgtaaaatcttttgttggttggagaatagcatttgtaccctttttgggttggagaataccctagaaaaatgcacttatttgctcgaagagcaaatttgctacgattttgaggatacacatgaacgaatgtcgtacaaccaaatactttgagtggtaaatcagaagaggcggcatgggtgtgaggaaactgttttaagaaaagttgacgtggggattgaaaggtaagcactctggatggcatatggttaatcaaataggtagctgtgagaatagcttccccccagaaatagtttggaacattagaggaaaacataaggcaccgggcaacctccaagagatgtctattcttgcgttcggccaccccattttgttgtggggtgtcaacgcaagaacttatgtggataatgccatgattttgaagataagtactgagactactagtaaagtattcctttgcattatctgacttgaggacttgtattttggaattgaattgattttgaaccataagattgaaggtttgaaaaatgtgcccgacctctgacttttctttcataaggaaaacccatgttacccgagtatgatcatcaacgaatgtcacaaaccatcgagtgccagaaatattttttatccgggagggaccccacacatcactatgtactagagagaaaacagtcgaaggtttgtatgggatttgaggatatactgttcgagtatgctttgcaaactgacaaatttcacagtgataagatgctggatttttattgataaataatttgggaaacaattttgcaaggtaaacaaagctaggatgaccaaggcgatagtgtaacattataatctcactatctttattgaccttagaatttgacacagaattgaaagactctgacatactctgagactggacgcaacttgcttgagagacttggtttgagaattggccacatgaaaggaggtagagcccggaacacagttcagcactgccaatcatcttccccgatttcaagtcctgaaaaacacacaagtttggatagaatttagtaacacattggagatcatgagccaatttgctaatggacaaaagattacaatccaagtttggaacatggaggacagagtcaagatataagtctttagtaagttttatagaacctgtcccggcaatttttgactttgaaccatcagcaatatggacggatgaatgaccattacttggcttgtaattttgaagaatggcagcatctcctgtcatgtgatcagaagcacctgtgtctactatccacggcctcattcctcctcgattagcagtgaaggctacaccggtagtactgccactgccaacttggcttaataatttctgtagcatctccatctgctctttgttgaatggactcggctcgagaacagatgtgctctcagagttggcagccacgtgtgctctgccatctctgtcaaaccgtggctttggtttccaatcagcaggtttgccatgaagcttccagcaagtctccttataatggcctggtttcttacaataatcacaccaaggcctatcccgtttctgacgatctccaccactactattaaatgaccgagcagcaagggcagaggcatccaatgttggggcaggttgcttttttgatcccatcatcactttctttctactttcttcatgcctaacctctgaaaaagcctccctgagacttggcaggggtttaatgcccatgattcgacctctaacatcatccaattccctgtttagtcctaggaagaacttgaacaatctcttttgttccacaatttgcctgtatgttgctgcatcatccgaacatttccatgagtgagtctcaaataagtcaagttgctgccaataccttgtgagtgtgttgtaatactgagtaactgactgctctccttggcggaagtcatgtagagctgattcaacctgaaacagttctgaagtattttcagaacttgagtaagtttctttggctgcatcccatatgtcctttgcagtcccaaacagcaagaaattttcgcctatgtcattgttcatggaattgataagccatgacatgatcatgctgttttcaatcttccacttcctgaaacccggttttgtagtttctggcatgactgcttctccagtgaggtactcatcatttcctttaccgcaaatgaacagcaacacagattgtgaccactgtaaatagttatggccatttaatttgtgtcctgtgatgagaataggagaggaatcattgccaccaaggtttggaatttcagatctgccccctgattctggtgacgtgacgctggatacttgtgatgatgccattccgtattttgtcatggaccggaaaggtagaagaacacttctcaaggcacgtgcagggactggagttgagaaaaaatagccggaggacgccggaaaatctgatcagagggcccgcggaagcaaaagaaccccaaaagaggcacgtgcagggctcggattgcacaaacaggtaggaagggtggctggtcggcgtcaggcgagcctggaggaggaagcgcgtcgtcggaaagtggctcacgcgccctcacgcgccggcgcgtgagatgcagtcgccggcctgaaaaacgcgcgtgggcggcgcgtggatgggtttctggttccggtgctttgggacaaattggagatctcctccaggcgctccttgcggtgtagaaaaaaaatcgtcgccggaaagttcgccggaaaagttgccggcggtgagtgttttctgacgacgattcgactgtccggaaagcgttttctcccttggctctgagaacagggactgatgatcggaatgagagagagagagagagagagatgatcggattgagatatggccagagagatttggccggaatgagtgatggcctgaataagaggtggccagaagggattagggtttcagaaaactggctctgataccatgaagaatttctgaactcctttattgatgttaatcggtacacaccatacacatatatatacacaaataactgaataagaaaaaatcaatctagcttaattctcttctaaaattaggaaactaaatcataaggaaatatcctaaatgatctctccttttttattcctaaattaaagtcctaactttggcattatttcaacaattgtcaaacactttcatttgcagattaattttgttaggagtggaacattttgttattcatgccattggtgttcatttcatccttaagaaaaataaagggtgatagtcaaggttaaaccttttatgttgtcaaataaatattgttgttttgtactatattttccattttgttctatcagtttttatattatttaatgatgccattttttacccaacctatgtcattaaatacaggactgtacaaacat

SEQ ID NO: 11317 - DNA, 1230 bp, Vitis vinifera
  Intron number 1 from transcript GSVIVT01006449001 (locus G SVIVG01006449001) derived from phytozome v7.0 (chr-ID chrU n; pos 26074721 to 26075950)
actgctcagcagcggcggcttctgaggactcaggggtatgtgaatttgaaattttctgttggtgatattttcgtgatttttctttaaattgaattgaaatctttctgtttaatttgtgttttttaatctttaaattggtatttttgggtaatttaggcatttaaaaagctttcataaatttgatgattttcattaatggaatatacatttttctttctttacatggaataattcaaatgtggtttgggattaaattggattttgggtaattggtacatgtgcaagtttcaagaactcatggatatgccaatcttgaacctcatttgatgatgctacttagattttcatgatttaggaatttgcagttctatttaaatgcaatttggaagtttcaagaactcaaggggaatgccaatttcaaattggtttggcagtatatttatctgaaatttactgttaattgaaagatttaatttgattggcacaactctttcagttccacctcatagtcacccatttgattaccggaaagaaaggaaaaagagaaagtgcaaatatcatgaaaggtgattattttaaatgtttcacaggtagccatttaaatattttgaagcatttccttttcttgcctcccattctttccacagaccaaagaaatcttgaatgttgcttaaaatttataaatcaatttttatccgatattttgaaattatgctgtctatatgaggactttcaagttttgtaattggttgaacatgataattttcatttttacattctttgatattctatcaactctcacaatttgaacttttccacccaaaaaagcatcatttgtgcatgaaggctcggaatttgtagttggcatcattctctttttattaaaataacccgataatacaagatacctattaaatcgattgtaaggatgagataaaattataattctgttctagtatatatctgcattgaattccatggtcaaataccagttaaaatttcacctagttcatgagctggtttagattatcgctaacttttgactaagtccttggcatgtaaggaatttctttcttgaatatggcttagctacatgggttactactactattttttttatcctttgtggaatgtcaaataaatgtactcacttgttctcttgttagagattggatttttgtgctttgattgctaatgcataccttaactcccaagtagcttgttttcagg

SEQ ID NO: 11318 - DNA, 1602 bp, Vitis vinifera
  Intron number 3 from transcript GSVIVT01033172001 (locus G SVIVG01033172001) derived from phytozome v7.0 (chr-ID chr4 ; pos 8909277 to 8910878 reverse strand)
agtttcgtgtttttggagttataaggaggtataacaattttgaaatcttcctttaaaatatttgattaactagcattcagttacttctcagatttctgtttgctgtttagatgcttttctcagttacttctcagatttttgtttgctgtttagatgcttatctcttaatacattccattttgatgctagttctgggatggttttttacttctatgcatgcaacataatgactggagtttgcatctgagaaagttgagctttgtttgtttttcccttttttcctctttagaagttttaaaaatcagagcacggggaaaatgtattccccatcttcctgtatgttgtgagactttcttgtttagttataccagtaacataataatggtccaactaatgaaaatgtttgttgtgctggaattatcttgacatgttattattgcctttacaactaggactttggtgcctccttggcagttccaaaccccttaaaaagttattaatatacatccttctttggtagcttaggatctttttaaaggtaaacacttaatatactgttttattgcttagcaggaagagacgggcagaagctacatttggcattagttttgtcttttttaaaatggaagtctaaaatttcttgtatgaagaagaaatagaggggaaaagactgaaatcatagataagaagggataaggtcaaacgagaacaaggacacaggcatttgcaaattcagaatttctttggagttagctttccatcttccacagggtgattgtcacttgaataagccactgaatttttttctatctgcacatttgtgcaagaaggctcaaattgacccatgatccctcctagatcttatatgtgcaatattttgaccctttggattcaaaattggattcattagatagagtgtattgcacttctaatgtgaaatatgatgctggtgctggtacttaaggtctgagcataaatatgtcagactggcttgacacatggatcccagaggacaattttgggaattagttttaagttacaagaatagtgatagaaccaatagaagttctgatattttttaagaagcatacatgaatgagctggaaccaagacatgtcatcataggaagacttttaggttccaaattgtgcaggatttgacttgtagcatcataatcgtattatgaaactatttgtctatggcagtgatatcatttcccactttccttaccgcctttggtgctgggaggggcaatcattgtattcaatgatgcatatggttgagatgtgttaacatgtccaatacatggcttgaatccttgtttataaagttttacagttacatgatttactactacatttttgcttggtttctccactttacttaacacctctggtgctacccctggaaggggcaatcattgtatagaatgatgccagttgtttaaatatgtctcacttgtccaataaatgattaagtttttgtttaaggtttggagtaacaccattgagtccattatgcaggcaatttttatttcagaatttcttaattttctgaaatgttttatgtgcagtgtctgggttgcacgcagaccaccaggct

SEQ ID NO: 11319 - DNA, 7052 bp, Vitis vinifera
  Intron number 2 from transcript GSVIVT01022319001 (locus G SVIVG01022319001) derived from phytozome v7.0 (chr-ID chr7 ; pos 18444125 to 18451176)
ctctttatctggttcgcctcacgcttatttggtcatcttttttgcttcgaattggtcgttcatttaccgtttcatggttttgaactttgattatgttgtgcgtgtggacgctttctaccctggcaagggttggcatggagaagggggaagttccaggtttaattccatgtcatagcaaaaagaaaaagggaaaaaatattacctacagaaaaataaaaataaataaaaaaacctagtttttaatcattaggaattatttctctaggatattgtttgtagattatgaaagctaaattggtatgctgacagtttgagtttggttcgcacattggagtgtctgacacctcaaatgtgcattggatgagccaattattgagtttgaattatggtgatttcaagaatgtaagtttaagagttgaaaagatccaaaaggactttttgtgggggcgggagctcttaaggaaaaacactatcagtcaattggtctacaatttgcaaacccaagaaaaaaatgggaagatcaacaaccttccatgtgttattttttattagtgcactcatttcttccatcattgcttccatcattttttcctatgggaagatcaacaacctcccatgtgttatttttttattagtgcactcatttcttccatcagtgctttcctctggttgtcatttctaagtgcctcatggacagtttttggtgtctctatggaatttagttttgagacaaaggcttggtaagaaggtgatagtttttcaagggaaacaaaatggctcatggggtgttgagtacattgtcctttttctttcctaagggcaataggcaaatcaagatcattaaggctaaggaaatcattgccctttttttgtgcatcaagatcaatagaattagtacctttttctggttaaatgactgggacacgtggagtttctggggccagttgcttcctccttgaatagaccttgagtggcacttgaagatcctccccctctaaactttgcatataggattcaaatctgggtagctcagggacagcttctggtgcagtttctgaggcattctttagggcaattgcttgggtatttcctgaagtaacagctatagaaaaatctggcattactggtgcagtgtttgaggcattttctggggctttttttttggtattttctggagtgactgctatggaaaaatctgatcccttaatttggacagttttggtggagttctctaggataggaagagtaggtaggctaggaaagaattccttatcttctgcaaaaggctccccctgaagataaggattagaaaaaaaaaggttgtttttcattgaatgatacatccatagtgacaaaaaaccttttagaaacacttataactcctttttgttggagaataaccaacaaagatacatttaagggctcttgggtcaagtttagttctttgatgagcatagatatgtacaaaggccacacacccaaaaatccttggggaaaggtggttgaaaccatcaaattttggaaaaaatctagaaagtgtttcaatagagctagaatagttaagaatccaagagcgtagcctatttatgaagtatgcagtagttaggacaacttctccccaaaatgactttggaacattcatttgaaaaatcaaggctatagtaatcttcaatagatgcctatttttacatttggctatcccattttgttggggagtatcattacaagatgaataatgtatgattccttctttttggagataaggtgtaaggtattgattaaaatactattttctattgtctgaccttattcctaagaccttggcataaaattgagtttttagcatgttatgaaaaatgggaagattgtgttaacctcaattttttgtttcatgagatatacccaagtaaatcaagtacaatcatcaacaaacaaaacaaaccaacttactccagaaatgctatgaatagtaggtccccaaacatccgtatgaatcaaactaaatggaacaaaacgtttcttattacttaaaggaaaagacactcgtgatgtttagcatactcacaaacatcacaatggaagttttgaacatttagtttttcaaacatattaggaactatttttttcaacaataaagaaggtggatgaccaagacgaaaatgggataaccaaacttgttcctcggttggagtatgatgttttgataaatacgtatgaggagtaggacatgttgtgccactttcagcttcaaggagaaacagtcccccttcttctgtagcatgcccaatcactttccctgtaagaaggtcatgaaaagaatattcagattgtgtaaagttgaccgagcaatttaggtccttagtaatttgaggaatagacaacaaatttactgatagttttggaacatgtaagacatttcttaatgttagagaagatgttaagaagacatctcctgaaccagccacagttactaaggtaccatcaacaattttgatcttttgatttcccgtgcatggaatgtaattagaaaagacttttgaagaattggtcatatggtctgaagcccccgaatcaacgattcaacggctggaaaactgaattttagaagcactcaaggagaaggaatacttacttatttgagcaaaatgactatatccctcaggtttttctagcttggaattgaatcttttaagtttgtcaatttcctccatgttgagctccatttcttggccaaagctttcttcttgctgttttcctccaatttcagcaagattggcttgtgatttatagccagaattaacccctttacccccactccccttgaagaaatttaggggcttgccatggagcttccggcatgtctcccttgtgtggctatttttcttgcaatagctgcaccataaggagtctttctcacttgttttcttcccttcatttcaaccagagtttgcagcattagccacaacacttccttcatttccacttggttttgagatggctaaagaagatccatccatgctgtttcccttttctaacattatatttctcctttctttttctcctctaattattgcaaaggctttgtttagagatggcagtggctctttcccaagaatttggacttgtacttgatccaattccacattcaaacctgccaagaaatcatacaccctctcttgttcaatgaactcttgatgcattgttgcatctatgctgcacttcattcttaaattctgatattgatcaagttcaagccaaagacttctaataacattgtagtactcagttacaaaaagaataccttgtttggtgttgtgaatccttatctttagttcatacatttgggttgcatcccttaccttaaaataggtatgacacacggactcccaaatttccttggctgttgagaggaacatgcatgtacggcttatctctggttgcatagagttccaaagccatgacatgatttgagagttttcttcatcccacacgacaaaccttggatcatccttactcataacaggtccaatgagatggcttaacttccctttgcccttaatacaagtctttaccaactgtgaccattctaagtaatttcccccattgagtttgaaggatcctactatattctggaatttagcaagtggtgttgattgttggattgtggttgggctcgatattgaagaatcaacctttgaagtgtttgacattatgatgggaagaagggatatgaaggtcaaaaaaataggggcaatgaaggcctaatttgaagcaacgtttctaacagaaggtcaaaaactaatgggatatgatttgaaaaaaaatcctgacaatcaaggcatgggacattggaatgctagtgattaggcaaagaaaattctagctctgataccatgttctcattcagatctagaacctttttgtgaaatgctttcttctaccttttttgtatagacatattaatatatacaaaataattgtataaaaatagcctaggaaataatgcctacgatcatgctatcaaagataaataagataagagaagaatgctaagaaaggaaaaaatcctaggagattctatgtgcaactatacaattattacagctcatatgggctgaaaaaatatttaataatctgccacacaatttggcagaatttccaaccgggagattttccaacaatatatgtatatatatatatatatatatatatatatatatatgtatgtatgtatatatgtatgtatctattgataaccaaggaatctttatggtcaagctccttgtactctccatggaatatactctttgtgtactttagtatgttttctttgtatctctttctatgtattttcattcttatatatatatatgggttttgtataagattaccaatctataccacttgtggtggaggcatgtgaagtagattctgaagagatgtttaatcaatactacctatgaggaatattcggcgtgggatggagtggaagagcgattccgtaaaagattggccatgtggaagagacaatacttatgaaagggggggagagcaactctaatccaaaacactttgtcgaatctccctatttactttatgtccttgctgaggttaccaagttcagttagacgaagactagagcaaatccaaagggacttcctttggggtggtggcaacttggagcgaaaaccacacttagtaagatgaaaggtggtgtgcttaaggtatactccctgtatgctttgtggcgattagccttttctaatgcaattcttgtttacttatcaaaaaaaaaaaaaaaaaaggtggtgtgcttaagtaaaaagaaaaggggattgggggtcaaatgtctttccattctcaataaggctctcctttccaaatggaattggcgattcgcaaatgagagagaggctttgtggaatcaagtgattagaagaaagtatggggaagatagagggggtggagctctcgggaagtgagagaggcacatggtgtggggctttggaaaggaataaggatggattgggagttggtgggcgctcgaatctcttttagagttggcaatgggaggagggtgagcttttggagggatagatggtgtggggactccccctgtgtgagtcttttccttccctctttgctttgtctactgaaaaggaagcttgggtggcggatgtttgggatcccttggccgaggggggttggggggctggagcccctatttttcaagagctctaaatgattgggaggtggaggaggcggaaagatttttggagcatcttcatgggaagagagtgcttggagatgtagaggatatggtggtttggaccgaaacaaagagtggcaaatttttggtaaagtttctctaccttgctctagaagcggattgccctgttttgtttccttctagttgtatatggaatgggtgggtacaacccaaaatcagtttctttgcgtgggaggttgcatggggtaaaactttaaccctagaccttgttcagaaaagaggatggtccttggcaaatagatgctttatgtgttttgagaatgaggagaccatagatcatttgcttcttcactgctaaaaaacaagggtcttatgggagttactctttaccttggttggggtgtcttgggtgttgccctcttcagttagagagactcttcttaactgacatggttcatttgtgggcaaaaagcgtaaaaaggtgtggaaagctgctcttcttcatatattttggacggtgtggaagacgagaaatagattgacatttaaggatgacgagttgtcaatccaaagattgaaatattcctttctttggtctgaggctaagttgtttatagttgaatgccctctaactatggttaattttattgattggttgggatccttttaaggttgtttttgggctaggtgcttttttgggtctctttctttttctttagcctttttggtggtgggtgtttaggtttgtataccttgcatagttctgtataccttgagtcgcttttttggcgtctctttttaatgaattatctttacctatcaaaaaaaaaaatactacttgtgaggattgatattgttgctagaagagacatgaggtagtgcaactagtggatttgaaatttagttttgggaagaaaaaaaaaatgtcttgatgccatttgtgatatcatactgtgtatgtccaaccatcagttgattgtagcattgtccttgggcccaagttgaaagctatactatatgtacatagttgctgttctcttttcagtctttaaaacaaatattttcagtaatttctgatacaaaatggtttttgtatcttcacacaaccaaacattgtgatgtaatttggttaggtctggttcacgggtaattcatgcgcttgtgttgactgctgacctgagaaacttaggtgtgaaactaaccaagagttctctgttgatcatatgtcatcaggttaatgggatcattatatctggtagaattgtttcaagtgtaatgagtcaattccactttagtgtaagcatatttcattgaagttctaatacatgaactggatgtagcttagattttgggttgtaccacatctatccaccattctttcccttctctggctttaaatattgtttccttattttacctctccttttaacctttaattataatttttccagagtgcaggcaaattgattaatgaattggaactgattcatttacttcagataccattccattacatgaatgactttcattaaagtggtggccttctaattattggggatgccaattactcgttggacctactaatggttggagttatagttctgttcacacgcatacactgctgatacagtgatacgtgatgtcactccttacagaaatactttaacattgtccaatgcattttagtctggtgtactgatctgatattgattcagttgaggttatgtattgacacagctctcactttccaaaagttctatttaataatttttcgatttttaattgcttcatgtaggctggagagaagcgcaaagaagaagag

SEQ ID NO: 11320 - DNA, 4107 bp, Vitis vinifera
  Intron number 7 from transcript GSVIVT01022339001 (locus G SVIVG01022339001) derived from phytozome v7.0 (chr-ID chr7 ; pos 18640892 to 18644998 reverse strand)
tggactgaaaattggcctgggtattgttatagttaactttcaatctttaaattattgtaatctttatgaatttgcatttgaatattgcatggtagacatctattcgatacttcttttttgtttggtataaggttggggttaaaatgcttctatatgttgcttaataccacattcacatgaaaagaaagtcaaagcattaggcaaaaaaggaaaaagataatgaaaaatttatgatataaatttaataatctagttatctatataagaaaatgattcttgttgagtacccatgcaaatttagtgttggtaaagaataaatgtcatatactattttgtatgcacacaattttttagttttttataaaaaatttaattgaagaaacagaaaaataaaaggaaggatgagctattcctaaaactaattaaaagaaaaatgatgtaaaaattgaaaagcaaaatagccaactaggaacctaatagagcatcctagagaccacatcaacaaaaatatcttagggagtaataatattatttcctaggaagctttctaccatagaggctatgcaattagccaaatggttagttgtcaaattattggatcttggaatctaggtgaaaaaagctttattctctcaccatatttataatcttgcaaattgtctagtccaaactccatggccatatctttctcctagaaacctaagaaagcaaaatagccaaacctccttttgacagtccttgtccctatagatgttccctttgtcaatccttctaatagagctaaaatctcattttcaatggctagtctagtcttatcatagtcggctaaggaaagcttttatgacattgattaacttatccttaaagacacctctaattcccatattgtttgcagttatctaatgaaaaaaggtgtccttatttgataaaaaaaaatgaaaaaaaggataaggggtagttaagctatcagttgacctaaaagtttaaattattagctaataagctaacaatgtatatcaagctcatttgagttttgccttaataccatattgggctttaaccctaatacttagcttcataggtagccttctttacgctaacatgtgaactcaataaattaggggaaataaacatgtgttgtaaggtccaaactcatgacctcccattaaacaagtctctaatatcatgttaagttataaatagacctagaagcttagaaacttaagcttctagctaattgcttcatagtgtgtaacaagctgatttagactttagcccttatagggttaccattttgctctaactcattctctttccttataatctcacacactttcctcaaatctaagattgcattcatgagggtgtacacaaatgtcttcataacaatttctaaaagaagtgaggtagtgaattgaatcccaagaatatgcagacctcacttatccttcaagatcccatcatttctcctcgatcataaaactagaagatattaaggaacccattttgcatgtgccaaaacctgtaaagcctataaccattaattggggtatgagaactcaaatcttgacattctagtcctagaagatctaggacatgcttcctctattgttagatttatcaattccaagaaagtactttaggatatcacctaaatgcttcaacttaaactccttagccatatgaaacttagatgccacattactaccaatgataactatatcatccacataaactgtaaagcaatgactatgtcctttgcatgcttaatgaagagagtatgatcaatctggctctacagagaactatagttttgcattacttgggtgaatttttcaaatcgcgctcttggagattgctttaggctatgtaaggaagtcttaggtttacatgcttcacctttagtagaggagatgcaaatcctaggaagacatctacatagacttcttttcaaagacgcatggagaagccttcgatatgtttactagcaataagaaaacataatattataaatacatacgtatatatttactataatgcattgacatataaaaaaacttttaatagtaatgtttttaaaataatcctcatttcaatgttacatttttaaaagattagagattttatcttgcaaaagttgagagaatactttttatcttgaaaaaatttagagagatttagaattagtcatgtaaaatattagacttatgcaatttggattaaaaatatttatattttattgattaaaaataatgattaagaagatattcttacaccctatttgggtgagcttttcaaatgctaaaagtagcattttaagctcaaatacaatttttagcagtgtttccatagaactttcaaccataggctacacacttccaaacatgatttatttgtgtttcgaataaccaaggacacccatgcttttcttcaaattgatttgaaaagtaaattttttaaaattcttaaaaatgtcataattattcttattcataaaaaacatttttaaaaatatagtttttaaactacaattcaatcgtattggggtagtgattacttttacttctacgtcttttaccattaaatactatcccaaataaggttttaatcttctttacaacctttgaatttgataaatagttattaatatttatataaatcaaataaaatcaaatgaataattacaaaactatttttaagtaatttatctttatgtgctagagtgcgactaattaaatgtataaatgcccctaatttgtaaaaaaaaaaaaaaaaaactaaccagtttatataactgttcttcatttactacccaagaaattaaagtatgtatttagtgcatgaatttacactatttaatatatggaaactcttatttaaaaatttgattatttcatatgtcattatgtcaaggaaatcccatctccatctaggggcttcaaggatacccattctccattttgaaagaatgaatttccttgaaattaggtggcacccacatgtttcctgattccatttccaaaaataaacattagaatataaaaaaggggaatgacttcctttcatttcattcctcaggaataggttaaacgtgccttgagggtaatggttcttgataatcaatgaggtaacccttagtcactagtttggtcttaaggctttttgtgggattcattactttgtgtttcatagtagacaccccttcaaatccaactgtcttcttcacttgttgcctcttgcatcctcccttgccccatggatctttcctacttttcaagttcttgccaaatgtgaggtaccaactaaggtgaaagagacatttgttctcttgtaatctatgttgaatataatatttgaactagaagatatgctttaatgctataggatcaagttctgcattgaccattgtaaaccaaaaaaaaaaaaagaaaaaaaaaaaaactaacaaaaaacactgttggggtatttgaaacaaatgggaaaaacatagaggactctcttggggccataagattcaattcccatgaaggcattcaattgagaaggtaagctactataagaactgcatcaccccaacatgtctccaaaaacctgcatagagaacatcaatgtcttagtaatgtctacctaatgatggttttgttcctcttaccatcattcatttcattgatagataattccatgttcaataaaatacaaaaaaactgccatttgtctattctccaccgctataaggcctaagcactttttggcattatgaatttaatcgtggttcttgtgatcttgtccacatccaacaaagtcttgcatcttaaggattatatatatatatatacacatcaactttcatactgttttgtggattttattttcaaaccaaagctgtttattttctttctttatccaatattttttttttctctctatttgtgcacaaaaggctcttgaatacatccaatgaatatgagcccattatgttatttcctttttggcctcatatagtaaaaacaagcttagctggttatgctatctcctttttagccgcataaagttaccacttcatctttttcaggtttaaaacatttggggcaccggatcctcaccgac

SEQ ID NO: 11321 - DNA, 11815 bp, Vitis vinifera
  Intron number 3 from transcript GSVIVT01020997001 (locus G SVIVG01020997001) derived from phytozome v7.0 (chr-ID chr5 ; pos 15668683 to 15680497 reverse strand)
cttggaactcttcaacaaaactgaggtctgcccctgtaagcttttctaagttatgatgttgccaagaaattgtgtgtttctttatttctatcggctggtcgagtatctttcctttctttcttaaattattttatagcacaacgtgttatatcaaattttggattaatcagtggatttgcatgtcaggctcaaagatcaatctagaaaaaagagattacctagttgggtgggatcttatgtgtaaatcaaaggggagatgaagggtttagggggaatctccttgaggaataaagcccttcttgaaaattgactctggaggtttcatagagagagtaatgctttttgcatgggatcatcctaagtatttatgtggttgcatcattgtccttggagaatcatttctcaagttttcaataatttctcgaatatcacttggtacttggtggaagatggcacaaaaatttgcctatggatggtggttggagagagtcctctcaagtttcaatttccaaatctattctgagtcagaaggacaattaatatgcttattttctttgttgtagatcagtactatctgggaatttcaattttcatttaaatctctctgatttgaaggttaaggaatagaatagactcctctcttcccttggtcatgtgtacttatcacttccctggattggaaaagtgcttgcttctcatacagatcaatgaagaaagttatgattggttggtctccctctttaataggttcagtaaaatttaacagttatggatgtttcttggataaccgtggttagatgggtattggagacataattagacatcactctcctaaagtgttaaaagccctctctaagcaattgggtgtgagttggttattgagataaatattttggcattgcctactgttatatcttgggtgattaataaggaaagaggtctagggaagtttcacaatttaatgtgcaaaatcatagatattgtcaatgagttaggttgttccctttcttgggattcccattcagcaaaccaagttgcaacccaattatctagacaagccgctaagcatttgacctcttttgttggagactttcttcccccttgagtgtgctatatttctcttcattgtatcttccctttttttttaaaaaaaaaaaacttgcaagactggactagtttttgtggggcttgacgcttagttaccttataacctttttgtatatccatgaaggattgttcatccttcttgtattcatctttttagataaacgaagatggttgtttctgtttacaaaaaaagtctaaagtcttccagtttcactcagaaattgatttttttcctgcttgtatgtaccattgatatgctcattgttgttgttggtttttttcttttcttaggcaagaatatgctcattgttgtgattgtaattattgttttctcaagtaggaatcataaattatgaaatttttattactactttgtatccaaaagctatatccaacttagaccaataaactaggatcccatgcctcttacaaagcctgatgctcctgaaaaatgcaacttgtctttaaataaatctgatactgagctcctggaaaattcataaacacaataatttcatatagatgtaaggctaactataaaagcctgggcaggatccaatgcatacctaatatatggtggaagttgaattaaatggaggcatagtggcttgtggcaagaggtggttaagtgtttctacttctatagaagatatgttggttggagaactcttagaaagtggaaacagtgaaacattgtacagtatcaaagatcacacaaggctaccaagaagggattttgaaatttttttattcgggaggagattcctatctatctaccaatggctattagagagataaatcaagtaaagaccgaatttgtgcaacacctatgatatataacatcagctggtatgacttgttttatgctccatgggatgaccttcacaagagcgcccccgaactctgtattcttccaattcctttcttataatcatgctctatatcagtttatgtaaccattcaagggattattcatctaaaattttatatttcttcgcttgatatattgggatgtgtggtagagtaactagagttatgtataatgtgtaaattaaatttataaataatgtcagtaggatcactacactcaaacttttcctatgaaggtcatttatagacgatgtttttagtcagtcaaccagattaggtgctggacagagttattttttatatcagaaacagagatgaatttttattagtaaaacaaagagagaaggatgagagatcctgctcacaaaattcaaacctgatcaaagtaagagtagacttctccaccatatgaggataactaaactcataggcatatacaaaataacttgcaagctgaaatcaactcctctcaatgttacccactccttttgaattaaaaatcgaaagccaactcagttgaataacattaagtggaactcccctaaaagcaatggaacaagaggccaaagggaggagtagaaatgaagtagatcccacaacgtctcttctattctccacttcttgaaaatcctagcagttctctcttgccacataatccaaagaatagtgaggcatgcaatttgacaaagtatcttgcctcttattgaattccccaatcctctaaaagagataatcatcatatcttcgatactcttggacatcacctaaactatattggttaaactgaagagcttatgccaaagccccaaagttaaaggacaatgtagaaaaagatggtcaattgattctccccttcctttgcataaaatgcaccaatgaggactaagggatttgtagggtcttctcacatgtagccagtcattggtatttaccttcttgtgcactactaaccaagcaaaagtcttgacgtttgaaggagcttttaatttccaagcaaaattggccggatggaaatggattggatttgaggaattggacaagaccaaaaagaaggattttattgagaataaaccagaggaggacaaagaccatgcccttatacagatcctaggaacaccttgctgattcctaatgatgctcatacatggttttgatttcccttaataaaattctggaaacctctcccgttttcttttaaatgttcccttcaaaatcttcctagcagtccaaattctttgtacaaagccatagctgtatttggcgcacttggtacaacttacaagtatagggtcttggtctccacaggtgttaggttcatttaatatctagtatgtgcagtccacgagaatgagagacttaaggtaacttgcaaagatgttgaacttgttcttttcctttattggatgcatccttatttaaacccttgttatgtcatggaatcaattggagaagtgatgggagagagtgagcgagagagcgattgcgaagagagagaacatagatcagagaagtagaggagactgaaggggcgtagattcggagtggaatcgaaggtgtttgagatcgaagtagagagaaatggaagacctcaagctattatagtggagagaaagagaggaatctcttcctaggtccggttaggactaacgagcctggggattttcctgaaaagcttgaaccaatgcattaaagaagagaaagctcgaaaatgggaaaggggctggaaggaaaatgggagatcttactccctagtgcaagatgagaatagggtggggtgtttccccaggttaggtgttatggacctggagatgaagatgtacagtatattcatcccgaaaggtagaggagaaaggggagggggggttggttctctatggtggagatgttacggaaaatgggagtagtcactggaaggaaggaaagcaagcaggaagagctggccccggtgaaacctattctagaaaggtcttatgcggaagtggtgaagatgccgaggagcaaaggcaaaaatttagtcatggtgaaggtaagagaggaggaaattagcagaaatttgagtaaattggaacactgcctcattggatgttggaaccctagctcagcaagaggagaagatttggaaaagttggggattttaatggcaaaagcttgggggctgaaaggtaaactagggttggcaaggatggaaaagggcaaggtgctattggaatttgaatctttggtcgaagctaagcgagttcttagttctgggaagagatcgcttgaagggattcaatcgtgcttggaaagttggagccctaagactgggtgtttggatgaaggtgagaaaagaagtgaggcttgggtgaaaattgtagggttaccaatctccttatgggacccgatcattttgagaagggtggggaaggagtgtggtggcttcttagcacttgacccccagacggagaaattggaggagctacagtgggcccgcattttggtgaagacgaacggcaaagaactacctaatgtgctgaagatctggatcgaagaggtctgttactccctttttctttggtgggagatcaggccgtcattgagaaaggcctcgtttgacagtcgagggaaggcttgttgctcaagaggcgaggtcgggggtgattctattgcacgcgttggcccgcacatggtggaagaggaagaagacgcgaggctcgaggttttgcaatagtcagcagaaaggacgggtaggcaggtgagtggaccggggcgtaaagaggacccaagttggagccaagttgggtcaggggcccgacccttaaatggtcttaatttggtgagcgagctttccataccaggcccagttgtggttccaaaagactttaagttggctggtgggctctctttgtctggcccactagcggacttaaaatcaaaagggcttgcagtggttgaagctgggccgtcgtcttcaaaggatgagtggtgggctggcgaagaggagaatactttgtatctcgggttagacgtcttggaaggggattcaagcccaggcccttctcagatccacctagaggacagagcccaatctgataaggcccatccttcggcctggtctagccttagaaactggagcaattcagaataagagtttcttaaactctgggatatgaaagttatgaggaagcagcaagtagaggatcagcaaacaacgacagatcttgccttagttgaagaggctatgaggtatgggaatgttttggtttcttgaggaaaaagggattttgggtcatctccttctctttctttttcttttggtcggactccggtgggggagtattacgaccattttggggcattaagggaggaagttcagggagagagtccgttgcgtatgattactgcagatgggattacagaggatgcaaccactgcctgttagggtctgatagaggtgaatattggcagcaataagaaaagaggaatggagttgtgctcagcccaatccgagtcacaagaaattaggggttgggaggagaatagatgggaggaaagcagcttggcaagattcagtcactttctgggtttctcgacagaggggttggaaaaggatattctagatttctggtcaaaattagaaaaaaaaaaggagagatttcgtagtaaaggtttattggagaaatcaaaatttgaaagggagttaaagagactagagtgctcaattaactatgagggagggaataagcagaaaggccccttgcagggcagagggtgtcaactttcggaagtccaatgaagctcaaattgttgagttggaatgtgcgtggagcaaacgacagctcccaaaggaaaataataaaggccattataagaaaatagaagatggatttattttgtattcaggaaatggaaattcaaacaaagaccgagggtgtggtgaggagtttgggaattgggagatttttagattggagggctttggatgcttctggctcagtgggaggaattttgatatgttgggacaaaaggacattggaaattcttgatttggaggtgggtcaattttcaatctcttgtagatttaggaaagtggaagatgggtttgtctgagtgttcatgggagttcatggtctgttcactagagaggatagggaatgcttgtgggaagagctaggggcgattagaggaatttgggaagaaccctggtgtttagggggtgatttcaatatcattttatttcaaagggaaaggagtaggcaagggaggttaacaacagcgatgagaagatttgctcagataattgatgaattagggttagttgatttacctttgcaagggggtttgttcacttggaacgagggtcaaattggatagatttctcgtgactcaaaattggcttgatcatcagaacaggttgcctaggcctacctcagatcacttccctattttgctagagggcggtggcttaagaagaggaccctcccctttcaaatttgaaaatatgtggctcaaagtagaaggcttcaaggatctcctacggagctggtggcaagggactgttgtaagaggtaaggccagttttagtttggctgcaaagttgaaggagcttaaacaaaaaattaaatcttggaatagggatgtttttgggaggctggaatgcaataaaaatttagctcttcaacaagtggagttctgggacctggtggaaagcgagagaaacttgttagaggaggaaacaaaattaaaaaatgaagcaaaggaaaattataaaaagtgggttttattggaagaagtacattggagacaactttcaagggaattatggttaagggaaggggataagaacacaattttttttccactgaatgacaaatgcccaccgtagaaataattctttggataaaattaagataaatggggtgtggttgacagaggagcaagacgtgagggaaggggtagctaacgcctatcatcagatgctgtcagaaaatgcagaatggaaagttgatattggggggctgcagttagatcacctgagtcttcaagaaactgagaatctggagcttcctttttctgaggaagaagtctgctctgctttgatggaaatgaatggcgataaagctccaggcccggatggcttcacagtggctttttggcaagactgttgggactttgtgaaggaggaggtcatggaaatgtttaaggattttcatgaacaaagctcttttctcaagagccttaataccacttttctggtgctaatcccaaagaaaggaggggctgaggaccttggggattttagacccataagcttgttaggggggctgtataaattgttggctaaggtgttggctaataggcttaagaaagtgataggaaaagtggtttcctcaaatcagaatgcttttgtgatgggtagaaagattttggatgcctctctaattgcaaacgaggtgattgactcctggcgaaaaagaaaagaaaaagggttaatctgtaaactggattcttatgacaacatcaactgatagtttttaatgaaggttatgcaaaagatagggtttgggttaaagtggatgggatggatgtggagatgcatctctatagctaaattttctgtcttggtaaatggggtgccggctggtttcttttcgagtaccaaggggctgcgacaaggagacccgctatctccttacctttttgttatgggaatggaagtgttgagtgttctcataagaagggctattgaagagggctttctttcagggtgcagaatccggggaagaaaagggacggaaatgaatatttctcatctgttctttgttgatgatacatttttttttttttgtgaggcaaagaaagagcatttaactcacttgagttggaccttgttttggtttgaagttgggtcaggtttaagaatcaatttggccaaaagtgaaatcattccagttggtgaggtggaagaggttgatgttttggcagtggagttagggtgcagggtggggtctttgccctcatcttacttgggactgcctttaggggctcctaacaagtctctctctgcgtgcgatggggtggaagagagagtgcggaggagactagcgctttggaaatgtaatatatttccaaaggcgggaaaattactctcataaagagtacgatggctagtatgcccatatatcagatgtctctttttcaaatgcccaaggtagtagcaagaagattagaaaaattacgaagagatttcctttgggaaggaggaaatttggagaggaaagcccactagttaattgggaggtggtatgtgcagataaaaagaagggcgggctaggcttaaggaagctagctcttttgaataaggccttgcttggcaaatggatatggagatttgcatgtgacaaggaaaacctttggaagaaggtgattttggtgaagtatgggcaagagggctttggttggaggacaaatgaggctaattggacgtttggagtgggggtttggaaggagattttgaaggaaatagattggtgttgggaaaatataatgttcacggttggtaatggtactaaaattagattttggactgatcattggtgtggccttgcagcactgtcccaaagttttccccaattatttgctttggctgtccataggaatgctacagtggaggaagtttgggaccagaattttggttaggggggatggaatctaagattctttagagcttttaatgattgggagttgggtttggtaggaaatttgcttactgtcttgaggggatataggctaactttggaggatgatccagtttcttggaagggtggaagaaataggcagtttggtgttaaggaagcatttagattgctgattacacccaatgacatctccttcccgaagaattacatttgggtggatagggtcccaaccaaagttgcttttttgtttgggaggctatgtgggggaaggttcttatcctagatagactccaaaaaagtgggtggtagctccctaaccgttgctttttgtgtggttgtgaagaagaaactgtaaatcatatacttatacattgtatagtggtcagagttctttgggacattgtccttgtcttgtttggctttcagtaggtcttcctagaaatagtaaaagaggtgttaattagctagaggggcccttttgtggggaaaaaaaggaaaaagatttggaaatctattctgttgtgcattttttggacggtttggaaggaaatgaataggctagcttttagggagggttctttagcagtacagaaactcaaaaattcttttgtatgtgatttgtggagttgggctagattgtatattggagaggagttgttttctcttataggctttttggagtggttagcttccacttaagggctagtgaggttttttggtttcttagcttgctctgtgaggtttaagctgcattgtatacttcctgtatgctttgtggttgtttgcctattgttaatataatccttgtttatttatcaaaaaaaaaaaacccttgttatgtcatggctgacatgggcaattcacataatttgaagtgttcatttgacttggagcatgcaaagagccattaggttcagaagcttcaaccattaacagcttcctcccaaaaaatcacttttcaaccacttgctctatttgttgagggaggacatcatgcaacccatctacttgaggtttgcaatccctacattaagcacattcattcatttttatctattgaactcaacctacttgtttgatttttacaactttttccctctttttttgctacatggagttaaatctagaactctccttattctctgcccagtccctgtaaattgggccttatgaccatgaaccacatgttgatttcttgttccttctttgtctcacatttctctcttgtttctattgctttgatacattttacatatggcttttgcctctgagtagatttatgataaaagtacttaaaatttttcaagctatccttattgtctcaacctgtcaatttgccatctgctggtcctgttttttattttttgttttttcttttttaatagaaactaactattcattgatgtcaattgtagatacaagtgcctcctatttattctataaaatctcaattcttagaaactagggcttagacaattcaaaaattgtgaaaagaaattactttctagccggcacatgacaaaagaagactaactagtcttaccttgatctaattggtcaattagaaaatgtttatatccaggttttttccctgtagaaaaatgctttgcatcatattcttatttctttcttttttttccttggcctttttcacttcctcatactccatttgctttcatttttctattggggaactgatggggagtgggtggccaagggtgtggttttgttgtttatgattttcggctcagaagttgatttcgatgacagttttctggtcaaaagtatgcatttacaaatatgttgaataattttaaagctgatgaaggaaattgttaaatgatctataaattgctcaggaacaaacttttgcccttgtattccttccaaagcccttaggccggagtggtgtatactatgtaggggggttggagagacagagtgaccacctatttctacattgtctgttcactttggggttgtggcacagactttttttacaggcagggatggtgtgggttcagcctaggagtttcagtgatatgatgtcaatttcttatatgggttttgggaactccactagaggcgagatacttaggaagaatgcttgtctcactttgatttggatggtgtggtgagagagaaatgttaggatctttgaggacaaatggagaacgtcggagactttatgggattcatgtcatttctttacttctctgtgggcctcttgtattgaagaatttaaaggttgtcctttaaacgtcattcagctgagttggcttatggtatgtacaccattagggttgggctgccattgagaggagcctagttgttttttcaggagaggttcctctggtacattcttttgtgatctatctttttgtacaaatccccttttatagcagaggttttttgtggtttagatcaggtttgtaaatttatgggaaggattcctcatccttctcatgaaatctttacacgatattaatacaattcttctttctgataaaaaaaataaaaaaaataaaaaattgcccttgtattcacaatcacattctttagaacaccaatgttgtaactttataatgtttaagtcctccactctataagatttcactgtttgagaattttaaacttttggtggcattaaaaccccatttagttattacagtcttctggtggaaactagtcatttacaaacaagttaaaggaaatggttaaatgatctttacattgctcaggaacaattttttgctcttgtattctcaaacaccaatcttgtaactcaataatgtttaaatcctagaatgtggcattaagacccaacttgtacctctctttgaaatttaacttactgtggaaacaagtataccaatgattttttgtcatgtaagagagcatttggtaaaacttaatacttaatgcttaatgactttaaatgactttaagttattaagtcattaagttgattttgcaagacattttgaacttcaagttacagtgttaaagttattttaccaaacatacttaataagttaaattaaattattaagttatataagatataaatgtggttagttcattggttctacccacttgttcaattaagagcttatcagaagtctaaagcttaccatgaaagtgtttatggcagacagaaa

SEQ ID NO: 11322 - DNA, 2156 bp, Vitis vinifera
  Intron number 4 from transcript GSVIVT01008685001 (locus G SVIVG01008685001) derived from phytozome v7.0 (chr-ID chr1 8; pos 1206798 to 1208953)
tcttgcctatacacctcctgagtatctaagaagtaaagaatcaattgttcttttttgaattctcacttgtattattattattattattattttttatggatattagtgtattgtacttgttgtgtttcatttgatcaatataatgtgtttataagagaaaaggttatgctcctgatcctgataaatcttgcctcattctttgacctcttcagcatgagttcaaaatgggaatatgaagctatccctaaagtggtcctgtggaatatgttctttgatttgatgaaaagatgctgtttcgaagttccattggacaattggaggtcctaacacactgttatatgttatccttgctaacgtttcatgggataacatattcagtttcactacttcaacagggaggttggatgtggctgtccaggtttttggaatttatcatgggtgaaatccatgcattcagctgaggtgcaaccttagatgtttgtctccatgaattatagattctacttgttaaggatctgtggagtggtaaccagaaaatgaataataagttgctggataatgtagtcccaaatacactggatttataggagttcgactaaagatgggatcttttactgttggtttgtgaatgcattaggtattcacttgccagagatctgttagtatattgcttattcagtgacctgatgttgattgatgaaactagggagtggatagatgcaaaactagaattataatgactggtagctagataggctttaaattaagtaggaccaacttataatctattgaatagttatcaaaatgtaggtaagatcaatgtggctgagataaccctaagagtatgtttagaaagtgtgatcctacattatcaaatatttttcaaaaacatttctcagttgtttttaagatgggaaatcaaatggggaaaacaattttcttgtcttattctccatcaaggtattgtactcatgtacaatacaaaagttcttatggtattctccatattttcaactgtttctcataacactctacaaaaaacacttgaacatgcttcaaatttgtttttaaaaacaacccatttcagaacaaatttttgaaaaaaaaaatgtttttagtaaaaattgtcaaacatgtgttttttaagttagaaaatgattttctattctttagaacaaaaaattgtttttcaagaatagtttccaaatagccttcttagggcatggcttggtggtaagggcgagtgtcgggatgtggggtagaggcaatatggtctcaggtttgattcttggcattagtaatccctggattatccagtgttggttatggtaggcatggttagtatccctaggtttaggtccccttggggagtttgaagggctctactatggaaggctccttggttgcccccaccccacaacaccaaaaaaggaatagttttcaaataggttcttatgtaattaagaatatctaagcccaggtttattgagggtatttgtctccattgaattaattttggattttaacaggtttgttttggtctagatttggtagactatagtaagaggaccaggatgagaagtggtaaactctggataggatttaagtaaaacctgtctagggtggagtgccttcttcaggcttcgtggctgtctgctagaatatagtgagtaacctggtttagttttccatgttgtctgacaaacacacatacatggtgcctataattttattactacactgatatggaatgataaaaccctgtgggctaactaccaagtggtgtgatcaggagcagaactttaaattgtgttatacatcaaggtttggacattgaagcatgtgcataagctaattatatgtatcgttgatatgtgacaagagactgctatttgggatggatgctgatggtgcctcacccatttatgcatccaccctgcaagtatgagtatgacatgtatttcatttatttagtgtgctggtcagttgcctcacatgactgcctgttactcattttattggcaaggtgttttatattgatgtaaagtgatgttcgcttgcatggttgtctgctttgtcaccaatacatcctgcaataactacattatatgtatgttgtaggaagggttactcctgaaagtgttatcttcagcttt

SEQ ID NO: 11323 - DNA, 1335 bp, Vitis vinifera
  Intron number 3 from transcript GSVIVT01031375001 (locus G SVIVG01031375001) derived from phytozome v7.0 (chr-ID chr6 ; pos 19411242 to 19412576)
aattagcaaaatgtatgacttgttatattcagtgaatctgtgtcctttcttatgcatttggtgttcttgttggtatgaaaggtgaaaatatttctacgcatacattgcctttcttaacatatcttaagagaccgtttggggagtgattaaaaaaagtgtttttgtagtgttttgtgtaatgcattatataacaaacaagtgatttttggaagaataatctatcatgattgtttagcaaatgattctccatattttaaaagtgaatttaaaaaaattataaaacacctagagtgcgtttggcagttgttctaggaagtgtttatagcttttctaacacttgaaaatttttatctttaagtgttaaaaagattagaaatatttcgttgaatcactaccaaacccactcttaatttttgtaagaaaatgcttccaagcataaagaaacatttttagcccctttcaacaacacttcaagtctaggaatcacttcaagtgattctccacattttaaaagtgattttcaaaattttattgaatacccaatttttgtaagaatgcgcttccaagcataaggaagtgtttttaaccactttcaaaatcactcccaaatgggctctttattattttgtcttgagtttaaattttttaagaaagatttacaggatgctaggttttagttgttcatcttattagagtttgagttttaatagcgagctcttttgaaatgtgttgtttgcggtttctgccatgactttgtactgaattgtttatagtttctgatcatggccttaaatgtgtcaactattgtgtgaattttagaatgaactaaatttagtatgttacaaccatgcaattttccagaaagattgataggattttggcatttgtttgcaactagaaaggaagttctatagtttgtgttgttagggacttgggattaccttgtacttgggatcacccggtcttgtgattttacacaagtctatgtgtgcagtaaaattgaggataatcagttgctgggcaggttgttaaaattgagcaagtatgttagatgcttgaagtctatatagtgtttcaaccatgcaattttcatccatgtttctactttgagtttctctacgttaattctcactatcaccttctctctattgtcaagtgatagattttgatttcaattttagtttctcatgtgcatggaaaccctttagtctaactatgaaattaatcaaatcccatagacttctaattaacttttttagatttattagtgtcaagtttcatttttcctttctttccccagataatcttggagaagattgccctgtcttcgaaaat

SEQ ID NO: 11324 - DNA, 4913 bp, Vitis vinifera
  Intron number 5 from transcript GSVIVT01037402001 (locus G SVIVG01037402001) derived from phytozome v7.0 (chr-ID chr6 ; pos 14332982 to 14337894)
cagaagtgaaaaagctagcaaattttcttaagcaggtaatgcaattatttttcataaggctggcattgttgctctgttttgcgttttagaattcttatatgcaaaatgttctaatgtttttttatttgtctaaaaatgcatgtagaagttaatgaattcattgcttcaaagtttcatgactctaatgtaaaaccaattttgtgtgtatgttgtacttgttgtgttaattagcttgggaatatgttttaggtaaaagaaattgcctaacttttccagtgctgttgttttaatagtcaatgtaacatataaaatccttttatgtagctttattatcacaagccatgtataacaatacaagaattcagttttctcctctctttcagtagttcattgaatacaagagtatgtaaaggttctttttagtcagctagggattacctttgacttgaggacctcctttttccatcccagttgagaattagattggtgttttgtaccaaattaccaatgtggttaaggatgtatggtttttggttgagttaggggttggagatgagtcatggggctataatgtagaacttggtttaaggcttcaagaatatgttcaagatgtattcttctcaggttttgaactctttatgtcaatttaccagcctggttttaccatttatagcttactaaagaatccatattttgatgccctcttttcaccaatatgaactgattgatatttctgactacatagtagtagcgcactacgtaggatatagttattctacctgatcaaatgctgttttcttttatcattttatttcaagacccatcttctctcaattctcatgtttattacttaacaaatgatcatatgtagagatatttcacagcaacatgtaaattcttacatagtgagatttttttaataacaaatgctatccaagcgttaaattatccacgaagatgacatttaatttatgtatgatttatcaattagctgctacctctctctctcagttcaaaataaaatttgtaggaaagtacttgttttatatgtctagaacataccttggcatgatttgaaattagaataagtcaatatttttactttcttttttaagattgtaaagtattatatggttcgattgttacagaatcatggctttacatagagtatgccaccacagagatcttatgactagggtgtcacataaagataactggcccaacttagtatgcctccttattgaatgatcatagttccaaacaactgctatgatcccatgatgttgagaaagttggtgcattaagtatgcatggactgcgtatactcccttgccccattgatatattctctatttttcctatcaaaaacaaaagaggagtatatatgaactacaatatttgtggctacatttagtcctctttcctctcttttaataagtggaatgaggaggaaaaatgtgaccctgtagtttagacttctagtgatattactgataagaagagattagtaaattgtgaatgtggaaaatggattttagagatgagggatacatggacatggatatgtccatgtggaaaaatatgtttggtggatacactgatagacatgtccattctgaagtaaaaagaggggtccatcagtgttgctgtcctgtcttctcaagaatctaaagaaaatgaggaagcttattctctaaagaagtgattttcattacagtgtatctgctgtacactagatggcttaaatagagttgattactaactaatcttctaaaagagtactaaccaaccttctaatggatttctaacaactctaatatagaagcaacaagtgtcctggttgttttaacaacttaatacaactactagccttgacatgtctagaacaaatgtagtagatgatgaaaatgactactggttgtagttggatgcacttcaatatatatatatttttaatagaaaataatgcatatagcaccaaaaggatgcactgaagtatacaggagttgaatgcacttgaatataatatccatggatggatatttgggaaaagggagatgtggacacgaccattctgaagtaaaaagagagggatccatcagtattgctgttctttccagaacaaatatagtatgatgaagaaaatgactaccagttgtagttatatgcacttgaataaaatatccatgtggtaaaagattgttggtgaatgcattgatggctgaagctcctacaacaaatttgacgatgtttgaggtagatgagggggacccttctgctgggccttaaaaccttgcatacttttatactctgcaaacaacgaccatattcaaaggaaatagcatatgtggtcttaattaaatgttgatacccagattgagatctctaatatctattagcttcattatatgtttgccaaagttttattcaaagtttcaatgttctctattaatttccacttttcttaaattgataatacatgattcatacctccattgaaatctgtgtttttagaaccttgattcgatggttaatatcaacatgtttttattttttgttgctgacaaccaaaaggttggaaattagctattatgctcatcaatgcattatggattgtgtaaacaccaagatgaccattccagtgaggccaagattaaagaaactgggtaggcttaccattctaaaatcaatgcatcttccttgtcagctagagtcccgacaatgttgacacttgtccccactaaagagggaagactattgcactcaagatgaagaaggttcaccaaggtccagataatacaacccatcattctcactcatgtcctgacctaatcatcctcttcatcagttatgaaacaatttaaggcttcattaagtacttacagctagagaattaaatggaaagttaggagctagaaggtaatgataacaacttaatagggtgtcaggtacattgcccaagaatagagacctataagagcctttggctaaaaaatgtgatggttaataggttctaaatcaaagaagagatgatttactgagcatgtggaattagcttcaaagctaatggcccatgatggagaagattagtccaaacatgtggtattatttgaattggctaacgtagcaatgaaagagaatggaaggctgtttgtaatgcctggatgagttcattaagtttagtgaatgtagcatgatgattgagtcaggaactgcatgtccagatgtaacagaaagctgtagtggcattagtgacttgatgcacataatctggcttatcatatttcacccagcaataaggctcaataggattggtaccaccataatgatcacacttcattactacatccacttccacaagaactaccatgaaggccacgatggtcacaaccaccataagaaccattgcaacttctactgttaagccataatggagccttattctaagggggatctcgattgccaagagtaagtgttaatagcagtagatagagtcttgctagcaagaatatgacctttaaaacctttaggcttcacacccaagtgatctttgtatcacttaaagaaaatagtgacagttgaaatttcatcattcattaattgattcctcttcaaaagacagatcaacaattatatagagcttctttaggcttcacacccaattataactccttggaactagtcacatagtagtaatgcaacttgaaaataacaaaaacttaagacggactactaaaccacattaaagactattgaaaaatgacaatattaatgatggaaagtagtaacttatgaccattggcgaggccgacaatttgatttctagaaagcacttaaaggctgaacccatattgaattatataaaatcccagctaagcccattatcatctggagagtgccaaccattcctttgcccctttgataaagttttaaaagttgcatcaccttctaatgacatttctgttgtgctagttcattagtgaaagaccatgaaaattttcaaaattttaagggtgctataatcttgaaagagtggtttacaacttaatagcctaagaaatgtgaccctattgcaaaaatgtctgtgcaaatgaatcccaaattttcctagaggtatgacataactcaaatatagttgcaatatggggttccattctatggcataaccatctaaccaccatggagttttgacacattcaatcttcattttccataaccttcgtatctaaagagggatcatatatttgttttttttttgacttgttattttttttttttttaatttttgtttttgttgttgggaatgatttatgcaatccataataaactctgggattgaacaatgccaagttagaagtagaaagttgtgagattaggaaaaagaagtgagaaaaagaaagcatagaaaagtctaggtttgttttacttgactttcctataccttcttagctatttatattattaaccaagattgccaaaataccccaagaaactaatacctaataactaataaataattgttaatagaacatgacaaaataaaataaactcttaacaatgatctagggaggagaggaagaagaaagggaagggagagtcaaataatcaatagtatttctctttcaaatcaaatcttatgaatacgactctgagaagatatttttggtaggtatgaatctgaaaagatattgttactctcaggatttgttctcataaataataatgttcctattatgtaatacctctggaaactgctccctgatgtttaattgttaattttgtttggtcttgtattttaggttgtagttcttccctttgcatttttttgagggttttgtttggttttcaaaagatacactcacccttttggcctcacttattgagaagtgatgtccattttcaggcttcagaag

SEQ ID NO: 11325 - DNA, 1475 bp, Vitis vinifera
  Intron number 1 from transcript GSVIVT01024122001 (locus G SVIVG01024122001) derived from phytozome v7.0 (chr-ID chr3 ; pos 915998 to 917472 reverse strand)
cagagaagaagtgttcatcaatctaacttgcagcttgaattgctcatgagtaaggaggaaaatcccaaaatgactagcctgaaggataccaaatctctaacaccatcgaccacaaaaccccattccagcaattttgaattccaagagttaggtcttttgtagtgagaacaatgtaaatttcttatatatattttttctgtaaaacaagttgacagcaaagtctattcatccaaattgatagctttactttttccttatattgccatgagtttgcagaagtcatttgcagatgatcaaccaaaccaaatctccacaatccttgcactatcaaacccaacaatataaattctagcattctaatttctgtcatatatcttctaattcaatgtctaagccagcactatacaacttggaatgtcagaaactgacgttaaattcaatgatcaatgagtaattcttatatgaaaagagatagaaaaagggtttatcttcgaatcaacaaacccactcatgcgtgcatataaatttctgctggagtcatatgaattaatggaggtttcagatttctggggtccccaaaataataatccaaagaattttcttatattttctcagcaaccaaacatggtagaattgattgaattatgcagaaaaagaaaaaggcaacacaaattcaaagcagaattagaatcaagatcttgaatcaattccagtgacattctctagagaaaattagaaagaaaaacagggggtaaaagtaggagattagacctgaaaaaatgctataaatcttgtggaaattggaatcagatcatccctgaattggccatcttttccatgaaatttagattctctgtttgtttcattttctgggtttggaaggaaaaattgaattttgtcatgaatctcaactcaacttttgtataatatgatcaacacacgtttcatttctataatagggaggaatagaacaatagaaacgacgccgttttaggtagaggcatcattagggaagcaaaacgacgtggtctgattcttttttaaaaggaagcggaaaaaccaaaacaacgtcgtttcgatggatctacaaacacaatcaaatttgaaaccaaaacgatgccgttttactgactcactgctgttaacgagtcaaacggtgtcgtttggttttctccggtttataacatttaatccaacaaaaacgacgtcgtttctttctccttccacctgtgaaatcattttctaccttatataatccattgcccaaattgaatttgggaccaagctttaaaaaaaatcaaatcaggatataaaggaaaaataatttccattttttaatatgttttttcttatataatgtaatggcccccatacaaaataatattggcaatatcaaaatggattgtaaaatttgtaagtatggtgggaaaaaggttggtaaagtctagagtataaaaaagatagggtcccattag

SEQ ID NO: 11326 - DNA, 8104 bp, Vitis vinifera
  Intron number 2 from transcript GSVIVT01001431001 (locus G SVIVG01001431001) derived from phytozome v7.0 (chr-ID chr1 3; pos 20926614 to 20934717)
ttcaacctaggcaactcttcacatcctatacaaacgtacttcataattaatacaaaatacatgtcgttttttaattcaataactattaaccacataaacattattaaagtagtaacccttagggtcaaacctttgacttggggtcacgggccaaattttgggtcgccgagaatttgggtcgtgacagcgtggtatcaaagccaaggttgcaataataccttggggtcaatgtttgtgggtgttgtgtgtattgtaatgttatgtaatgttatgattttttgtatgtggtagttaatgagttgattattaaataaattatttaattgttgattcttgatgtttgaaaagccttgtgatggtgcttgttgatgataataagaaacatgatgatgttaattatgttgaattatgtattgtgattgtaggaaagtgaaagttttgatagttgttgaagttgttaaatgggtacatgtgaatttattttgctcaccttggtaatgtggttgaattagggattgttaaatttgaaatggcggaatggaccagaagaggaagatctaagagaaatgaggagttggagtcggtaagaaaagaactaagagaaaaactccgagaagtaagaaaggagttgagagagattgtccagttgatgagaggtcagggctctaggagatcaggaggtacctagggcatgaggattcagaccactcacataggaggagccgcagtaagaggccagtaatgagccaaatggaagtgatgaagagattcatggtgatgcagcctccatattttaatggagagcccagtgtagaagtagttgagcattggttatggaggatgagaagaattctagtggggttggacatacctgaggaaaggagggtaagtctggcagcatagatgcttgttgataaagctgatttctcgtgggaatcgatggaaagagtgtatgacactgaggttatgacctcggaggaatttgagagaatcttcctaggcaagtatttgggagaggtggctaagcacgccaagagaatggagtttgagcaccttatccagggaaccatgtcagtgctggagtatgagtcacgcttttcggagttgtctagattcgctttggggatgatcaatgaggaatgagaaaatgctagaaggttccagcaggggttgaggcctgctattaggaatagattaatcccattggcaataagggactattctgagttggttaagagggctttgttggtggagcaggacattgaggaaaccaaccaaattcgagagcaaaaaggagacagaaaagggaaacaaagaatgagggaaagttcccaggggccacaacagaggtagaagactcaacaatctaagaggatatcctgttctatgcaggaggtgggcagagtgctcagagggcggttgttaatagagaatgttatggttgtggagcgggagaccacttatggagggcttgcccattgcggggtgtacaacaggctcgacctcagtctcagggaattctcagcaacggtcagtagtgcctttccaaccccctcagtttcaattgccttactaccagatgccacaattacccccagcagcgtagggaaccaggacaactaccatgattagttagacccgttcttcttaggggtcgaatgctagaggtaggggaagacaggtagctggaagagtttttgccttgaccccaacagagccagaggaggacgtccttttggtgggaggtatgattttggtatatagtacttgggtgcattttttgtttgatactggtgcaacttattctttcatttctacatcttgtgctaatgcattggggttgaaatcgaaaacggtagagaatttattacttatcgaatcccctatgggtacgaattctagagttaatagaatatgcaagaggtgcgttattaccttggcggatagagcacttaatgtggatttgaggattttggatatgactgggtatgatgttatcttgggaatggattggttgacagtgtatagagtgcttattgattgtcatcgccgcagaataatattttgtctactagatggttttaaggtttgctttgttggagggaagtgtcttagtttgcctttttcacaatccgatccgtgttatcagtatgtgttgaggaatggatcaattcctagcttgccttcgtggtaaggagaaagcccaaaagggcattacataaattctagtggtgaggaagtttcaggatgtattcccagatgagttaccaggtttaccaccacatagagaatttgatttctttactgaagtatacccaggaactaatcctattttagtatccccttataggatggcccctcttgagttgaaggaattgaaaactcagttagatgaattgttgagtaagggttttatttgtctgagtacgtcgccatggggagccccgatgttgtttgtgaataagaaggatggcacactaaggttgtgtattgactataggaagttgaatagagttactgtgaagaacaagtatcatcttccaagaatcgatgacttgtttgattagttgaagggtgcaaagtattttagtaagattgacttgaggggtatcatcaattgagagttagggaagaagatgttcctaaaatcgcttttagaacgagatatgggcattatgaatttctagtcatgccttttgggttaactaatgtcctcgctgctttcatggatttaatgaacatagtatttcgtgcttacttggatcagtttgtgattgtttttttggatgatattttgatttactccaaaagtttggaggagcataagcaacatttggtgaccattcttaaaactttaagaagacatcagttgtatgggaagttggacaaaagtgagttttggcttactgaagtgaatttcttaggccatgtggtttctgaggcaggaatagcagtagaccattccaaggtggaagctgttcatgagtggcaaaggcctactaatgtatttgaggttagaagtttcttggggttggttggatattataggaggtttgtgggaaacttctctaagattgcagcaccaatgactcggttgactagaaaagggttaaagtttgaatggaatgaggagtgtgagaatgctttccaggaattgaagaggaaattgaccactactccagtgttaactactcctattagtggagagttgtttacggtttattgtgatgcttctacagtggggctagggtgtgtgctaatgcagtaaggcaaggtggtagcttatgcctcaagacaattaaagcaacatgagcggaattatccaacacatgatttggagcttgcagcaattgtgtttgccttaaagacttggagacactatttgtatggagagaagtttgaggtgtactctgatcacaagagtttgaaatacattttcactcaaaaggatttgaactctaagcagaggagatggatggagacattggaagattatgattttgttcttcattaccatcctgggaaggcaaatgttgtagcagatgccttaagtaggaagagttatggtcagttgtctagcttggggttgagagagtttgagatgcatgcagttattgaggattttgagttatgtcttagttgggaaggacatggtccatgcttgtacagtatatcgactagaccaatggttatccaaagaatagtggaggcccaagttcgtgatgagtttttagaaaaggttaaagcctagttggtagcagatgaagtaggtgaaaattggtctatgtatgaagataggagtgtgaggtttaaagggagattgtgtgtgccaaaagatgtggagctgagaaatgaaattttagcagatgctcatagggcgaagtataccatccaccctaggaataccaagatgtatcaagacttaaagagacagttttggtggcgtgggatgaagagagatattgctcagtttgtagccaactgtcagatttgtcagcaagtgaaggctaaacacctgaggcctgcagggttgttgcaacctttagctatacctgagtggaagtgggatcatatcactatggactttgtgatagggttgccaagaactagaagcaagaaaaatggagtttgggtgattgtggaccgtcttagtaagtcagctcattttctatccatgaaaactactgatcccatgaactctttggctaagttgtatatacaagaggttgtgagattgcatgggattcctctatctatagtgtttgacagggaccttaagtttacttctcagttttggtatagtttacaaagggctttgggcacccaattgaagtttagcaccgcctttcaccctcaaacagatggttaatcagaaagagtgatccagatcttagaagacatgttaagggcttgtgttttggattttggaggaaattaggcagattacttacctttagcagagtttgcttataacaacagttaccaatctagtattggcatgacaccttatgaagcactttatgagagaccttgtagattgctcttgtgttggataaaggtaggtgagagacgtttgttgggacctgagattgtttaagagactacagaaaagatacaactcatcaaggaaaatcttaagactgcccaagatagacagaaaagctatacagaccaaatgagaaggcccttggagtttgaggaaggggattgtaaaagtgtcccctcgaagaggcatatttcgatttgggaaaaatgggaagttagcccctagattcgtgggaccatttcagattgataagagagttgggccagtggcatacaagttaattttgcctcaacaattgtcccttgtgcatgatgttttccatgtgtcgatgctaaggtactccaaatccaacttaggtagtggacttgcaagatgttcaaattagttaagacacttcttatgtggaagaacctttacggattctggaggttggagaacataagttcagaaacaaggtgattcctgcagtcaaagtgtggtggcaacaccatgggatagaagaagtcacttgggaacctgaagaagaaatgagacaacactatccgcaaggtaagctcgtttaaatttcgggacgaaatttctttaaggggtaggatgtaatgaccgggtattttatgccacgttagaatttctattttgaaaagtcttattttgagtgatggttgaaaagtcaaaaagaaaagtaattggagaacacttgttaattttggattggtgaaatctgatttattgtgttggtcaattagacgagttgatatatatatatattttttaattcatttaaccactagcccactgtccatggcccaatatccaaagcccaaatccattcccttttcttttaaaaccccatttcatccaaaggcccaaatcaattttttttttttggtttttaaaagcttactttcatccactcacagccattgcccatggcccaaatccaaaggctccaattaatctttttttttttcttttctttatttttatttggttattttccatttccaatttcatttttttctttttttaacaacacaaattaatttattaaacaccaacaaaaaaataatttaatttaattttttcttaattaattttaattaatttacttttcattttcgttttcgtttttcttttccagaaattttcaatttctaaaatcctaagaacttaactaccctaaggctgacatggcacaaaattaacacgtgttctccaattacttttcttttttacttttcaaccatcactcaaaataagatttttcaaaatagaaatgttaacatgacataaaatacccgatgattacagaaacagtactgccaaccacttctctggtagatgcccctcgtgtttaggcaggggcgacgataaaagggcaattcttaaccagttgcgtaatgatgaagcaagtgaaaatgaaatctgtgttattcctatactcggtatgccaggtgttggcaagactgctctcgctcagttggcattcaatgatggtgaggtgaaaagcattttgatccgagagtttggatttttgtgaccaatgattttgatgttgtgagagtaaccaaaacaattctgcagtctatcgcttctagttttcgggatgtggatgatctaaatttacttcaagtatcactcaaagagaacttggccgggaagaaatttctgctggtgttagatgatgtttgggaagaggactatgctacatgggatctctttcgctctcctttaagagcaggtgcaagaggcagtaaacttattgtaacaactcgtagtcaatgggttacatcaataattggaggctttgcaagagttgcccgatgatgattgcctacctatacttacccaccatgcattgggaacaagaaacttcgataaccatccacacctgcgagtaattggtgagaaaattgtaagaaagtgtaaaggtttgcctttggcagcaaaggccctagggggtctgttgcgcactaaatcaaattgcgaggaatgggcagagatattaggcagcaacatctgggatttgccaaacaaggagtgtgacattcttccagctctaaagcttggctatcaccatcttcctccccacttgaagcagtgtttcagttattggtcattatttcccaagggttatgaatttgataaggatgagttgctccttatatggatggcagaacaacctactggaaataagcaaatggaagatttaggttgtgaatacttttgtgagttgttatcaagatcacttttccagccatcaagtagcaatgtatcaaagttcaccatgcatgatctcctcaatgacttggctcaatctgttgctgctgaaatatgcttccactcagaggatcagcctgagaaaaatttgaggcatgccatttctgaaaaggttcgtcattcatcattcacccgtatgtatgaaatctttgaaaattttgaacccgttcgtaaagctaggtatttgggaacatttcttgcattaccaattcatgcatcggatatgaattcgggttgctaaatatccactaaggtgttgcatgatcttttaatgaaaatgagatgcttatgggtgctatctttgagtggtcatcggatatctgagctaccaaattcgcttggtgatttgaagcatttaaggtatcttaatttttcatacacattaattaaatggctacctgaatcagtttgctatctttataatttacaaacattaatattacgtggatgcaagagtcttttcaagttatactgatgagttacaggagatgccttcccaaatatgtaaactaggatccttacattgtcaaagtttattgttagtaaaggcagtgggttgagaatacgggatttggggaatttgtctcaacttctagggaagctgtccattttggggttgcagaatatggtgaatatgaaagaggtgatggatgcaaatttaaagaatagacacaagattgaggacttaacagtggaattgggttatgtggatgcacaaaatgaaacattaactgagatgctggaacctcatcaaaatctgaaaaagctcaccgttcaatggtactggggattcaaattcccttcttggataggagatccctcattttcatcaatggtgcaactaagtctcagtgattgctgaaatcgcagaacattaccacctcgtgggcgactaacctcacttaaagtcttacacatctcaagcatgtataaagtaggaagagtggatgatgcgttttatggggaagccttttccatccttggaatctctaacatttgggaatatgccaaattgggaattttggtttcctcttagcaatagtgatgcagaagttcaaacactatttcctagccttgttgaactgaagatatcgcaatgccccttgttacactgtgaattaattcatccttgccttccttccattgtaaagcttgatgttcgtgaatgcccacacacactcctacgtttcgagtttcctttccttcgtgaattaaatgtaactgatattatggggttgaggagagggcttcacgttgacctccactcactcaacgcac

SEQ ID NO: 11327 - DNA, 11228 bp, Vitis vinifera
  Intron number 21 from transcript GSVIVT01032195001 (locus GSVIVG01032195001) derived from phytozome v7.0 (chr-ID chr 13; pos 21637550 to 21648777 reverse strand)
tgatcactccagtacttgagaaagcattccttgaggttgtttaaatatttatgtacaaaaataaatgatttggagtatcacctgaaagttaggacatgagaaaatatattatatttcatacaagtgcagtgttggaactaaccaatttgtggtataggatttgacaaacccagaagtttaggattcctagacatgacagtacatttgaatttctttttgattgataatcaaaatatttgttacaaataaaggcaagacatgatattggacattataattataatacaacatgatgaaaataatcataacatagactataatatcacttgctatgaatagtattgtatattgatgagaaaaggctgtttgggttgaggcttgttaaccatggcactgtagcagagtaattgcaactgtgaaggaggatgtactggggtttcttagagtccttctcataagacaggtgtgtttgaaaagagcccaaatgctatgtttattgcattggcttgagataaggagggttcagaagatatgagacatttagactgaccagttgggaatgtaaaatcctggctttgagatttgagagagtgattagaaggatctttcagattctcagaatcctttcatgggaggcagatgaatattgagctattgactagattttttggtagaagatttggattgacttgtaaactggatatatagaaagcctatgatcatatgaactaggattcctggtgtatcctctgaggatgggacttggtgttaattggattaaggggattggggcttgtatttcttactgagattctcagttctgatgaatggtctcttgcaaaaaattttggagattggtctttaaggtttcagtgcaggtttgcagaggctttgaggaggataatattaggggctgctggggagggtttcctgtatggtttcagtgtgggtttgagatatggtgcaggtcttgtaatcttttactgtttcacagcctatatgcggaagacactttgttgctctgttctgtgatgcctaatggctcttttaaaagggtatgctcctaatttcatttggatacaaagagatattgatgattatcccgaggaggcttaatactcagctaatagatctggagagccagccatgatcactgaacttgctaaaccagcatatgataatattaataataggtatgcttcaggaaaatgagatttgcagaggacaatacttttgagtctgtttcttgttttaaatgaatttagtcatgattgggctttcattacaactgggcaagttgaggacttcaactatttggtcatgatgttgaggggcgagtgtggtaagcatccagaaacttatttaggccttttgttgaacactagatacagggctgaagcagtttggaatcaagtgattgagaggtttgggaaaagatgtaactgttggaagaggcattattcacccaaaggagtcatatgaaccatctgggagagtactttgttgaatcaccgagtgtcaaatgggtctctgtttgtgctcctaatgttggttagaaatcaactgggaaagttcagaagggacttattgttagttggtgtagagagtgcaaggaaagtgtacttgataacatggaggacaggctgctttccttggtagaaagaaaggttaggagtgagaaacttattttttctccacaacactctgcaaagtaaataaatatggagatgtgcaagggaaagggagagattgtctagaaagggggtggcaggcaattttgggggtggagggtgatcggtgctctatggtaaagagttcctgtgggtaggtataagggggtgatggaacgatctcctcacatttgctcaattcttgactggtgatgggtggacatggtgagggataattttttgtatattcttgtccaatcttgtagttgggcaggattttgttgttgtcatttcatgggtggctgaaaaggaaagaggttcatgaaggtttgatggatggctacaccaaatatttgatattgttacagagttgggatgctccatttgtgggtttccttgcttagtcaatcaagtggcagactttttagttgaaagagaacaatgcatttggtgccttttgttggagttgtaattagtgtttgtttatgttttacacttgaaaatttttggaacatatatatattttttttctttggttggggggggggagtgggttagcttgtatggctccttgataaggagttccaattccttagtcctcattggtgcatattatgcctgggaagtggagaatcgttgaccatatctttccacattgcctattaacaatggggctttggcacaaaccatccagtctagacaagatggattgggtaccggccaggagtatatgtgaaatgctgaccatctcctttagaggtttggggagttttgagttttgttagaggcaagaccctttggaaaatagcttgtctcattatgtcttggattgtgcaatgagagaggtgctaggatctttgaggaaaagtgaagaatggtagagttgttgtgggatctagttcacttctattcctccttaggggcctcttgtacggctgcttttaaaagtgttccattcaatgttattcaacttagttggcagtggactggacctttgtgtatggttctccttatatagtggaggagtttagtcatactcttataagtttcttgtattttgtggggaggacccttcttctcatgtacttttttttttttttttgcatctgataaaaaataaagttccttttgttgttttgatcagatttgtgtgttgtggtaggatgtctcgtcctgcttgatctttttaattaatcaaaaagatctaatgtgttcttgattaaaaaaaaaaaaaggaagaagaaagacttttatagacatcctttgaataattgcatgagaagagggaagtctaattataatgccaagccttagtttggcacatggatgatttaagtccctcttaggagtttagcgtgtttttgattaaaaaaaaaaagaagaagaagaagaagaagaagaaagacttttgtagacatcctttgaatacttacaggagaagagggaagtttgattacaatgccaagccttagtttggcatatagatgatttaagtccctcttaggagtttaccttcttaatctaggtgaaattgagtcttagtatatgtttgtttaggtaaaggttgctggtttttcttttgttgaggaattatattatttctaatggggtagtgtaaaaattttcagattggtagaatgggatggactagcagccgatgattctatttaaagtcttcatattttattaggattggtttagtagtttacttctgttgaatataatgaatttatagtgtacaatctttccttttttttaatataggtcacatgtatggtagttaggactcctagccttgtatatatatatattttctcaattgtaagtagacactacatgaatgagaatcaaggttttcttctctctctctcttaacatggtatcagagctaagggagaaaacctaattctttccagtttccccgtgtcatcaattccgggaaaccttcctgtgaccgtgtttcattccggtcaccttccccagaccccaaagctttccgatcggtcgaatcgtcgttagaaaacattcaccgccggcgacttttccggcaacgtctttttccgataccgcaaggagcgcctagaggagatctccgatttttcccaaagcaccgtagccagaaaaccacccacgcgccggccacgcgtgtttttccggccggcgcgtgagggtgcgtgagccactttccagcaattcgcttcctccttcagcctcgcctgacgccgactagccacccttcatacctgtttctgccatccgagccctgcacgtgccttttttggggttcttttgcctccgccggccctccgaacagtttttccggcgtcctccggctattttttctcaaccccaatccctgcacgtgccttgggaagtgttcttctacctttccggtggtgccacggttgttttttcttttctatttggtctctcacacgggcgattcttcgatttttccttcttcagacgcatctgaagccgtattagggctctcttcgatctaaatatacttcattctctagataagtggatatggctactaaaacttccattttttcctctgtcatatctggatctcctatgattacttcggagaaattggttgacaatgaaaattatctttcttggtctgcctctgttgaactttggtttatgggacaaggatatgaggatcacttggttacacaggaggcagatatccctgaggttgagcgcatacagtggagaaagatagatgtccagttatgtagtgtattatggcaatcagttgatcccaagatccttcttcatcttcgggcctacaaaacttgttttaaattttggactcagggcaaaggattatgcacgaatgatatccaacgtctttataaggtggcttctgctattgtccatatcagccaacaggacttggatctatctacttatattggtcagattgcctctcttaaggaggagttcttgactgtgatgcctcttactcctgatgttggggctcaacaaacacagcttgataagttcttcatggtccttactcttattggcctccgtccggatcttgagcctatccgcgatcaaattcttggtagttcatcagttccgtccttggatgatgtgtttgctcgcctccttcgtatctcatctactcagactttgccatctgatagcatttcaaattcttctgtgttagtttctcacaatacctctcgaggaggacgcagtggtaaccgaggtagaggccaacgtcctcattgcacctattgcaataaacttggccacactcgcgatcgttgctatcagttacatagacggcctcctcgcactgcccatgtggcccagtcctctgattctcagctgcctcagcctccgagctccttcgcatctcaggcatctcaggcttctgttgcctctgttgcctctgttgcccagcctggtaatgcttctgcctgccttacccacacatcttctcttggaacctggattctagattctggagcttctgatcacatatctggtaataaggatcttttctcctctattactactacctctgctttacctactgttaccttagctaatggttctcaaactgtagctaaaggtattggtttggcccttcctctgccttctctacctctcacttctgtcctttatactcctgaatgtccttttaatcttatttctatcagcaaaatcactcgtacttttaattgctctattaccttttctgataaatttgtgaccttgcaggaccggagtacggggaagacgattggcataggacgtgagtctcaaggcctctatcacttcacctcggattcatctcctgcagtttgcatttccactgatgctcctctcctcattcacagtcgtttgggccaccctagtctctccaagttccagaagatggtccctcgtttttccactttgtcgtcgctttcgtgtgagtcatgtcagcttgggaaacatactcgtgtctcgttcccaaagcgtttgaataatcgggcaaagtctccttttgagcttgtccacactgatgtttggggtccttgtcggactgcgtctactttaggatttcagtattttgtcactttcattgatgactattctcgatgtacttggttatttttaatgaaaaatcgagctaagttattctctattttctagaaattttatgctgaaatccagacccagttcaatatttctattcgtgtgttacgcagtgataatgccagggaatatttttcagccccatttacttcatttatgtctcatcatgggattcttcatcagtcttcttgtgctcatactcctcaacaaaatggggtagctgaacgcaagaatcgacatcttgttgagacagctcgtactattctcctccatagtaatgttccttttcatttttggggggatgctgttcttactgcttgttatttgattaatcatatgccctcctccgttttacatgatcagattcctcatttccttctcttccctgaccaaccactttatttccttcctcctcgtgtctttggttgtacttgctttgttcatattttcactcctggacaggacaagctttccgccaaagccatgaagtgcctcttcttgggatattccagacttcagaagggttatcgttgttattcccttaagactcatcgatactttatctccgctgatgtcactttctttgaggactcaccattcttttccaccacttctgagtctcttcctgtttctgaagtcttgccccttcctattgtctccccatctgatgttgtgcctcctcgaccacttcaggtttatcatcgtcgccctcgtgtcgctgctcctctcccttttgctgaggtacctgctgactcacttcctatcccttcggcttctcctgccccggctctgccttctcctgatgatttacccattgctattcggaaaggtactcgctctacttgtaatcctcatcctatttacaattttttgagttatcatcgattatcttcaccctattctgcttttgtttctgctatatcctctgtttctcttccaaagagcacccatgaagctctttcccatccaggctagcgacaggcaatggtggatgaaatggctgctctacactctaatggcacttgggatcttgttgttttaccctctagtaaatctacagttggttgtcgttgggtctatgcagttaaggttggtcctgatggtcaggttgatcgccttaaggcccgcttagttgctaaaggctatacttaggtttatggttctgattatggtgacacattctcccctattgccaagattgcttctgtccgcttgcttctctctatggctgctatgtgttcttggcctctttatcagttagatattaaaaatgcattccttcatggtgatcttgccgaggaagtttatatggagcaacctcctggttttgttgctcagggggagtctggtttagtgtgcaggttacgccattctctatatggcttgaaacaatctcttcgagcatggtttggctgttttagttctgttgttcaagagtttggcatgcttcgtagtacaacagacaattcagttttctatcatcataactccttgaggcagtgtatttatctagttgtttatgtggacgacatcgtcattacaggcagtgatcaggatggtattcagaaactaaagcaacatctttttacccactttcagaccaaagacttggggaaagtcaagtatttcttgggaattgagatagctcaatccagttccggtgtggtcctttcccaaaggaagtatgttttagacatcctggaagaaactggtatgttagactgtaaaccgatagacacacctatggatccaaatgtcaaacttgtaccaggacaaggggagcctttaggagaccttgggagatatcgacggctcgtaggtaaattgaactatctcaccattactcgtccagacatttcttttcctgtgagtgttgttagtcaattcctacagtcatcatgtgatagccattggtatgctgtaatccgcattctttgatatatcaaaagtacaccaggccaaggtgtgttgtacgagaacagaggtcatactcaggttgttggttacacagatgcagattgggctggctcactcacagatagacgttccacttcagggtactgtgtttttattggaggtaatctaatatcttggaagagtaagaaacaaaatgtagtggctagatctagtgctgaagttgagtatcgagctatgactttggcaacatgtgaactcatatggttgagacatcttctttgagagttgaaatttggaaaggatgaacagatgaaactcatctgtgataaccaggccgcattacatattgcatccaatccagtctttcatgaaaggaccaaacatattgaagttgactgtcacttcattagagagaagatcgcatcaggatgtgttgctacaagttttgttaattcaaatgatcaactagcagacatcttcactaaatctctcagaggtcctaggattaaatacatttgtaacaagcttggtgcatatgacgtatatgctccagcttgagggggagtgttgaatataatgaatttatagtgtacaatctttccttttttttaatataggtcacatgtatggtagttaggactcctagccttgtatatatatatatattttctcaattgtaagtagacactacatgaatgagaatcaaggttttcttctctctctctcttaacaacttctttgtcaaattcttatttctttacattttaaattggggtctctattcctattagaaaaggaagtcctagactgggcttgaaaccttccacatccctaccttaaaccccccatctcttgcaatctttcaaagttattgttagactttaataaagttttgagcccccatccttatgctcaaagttttgagcatctaattacttttctcttgagagtttgataccttcttccaaagtaagattacttgtgaaacctaggtttgaatagctaaggtttggttctttctttctcctgctaactacaagcattcttcattcattcacgacaatccacaactgctgataattcttaacatgctagaaatctagaacaaaactatggcaactagatgcagttggagttttagggggaacttgataaactggtaacacaatgcttgtctttgtatgattatggaatggaggggttgatgctcaggaaacttaggtatgattttctagagtttatttatttttcctaattttcttaacccaataaaaacacaatttttgtaaccaattccaccattgattcttaatcgcaatcacctttgaaccattcaccttaacctacaattataaaaaattcccaagtgtgttggaaatccaaccatccaatatcaaaatggttagattctagagtgattctttgtattgggatagatttttcgatacatattccctggaattattagtattcataaggatgcactagggtgtgattttttgtcctctgcttttgtttggaacttttagggttgggaactagatgtggtggtagagtttatggttgctctgtgagatgaaggggagcaaggtacagaaaacatggttggaagctcaactgggaagggggattttctatcaacttgctttttcaggccttggtaataggaagatcaaaaggtttcagcttctgagatgtggatggcaaatgttctcttctgagatttgcagaaaattcaaaaggcatgagtcagccaacatattcaatcggtgattgatggccagagagctttaatgtgatgtggttgcctccagaattgataaaggagaccctgaatggttgcttgggaggtttgtgaagaagataagaagaaagaggagaacagcttcctaatgcttgcctttggtgctattgaaaagcataaccaagggattttcaaagcggaagactaattggttctaacttgaaaaaaataatctagtctactcattattcctttgtacctctatctcatgatgcatcctttcatggatttaattgattactgaattcttgttctgtgatgggcagtttgatcttgttttttttttctcatcttttctagttaattagctgatcttttctgttgcattcttggtagtacctacacatacaccatctctaccaattgtgatcttatcattgggtgggggagatttgtaactgtacctgtgtcacacctcaacttatatttatgcatgcagatatgttgtttttattgcagagccttgattaatcccttgatgtgaaccaaactgactcattgcctttgagggctttggtagttggtggaaagagaagttagcgttttaagaaaaaaatatgggaagcaggagaaatagtgagatagagttcatattttcacctctttgttttggtgacagcaaactttactggtatccttgaattttctagcagggaccggagggtggtttagtggcccagacatgtgatccaattgtttattgttgtgcctcttcctccagtgggaggttaaagttgaaagttagaatgcttgttggggacccaaagtcaaatgggtattgatggaattatcaaagactacacgaatgctgtttttagcactgggcagaattgggatctatataagtgaaattcttaaccttggttgaaggccttaaagagggtttattttttggcgattataatgtgaaggatggagattcttcagaggtcctttcttgggtctccaaggggaatggaggtacttggtaagatgatcattagatgcagagaacttctcacattttcaaagacatggaaacctccttcctctggagacctagatcaggtacaggaggcatattccttgactaagaggatggctgcatcaaattggtcttttatgtggaattttagccccatggcatttgtgcaggagtaatctttgtttttcctgcttttgttttgtcctctttgttctatgagaaggatctcccaataataatattttgtatctctttccagcaataatatcttctttccttgaaaaaaaaaaaatcatcagcaagcttgttgaactagaaggtacttttgcaagtgtatttgaagcctcaatatctcgagaattatagaattggcatttatacttaattttatcctattttgctgtatctgttcaagctgcccgtggtatctgttttgttcattcttctagaagtacttgaatttggattttgtgatggaacttctttaccttgatgctgattgagagttaatcaaagggaatgatttagttccttttatatgcaccatcttatttatttctttttttttataagtggtttaaccatatgctgcatttttctcgaattaaatatccatatttacattgtctttcatctatttttaacacatttggtctcatctgaacccatttatccacaattaattttgaactacattttttcaatcatttccactttctttcctttatattttagaataatttgatgttctcatgtctatttgtag

SEQ ID NO: 11328 - DNA, 6909 bp, Vitis vinifera
  Intron number 5 from transcript GSVIVT01037211001 (locus G SVIVG01037211001) derived from phytozome v7.0 (chr-ID chr1 8; pos 27929502 to 27936410 reverse strand)
gaaagtcggttccttgaaggcctggcctcatctcaactatggtcttcttttttcgtcatggtctgctgaatggatggattttcaaatccattatcatctgggtcatttttttttttacctttgatttatcaaacaaagtatgatctattatatccatagaactagtcaagtgtgttgaagtccgagcctcgtgaagctaaagttcttcgtagtagagtaggatatattcaataaaaggctggcagtctgatgtatgttgagatgaatttagaaaaaaatttactttgaatttttgttgtccttaattttcattgttgaggttggtgaatctgttgctatcttgactaagaatattaccattgatgaaaagcacaaatggtggtttctatttcaagtgtgcatcagtggcaaaaaagaaaaaaaatagagaaaaaaatatagaaaataggagtctagataataatgtatattacaaaaataaaattatacagtatggtaattaattgaagataatgttaatggtgaatatacttcgaattgggttggcttggaatcaaattaagaaagtagagaattaatactttgtttatgtttagaaagtgttttcgaaaatatttttgaaaaatagtttatgatgttttgtaaaataaaaatttattagggaacttaaattttttttaatctattttctacatttttttaaatattttttacttatctatgattatatttgcaatcattttccaatatttatatcattattttttagaaaaaatatttaaaaaacaagtaaaaacaattgaaaacaattaaaatatgttattagaaaacaccatttttattttttataaattttcccacttgagttcaagcaaacttataagttcaatttgaacatgaacagattttgaaggcagtcttcctaggttacggtcagtccaacatcatttgcttgaatttaagaaattcaagcaaaggcagttttgaaggtgggctatactacctcaattttcaagtccaagtgatgcaatcttttttcatcttcatttcttcactgtcatcatttatttcaataaataaaagtgacatattttgatatgaagtggatatacagactgtttgggcccacccattattggcccaaaattctggcctttggcctggcctagccagcccatttaacccttcaatttgaggtattttgaaggagctatgcatatttacaatagaaaaatagcatattttctcacctcataagtcataaacactattctttggaccctttttctttctttctctctctactcttctccgtctctcctttctcttataaaagaccatagaattaatcatctaagcatatttgattatttatataaaagttgaggttttgtttgatgtactacttattttttatttttaaaaataaaaaaattaatagtagttctcatataaaatgcatgaagtgttaaaaatttaccttcaagacggtttttaaaaactattaaaaaaattaggtattagaaaatttttactacctcaaatttaaaaagaaagttttcactataaattaaaatttaaaaaaaaaaaattttaggaacataaaatatatcgatacctcttatatgaagagtttttatattttatataaaaattactattattttttattttttattttttaaaaataaaaaaatgaagtgtatccaaacaatacctaatttatttaattttatctaaaaaattcactaaattttcataattgattgtattaaataactatattgaattttcgtttgtattattctaataactcctattttgcctttctctatcaaatttaattaactttcttatatggtaaacacttttgaaaagctattgctaacataacttcccattattacaccaaattactactctttttaaaattagaaatatgcccatttttttctaccatggcccaaatcttgaaatttcacataaactattctacaaacacttagcctatactcatctttgagtatcctatccttggatcctaggtgaaggtttaaaacttcaagtgttaataataaaaagagggagattaagtactaacaaaaaattaatgcctacaaaagtaaataattcaagagagtagatttacgaacccctttaccaataactaaatctattcgagttgtgaattttaaaaaatgcaataaaatcaaactagaacaagtatttagagtccattttatagaaattttataaaatacttctactttaaaaatgttgaaaaaaaaaaaagaattaagtgtttgacaaattttaagaaaggtttttcaaatctaagaaataattttaaatattgaaaaattatttatggtgtttttgaaaaaataatttataaataattatcttaaaaacactttcaaataaaacacttttattaaaaatattttaaataaaaacactgaaaatcacattatctatgaaaaaccaaatttaatgcgttgaataaataaagatgaaagcttaacaatgatttttaactgtaaaagtaggattataaccctacgctaaaccaacttataacatcaaagagaagaaaaactaagaaactaagggctcctgagggatgcaggaaaacttctcttcatatacaaaatgagagttttatatcttccaaaatattgccctagacctaggacacatggaagcattaagataggagaagtggagatccagtggttgcaagaaattaaagactcatttttagcttacgtgcacaaaacgaaactagatggcaaggtggcctagggcacatttttggcaaacaccactaagctctttctttggcaatttcatgatttttttggcccaaattttattgattttagggctagacagataggattcaaaatcttaattatgggaattggtagcactgagagttagaagaatgaaaaacatattaaagactcaggaaaagatgataattaatgatcaaacataccggaatagctccaaaataattgatgatgatgggatagaagccacattgaaacactccaaatatatggtagatattaaggatagagaggagtttcagttgctagtcatcttggtattaagacgccggacaaatgatagagtggtggttgaaaaaggtttaaatttctgatccaaaaatagtgtgaaacaaagagaatccctttggacaaaatgcaagaaacagtgggcgccataaagagaaggtcattgaactgcatggtacgatatgtcatcaaactaactccacatgcaatgcagctgtccctcgtcacccttgggcttctcctcaatttcattggccatgaaatgaacccacaaagcacttacccatttccttcactttgcattgagataagatcgcaagactttcatggagagtcccctcggccttttctctcaattcactgcaaaaacctaacaaacctagcttctttaattctctgagtaccggcccccactatgcaactgtccacaatcacatgtgtatggttcttcttcttcttttttagatcatcagtccaatggaaggatttgaagttgcaaccattcatcttcctttctctatccatttcctcatttcctttagtgcattggcacatggatccactttttgtttgcaattacacctctctatcctactagaagccgctagatttcactgccggttttctcgacacgcgtcccatgcattaatttaatagatatatggctttttactatttttagattactatttttcttttgtttttttccttgatatttagccttttttttttctagattagaaatgccctgaatttgagtatattagatcaccaatcccgtgtagagatttgcagtttcaaccaaccatctttctttccctatccactcccccatttctggtgcaaagggtctgggcctttcacttgctttgcactagcacctttctccatcccactagaagctgctagatttcattttctgttctctcaacatgtgacccgtgtattaatttgttagatttatggcttcttactttttttttttttttaatggaattctcatgtaatatatgaggctaaagggtagagatttttaggttaaaatcataaaagtatatgttaaataattaccttacgtccagagaggaattagatcattttaaataggggatgacaatgcaagtttgagatagatcaaactatcttgccctaagaaaataattaaatggggaagaacatgacaatttcccatacttgctctaccactattcatttgatttttatttttttaattttttaaaaatttaaattatataaaaaataaatattataaatttttataatttattttaataggaaatgatttttaattttatatgtataaaaataataataataataataataataattatatatatataaaagggataaagtaatatacattgaacttagtttaagtttatctttttttttcaaacttttcttattaagagcgggatggaaacgtgaaaaaacccattttactatcatttttatttttaatatctttgacctttaattaaatacattgttacctcttggctacttatttatttgcttagccctttacattatgccacatgaataaaatttgatacattcattagattaattgacttttatttaacttcattatttttttttcttcgaacatagaatgctcctcagacctcactaaaaaaattgaaaaaagatttacttaaatgaaaaatagaagaagatctagtagtactctattaacttttattgtgtaactgcccgaggaaccaaatcaggaaacccatttgacatggcaggatcaagagtgcatcaaagctggtcaatcttgaatcaaggtaactagaagttgactcaaattttaaaatccatagttgtttaaagttgttgcatgtataaaaaaaaccatatgtttcagctctcctacatttatattttttaaaactacttaagatattctttaagattttaaataagagatcctcattctctaaccttcaatatgaatgtgaccttttatttgttttatattttcaaatttgcacaaaactgtgtcctacccaacgtgcatgtgtgagagtaatttataaattttaattgctagttgtttctttttcttagaaacttgggtagtttttttaacttaggagcttttgctaggtgtgtagttaaaattttcttatcaagaaaatgacatgcatctgccaaaaaacactatcggaagttacattaatttttaaagaatttttagattgataattggagaatagactattggcattgattttgttagagtgcatagtattcattgtgagcataattcttcaaacttaaatttttaggaacattgattattccatatggtattagagcttcatttggttggaggtcatatgtttgaatcttatcattatatatatatttgtttcccaatttattaaatcaacatgtaacctcaagtgagcctagacgcgagtaaggatgttagagtgcatgttatatattatgagtccaaatcttattgattaagtatcataatagaaagttcaatactgttgtcactacctaaattatttgaattactttcctttcaatcatccctaacattaacataatttttttccttttgattgaccagcctttcaatagttgtttaatcaatgtaatttatagactatttgatgtacttgtatatattgccacaatcaaaataaatcaagcaaggaattcttttttgtttatcatgttattcgtttattgttcttccaacttactaaaaaatttaaataattagaagggttgtgatatgatttatgctaatagtagagaaggtttgtaaatttctcacattggtaataccaacttacataatcaacatgatatatagcgtcctaaaactaaataatgtttttattgtacctaaattaaagaaaaactcatatctctataggcaactcactattgatagttcttgtatatatttttgagtttgatcctaatagttttgtgataaaggataaaagcaaaaagatattcgtgagggagtatgatgtgactaactttatgcactcgaggataaataagaagaaaccttaattgttattagaagcaacactataacctcaaccattcggcatcaaagacttggacatctcattctaaagattatttgaagctttaaaagataaaattgatatttccaaatggatcaaaatacctagtatttgttcctcttgtcaaatgggtaaaagttgcaaactaccttttattaattcttttaaataaagtttcagattttcgttgacagtgaccaatgggaccttcctcctattgcttcaagtaaaaaatatagatattatgctttatttgtagatgattgcacttgatttcatggatttttccattaaaaagaaatctaacttttttttttcttgtttcctaaaattctaatggcaaataaaaaatcaattggatgtaaaaatcaagattttctggtatgatggaggtggtgaatttcaatctatttttgaatcacttggatttatgtagtgtagctaaacaaatatattatcttaaaaacccccgacccaaatggggttatagaaaggaggtcacgcttcatgatgacttacctcttgagtggatgtttttcttacaacaatttatcccataaatagatcatatataatggcccaccatattttgtagattgtttttaaaaaagtcacaaaggcatgtgtcttttcgtgcattaatggctcattcatcatagtgaaggtaaatggttgctttcacaccatgtgaggatgggacatgaataaagtgagaatactttttaaggagaaag

SEQ ID NO: 11329 - DNA, 13666 bp, Vitis vinifera
  Intron number 5 from transcript GSVIVT01034359001 (locus G SVIVG01034359001) derived from phytozome v7.0 (chr-ID chr1 0; pos 17459460 to 17473125 reverse strand)
gaacgggcatttctgttttgaaaaatattgaaacagtaagttatatgtatggttacttttgaaaaatttacattgctcattgtgttttaagataacaaatctaggttgttgttaattgttttgttggctcttgttaatgagaatattctcttcttgctatccttggatctttttttccttcttatatgcattcaagtaagtgctcagttgttagaatgcatgccttcttttgttttctccaagtgcattattgttgaaaacattacagtcattttcctttgtttttggcaaacatgatggcttttgaaatgttggaatatggtccatacaaggtttaaactccccttgctagttggattgacctagagaaacaattttgcaagttgatttcacattttattagagatgttaataggttttgttgtggtacattaactgtagtcatggtgtcctgtgatggtgaacaggactaaatgttgttttggttggatgtatgatgtgggccagagcctttagacaatgtttcctagacctttatgccatagcctagaatgttaagagttatttatttagttactatttctctttcttatttagttattatattagaattattctctttctttttaggagtaagggtaagttagtctttattgccttttattaagtctatttaaactctaatggtgttgtattttttttttctgaagagtgttcataataagaaatccttttttttttttttttctttgaatcttttttggatttcacatagaataggtctagagtgtagttgtggtttccagattacagggagggcatatagggcctgattttttctaatccttgctctgtcagacggtttccaaactgggaaccggagtctgtggaggtctttaggatcatctatggggttagaggagggttcaaatgcattcaactgaatcaggctaatgatggcaagttatcagtaaaatcctatgtcaaggatctggatggtctgccagggaggtccaagagggcttccctaggaaaaagaggagaagcatctctgaacagagtttccccatgggaattttatgggagtttttgcctctttgaaatattcccaaaatatcacaaaaattttcatagtttttctcaaaaagcctggatgttccactggaaagagtttgagattttttctgagtctttgaaagttccatgattggtttgagaacttgattgaagaagaccagaattttaaatgcacagctctgcggatccaatgtttggagttactttactcctttttgatttatggattctgtaattaagacagatgttcttacatatgaggtttgactccatggtgattcatgtctcgattcagcagtcaattttcaaaaccacatgccctgctttagcaccatgtctcatttgccagtgtagagcacatgatttgttgactttccaattttcctatgataccgacatgaatggaaggttcctgtggaatttttcttggtcaatcaagaacaatgttatacctcaagatagcactttagatgtattagtgtttgcttctcacaaactggtaactgcatgtgtgagcactttgaagagtccattaccatttgcttcattttaatgtagcttttaagttttggtactctcttttgatggtgatgggcctgtctgggtgttgtcaaagaaaataaggaccctgttaaggggtgtggccttgccagtgtgtggacaatatggaatgaaataaataagagtaagaattgattcataataactaataactaagattgcttggggttggataatctatcaaatgctgattaagtgtggatgatacaggttgtttaaggagagagattcattggtggggccttatcagtgaatgttattgaaacctagccctatatagtattggagtgtgggacctacagggttctagctacctaggggcaagatctggttttttggttggtgctggagtaggtacctctgacagagcatttggcactgtttgctaaagggaagcagcaacttagataggagcccattctaggattcattttgggggaccatcttaatcaaaatggttatctatgctatgttacaagactgctgaaagaaataagagttgttgggttgtgttaaaatgggttagaaaattggatagcaaaatagtttgtacaaggaatttattgagtcagtattatgatgagctcatcagatccgatcatcttagagattaaagactttttcgagtttgatgcacataaaatatttcatgacaggacttccataccgctttcggatgggtaattgacacaaaatatgagatgaaaaataataagttctttctattagattgactatacacacaatttctataggagattacaagagaagaaataggaaacaagagacgtaataggaaactaacttattcctaaatcataaaactatctatttacagaaataggaaactaacataataggaaaatgattctcctattctatttacagctcaacactccccctcaagttaaggaatagatgtcttccattcccaacttgaatacaagattgtgaaacattgaactgttcagcccttttgttaggatattagttaattgatgttctgatggaacataggacatacacactactccttcctctaatttttctttgatgaaatgtctatcaatctcaatatgttttgtcctatcgtgttgtacagggttatgaacaatattgatagttgacttgttgtcacaatagagcttcataggaccatcccacttgattctcaaatcatctagtataatcttcagccaaagtagttcacacaacccttgagcaatgaccctaaactctgattttgcagtcaaccttgctaccacattctgctttttatttctccatgttaccagattacctccaaaaaaagtacaataccctttagttgatcttcgatccactagggaacctttatagttagcgtcggtgtatgcttttagagcaagagtattgttcttcttgaacaaaattcctttcccggggttgcttttcaagtaatgcagcaccctgtaagtagcttgaatatgaggttctcttggatcatgcatgaattgattgatcacgctcaccgagtaggcgatgtctggccgattctgagcaaggtatatgagcctaccaaccagcctctggtacattcttttatccaccactggttcttctttagcttctcccaacttatggtttggatctaatggggtagagactggtttatacccaatcttctctgtttctgctaataaatcagtcacatacttttgttgagagatgaagatcccttgtgtggaatatgccacctcaatatcgaggaagtacttcagtttccctagttcctttatctcaaattctgttgttaatctctgcttcacttcatgcttttctctctcatcatttcaagtcactatgatgtcgtcaacatagactagaagagtagttactccccctgcagccgagtgcttaatgaagagagtgtagtcaccttggctttgtttgtacccaaactctttcatgacttttgcaaatatcccaaaccaagccctaggagattgttttaacccataaagggcctttttcagcttgcacaccttgttacctgtgtttccctcaaatcctggtgggatgttcatataaatcccttcatctaaatcaccatgaagaaatgcattcttaacatcatattgtaggagttgccaattgtagtgggtagctagtgacaataggattcttatagtattcatttttgcaactggagcaaaagtctcctaataatcaactccataagtttgagtgtaccctttggctaccaatcttgctttatatctctcaagagatccgtcggccttatatttcagcgtgaaaatccacttgcaatcaacaatgtttttccctttcggtctttcaacaatctcccatgttttattctaatctaatgcactcatctcctctctcatagcatccttccattccttttttgtcaatgcctcagtaacagtgttagggatgatagtggtgtttagactcacaataaaattcttgtgggctggtgataggtgcttaagagacacataatgtgatagtggatagagtggtcggttagtgcattctctagtgccttttctaacagcaatgagaaggtctagttctaggttatctgttgagtcaatggaagtttcactaggttgtgtatataaaggtgggtctgatcttaccgtgatttcattcctagggtctgagttggattcttggacttgcttttgttctagaatggccttttcccttaaatacaccttaggaaattgtggaaaattgtgagtgacactggctggaataggggatgacacaggtttagtggtaaaattgggtgactcaagtgtgattgactcggatgactcaagttaggatgactcaagttcttcatcaccatgggttgagacatgaggaatatcaagaggttcaaaagactcacaaggactatcttccatcattgaaatctcccactgaagagaggacttggggaaaaaaggtttattttctgtgaaggtgacatctgcagagatgtaaaattttatggttgagggattgtaacagttgtatccttttttagtggatgagtaaccaaggaagacatattttatggctcgggggtctagcttgtctctatgttggctatggacatgaacaaatgtagtgcacccaaataccctaggagtgagctcatttgaggttctaaagtgtggatagaaactcttaagtatctttatggggcttttgttgtctaacactcgtgagggaattctatttatcatgtatgtggcagtaagaacaacttccccccaataggacttaggaacattcccttgaaagagtaaggctcgggttgtgttgagtaaatgcccatttttcctctcggctaccccattttgttggggtgtgttaacacatgataagtcatggagaatgccctgtgattgaaaatagggtgacaaaatctggttgaagtaatctctagcattgtctgtcctaaaactctttattttaaccccaaattggttttgaaccattaagtggaaattaggtataacaatgctaacatcagatttttgtttaagaagaaagatccatgtaacccgagtgcagtcatcaattaaggatacaaaccaacgagccccacaaacattaggtatagtcgaaggaccccatatgtcactatgaatcaaataaaaaggatgagaacttcttttattgctaataggaaaagatacactagtatgttttgccaattcacaagtttcgtaatgaaacttagaaatatctaatctgaaacagatgaggaaacatgacctttaaaaccctaaaagatggatgacctagacataggtgatacaaccaaatggtatctttatttgaggaactgagaaaagacaacgacaaataattactagttttctgagatgattcaaggtggtaaagaccgctcctttccttagcaagtccaatcctcctccccgagccttgttcctgaaaaacacaataagaagggaaaaaaatagcataacatttaagatcatgggtaagcttttgaatggaaataaggttggtcgacaattttggtacatggaggacatttttaagaataagggtaggtgtgatgtatatgtttccgaaacctacaacggtagctaaagagccattgaccactgtaattttcttgttacttgggcttggggtataagtatggaaaagttgagatttggaggtcatatggtttgtggcactggagtctattattcaagagtcatcataaaccctatgtgagacatttatgcaaaaagagagtgaaagtgtacctaagagagccaaagaacaagttccaataggtttgtcaagggatcctaacaagcttctcaacttctccgtttcttcactattgaacaagttctagtaggtttgtaaagaacacgtgaataaataaaaaaaatccaactatgaagaccagaaaaatggcaatgaaggccagaatgatgcctaggtcttaaaaacctacagctctgataccatgacacgaaatatgggatgaaaaataataagttttgtaaaagatgattcgaaattagtcggttgtagtggagagaaaggttttccaggtgaagtctgaagattgcaatggaggaacgtggatatcaataatagagagaagtcgaggttttgtggtttctttaggttttggagagaaggagacgggttggttagtggagcagttagagaaagctgtggatttggaggcttccaagggtttcattcgaaaaatgaggggcaagactagggctcatctgatggagatatgttttaatagtagagggagatatatgaaaatcacagaatacgttgcaaagagaaaacctttggttttagttgttccaagaggtgttaatggctgtgggtgggaaaatcttaggaaggtgattgtttcagtctaagagttctctgttcaagctgaaagagatttgaaggagaagcaaaaaaagcctcaagaaagcaaaggaatgtacagaggtgagaggtcctatgctgatgtggtggcagagaaaggaactaggaatggtgcagagatgccagttggaaaatgggcaagagctgtagtttgtgaaagcaaaggaaaaatacgagactggtgtgaggttggaaaagctatagcgagaagggtggggatgaaaggaatggtgtctgtaacacccatttctgcttacaaagggtgtttttttgtggaatttgcaaggaaagctcagtggatacaagatcaagggagcttcacagcgagaggagaggttattgctctgaagaaatggtcgccaaaagagaactcaatcgttaatggaaaatttagacgggggtggttggaactaagaggtctccctttccacctgtgggatgaggtgcagttgagacacattttgcagcagtgggggagggtaacaaaggtggcgaggaaatcattgaagctcgttgatttgacgaaggtaacattgtgggtggagatgtttccaaatgttgtgcttccaacgctattagaggtagaagatggagattggacatacatggttgcagttacagtcaccaaagaagatgacggagaagatgacagagaagactctattaggcctgagtcgaatcgcagcaaggacgagctgaggtcagccaggggttgcgtctttcagaagccacagaacattgaggggctacgagctattgacaggaccattgagtgccatagctggatgcctcgtcatcgttcccattttcgttcttcagattcaaaatcggctaagggggagaaaggaaagggaaggtggatgttgggcccaacggcgggaagcaacatcgggccaacaccagacgcctttgaagcccgttttgattgggcccaatttggggcgaaagattttgggcccctagtgggtctagcccataaaggatcctataatggcggcccagatgcatcttcgtcttcaaagctcctaagaccagggttcactgcaaagaataaaatgccgaaagatcatcttcaagtgtcgtcaatgccgaaaggatcctcagtctccgtaaggcgcagagcaagaagtgggccgccgagatttgagaaggcgtcttctaccccgaagtgaaacttagaaggaggtggctcactggagacaaatcgagacacttctcggggcaaatctcactccaggaagagcaatctctccactgattttgaaacatccaaagtttctaccggcgagacagagggagaagaggggattctgcaatgcaaattgatcaatgaggtgcgtactcctttctcagttgtatctgagcaagatcttcctctgtctggggcttttgagccaaattttattcccgaaacctcagtttctttggttcacccttctcgtcgtcaatctttttcttcgattccgtcggagtcaagctacgccgttcagcgtggttccatttttatctctcctgtggtgaataacaaccatcgtggtggtgcgtcctgtttggaaggtgtggtggttcccctagaaacctctaactgaaaatttaaagaccggcctctccttagggaaactctcagtaaccctgaggtgcgtggtgtctcaggtgaggcttcgttcccagtgctagaaccttccaccctcccgttggaaggtttttaggttgaggggcttacgcctcggaagatggtcaaggttcagtcggttctggagagtttgagggttagaattgtcagggataacggaaaaggtgtggaaggagagaacaagagtgctctctctacggacaaggtttattccaaaagaaagaagaaaaatgactctagaacttgaggagaggattagttctgggtgtgggttgtgtcgggttgtttttgttttcatgaagatcttaagttggaatacaagaggtttaggatctaggaagaaaaggaggactgtgagaaggtttttaagtactcaaaacccagatgtggtgatgcttcaggaaacaaagcgtgaaatttgggataggaggtttgtgagtagtgtttggaaaggtaaaagtctggattgggttgctcttcctgcttgtggggcgtcgggggggattgtgatcttgtgggattcaattaagttcaagtgttcagagaaggtgttaggatctttctctgttactgtaaaattgaactctgatgaggaagggtttttttggttaacctcagtgtatggcccgaataaggcagtgtggagaaaggacttttggatggagcttcaagacctgcatggtctgacttccccaaggtggtgcgtaggaggggattttaatgtgatcaagaggatgtctgagaggatgggtgactctaggttaacagtcaacatgaggtgttttgacgagtttataaaggaaagtggtttgttggatccccctcttaggaatgcggcttttacatggtcaaacatgcaagtcgatcctatttgcaagagattagataggtttttgttctcttctgagtgggattcttttttctctcaaagtattcaagaggcccttcctagatggacctctgaccatagcctaatttgtttggaaactaatcctttaaaatggggaccgactccttttaggtttgagaatatgtggttgctccatcctgagtttaaagagaagtttagagattggtggcaagagtgtacggttgaaggttgggaaggtcacaagtttatgaggaaactaaagtttattaaatcaaagttgaaagagtggaatatagtggtctttggagatttaagagagaggaaaaagcgcattcttacggacttaggcagaattgatcgaattgaacaagaagggaatttaaatcttgatctggtttcggaaaggaccctaagaaggaaggagctagaggatttgttattgaaggaagaggtgcaatggagacaaaaatctagggttaagtggattaaagaaggggattgcaactctaagttttttcacagagtggccactggaagaagaagcaggaagttcataaagtctctgatttctgagaggggggagactttaaataacattgagattatttctgaggagattgtaaatttctttgggaatctctattccaaacccgaaggtgactcttggaagattgaagagattgattgggcccttatttctgaaaagagtgcaatttggttggatagaccgttttctgaagaggaggttcgaatggcagttttccaattgaataaggaaaaggccctgagccctgatggctttactatagcagtttatcaagagtgttgggatgtgataaaagaggatctaatgagggtgttttttgagttccacactaagggggtaataaatcaaagtacaaatgcgacattcattgctatggtgcctaagaaaagccaaacttttaaaatctcagattatagacctattagtttggttacaagtttatataagataattgctaaggtcttatcagggcgtttacgcaaagttctacatgaaacaatctttggctctcaaggagcctttgtggaagggagacaaattttggatgctgtattgatagccaatgaagtggtggatgagaaaaaaaggtcaagggaggaaggggtagtcttcaaaattgattttgagaagacctatgatcatgtggattggggctttttagatcatgtgcttcaaaggaaggggttcagccagaaatggagatcttggatgaggggctgtttatcttcttctagttttgcaatcctagttaatgggaatgcaaagggttgggttaaggcctttagaggtttgagacagggagatcctctttctcctttcctttttactctagtagcagatgttctaagtaggttgatgattagagctgaggaaactgggataactgagggtttccttgtggggagggataggactagagtgtccttgttacagtttgctgatgataccatatttttctctaaagcctctttggaccttcttcaaaaccttaagattatccttttggtttttgggcaagtatctggtttaaaaatcaacttagaaaaaagcaccatttcaggtattaacactgggcaggaggtgttgtctagtttggctttggttgtggagtgtagagtgtcagagtggcctttgtcttatttaggccttcctttgagagggaacccaaagacaataggcttttgggatccagtggttgagagaatttcgaggaggctggatgggtggaaaaaggcctatttgtctttgggagggaggattactttaattcagtcttgtctgtctcacatccctagctacttcctctccctcttcaaaatccctgtatctatagcttcaaagattgagaagatgcaaagggattttctttggtttggggccggggaagggaagaaagatcacctaatcagatgagaggttgttagtagaccaaaggagatgggaggtttgggctttgggaagacttctatgagaaatattgccctcttagggaaatggctctggaggttccctagagaaaggagcgatctttggcataaggttattgcgagtatatatgggacacatcctaatggatgggacgccaacatggtggttagatggtctcacagatgtccttggaaggctattgctcaagttttccaggagttctccccttttgtccgcctagtggtgggcaatggggagagaattcggttttgggaagatctttggtggggaaaccaaactttgtgttctcaatttgctgatctctacagagttatttctgtgaaaaacctcactgtctcaaatgtccttgacaattccttaccattgtcttggaattttaactttcgccgtaatctaacagattcaaaaattgatctccttcagagattaatgtcctcccttaattttgtgcttctttccccttcttcatcagactcaagagtgtggtctttgtcttcgtcaggctcgttttcagtgaaatcttttttctatgccttgtcaaaagtttcaaatcctttaatgttccttccagccaagtttttatggagctcaaaagtcccttcaaaggttaaggccctcgcttggttagtagcacatgggaagataaacactaatgacaagttgcaattgagaagaccctacaaagccctctatcctcaatgatgcattctttgcaaaggaaatggagagtcgattgaccacctttttcttcattgtcccattaccattggactttggcacaggttgttcaatctagtaggtttgatttgggtccctccaaggagccttgaggacatgttggttatttcttttaaaggcttgggaaactcattaagaggcaagacactttggcaaattgcttgccttactttgatttggatggtgtggcaagaaagaaacaaaaggatctttgaggataaagggagaacggaagagatggtttgggatttgatccggttttattcttctctatgggcttcttgtattgaagcttttagaggagttcctctaagcattctacaactcaattggattggggtttgcgtctcaagagtttgaagattgatggggtttcttttgtttttagagttctattgttgggtgtttttccttggtatttgtgtaggaaggacctcttatccttcccttggtttttttctctttctattgtctcttttttctctcttgtatttgttcttttattaatataattttcttcgtttctgataaaaaaataaaaataatagtaataataataataagttttgtctattagattgactatacacacagtttgtataggagattacaagaaaagaaataggaaacaagagacataataagaaactaacttattcctaaatcataaaactatctatttacagaaataggaaactaataaaactatctatttatagaaataggaaactaacataataggaaaataattctcctattctatttacaactcaacagtaattgttttaaagaccttagtttttattggataggttttcaggaaattgttaagtataaaatgcaattttttatttttttttgtcgaaactgcaccagacccacaagaagagtattcttggttcggtttggataagtctggatccaagagatccaggttttcaaaatttcagctgtctttattagataagcccattcactttgtttctttagttagtgtaaaatcatattttttcatcagaatcctcacctctgcatttaaacatctatttttaattcccagagaatttttccacaaagaacccttgtttttccatgaaaaggcctttcaagtgattttttcagtttgggaaacccctggatgtattcaacttattctgtatgatgttactttttttgatccagatccagtgggttgttggattggaaagtgctgggccttggaggagtttatctgtgtttggtatgagtagttgtacatggaagtcagtaaatttgcaaggtaacctaatcaaggatatgtggcattgggctgcatatagattttcctgtgttttcattttgtatggcgtaggtattctcaatcctttgggaaaatgctttgggcaaatacaaccttggaataactctataggaacctcttgccaccatagcttggaacctgtttggcgctcttaatgataattatttgaaagagaaaaaggattaatttcaagatgagtttggaatctgctgttctttgtaacaaaatgaccaatttaaattgaacaggaccatgtccatctcaaaaatgcatttacttcatttatttctaggctagaaatgactatgtaaataatgggttgatataataataataattgaaattcttgctttccacttgcacaactaaaaaaaaaacacttggtgttcataatcaagtgtatttttcagttgtttcagttacttctctaaatcctctattaactttatttgtctagccaagaatttgttctattttttctttcttttctgtgagctaaaatatgtatatctcatctcagtttttctttccactcttttgctcaggttttgggggattttg

SEQ ID NO: 11330 - DNA, 2874 bp, Vitis vinifera
  Intron number 4 from transcript GSVIVT01003724001 (locus G SVIVG01003724001) derived from phytozome v7.0 (chr-ID chr1 1; pos 7426726 to 7429599 reverse strand)
agaggcttttgcggttaaagatcataggggagaatgtgagttttctgccaattgctccctccttgttttgctcatccaaatgttttttcaagaaaattttgcactgccaatgctacttaaatgggtggacaacagatagttaatcacataactgagaggacagagcctgtattagttggttaggcacagtaatgtatatgtttctgcagtaggtagaaatgccaactgctgctaagaaccttagcctgcatcacacagaggaagtgtactgctattgtttcattgacaaaagcagtaacagtttgactaatggtgtcctcactttttcactataaggaatgtgaggcccttcaaaagcatgatgtgcagatgatagttggctgcagtctaggaaatacaatgatcatagggtcaaaacacctttttaagcttatcaggtttaaggtcagaatggcccaaacaaatatagttattggtaccctagtataaatcatgagcccatgtcctaatagtttaaacttttaggaaatttgataacttaatgtggtatcagagcaatgattaactagaagtctcaagttcaaggctccatggtctaccacatatgatggagggtattagccctatacatggtgggaccatatcttaatagtttaaacttttaggaaagttggtaacttaactgttatgctgtaggaaaatatctagattgtaaggttaagatatctgatcataacaatgttttgacctagaaaatctcatatgctaggactgactctatctgcctgtggtttatatgctgtcttatcaagggaggatgactcaatcttcactgacaacaactttatttacaagtaaggaaattaattagcaacaagaaagtatggacaaactaaagatgttgtaaaatatattgaaactaaagaaataataatttctaaacctgctataataaagtattgtttgccttcttaaatctaaaaataatatcagaactgttctaacaatgattggattagttacttagagaaaaatataataacaaaatgaaaatctatctaaaaagataagaaattgaaatatataagaatgtaaagaataggaatttaaatgtaaaggctgcattagccgccaagttgcaaaaaacttgaacttaatttaagtgcttgacataaaaaatatctgaagttagaaaatgacacagtaacataagttgataagcactatcataaatacttttaagaatttaaaaaagaaacatcttccttgggttcaacttcttgtatgcaaccgttgaagttctgtggtttatgatcataacccaaacaaagttactaaagtcaagcaccatccattttctttatttttctgatatctttatactttatgttgctaccctaaaggcctttcctggcttcctcataatatgatggatgccattatccatattctcagtttttccattattcccaaagtttcctccttattgtaaattaataccctccctttttacagatttaagcttaatttcctctttagatggcacaaagatcttcttattcttattgtccttgttaaaggtgtagatattggtccagccatcatatgtaacaccctattatcatattgtcatggcttaacaaattgaagatgacacatagccatagtcaaattaatcacaccaaagcttatgtctacatgaagaatatcatcctatgcttatttgagtgcatttggagataacacaatcctggcattcctttcctgccagataatccctatcagagtaaggctagtccatgtgccaaaacatcctgcctcccaaatgaccgttgaaacccctaaaagatatgatctgcacatccaccacacttttaggtggagcccaaacaattccagtgcttcttagtaacctttgccatagctctaaagctaccaagtagtatagaaaaaatataattaatcaacctgtcacttgctgagcacataaaaaaatccaaacagatgattctgtaaagaacactcaattgtagcatatcatttgtattgatcttcttattagcaaataatcacacaaaagctttaccttatgcaagattttcatcaccttcttcaggataatcatcataaatatgatcttcataatctagttcttccttatcacattttagaagaaacaaggatgtctaaatcgaaaaaaaattgaaccatgtctctataacatcaccatcttcacccttgaaagaaccattcaattttgatctaacttaagcgtctataatttctgtcatccttctctatcaaaagttgctgcctttatcaatgtgattgtctgaggtttttggaccctccatttgacttatgcctggttcttcacatttgtggcatgttcttccaaggttttcaatgcaagtttggcctgttgtccaacttaagtttgtgtgatttgcagtgttggaaactttcttttcagttctcgaaacacacttctgcaattgtccagcctccatagcattactttgtatcatcacagtggttgtttcacatttaaaagtgggttgcaatcttgtagactgttgtcaatatacaaatctccccttattttgttgtttctctaccaacaaaactagttaatctgatgatttcaagtagttctttggcttcttggacaaaaaccaacattttatattaattgatacagtttgactgtgtacttgaaatgtagaacactggaatcttgatgtaaataaggtcaaattttctctctttcgttttgttccattgaataagaagatcttgtatgtaaccattaatctaaccaaaattgtctctgttttcttgcagtatacaagaaacattacccacctgcattac

SEQ ID NO: 11331 - DNA, 9055 bp, Vitis vinifera
  Intron number 3 from transcript GSVIVT01016139001 (locus G SVIVG01016139001) derived from phytozome v7.0 (chr-ID chr9 ; pos 19612533 to 19621587 reverse strand)
gtgtcagtggagactgaagaaaaaagttagttatgttgtttatttaaatgattatcactatttttctttcttggtttccttggttggattttgtaattgtatctgtttatagtttttttgaactattttgttcaacccttgatctgagtcatgctgttgtgttttggttttcggttctttcttttgttttgttttttgtttttttttttttaaattttgtcttgttctctccatgaatttaaattatgttgtacatggccatttcctgcctagtcttgtgttgaagggcaaaaaggatcgttgttgtcttcatcaagcagttgggattcaaggattttagaattgaactgatactgaaatcaattatattgcccatgccattgctaatgctaatgcagatgctgggatcatcatcagtaccggtaataactaatgcaaattggatggtccaaatgacaagcgtgctaagatcatacttgagcaataaatgatacaaattggtgttgtacagtagttaaaactgttgttctttgatctatcagctttcctcaattagattgtgaatgaaccatcagctatatacgtatgtatgtatattacattttaaattgcaatcaccatgtaaaggtaaaagatcggtctctcttctttctttctttcttttgtctaataagtgaaattggcaggaagtctcttattagattgtgaatgaaccatcagctatatatgtatgtatgtatgtatgtatgtatattacattttaaattgcaatcaccatgtaaaggtaaaagatcggtctctcttctttctttctttcttttgtctaataagtgaaattggcaggaagtctcttatttgaaaaaagttaaatcaacctttaatggaaaaagaaagaaatcgaaaatatttataatgccaataactctttataattgcaaatacttttcctttggtgggggttgttttgaagctttgactaaagcttctagaggaaaccacttatactttggctatgtttagtttcttgaaaacttgacaggaaatgcatggaaatagagaggagaagtagaaggaaatgaaaagttagagagttgctttcttatggatatgttaggttcatcgtaagaagaagctatgaagaaccataccccttatcttggcttggtgtctttaaaaagaatggaatagtggagatttaaggggtttgattcccataaaggatgcacaaagaatatggaatgcattcattgtttatttatatttttaaattggcaataaagactatatattgacaaatgctaaaggaagaggagaagagggggggttggttgcagggcgcaccaaagtatataaagagtactaaaaaggctaaaaagaaagaaagatgatgggaccttacacaatcaatgaaatgaaacaaagtggagacatcaaccttcaaccttcgaaccacaaatgcagagagtgagtaaaaacacctattaaagattgaatcgatcactcaatctcatcaaaggttataatttcagtccaaagagataatggggcttaagaggtgctcatttctatactttttggaacacttaggttcttgtgatgtatgagagttgtatttttcgtttttgtttttttatttcctccatgccctttatttacataacactctcattgtatacttgtgttttgtcacctccataaataaataaataagctcaaccattttgcacttgaagcttttcttattatgggtgttggagcatggcatatgtgttggacccaaatcctaatatcttaaatttttaggaaaattgattgtttaagatgatatcataactaagatttaattggaggtctagggttttgtcctccctcaatcaatttatctatctaattattgtgacaaaaaatgtgtcctgtttgttggcaatgtgatatgtgcctctcacagtgagtatggggccacacatgaggagggtatcaaagcattgtggaagcttatattgtgaggaaatatggttgcccaacaatggaaaaatggaaaattgcattgaagataacatctaccatttttgcatttgaagtttttttataaacaaagtaaaaaaatgatgataaagaaaaagaccataagctagttcatataaggtatatagaggcaataaggcccaacttggtaagaaggcaaacatttccaaactccaaaaatgaagccactactaagaaagcaaatacaatgtgtttagagctatatcctttaccttagcagtgtcgttttcttgttcttgatggttttgtgatggtttctgatattggcaatagtgtttataccaatgctcacatgagctataataggtaatgaagatagatgaagtactccaattgttatgtatcagttcttcgataaattacttatatgcatataaaagcttgattgggtaaatgaattgaaaatggataaattgtaggagatggtcttgctacaatttgtgaactcactttagggaaaaaaaaagtattaatagcttatattgctaagaacgttacaattctaaagatgcttacttgttcatgagctttgggtatatagagatatcgataccttttttcagatgtttaagatgaaactcatgcctatgtgacaatctaaggtctataaaggatcatttgtgacatacgacatttggaatcccatttaccctgtcattttggttagaatacttgataagtaccaagaagcacaagctagaaagcacaatgtgtcctttgcatacctgtataactccaaatgttaaagatttattataatctagcatattattctttgatccatcaattaattattcttatactagttataaattgtataataaacataccttgtctccctattggatcaagaataaggttaaagggataaaaaccaccaatatatgtcaagccatcaaatttgcccaataaccaattgacgtcaccaataaaaaataaaaaaataaaaagcaattgacgttgtgtgcattatgtagacataaatgaattcccaaaatcattccatgtatgtaatccaaggatatttagtagataaatgtcttatatggaaaaagggaaaatcatcttaggctctagaaggtagattattaccaactctacttggcattcaatgtccacttaaaaataaactcacctaacactacttgtaggtggtatgaggttgagttattgatggatgatggatctagaaaagtggttgttctactccattttccataaatgatttttccactattcatttgtgggcaaaattttaattataagtactatccaaattgggttcatttcaaagatgctttgaaaccaacaaatggagaaaaaggaaaaaaacaaaagcaattccaatttcgtttctcttataactaacttaggaacttttacttaagaattgcaacaatttacaatatgaacaatgaaaagtcattccaactaagaattctaatagtgatgggatgttaacaccatgccaagtggttgcatcattatccttggaagtcattgtgtaggttccctttgatttttcttgttttattcgttcttcaatgaatggtggtaaaaataggattctcttttggaatatatttggtggcaatatcaacctctatgttttcagttctcaaatctttttaggttacaagaactagggcctctactatcttatccatattaggcctttcttcttctacaccgacttggattttcaatttctatcattatcttttttattagaaaattgatgagcttgcacttcttgtgccatttctcattcatgtgtgctggttcccttccttacaaaatgtaacatttggtcattaacctcatcaaggtaagtcttagtcaattcaatctttgaagttgcttctcaattgtgagtgaaaattttttccgtaaccaatttcacatggaaatctaaagcctaagtaaaagcttttgcttggttagtggctaatatgaaggtcaatactaataatttttttttttgataaataaaaacctaaattaaattaaaaagagccgccaaaagaggacccgaagatgaaggtcaatactaataatgtgctacaactaaggagaccttgcgaaacccttaatccaaaccactatgttatgtgctcggcaagtggaaaattgattgattatcattttttacactatcttgtagcattggagctatagcattcattattcaaaagcattggaattgtgagggttcccactagaagtatggtgaatatgttagccatatcttttaggattttgaggatcaagaggctcatctaagagtcatactattttggtatttggagagcttcactttgatatatattatccaacgggagaggaatgcataaaatttcaaggatatataaaggacatagaatatttgggagatggtacacttctttgcctcctatgggtttttgtcaccgacacctttgagggcgcacctttaaggtattttctactaaattggaacccatcttgcaactataagaagacaactagagagatgcatcttatgttcagaccacctaggtaaagatctaggacactacgaatttgaaatgtgcttaaagagcaattaggtatgtgtgggatcttattctaaatatgctaaagaaggtagcttttgtggatattcctgtcaatgctttacaactttattgaaaatggtatataaaccgaaagggttaaaagagaagttgttccctatttaggttttgttttcagtgggttcattcaagttaaattctgatgattgtgcattgggtaatctaagtcagttgtgaattggaggggtgatcataggatagagtgttttaggggtgggagctttctcaaaactagtataagatggtttagtcattgaggcaaatattttagcccttttagagggcttgctatgggctcgagctcattaccctttaaccaagggtagaagaggattcttctattttcatatcttaggtgtctaagttagagggagggccttggaggtattgtcgatatcttcgacaaattctatatataacttaggacttgggtttttacttttcatgatctcctcattcagctaataaagttgccaatcttttagcaaagagaggagctaagcatttggttccttttgtaggggaatttttgagggagtagagacattttaccttatacaagctcttgtggattttgatcagattttggaaggatttatcatccttcatttgtgctttaaaacttctatcagtgaattggttttgtttaccgtaaaaaaaatcttccttccttttgttgtgctacatccaaatagtcattattaagatcttttttaggcaagtccttgtattctaaaattggaggcgtggctgatcaaaaacacctatatgcatacttgcacttgacattgatgcccaaatccaagcaacattgatcttcgctaatttgttcttgattgtgaatgagaatcctggggcttggattgaggccagtgcaatgatagatatacttaatgctatgattgttggggtggcagtagggttggtggtatgtaaagtttctcctctatgattcatagatgtcagcttttttccctctatttctaaaaagaagaaagtttctaattctaaacttatccctaaaatttttgggattggatctgtttaaattataaataaaagtacttgattgagagggagttagtcacaagtggttggcccttgatgtagtttataggtgcccaatagttgagaaaaattttaaatagcttaatgggttgaagaaggcctatgcttccttaaaggagaagttaattgttgaaatgggtactcatatgctagaagtacaagattttgattccattttttattttttcagattggattatttgaaagaggtctatgggattgtatgggttcttgtacatatttagtcttgtattggaatccaaaaggatgacagcaattgtgtgattagaaagagaaatatctgcagagtacaggctatacatatgggaccggaaaatgctagtcctttgggaaattttcaagctttagcagatgggacaaaactattttcaatttgcaagaggttatagtagctgagattgatggaagggaatataaaccatctaagtcaaatgtttgggctgaaatttttggagcaccagatgtctttgttttgtcatggttaggcccagggtgttccaaataaagctctgtaagtggttatagtgattctatgtagagcatgattctgtgtgatgtattttactgtttatatataatatactttggcctctttacttatcaaaaaaatgattctgtgtgatgtatatcatcaagggcatatataggttgcagaatgatgggtgatatgccaattttctggtggaagagttctactcctttctctggaaagccatctcccaaggctatcagaatttcccttgacatgttagattcattgttaaggattgattattgattccacataagactaccaatcttttttatttgtcatactctcttctctgacagctttataatatttgactctcccatatctagcctttcttctctttgtaattctccagctcacaattcagccttggcaaaaacttggtttcatgaaattgatgacatttcttgtccttccctttgaaaaggcaaatatccttatattcattgaatgagaggtgttggtctttggattgtgaaggcatttttttttattccattcacttcttctatttcctatgaaagagatataatcagacccactgattaaggttcttggtacttgtgtcatggaaaatacagtgacatgcatttgatcaaagttacacaatggcaccctaaaccaagggtcaagtcttcttagaagcttgcaatcttcatgttcttgatgacaaactagctaaccaaatttgtctagctagggaaaaaattgtcactgctatgtaatggcatcagatctggaatttgggtctataaaattgtaccttgttaaaggtacaaaattctttctcactagtgtttgttcctatttgtttctctaatagaggcatagtgtatgacattttctgtgttcagcttaatatatcttcattttagattatatgtgcatacttagagatctctcatggctatatatgttgtaacatttttgcataacttcatcctttttttaatttcttgctaggcaagacaatccttcaatcgttgtctgatatagagacagtactcaccaaaaaattgttttcctatttgatgtttagaactcctttcagcattaggaaattcaaatgcttgatgaaacctcatcgaaatgcttggctagttttgtaggaataagaacttgaaattctttgccttgaggatgcatttggttcatgggtttcttaactagggaatgagtagcttatatccaagtacaagattaccgtgttttggtctaccattgtgaatctttcatttaccaaaatttacttatcaaaaaaaaaagattaccgtgttttggtgcatataactttgggattcttaatttctttcaatatgagattccctcaaatttggggaaatctaatacccatggaggacttggaagtttttatggtcctatttctaaggaatgaagatgaaagaaatgtagacaacttgattcaatttttgtaaatattactcaaaagattgttatgtaaattgatactaattcccatgtacaccaaacactataatggaaatagcataggagtttcaaattcccaattttaactaaatgtgaaaatggaaatctcctatcaattagattccaggaattttttttttcagaaaaatataatttcaatttcctagtttaggttccggcaaaccaaatgcacttatatgccttattggttattgtgataactaggaaaacaattacacctattctcttaatttaccttttcctcctcaacttttggtatttgtatggaccactatcataactatatgcaaacattattttgtaagtcaaggcattagaaaaaactggaaaaaaaaaaggttgagctaccctgaaacatagcttgtatacagggatcacccataaacaaaaggaaatggcaaaaagaagaaaaatgagaaaaacaaagccatcgtccaagtcctagagcacccttaacacaccaatgaaatttaaaaagataaacttccttcttcagcaaatgctccgacaaggcaaacagagatttgaaggaagatgtctttctgattcagctccaaccactctaagccttaaaaattatttactctctttccataaacaccaaaacaaactcaagagtcatcttccctactttcttttaccgttatctaaaatacaaatcaccaatgttatctggttttgattttcttgattaaatctcagcatcttcagatcgtcttccaaatttggtttagtactttatgttctttgtcatgtttagtgcttccaacacatgggcaaaggctcaagctcctattctttggtgcacaaaatcatttatattatgttggaagcaaatcacataagtcaccaagatgctgcaaagctggtttatcattacaccaccatcctcatcatcatcataattattgctgctgttgttgtaaagcttcagttgctatgcatgagtggctcatggaaccactcacctgccaatttcagctgtttactttaatctcttctgcacttctgcgtgctttagtcacttattttgttgttattgctgtaaacctttagttactataaaaagtgttgttcatgaagagttacttcacctggcaatttcagctgttcactttcctgtcttctgcacttctatgtttttactttggtcactcattttgcaaatatttgctgaacttttcattcataaaaagatacatgccttggaagctaatatcaatgtctctttggaaaaatcccataaaatttgggtgtagaagccaatttagataatgcttaccttgtattgttgaattgcagg

SEQ ID NO: 11332 - DNA, 3388 bp, Vitis vinifera
  Intron number 8 from transcript GSVIVT01009575001 (locus G SVIVG01009575001) derived from phytozome v7.0 (chr-ID chr1 8; pos 9555599 to 9558986)
gaagacctccttggagtgagtttgctgcggtaagcttttgattgtctggctgcattcatcatagccttggcttgttagaatatctcaacatgccaactgttttgggttttgattttgaatagcaccctaatagagttattcaaacttcctaaaggcatgcttgtattaggagatgatgtgtggttaattcattatgctaaagtatcaatcattttcttttatacatattttcgtgaagattctttgcttttgcagcatttgtttcatagcatccttgctccttttatctcaagttccccttagaaatatttttgagtcattttaatgccttacagttttaactcactgtattggtgctcatctacagttttcctgctatagcagctactcctaaacttctgtctttactctttagatagatgccatgcagcttatcattctcgtggatatatttggatagttgacaccaagatgatctaaatcaagatcactcagattgagtctttatactagtgtgctttagaatgtaaataagcttattgtgagtgtgttatatttatattgtgtcaatggcattgtaatagagctcctagattagtcctaggtgatcaagatttgatgggagatatgctgcagatgattcaaagtggaaggcatctgcatggttttggtggtaaagataacatcacatgacatatgtgcatgtagttttgaaaatgcatacattttgagggatttaaagcatgatattttttgtgtatttttggcccaaaaattctgaacaatcatgttcaaaatgttgtgaaaaacagtcatgaaaaatgttgaagtggaagaaaaattgaatggaattcaaaaaggaagttgggcatggaattgcacttggtgtaatggctgcaggctgcacacaggcagtgcatagggtgtgcgcaaggatggtgcagggaggttggccttgtgtcatgcatgtcagctcaggtggaggcggagtgggcatattttgtgcatcttggtttggctactgcctgagggcagtgcatttgtccttagtgagttttttcgcactgagcttgcacatttgccgcaaatgggatggggcagcctgatgtgcatgcttcctggggaagtagatgtgtgcctagcactgaattaatgtggcatttgcatattggatttacacaatattaggtgcttaggccatgggcaaagagctgttgctactgactgggtagatgtgcttagcacaaatctgtactgggccctagtgcactgtgccacctggtttcctttgtgacaatcacttggcgcaaattgtactcgtggccctagcgaaattgttcaccaattcaaaattttgtattttcactccaaaatgattctaaatcatttctcatggaacttttgagttgaaatgaagtatgctaggttctccataaataggtaagagtctttctttttgagtgagcttttggtgttgcatccattctcatttcatatctgttgatgctttttgagagttgttgagacttgagagagaccttgttctgagaagattatgagattctccattgaagatcaatttagcttcttcttgaagatgaaagcaaggttgattcaaggccaagttcactaaaggttcttcttcttctctcttcgtatcgggctgaacaacttctactccattcttctttgtttttggagggttgtgattagatgtcatcataaagtcctatgatacctaaatcctccaacaggacctagcttacatgtgttgacattatacgatatgggtgtgggattcttatcagatattctcactttgctttggatttggtcatttgatttttatttttatttttagtttttattttttattttttacagtttgccaaaagtgaacttttataaacatatttataaataagaaagaaaagacagggataaaatggaaaagaagaagagttcctatctaatatatctttgatttcttaattaatttttaattggattttttccctctttcccttttagtgtgttgtatccaagtgtccatacccattattgaaatcctttctggccaaattcccatatccaaaaaatttgtaaatgtaaaggatcaaacacctggatgtatacctgtatctaacacccacacccctatccgtgcaacaaaggtgaaatttggtcagactctggtgatgtgaaagaagaatggtgaaatattcctgtaatgtgaaagaagatttaaagtaattttgaagagattgatgagatgttgatctgtggaaggtcatcaacatgaatttgtggagttgcaattgagggcaggccaccaggtaaagataatctaagattggtctgaagctctatgctaggtaagactaggttgtgctaaaagttatcttcatactggattttatcaactgagacggctgctcatgatttttgacctcttggaagttttccatgtaaaacctctgagttcattgttgtgtgattgctaagattttctcaaagacttctagtccctttttcatagttgattttctgttaatagcagcgttgcttattctccacacactcaccttcatctatcactgattcttcattatcatttaccagtaaaagaaaaggaaataaatcaaaatattcatactatctctcctacaatttctcctataatctcaacacaattaaatattgtaggtagagttgaagtcatctcaacatgttatttcctttgtaacctttgggtgtgggctaataggtttttagtttccggcccctcttccattgttgattttgtagattggttgggctatgtttgagggggtgcttttcttttttgtcccctgctcttttctaaggcgctcttaggtgtcctttgtatacttcctgtgtcttgttttaatatattgctatttacccatcaaaaaaaaaattaactgagattaaaatcaaaacattaatcaatatttcaatactagtttctcaaagaaaatggttaaattgcttgagtggtaatgtaatgtgacgtgctgattgttgatgaagaagcatgaatcctttggattggaattgctgaaatttacattaaaaggttttccagacaagcatcatatactatctcactttttattttccttggtgattgtgatggtatctgtcactgtactaccaacgtgggtattgagatgttatgctaagcacagcacattgattcaatttgcttggtcatgaaattgtcccctcaacttttaatggttccacataaaagtatgtgttccacaagagaataccagaacatacaagtatgtgttccacttgcatgtgtttctgttttatcacttaaatggactaattgtcttcttcccatcagcctgcagca

SEQ ID NO: 11333 - DNA, 3965 bp, Vitis vinifera
  Intron number 1 from transcript GSVIVT01037004001 (locus G SVIVG01037004001) derived from phytozome v7.0 (chr-ID chr3 ; pos 9050393 to 9054357)
ttgcagttaagagagtatcaagggggtgcaaacaagggataaaggattatgcatgcatctgaagtgaagatcatcagtcgattgaggcatcggaacttggtgcagttcatgggctggtgccataaaaaaagagagctcctattggtttatgagctcatgccaaatggtaacttaaactcctgtcctttggaagaaaaaaccaaaggtagcgtgatgaccgaatggaaagaaagaaagaatctgaagaaaattcttggtaattgtaagtcactttatgcaagatgtgatgctctcttttgatgtttttaacagacgtagcaaacgacaataggcttggaatctggcatggacacaaaggaatggctttccacgctctttcatacggatatttgtctctctccagcacgttatttctcaatcatgtcctcagcctatcgtcatctgtttacgtaatcgtccgatggcgacattatgtcaccctcgcgaagataaggcctcaagacagctcatccatctcaatctttatctatatctattcttatcatcactcaaaaaattttaaacatgataggatggttataagaaattctcagtcttattcactcgtctaattattttaatttttgtttcaaaattttttaatttataataaataaaatataaatacaatttataaataaaaaatattataaatatttatgatttatttttatataaaaagataatattttatttatctttaaaaattgaaaacaataaaaaaaattgacaaaattgtaactaaatccgctttcaacttgggtttttaaaacttctcaaactcaatcataacattttttatgtttatttcaaagtcctcctacgagaggccaccacggataccgaaaaagcttacctcattatcatctttgattatacattgtttatataattgaatgcattgataaaaaggattttgaaaaaaatataggagtttatatgattgaatgcatgggtggaaaggattttaaaaaactatagcaacacttttaaaaaaacttatttttaattttattttttaaaacatcaattaaaatggtataaagttagttttgaaaaaataattttcacatttaaattgaaattatttcttcaaaaaataattttttttataaaaagtgttccaaatttgaaataatttcaaaaatattatttttttaataaataatttttttttttaaattgatgctcctttttgaaaaaaaaaaaaatcatccctgaagtgaagattttgagtgaggtaaatgggtgtgaattgaaacagtgcaaataagaaaaaaaatatttggttaaaataaataaataatccctaaattgtaaatcaaacatttttcatgttttttaaaaaaaaaaatcaaattttgatataaatgtcctttgacatttcaagtatttatatgtaggttttaaaaaatgttatttttgtaagaaaatgataagagtatttttacctaaatgaggcaaaaaaaaaagaaagattaaatttcaaaatttgggttttcaagaacatcgaacgaaatgacacaataaaaaaagtacacgcaatcacaaactttcaacattggaaattcgaaattaaccttatgactagaaacaacaagattctatctatggtgtatatttcattttgtactaaaaaaaaataaaatatatatatgctttatatctaacataaacttggattaattccaaatataagtttacggtatagaaactcaggaggcagagatctctactcaaaccaaatatctaaagatagaaccagtagcatgttcagcttgttttatttttttagacttcaacaattttcacacgtaaacgaacactactcatgaaatgacttcaatggagattaatatttgaaatttcttcttgtaactcatgtaggccataccagttttatcaagacttataatctttcttctttgaaatttctttcttgtgttgatttcttttagactatgtatgatatgttttacattgtgtatagtaggtgagaatgaataatgaaaatgaacattttgtttttatttccatttctccttgaatataaatgaatttgataattttaattcttatatttgaatgcactaagaataaaaagttaaaacgattttttgtttatattttgatgtttggtaataattggaatatgaatgaaaaaaagacattgataatttaattttttattttttttactaaataataatattaaaaataataatatttacttaataaatacaaattaattataaaaatcattaaaaattaatgaaaatgtaaggataaagtagtaattttaagaaattatatatcatttcctataacatcctttaatagattgattcaaatttgacttacaagtagaatttcattattataggaattttttaattttatttttattgtcatttaaattttttttatcgtacaatgatgaatgaaaaaaataataaaatatccctccttattccttatcccctttcataaaagacagttgtaataataataatttttatcttttcatatttgttttattggtaagaaagtcttgacttaaaattttcaataaatgattatttgatgggtttttagaaatttaatttgtcttgttatgtttaatagtgattttagaaacatttagaaaaaattatatttgaaagataaaatttttcaagtgttaaaaagtttagaaatattttctaaaattattatcaaatgcattattaatcatttacacatatttacaaatgactttaattaacttgatgattcattaatataatagtagaagctaaattactatccttgatttaaaactcatttgacaatacttttgaaaagcgctcagatcggagaaggttgaatctcaatgggttaaaaaaagaatttttgagaaaaaattagatattttataaaatttaagaaacatttttagatatttgaaaaaaaatcctttatgttgctttttagctagacacaagcccacagttctacaacatgtcatttcagcttccacgatgagtacttttcaaaaggttattcctaggattcaataattcaatcatttaagtttaaacataatcactacatgtgttattaatttcaagcatatatatttggtttgattgattaaggtagaaaaatcctaaatatcaattgtaaaatgagtttcatttgaacaaattaactcatgattacttctaaatggcatgaaccctaaaaaatgatatcttaaatatcaatgtaattaagttacatgtatatatcctcaaaatgcatccaaacatgatcttacttctaaagttatgtttgattcttaaaaagtaataagaaaaaaagtgttaaaaaaaattattttctcatatttggtttcataataagaaatataaaaaaaaaatatataattaaaattagtaaaaatttaatatatttctaaattatttaatttttatatagagagaaacactaatatattttgcacatgacccttggaaaataaaatcaaatagtggaatagattctttcatctaaggtataaaggaaaaacgagtttttcattgaactaaatacaacaatctccccacgtcttgcccattctcaaatatttcttctatttatgtcccccaagactgcattctagttctgccactaaagaaaaataaagtaaaatgagttaaaaaaaacatataaaaataatttattaaatttaaatttatttttttattttttatttcttctattttctttatttcctccctattttcctttttaggaacaaacataactttaaaaaatcacaagttgaaaggagaattatatgactaaccttgtttgtatagagcatggagactcattttttgggtccatactagaatccaaggctattagctatacatttgtgtttttagcaacattatcaaaga

SEQ ID NO: 11334 - DNA, 3145 bp, Vitis vinifera
  Intron number 3 from transcript GSVIVT01036486001 (locus G SVIVG01036486001) derived from phytozome v7.0 (chr-ID chr1 4; pos 22602050 to 22605194)
ctaaaaatatcttgaagtatattcagcaattggatgtaaactcttaaaggatccttagacatgtcaatgaagtcccataccaagtttatcatgctataaaggggtggcaacagatacctgctcctcattttcagcccatgttttcaaggttatctatcaagtgaatggaacaagagagattttcttaacatgcactgactgaaccaacaagggaattgttccaattaggttacagagaaccttgtgatttgctagagggtgactattgagcaaatgatgcaggtaatctcaccattgaggggatcaatgcaatctcaatactggatatctggaatttggggctcactattgaatttgccatggggcatagaaaaattttgtttgttctcaattctcatctggaacttgtttgggctacaagtcaactttttctcttttcacaatttaagtcctaatgctgggcagctagaaggttcttcctgtatagctatactagtctcatgtgaggtaattttgaaacagtactgtttttgtttattcacaaagatccatttagattttggatcaacctcaattttgattattgagtttagtatgaacatgttgtttccaatgaagtaacttggttcctttctcagagtgatttgatagcatatttctcatcttttgaattatcgctacaaacctatggcaccaataaacaaaattctcatcgtaacttgtttcaaatagactggcaactatggtgttattgaccacacatttcaacgtttgatcactatataggagactagcaaatagggtgagtttcaaatgctcggttgtattgatcacaatttataggttattcacattcttcactatgtaaaattaaaattttatttgtaatatatagtggttttactgttttagatttaggtaaactatcataagattctcatttcaatcccaaatgttcttgcactataaatgccctcgggtgtagctcagcagtagcgacctctggcaatgaacagacctttcttgggtcttcttttccattttttttttcttttttttttttgttttttgttttttgtttttgtttattttttggggagtgcacctatttatccaggaagacttaattaatttgacagtcttacaaaattgtcttgtgtcatttgtacaacttacaacattttctatgaatcagatgccacatctaccatgcttgggacttcattatttgttaaacttggatctgctgtagtgaagaatcaaaatgtggatctgtcaagttctatgataatttgaatccattgaaatttttggtattggtgtctacaaataccctccctttaagccacatgaacatgttgtcatacacacacaacgaagttaaaagtcacttttttaggttttgacttgatttgggctttaacatgacttggaatttggcttaaacaacgtcaattatgcgcttaagtagtttgatctgaaatataaaaactcttttataggactggatcttgaagctttgaagattcgaaaatacttgcaaacccttttgaaattttgaagaagtttcaaatccttttgaagctttggatctcttttgaagaagcttagaaaaagtttgaaggatatttgaagattttggagagtttaaagactttcaaagaagttgtggacctccaccctcttccttcttcatgagccagctctgaaatttactttcttcaaatatgtacaacattgaacttaaatttggcaatggctatataagcaccccctgtgagaacattgcatggcctcttttattgtctgggcaccatcattctttgataagctttggtaacctgttcagtgtatgctttgttccattatttttggatttctgtcatgctttattataaatgtcttgtcggtcttttaagtaagctttctgatagtgaaatgacatggatctacgaggacaattaccccataatgtgaacatacctcagtgcaaattatagcaataacaattaatcttaactatttggagttggttatacattaggcttttctattcagatgttcatttcatctattaaataaaggctataatgtctgtctcactgcattgtcttaagttccttctgcacttcaaattgtcctcgtagcatttgaacttgaatcaaataacttcttcttactggtgcatttattggtctttgttgcaaataagccagttatcaataaagataattatgggaaatcaattactagctcttttctttttcttttttggtcagggctccatgtaaataaattgataattatatactgactgtgttacaaaataggcattataagctggttgcagtaggacataggctctcttaaccaatctagacttctgttctctattggttcccattgtttttcttcctgaagttttcacttaccaaatggaaaaagattggtaaataaatatttgtagtacaaactaacaaatatgttcatactttctctgtaatcatcttctttttagtctcctttttggtgtacgaaaaattgaaaccaagtgagataattaatctctagctgtcttgagacagtctgtttttccattgcttcaatgcagaactatgagatttattaagtctttgtttggaattaaatatttgttgtgctccaaaatgatctttcatttcattctctttatgtttaatatggagggcttgtactttaagcagtatttgtttttcaagtagtgattctctatgattgtatatgcgtgcagttctgtgtattatatgtgcatgcacaggtatggaagccaatgaaaatactttgacgggtatttggtttaggaaaattgattttttatgctgtgtttgtgtatgtttttcccttgacggatattttttatgccaatgaaaatactttgacggatattttaatacaagacataaggtttcttttcagggaggaaagacgggctagaaaatggaggaaaatgattggaattagagggagtgattggaagcattatgttaggagaaatcttaatttggttaaaaggtgtgtatgaaaagaagtcctgattgtttaaggggacttgtttggcagttgatctcagaaagtcatgacctcttgctgatgaaccctggagtat

SEQ ID NO: 11335 - DNA, 7857 bp, Vitis vinifera
  Intron number 3 from transcript GSVIVT01009681001 (locus G SVIVG01009681001) derived from phytozome v7.0 (chr-ID chr1 8; pos 10417538 to 10425394 reverse strand)
cctcgacccttggaacatgtgagcatgcttctgttttttctattcattctttttgccttgcagctcaccttcttttttattctcaatcttcttcttctatctctctctcgtcttttccacagttacatctaattctatgaattcaagtctaagccctccagacacttatcagtgacacacacttgttgtacatataatgatatcatcaatttcctgcagatttcccttaaatgtttagtagcatttattcaccaattcaaatccatacatacaaatcgtatgtacatgactgatgagttatggctatgtgcttagagaacagctgtatccatatttgtggatgactaaaatgcgaattaaatatattcatatttatatacttatgtgtgtacttaaacacttagtatctttcccaagtcacatgcatattctcaactattctgaacctctgatgcatttttttcatgcatgacagtgtgacactacacatgcacaacagcataagagtgtttatcttatggaggatttttttttttcttttttaatcatttcctctctttggtgagtaatcgaaaactaattggtgtagttcaaaaagccaaccaattgaactacttgccagaggatcgattgcatttctttgatctaatagctatttagcatgggaggaagtatgaatgaaggtaaaaggggctacaagttggagctacacaacaacaatgttggtagattcttgctatgctcagtatcgttaatagaggataaaaggttctccttagttctcccagaaggtagggacttcctagggggatggaaggccttgagcaccaaattaaggagcattggagttgcccaagcctttagagcccaataaggtaattgtatgatggttggagtagaatgtacatagggagcgccccctgttttggcgtattttattttaattttgtctctttgtctatcaaaaaaaaaaaaaatgatggttggagtagaaaggagggggagccccttcaaagggtgtttcctttgcaaaggtggtgagcaaaggtaagagggagattgaggaggcactttggattgagagtgagagaaaggaggttatgagaaatttggagcacctcaagaagtgcttggtggggagatgaattgattctttaggccagatgctgattctggacttgtcgaaatcatgggcttgacattcttggagattgaaagttgatttacaaatgtttttgttggaggctcacctcatattattcaagtttgcaaatgcttttgaagccaaaagggtggtggcatttagggaatagtttgtatgaggggagaaaaatgcagttagactagtggagtccgattgttggttactttggagatgagcttgctattggagaagtttgggtgagagtgacaacattgtcgatgcacttgtggggaaaagagtttttcaataggcttagcgatgcctatgaaggcttcatggttgtggatgaggagatggtaggtagccatcatctccaatgggcttagaatcctccttaagttcagctcggggaaggtgcaggctaatctgcatgtagtggacaaggaagatgtcctaattgtccaactatggtggtaaattccgccatggttgatgatggtagtctttaaggggaggtatagaggtttggtcagggatgagtgtgtgggaagtgcatgtgtagttgaaagagtggggatggaagaagagaaacctattgacaaggacttgcaagtgttgtgcccagagcaaagtctccctgcatgtgcaacgacaaaggcaactttttatgagattgacgacaacatggtcattgagccttttgagtctctttgtgatccattaggccttaggtcttctaatgacaaggatgagggtagagagatctcttacaagtctttattagactaaccctaagcaataaaaatcaacttttttgtagggagctttggtaagctggtccctttgaggaatgatctaaaggttttaatttcaaacacttcagaaggtcgacctaaaggttttattttcaaatccattaaagggcctaaggctaagaaggcctaagagggtcttcagagctctcctttcgataaagagagtgttagcaatgtggagatcttcgttgaaccctttctaaaggtgatgcattgaggtctggatgtgtgggtcttgggaattgatgacattctctcagcataagcaacaccttcaaaggtaggccatcatcttccctttcttatctttttgattctccattgggattcttgttgatggcagtgggctagcgattcaacaccagggagatgggctagtgatgtacggttgagacagtggggatggaagaagagaaacctgttgatgaggacttgcaagtgttgtgcttagaccttagtctccctgcacatgcaacgacagaggcaactttttatgagattgatgacaacatggtcattgagccttttgagtctctttgtgatccattgggccttaggtcttttgatgacaaggatgagggtagagggagctcttgcaagtctttattagactaaccttaagcaacaaaaatcaactcttttatgtggagctctggtaggctggcccctttgaggaccgatctaaaggttttaatttcaaacccttcagaaggttgacctaaaggttttattttcaaatccattaaatggcctaaggctaagaaggtctaaaatggtctttagagctcttctttcgatagagagagtgttagcagcgtggagatctttgttgaaccctttctaaaggtgatgcctcgatgtctagatgggtggcttttgggaattgatgacactctcttggcataggcgacacctttgaaggtaggccatcatcttccctttcttatctttttgattctccattgggattcccatcaatggcaatgggcttgtgattcaacactagggaaatggtcatggttgggagatcgagtctcatccaaaggtggggctttctttttggtcctttgagatatggaaatgggcttgcttaggatgatgtttcaaggtggtcggttgttggagtttataatgaatgttgtcaaaggtcctacgtgtaaggtgattgtggtaaggtttgaggagatggagtcttctaaagcgatagagtctcgatgcgatttagagggggaggagcattcttctaacttcctcttcagtgagttgttcaactttagtagctttatggagatgccaattgtttttttttttttttgataggtaaaggaaatttcattaaaagccaaagaggctaaagaaagagtatacacgaagtatactagggaacaaaagagtaaaagacaataaggtaacaagcttggcctttacttggtagctaaccagtctacaaaatcaatcaaagagaaagtgtgttcctctatatacaccctagcccaattcacaaaagtgtacaaaaaaatggatttaattttttggtcattcctcgcaacatcgtcgaaggccctcctattcctttctttccatatggtccacatcaagcagagaagggcaactcttcaagctttctcccttttcttgcccacaaaggacccatgccatcccaataggttccttctcacggaggagtgcatcacccattgcactccaaaaagggcgaggatcagaagccataacattttggccttctcacaaaacaaaagaaggtgatctgtggtttcctcttcatttttacacaaatagcacctattggggatgcttcgcccatttctctttaggcaatcaatggtgagcaacttgctccaagccgcctcctaaccaaacaagctagccctaattagaacccaaggcgtccaagtaattctagccgggaaaggagttctaatgccccttgagaacgagttataaaagacttgactgagaaggtctcattcttgttctctccccaccaaagcaagtcatccacacctcttctaatggtcaaaggatgaagtttgcttaacaagctttctacttcccctatctcccaatcatttaggtgtctattaaaacgaagcccccagctgcccccaactccgtcctcctcccaagccttagcaacctaaccttctttgttgactgttagattaaacaagtttgggaaagcatcttccagagattgattttcacaccacaagtccttccaaaacttcactctagtaccgtctcctacaatgaagcgggagtgagttcgaaagttctcccaacatttttgatggccttccaaacccccaccccataactgtctcttacacctttggagcaccaccccccctcttgaaagctgtactttctagagataatttgcttccataagggatcattctcattagcaaatctccacaaccacttcccaagtaaggctttattaaggatagataggctgtggatgcccaggccaccatcctttttagcagcacaaataatcttccaactcaccaagtgaggtctattctctaaggcgcctccaccccataagaaatccctttggatattttcaagccttgcacactctcttaggaatcacaaagagggaaagaaagtaggttgggaggctagagagggtgctttttagcaaagtaagccggccacctttggagagatattgccttttccatagagacaaccttttcctgaatctttcttccactacatcccacaccctagtggatttgtaaggggccccaagtgggagacccaggtaggaggtaggtaaactcccaatcttgcaacccaagaccggggcaagagtctccataggaatgccttcccccactgggatggcctcagttttgctcaggttaacttttaactgtggaatcgcctcaaaccacataaaagtccagctaagatattgtaactgttctgcatcggcgtcaattgtgggtttcaaaaagcagattgtctcccttctgagaaaaatagaagcaagaaaagggcttggtgataaggccttgaggggggaaagagaaaatcaaaattgtcatcttgttttgattgaaagattcaactataatgctcggttaattaatagctcttctctatcaactaggggaaggaagaggagtagtagggatccaactctcattgcacgaggttgctatgactccactcttggattgatagaggtacttttattatagaattgcttaggggttagatcgagttcacttccatgatgtaaaggtgtttcgattgctagtcttgatgatgagaagtctaggtttgggatgtttcttggttttgggagatgtggtgtcaagagggccaattgagggtagtctaatgttctaggggttagggtgttgtttttgcttaggtggttcatgcttgctagtctctcttctttcttgcttgccttttaaggctatttgtatacttcatggttattttgatgcaccttttcaaagtgcttttaatatgttcttttaatttacctatcaaaaaaaaaaaaaaatacaaaatcaattaaagggattgaaccttcttatgtacattacaacccgtaataagaggttactttttttttgacaagtggtataataagaggttacctaggaatgagcgcttcaacatttgattagattgctcttatctcggcctaataccaacttgggctaagtggctctcacttttcttaaattgcaataccagggtcttgtcctgatgactaaccctctccttcttattgtgggtgtcctgcaaatctacttgacccaaccttccttcaaatctaagcctgctcgtagttgaaaacccaccaccacctgcatcttctcccttttttggccacctaaaaagagctttttagggccattagactctttttaacttaccactttctcttaatggttgacatgtccattgcgtcattgttacccttcatattctaatcactctttctttttctctaacttgtgtgcgcatgccaaacccttttcttcatccttaacctcgagtctccttaatctaccccttggaactaccttttatatccatggtaggccttcccgccacaacagttctacaaaacaaaagagacccaccaccacttgtagcgtcttaggcagctttccccttggacctcgcaagaatccttgcttgctgcaaattgtgattaagaacattgtcttcatccattgcaacaaaactatcacatcaatctccaaaatttttaaacaactccttatccctcaagtgcaatggacgccccactattgtcatccacacttccttcacatgttgttttgaaagtaccctccttttagcacctatctctttagaaactaaaatttgtcctcattgcttaatcctctaataagtagtgattgcgtatcaaaggcttcatcaaaatcaagtaagatgagggaatgcccaagcaaggataacctttccccacctttcaaatgtcaattatgaacaacctttctcttcaaagccaacaaattaggagttaaatctgagaactctcctttgtctacccactcaacaatgctacaaaggtctactctctaagattaacctccttatccctcagttgcacctatgccgcatctcccattacacctcaagcctttttcgccttgtctgtgaatgacttgttggaaggaggaggagctatcttgctactttccactaccaacctttttaacaagaattcaccctttggctcttgagaggttgagactaccccaagacaatgaagctttacgacgagagttacccaacctcaaggaggtccttaccttgtaggaaaactagatcaaacctccttgcatccacagagctaacaaatcattgatgaacctctctaccccattaccgcattgctctaatacatatcccctcctttcttcctcccaaactttgcaaaactatttcctattttcctcttagcaaccaaactccactccttccaacaactacgacaaagtcaaatctctgaatcttatctaattggagaagcctttccctctctctagaaaatttctaaccaaatgaccttcgtcctcaacgaagatttagaaggacttcgaatccatgccaaacaaacacttccctccccttgtgagatcaaaacccctacagaaatctgtctattattagagaaatgaattttgaagtttcctttttaatgaaataacctaacatttaatttatttttacattcaactaattcttgatgagataacggaatatgaatggatggctgtacccttttatgtgggtgcaatagaggttctagacacttttccctagttttgtgaagaatatggttccatttggagtatgaaaagtgagttttttaaaaatggaaataataagggaaatgaaaaaaagtaagcataaaaaataagtttgggtccagtaaaattttcctttgattgttctttgattttattccctcatatttaaaatgaacaatttaaaattataactttttaacataattttcattatgttctattttctttcatattttccatggaaaaccaagagaattcgagatcccttccttttttccccctttgctgaccgcttattaagatttgaatagagtgtacaaatcagtgatttttcattttagaaaatcttgtgcatgttttcctcccatgtaattgatcatagccaggaatactaaggcaggttgtcaagataagcaaattataagccctgcttgacatgctagagtgttaatgactttcttgatgttgttttagtgtgtatcatgctgtatgtcctatatttctctatcctcataagtttggtttactttgaaggtaactcttcttgcggctagaa

SEQ ID NO: 11336 - DNA, 8402 bp, Vitis vinifera
  Intron number 2 from transcript GSVIVT01009688001 (locus G SVIVG01009688001) derived from phytozome v7.0 (chr-ID chr1 8; pos 10490916 to 10499317 reverse strand)
tggactggtccaggaattccaagcagtctttcaaggtatacaattttcttttcttctttaactggtttaaatgctggccatgagttcccatttgaattgcattactgagtgacgtttaggaccatctgcttggttggaatgggagattggagattgagaatggtattataggagtttaaaagttctccagagagattggaaggagaaggcatctcttagaaaaaaaaaaaatagtagataaaaagttgtatagaaagagccctttttttttaaaaaaaaaaaaaagtaaagagaggcaaaaatatattaaaaaagaggcgctaaaacaacgactcaaactaaacaaaaaagatacaccgatccccacccagcatgaataaaaagggttgtcaacaaggaggtacaaaaaaacccactctcaatgagagcccaaccaatcaatgaaaccaactaacgtcgaaggaccatcttttatgaataatttggtctcaaaccaaagaaaacaaacaaaaaactttttaagtttttggatggccaacacatcatcttcaatcacaattttgttccttgtttttccaaagcatccaaaaaaatgcataaaggacttactctccaaacttccatcctcttctttctcacaaatgacccatgtcatcctaaatgtgtcgccctaactgatgaaggcaacacccattgcaccccaaagagagtgaaaaacatctctcataaagtccttgtcttgtcacaatggagaaggatgtgatctaccgattcttcatgcatttggcgaaggtaacatctatttgctaacaaccatcctcttttttgaatttgatccaaagtaagagctcttccccatgttgcttcccaacccaaaaaactcactttgggctgcacgcaagacttccaaatgatatttgatgggaaggaaattgtagagcatggttctaaggctttgtagagggatttaatagaaaacttcccgcacttagtcttcgtccaaagcaccttattctcttcatccccttgaacactcttcccattgagactcaataagaatctgtccacctcatccacctctcaatcattgaagggtctagagaaatgcgagctccaactcccttttccatcagcggaactccacatatcattcacccaaacgtccttggagagggctagagcaaataatgaaggaaaagagtcacaaaaaggtgaagcctcacaccatttatccttccaaaatctcaccctctgtccattatctaccataaaaaaaaatctactacttaccaagtgcaactcctttctaattgctttccacctccccacattgatacgatccacttcacgaaatcgagaaacttgtggatcaagaatgactccaagattgtctagaaacagatttgtatgaaaccgcgacccattgcttatatggaagtaagaactttggtataatgaagatgccacaatcaattatggaaggattgattgataagtcgaaggagaatgccacataaaattttccaataagttcaaagagttctaaaagaaccaaagagaattttctctcacaaaattataaatgaaatctatataatttttcaataaatcgatgactatttaaatataaagaggtccatgaatttctaatttattacttccacataaaatttgaaaattaaaatatcttgagttggattctaaaaattgaatccattatttcctaaaatcatgcttaccccaaagtaaaaaggaaataagggaatttctaatttattacttccacataaaattcgaaaattaaaatataataataaataagaaaggtaatctagtagtcttaaaagattgctttagattgtgccaaccaatctctttaatgagtcaaaatctagtaatcaccaattcaggaaactccattcaatccatgcaataggcccaccagcccatttttccaccaaattaaggtccaccctaaaccgcgactgggccataggtccactcttatatgggcccctagactgaggctcatgagctctataaaccagcccgcacctcttcttaccaacctcggcccaattgtctttaggcccactcccctccccactcaatctcactccaaaaactgctagagagttcctttccttaacaactgctttcccccgcccaccttttcctgcaacttgtcttgcacccccaacaatacccaaaccgtgcaagtcagagtcaacaaccacctccctttctatgacttcaccattggagcacgccactccatctccagcaatatgctcttgcgcttgtgaaaaccccatgcacctccctgcatgtgtatccacccttccttcctccctaacctttggccgctcatttttcccatgcatcgacaccaccatcgaaacccatggtggcatttcccaccatagttggattgcaaaacaattagatccccccaccaattgtaacgtcccaggttggtcttttccctcagaccttactaagagcctggcccattgaagctgtgggaagttagatgtgtcgtcatccacaacaacaaaccctttgcaattgtcccctgcctttttaagcacctcccaattccaaaagtgtaacgacaaaccaactgccctcacctagatttgattagcatgaactccagcccaaaaacaacccacctcgggtccccacctctccaaatgaagcaccttgtcctcaaagcgtcgaaccccccttctcaacatcctctatgtttcctctgcaactttgaattccatcataaaatatccattgctcaaattcgataggctcacccttctcttcaggttccaatgacgcacccccatctccttaacaaattcaaatccggaacctcaactattgcttctccccatcgtcccaccaaacagctccccaattgctcctccctactcctcaagtctctgcccccaagttgaagccacactgcatcacctaatcttccgaactttgcccttgcaacctcatcaaaggtccttctcccatcctctacctcaacctggtctccacccctcttatcgacccgttcaccaacaaggctagaacccaccttcgcttcaacaggggtgacaacaccaagagagtgcagcttcttggctagcttaacccagcccccaaggatccctcttctttccaaaaaaactaaacaaaacctctttgcttccagattgagaacagaatagaggatgaaccttcacgccttgttagaatgcctcttcattctaaatttcctaccctcatcttcccaactttttacaacactcacacacatttccttcttgcagcagacttccaccccttccaacaaacatctcaaactgaagtcaccgaacctaatccacgaggagaaacctttacttctctccaaaataattccatgtagcttcccatcagcattctcgaccgaaatctcgaaagacttctactccttagcaaaccaacaactaccacctttgcttcccctagacatatttttatttttttcgattgacatttttcaaatcctaaaaactaaatgcgtcctcctctgttttttatcttttataaaattagaataacccatgggattaattgatttgtttaaagccacagtataacagtaaagaaagtgtggatcaaactcttacagtggggaatggggatctaatctgacttcaataacatttgactacttggcttttagtctccttgcattcctttttgctttggattcttgtttttgtaagccgttataatgggaatcaaatctcacttcaataagatctaacattggctttgagtcttctcgtcaacgttaacttgcctttggatgagatttttgccatgtgattagaaagtatcagattcagatgctacatttctcccttagtcctggcactatgcctttaggacatgtgacaagggtctctatttgatcttcttgtagaaatcttggctcaaccttctactttagcctcttatttccttcttgattgagctttgaattggtaattgtgcaattagtatcttattttagcttagaatctacaaaaaattaaagagaaaatgtaaaaattattttcccatgaaactagagggtcatttttttttttgataagtaccatgaaagtagagagtcatacaacaaagaagttataataatgagaagaatcctttctaaaaccaatagttataattaataaaattatagataaaggaaatttgaagttaaaggaaaattccttccataagtatcattctccttcctagaattaaagagttgcattcactcctcattttttattttattttattttattttattttttcagcagttctagaaatgaagttagaaaattaacatatgtttatagtagtcccactttttaatatttgctctacttttttggcaacccccattttttaaaattagttaaataaaagaatatgttatttcacaagtctttcaggatttttccaagtatattcgatttgtcgtaggagatggggaaaaaatttgcttttgggaagatttgtggtggggggaccaaatctttaaagaccaatatccaagactatttagagtagtaatggataaaaatattcctatatcttcaattgttggttcggctcgccctttctcatggaactttaatttccgtcgtaatctaatcgattctgagatagaagatctagaacgcctcatgcactctcttgattatatgaatttatccacatctgcttcagacgcgagatcttggtccttattgtcttcaggattgtttacagtcaagtctttctttacagccttgtcccaaatgcctgattcatctccgtttttccccactaagtttgtatgaaaatctcaagtccctttcaaagttaaggcctttgtctggcttgtggcacacaagaaggtaaataccaatgacttgctacaattgaggagaccccacaaagctcttagccctgacatttgtaagttgtgtatggagtaaggagaatcaacagatcatctcttccttcattgttctatgacgttggggttgtggcatagactatttcaactagctaagatggattgggttcctctgaaaagcatttcagacatgatgttcatcaattataaaggttttggcaagtccaagagagggttagttctgtggcaaaacgcgtgcataactttaatttgggttgtgtggtgggaaagaaatgttaggatatttgaggacaaagctaggaattcagagaatctttgggactccattcatttccttgctcccttttgggctttttgttctgcgggttttaagggcattcccctttaatgtattacaacttgattggctagcagtgtgtagttctaatgggacggtctagtgtattgttattttttcgtgttgtttagttttacttttggcgggaggattcctcatcctccttttgtacttccttttctatcaatatattcatgtgtggtttcctataaaaaaaagaatatgttattttttcttcattttgttgggaatctaacaaaaaaatttcacctttactgattgaagaatgcaaaacatgaactaagaaacattgtgtattccttctcccatcagcaaaaatgatataaaagataaaaattatgaaaatgatgaatacaattgtattttctcttattttcctcaactaaaagaacttgtaaaccaaaatgatagaaaatgtgaaattttataaagatgaaaatttttgtttgtcattcatatccttttattttaaatatttgtttgtctttttcttgaaggggaataagcaaaaataactagggggtgaggaggaaatttataagtgttagcatggatgagaatgaagtttttgttcccattttaggctcttacttgcaaccaaatgctagaatgggccactaatagaataacattctcattccaccactccattaacaaatgcattcttatttgctttaattttattattacaatgacttcaagatttaatcaagaaaaatgttagtataggtcatgaaaggttgtctaacataactgtttttgcccaatgcgaaaacgttggataggttatgaaaggttgtctaagataaccttttttgctaatgcgaaaacctcgcataggttatgaaaggttgtctaagatatctttttttgctaatgcgaaaaccttgaaacacaattatatgaaagcataacaagtacgttatgtttagattagatagagtgtatgtttgcaaggatattatcatttacttagtcaggtgtttcataagcaacctgtgtagcagttatgcaactcaagatacttgaagtcaacatattcaaaccaagctagtgacatggaaggatgaacaaggaaagccatgcttagagtttgggagaatgtaaactctttaccatacgacatgctttacaaaacttgatagtgcttgagttcttgatgtctcaaccaaatgatgccatcacttagtccatcaagtgaggtcattaaataagccaaataatgtgatcacctatttataggcaaccatagaaccttcctttggaacacttataaacaatctaaatagaatataacttacaagctatgtagaagtatacaagaataatattttgcacaactctagaaattccaaagactttcagccaatcttggaaattttgggagatttttggtctcttctgaaatctttttgatgctttgactgtttgaaagaagctattgcctgtggggtcatttgctgctaaatatgtagagaatgaaaagtttgtattctagaatcttgcggccatctgtaaatgctcaagtgaatgattgtttaagcagggcatgatttttagaatttagcatgatatgtgtcttgggtagagattttgaattcatcccatctggtcaatgttgactaaatgaaagcacagttattttgaatcatgttaacattttgcttgtggtgcttttagtcactttagtaaataagtaggagtgatatgataatcatttaaatcattaaagaaaccttgaaggacaataacatgtcacactaaaatgtgaattgcattcttttagacactacatttccaatgaaatgctgacaatcccctgagacctttttttttttaaaaaaaagtttttattttattttattttttatactttccctttccatgaagatcataaaaatatctcagtttggatctttcatatcatatttctttgataatttccttcctgtagtagctaacagaatactcacagaatccttatgatagttagttaaggtcactttacatgtattctctttgtattattactaatcaccttctctagttttaacatggtggaatcttttttttttttttttttttctgatatgtaaatgtttaacatggtggaatcttgtcactcttgcttttgcacacgagtttttcattctaaaattgtttgacatctctgatttttactcttggtcatgttacatgtattctctttgtatcattactaatccccttctctagttttatcatggtgtaatttcggattcattactgaaattccaatagtagatgttccttggggatggaattgttgcattttattttacataattcatgtaaaatactagttggcacctaaattaaaagtgagggctgtcacccttatcaccaaaatgataatgttaggatggaaataagccgtgtgatggattttttgtgggcaataactgatgcttgagattcatggtcaatggtcatttcaccttcaatatatgaaaaacttatgtttagttcagaaagagttctttcttagtggctgctttttgaaacttggtgagtctattaatgttcctctcttttgaaatgatgtaatgatgatatggataatatcttcactttagctatttgatggggggaattctcttcttcccacttttctaggtgatgggcaccaaaacttacaaaattgcacagatgtgtatttgaaagtcagttttattgcaagaaaggttctgtcatcatcaagttccttttgctcctactttgcataacaatgttttctatcaatttgtgggaatccccttctagtttaaagggatctcggattcctatcatgaatatgtttaatgaaaagtaactaaccagccaaacattttgggaattttgagaaatgcttgttgcttaatcgaattttgtttttttaactgaaatttatatctcctatgtggaattatgtttgcacttatttttttgaactgtttgatgccaagttaatgatcatcgtttcggcaacttggagccagtgaaaacgttctaactttttgtcttatatttctcccagatttcagccatcatcgatttgaacgaggaatcgaa

SEQ ID NO: 11337 - DNA, 194 bp, Vitis vinifera
  Intron number 6 from transcript GSVIVT01012668001 (locus G SVIVG01012668001) derived from phytozome v7.0 (chr-ID chr1 0; pos 480350 to 480543)
tatacaaccaggccagataccatctttggagcaacgtattcatcttgtacttcactcattgtttgaatttgatagatttcgtacacctgtatattgactccttaataacaactggaacttcattaggatttattcttatcatttgtagtttacatgcagctatcttgtcctggcacctgagcatttcttgctgt

SEQ ID NO: 11338 - DNA, 3926 bp, Vitis vinifera
  Intron number 4 from transcript GSVIVT01021235001 (locus G SVIVG01021235001) derived from phytozome v7.0 (chr-ID chr1 0; pos 2848771 to 2852696)
agttgcaagtaagttcctcttttagaagagccagcaagatatgattactgctgaaagcttctacttcatatcgattctaataatattttctgaggtcttaaggaatttgatctgaaaatctaaaaatacagatcctgaaatcggtcctacgatcttcactgtctcctttggcctttccagcacttaaaaacttaatacttctgggtctctagaaatgaagactagagacactttttctattggtagctttgtgtgttgtattttctgataggtaaggcaaagaaatttattagaatggtgcctgagatggtacaaccaaaggagatacaagtatgcaaggttttcccacctgaaagctgaaaagtaagaagagaaagggccaaagaaccctcaccaattggttacatccaatacttacgttaaaatttgatacaaggagtgcctcccatccatgctagattctatcaacccgatatatagagatcctagcattatatgctcaagctcctggatttttttgtttcctttttgatgtgtggggggtttggtaggaagaaaaatatataggttcctgaagggactagacccagtacatggggtattcaatgaacactgcaaataaacagagaaagaaaaagtagtggtcataataaggttctaagctaataaataacaacctttcagtgaatccaaaaaaggttaagtgtccttcctctatagaatccctagaccgcataaataaaaacttcacacagagggctttcaaacttagttccaagtgctccttcctttaaagaatggaccggtgtaattccttctgaatacaccatagtaagtgcaggggcaattttccacatcttcctcttcctcttggcaacaaaactgccatggcaacttaccagagaactatcaaaattaaagactttaccaagaaatgccaaggacagtagaaagcaggggatgtagtgcctgtagtgatgtgtgagcaatccaccttgcaaagaagttggctgactcctaactctctctgcacaaaagacaccagtttacgataattcttcctctatccattagttgattgatggtgaaaacccacccccgtaccacttccaagtaaagaaacccaccttagaaggggatacaaaagtcccaatactggtgacaatgaacaagtagaattggcctcgagtaaagcccagggcaggtatgaagaccaggccttccagcatactctgcgtagacaccaggacaggaacattggaccgtcctccacgttctctttctcttccagcaaatttgccattccagttgtgaagcatctgcactgtggttctcggaagcactcaacatacaccaaaaaagagcgatcatcataaagcataggttccttggcatctcacattgaaaaagtgatccacactcttcccttttttttttggcacataagcaccagtttggaataactcttttccctcatcatcaagccagtgagccacacaaaaaagccacctttatgggagccaaagagctctagatttccttagctagaaatcattgctcagctgaaccttttatcttgatatagaacaatttgatagagaaccttttatcttctgtcaattttcatccatttgcatgctctctggttctaagcatttccaccctataaatgtggtccatgaaggtagtcacttcctttatatcccaattttggaattccctgaccaagctaggaattccagtttctttttgcctttgtccaaaccaatgaatctgcaaatcttgcctttctgttaactgcaacttgtaagtatgtttaatggttatcacttctgctaatttgcctgcctcaaaacattcttttaattaaagcaattctcccgccttttaatggttatcacctcttctaatttgcctgcctcaaaacagagaacaacacatttaaggtgccttggctcattgatgtcaatgcccaaaggactgctatcatcttcctactaagaatgcaggatgatcactctgctctctaatgggtccagccttagattagtaaaaagttagtagattctaggtcttttcttgagcaatttatcaatggtggaaagagaggaccgagtgatgcatccttcttggtaggggacctatgaatatggtgggtcactagaagtttagagttattaggatctattttatgaataattttatatcttcaattgatttttttagaagttttactggtttagaaacagaatttgagtgctaaaatttagtttaatggttaggattagttcaagtatgttgctactcatttttaagattttttttttttggaaatatttgggtgttaatattttactataatagttagggatagttctagtatgcttttacttatttttagtctccatttagatcttgtaaaaaattaaggggaagtatgagataaagaaaatggaggggaaaatggaaataatggaatgaaagaaaaagtgaaaaacaagaaataggtttaaactcaataaactctttcttacatgcttctccaaatttatctcttttcatgctttgaaaatgtataaattttttagttatattgattatattttatttttcttagtaatttctatggcaaaccaaataagggaatttgaaattcattcctatttcccccctagtgctttctatgattcaaatgaagccttgaggctttgcaagtgatttatccttgttcttcttctaatggatcttttatttgtttatttatttatatttattttttatatgcttagagcaccaatctaagttcctttgaggaatttctcttctttgagttgatatggaaagggagaataatcttttttgattgtcttattcttggttagggaaatctccaagcccttcccatttatccctaacactttgaaaccaaataattagccaccctctcttgcccttccaagaaggcaactaagtgcctccatagctagaacaaacaagtatggagataacaggtctccttgctttaagcccctaaagctttgaaaaaaccctgagggagtaccattcactaacaccgagaactgagaaccttggagttgagatgcaccaactaatccaattgatccacctttgtccaaaatccatttttcctaacacctcaagtaaaaaattccagcttacatgatcataagctttttcaatatcaagtttgcaaagcacccctagactattacttctcaacatcgagtcaattgcctcattagctataagtactgcatcaagaatttgtcttattttaaaagtcatatttggtaactattttcactttttattttaagaatttgttagcaatttttttttttaataaaaaaagtataaaattttatgaattttatgattatcaatttttttaaaatggataattaacacacattccacctgcatcttattcttctccctcaaacaaacgatattaatggttcatttatgatcattggatatcacaagaaatcattgaaaaatcaccaataactttttcttttttacatttttttaattatataactataaacatgttttttatttttttgctttcaaaaacaagaaacaaaattaaaaactaccaagtatttttttttttataattaaattgaaagaataattgaaaaatatttatgttttgtttttaaaaatagaaatgttcccaaatgacatcttaatttattggtgcttactgtttaaaacaattttatttgtattcttctttctctttttctttttttgggcataatttcaaaactccattagtattaaaatcactcaaatactgtgacttgatgtttagtccattgccttctgatattttttctccctcctgttttgatgctgcaggaaaaaataaacaagttcctttcatataagagaca

SEQ ID NO: 11339 - DNA, 1281 bp, Vitis vinifera
  Intron number 3 from transcript GSVIVT01008237001 (locus G SVIVG01008237001) derived from phytozome v7.0 (chr-ID chr1 7; pos 4300372 to 4301652 reverse strand)
acttctcctttgtatatatctcgaaagcatttgtactgaagctaacccatttaatcattgtcagtagtttagggatttagaaatacttttatgtgctccaagtttcttttgtagtctttactcatgaatggggaattcattaacacaatactctctccataggatttgaagacaatattttatagtttttacatcttattgaatttggtattctttgcagaactcttgggattcaaaatgacatgatttagtggaattttatccctcaaaaagcatgggagatttaccttccttctctgtttgaatgattacatttttttttttggttcttttttgtttttctttcaattgttgtgcaactacgaatgtcctacaattacttacacacagacacacacacaaaaaaaataaaaatactgaccactaactttgttgtaatctaaaaaacccatagcaattattttgatttcattaaggtgtttcctaaatgggttagttggttagtccaaaagagataaatccaccctaataacgaatatgccatgcgaggtcaggttgtttaaccaactaacccaaattcagccagattagtaatttccatttaatttatggtacaacaaaaaatatagttactgtaatattattttatatattttgtaatatggtcagttggttttttggttgaaccttaatcattaggttggatttgggcttgtgatagttaaatttggacccaacctgaattatttgaacagaatttattgctagctgcaaaaccttattctgtgttctatatcccatgttataggactttacctatctttcaattcttgaaagtttaatattgaaactttttacttcacaagaaaggaacttatcaattcattggacttcaaatcacatattcacaaagttcttaaatcttgtgatctttcaagtaagaagtttctgaacttctcactagaacttgacctaaaattttcaagtttgttgaacttatagctctactagatctaatatcctcctaaaaaaatatatattgggtttctcctcttctgtttttttatcagatttagaaaattgggtaggatttctcatccttcactcgtattttttcattttaatgaatatattttgtttctgatttaaaaaaaaaaagggttccgtattttggcttttgtacatcgagtctatcagtctcaagttctgataatttcatttgtaaggaaaaagttgaaaagttttcatatttttattaatgcattttatctttaacagctt

SEQ ID NO: 11340 - DNA, 2920 bp, Vitis vinifera
  Intron number 1 from transcript GSVIVT01009762001 (locus G SVIVG01009762001) derived from phytozome v7.0 (chr-ID chr1 8; pos 11087722 to 11090641 reverse strand)
tacgctgcgcctggtttaggagaaatttacttcaagtaagtgaattttgggttgatgttctttttgctttcttccgatgcatatttttggaaaataaagggagtattgatttggttttcttccggaattttgatacgttcgagcaaattgatggaattttactttaaaatgattaatttcgtttattttgtgtgaatcgtcgatctctgtgttgatttcatgcttgatttgtgggggctcgttgttttagctccgattctatgtttggaaaaccttaaaatacttaccatgtttggctaaggatatggaaaagagagacttccttgcccttataggcatatgtaattttattttctctgttttttagaaatttttgtcagataatgtgaaaattttgaattcttggtacatttatcacaaacaggggaaatcaacctggctgcttttagtaactgcagaaaatttctgggaatctttataaatcttgataaggataatattattgtaatgcagaaaagcatacaaaccctagtacatcccaagtaaatgaatcccccaaagaaaacaaaaaaacgggaaacatcatatccagcctgaagctgaagaaaatagaagaaaaatagctttgcacagggaactacaactcaaactccttttatattttttatgaaatccaacaagagccttgtgatctgaagttgatataatgaccatagaaaaaaaggagtgcaaagacatttgtttaagctttcatatgatattttctaggctctcaacattcttctattgtgctctttccactgctccctcccaaaatgcttatcatgactacaggccacatctttttcttcactctccccatgaacctgccttttcaatctgccaacatttgtttcgagttttcgaagataacctagagagctgttgatctccgatttcatatgctccacatggacctatcatcctgtgccatgtgttgcaatgcaacacattgaacttcttgttgaattgcccagaatacattgctacatggccaatggtccagtgccatgtgtactgaatagttatccatttacatgattttgtgcacattgcaatgtttcatacttgctttgcatcattatctccaatacaccatgttaagctgaaagttgaacttggcatagctacctacccatttggatagttgcccatgcaacatggaaacttgcctatgacagatcctgaagtaattttccctattatctacggataggagataacttgtccatgagatgttactcatttttttccataaatgacaaaaggaaggatgccattcccccttgatttctagaagtgatctcttaagggaggtatggactcaacccttcagtggtagcgtgaatctgatccttcagaggtagcatggaccttacttcttagtgaataatgtgggtgtgatgatgtaaaccacaacatacattcccctgcacccaatgtgctttgaaaatactgtgaatgtactgctttttcaatgcaaagatggtctgtcattgttcattctactccatggccactccagttgtgtccacattgaggacatcttttgggacaggacaccttgatgttattatgtccattcaaatcaagagccaagtttgagagatcctacgtgtactcggtgcatatcaatggtggacttagcgatcttactattggatacttgagactaggcaagggtcttgatttggtagatggaactagactcacatcaaggtgagatagaatgtacatgtattgggcttgtatcaaccgaattaagaggaggcaagacccatcacaatgaaaaggtgcgttacctcctcatgcataatgttgggtcaagtgttgatctatggcaagtttaggcctcctaagcttgtaggcctaacaggattctcattaattggaacagctttcacaggcctgacctttttggcctgacaatcaacaaaggcaatgcacttgattatgcatttccaacaaatgggtgtaatcttgagcatctacatttagagcccttggtgtgtttagaaattcaaccatctgtaggagctcctaagcccatcactgagggtttttttctaagtgctttgtcccacttgggaccaccgccaactcacacacctttccctctctgtctgctttactcttcccttaattggttgatattttaccgttcctgtggcttaccttccatttccatcaagaactccaaaaatagaaagaacaagggttgacaagagataagcttccaagcaatgattcagtgaatgacctccagtttcaatgtccaatttcagatgcaataccaatttcggatggttcaccatcttttgactaatttgttgatagttaatagtctagtcctagctgcagcatgaacaaagaataccacatttgtaggaatcacatggccccagatctctatttgcaaaatcatccgctctccttttcaaactttcttatagaaagatttaactaagggattcttatccgagaaatcttgcaggttatttgttctgggagaacctgtttggtggtttaactgcttgggaagtacatgaattgttcttgtcatctaaaccaacaaatttccctgggaaggatcagtgataagaaattttggtctgctttaagttgttatttacatatatgtggtctttgtttggtccattctattactgttttttagcatacaataatcaatatagccagtaaaggtgctgtccctttttttttttggtttttttctttttgttttttgcctgttttgtctctgaaaacaatcttgttcctagctttttatgtgcatgatcaatatatcaatgatatcttattagcttttttttttctccctgcaggaaattagtctgccctagagagagagagagagagc

SEQ ID NO: 11341 - DNA, 20217 bp, Vitis vinifera
  Intron number 3 from transcript GSVIVT01001480001 (locus G SVIVG01001480001) derived from phytozome v7.0 (chr-ID chr4 ; pos 12153826 to 12174042)
attcatttgttaaggtaggataaaatgatctctcttttctgtgttctgttttattcattctcatattgaatctctgtctatttggtaaatcttgtttgcctacgttttcttaatggtctttgttttgagttgtatgttatttatggaatgaaatgtggttatctcttgcatgatttattgcacttttggtgatgtcaacatgaaattacgttgagaacttggcaaacatggaaaataagtgagtagttgcttagaagcatggatgggtggagttgcatgcttcttaaaggttcacgagattggagtgcctgggaatgaaccaatgtatactgatattcattggttatatgtcctgaataatttttaaacaattgttataacatgtttagttttgaagattggagttggaacctgttcaggggagcttctaaaataattaaatcatgttctgagcgccaagatgacttctaagggtgtttggatggaaccaaaattctagaagttgaacatgcttcctttctaggcatgtttagaagaagcaaggattgcatgcttatgttgaaagatgcataacagacattttaacaaaacctgttatctcctttctgttaggtctacttttttccacaagatctcaatcagctcttgtcttgctcaaagaaccctcccttgcttctcaactcactcacccacttcacttgttttttcaaccaccagaccactttattctctccatgacaccttcgattagctctctataacctcacccacttcttgttgtcacccatttcactttgaaatctccttgttagcagctaataattggagcttgagcggcatttatggtgctagaagtaaagactaacctgtatcagctcatgcattgcttattcctaaatagtgaagaagaaacccatagttctctacttcataacatgttgttccctagttcaccttatattccttgttgttttaactagattgtgagtttttgagtgttacatacgatggcatatataagataatatacttagttttcttttcttcttcttgccttttcacaacaatcaaatggtttacttttagctacttttatgtatttcatagtaaatcatattgtaactttgttgaattttgagaatctaaaatagggtgtttgaatttgttgcttgattcttaccatattaatgtaatttatggataattatattgtaacattttatttttaaacatctagaatctaaaatagggtactgaaaattgttgttttgctctttatacaatctctctctctctctctctctctcacacacacacacacacacatgcacacatatgtatgtgtatgtatatgtttgatgggtaacacatatgtatttgttgtttttctctttcacatggtgtggtgtccaaagaaattggttttcctcaagattggattagtttctagtgttggagtgggatgaccactttttgggcttcatttagtgcttccttccaaagcttacatctgatcattcccccattattttggatggggatcagatgaggagcgacaaatctcctttcagatttgaaaatatgtggctcaaggtcaatgctttcaatgatcttgtgtcgagttggtggatgggatatagtataaggggcacatataactatgttctggtaatgaaaattaaggccctcaaacaagatcccaacaaatggaataaagaggtgttatataaacttttagcaaaattcttagccaaacaagctaaaaaaagtggtggataaggtggtttcaatctttcaatatgcttttgtagagggtaaacaaattttggatcctatcattattgcaagtgaaactattgattcaaggataaagaaaggttccaatagtgggaccatcggtaagttggatataaaaaaggtgtaagatcatgttaattgtgacttcttggtagcaaccatggaaaagatgggttttgaccaaaagtgggccaattagattagatgatgaactttaacctatgttttcagaaccaaaccaatcattgaattgaaaaagttattggtttaatattcaacgattgaatcgatggttaaactgcgataaaactagtgatgtcataaatatataatttatattatgtaaaattaaaaattagtacaagaaattaaaaatatatatgattaaaaagtttattaatatttcattttttatatttgatatgtcaaattaaatgataaagataaatttaaatgtataaatattttaaattttattaaataaaacatgtataatatttaagtatgaagatatatttaagatgaagagaaaattataatatttacttttatcaatatatttatgtatttttttattttaaaattaaaattttaaaaattattatattaattaattgtattgttttcatacttatcattatgtaattgttataaaaataaatgtaaatgtaaatatttatatttgtttaatagttttatacaatattttgaaaaccggacaggactagctggtccaactggttggacagttgattgagcactttttcattcgattttagcttgctgttacatcaaactgggatctaattgtttgaattggaagtccaattgccaatcagatcaaacaacgcagttaggtgagaaccgatgggtcttaaaattgttgttgaaatgggcttgtacgatctttaggctctgatggtaagcattttagacgtgcatccaactcaccaataatttaaggcaattaatattcctttaaattgttgatgtgggatcactaccactaggcccaaagaccaacttgcaagatggggaattgaacttgggctgcaattattgtgagaaaagggagaactaccactaggccacctatggtgtttgtgaaaattaatgtacatggtatataatctaatattcgagtgttgtttttgtttatatgtttattgtcattaatttaaactcttaaataaacctaaatatttaagagtatatttattttataatgttaaatatgaaaagaatataaattaaataatgtaataatttttaaaattataaaataattagatatataatttttgacatttaaataaaattaaatattataattttcctttcctcttatatgttttattaaataaaattaaaaatattaatatatttatatttaaatttatcatcatttaatttgataatatcaaatattaaagatgaaatattattaaaattttaaattatacatattcttaatttttataattacttttacttttatgtaatataaaaattacatatttatggtatcactgatttagccgtggtttaatcattgattcgaccaatgaactgtgaaccgaaaacttttctggttcaatgaccagtccggttttgaaaacattggttttatatgataaaaatttgaaaaaagcattaatattgctatatatttcagtttattgcaatattaactaaaaatattgcatagctcagtggtccaatacttatttttacaattggagatccacaactcaagtcccttagcatgcaaagtttcttttccttatctaataaccattctcacattagaagaataagaactatatgtgctatacaaattccttgctacatccattggcttgtaagctagttgctgggttgggtagtgagtaatgttgtgccaagtggacatgggagcttgatgtcattttgcttaaacaatagttgattgattccaagggaactatgtgaatcgttaggttcgatggcccagttgctagttcaaacgattcaacactgattcaactcataaacggttcaacgctgatccaactcataaacggtttacttcaaccatccggatcagagaggctactagtcaatgtttgactgattggactagtcagtctagaccggtttttaaaaccttgatttcaacaacaaaatttcctactttggttaataggactcttgttggtttaagagtttcaaggggctgaggtagggagatcccctttttccttatttatcttggccatggaggggcttaggcaaatgttgatgaggggttaaataagtgggcttctttttgggtttcaaggtggcaaaagaggaggagaagggttggaattgacccatcttctatttgttgatgatactttaatcttttgtaacgctaaccttaactggtaggaatttctgagttggacacttatgtggttgaggccattttaggtttgaaaattagctttagagaaaactgaactaatttcaattgggaagttgttaatttctttttttgataagtaaatagaattagtatttaaaagagttacaaaaaggggtgcaccgaagtatgcacaatttatataatgatcaccaagaagcactaaaaaaaggaaagggaaaacaaaaaaccactctctttcaaattgaactcaaccaatcaataaaatcaattatggacattgaagttttgcctataaacagtttggtccaagttaacaagttgcacataaacaaggttttcagtctttgaacagagagcttcatcttctcaaaagatcttttatttccctctttctttattttccataagaggcataaaggttctactctccaaacttttttccactttcttccaacaaaagacccatgccaacccaacaaagtctctctcttatggtgcaatgcatcacccaataaaccttaaaaaagagagaacaaaagcttccacaacacctttgccttgccacaatgcaaaaagatgtggtctattgactactcacgagtttgacatagaaaacatgtattagccaaaaaccaacctctcctttgtagctggttgagagtcaaagctttccccaagttgcctcccaagcacaaaagcacaccttaagtggaacccatgtgttccacacaacacctgttgggaatgacactaatcttcctaccttaaggctagtttaaagggatttaatagagtaggtagcactctttgtccctaatcgacacaccttatcctcccctccctcaactatcaccttatcttgtagtcttgccaaaaaacactctataatatcaatatcccaatagttgaaatgcctcaaaaaactaggaatccaaacacccctttcattagaatgcagtcataagtctgcctcccaagcctctttggagctagctaaggtaaataaggagggaaaagaaacacttaaaggctcatcaccacaccatttatcttttcagaatttaacccttctcccattgtccacctagaaggacattcgatagttaacaaactcccaccatagttgttaacttgtaaaatgtattgtgtattgtttttctattttattttttatttttttatatagagaaaaataaatagaaaaatatgtatgtgtgaatatttggtgaaagtatgaagtatagagtattatatatccaattttatggaggatagtaggatctaaagagttaatttatatcatattatatgaaaacattgaatgttaatgtttcaaattaacaaaatataactttaatatatagattcatcacataatccacaaataatcttcaatttttagctatgatctttggttccaaattctaactaggtatatatatatatatataggagctaaagagttaatttatatcatattatatgaaaacattgaatgttaatgtttcaaattaacaaaatataactttaatatatagatttgtcacataatccacaaaaataatcttcttcaatttttatctatgatttttagttccaaattctaactaggtttatatacatatatatatatgtgtgtgtgtgtgtgtgtgtgtgtctttatgtgttatcttcaaagttccaactttttaagtttgtcatcattccttttccacctaaaaagaatatatatacatatatacatgtatatatattctttaatatatagattcatcacataatccacaaataatcttcttctatttttagccatgatctttagttccaaattctaactaggtataaatatatgtaggagctaaagagttaatttatatcatattatatgaaaacattgaatgttaatgtttcaaattaacaaaatataactttaatatatagattcatcgcagaaagtagggggggagggttgggtgtgaatgggtgattaaaagtttttagtaaatatatatatttttttcttttaccctttgaaatagtagggatatcctagatatccaaaagtgttaatacttttattcttataaaaatctgttttttatatctaattgaaacactgtgattagttagggataaaataatataattattaatatccaaaagacaacctaagagatgttagggataacaatcataaccaccaagataaccaccctaacaatctcaataataaactaaccaatcaatcaagaaaatatcatctatcaagacaatatcattaatcagaatgtaggtaggaagataaagatatgcaatgagacacaaggtttttacatggaaaacctccacactaactatggagataaaaaaacacgaggtctaataccactaatctaaatccactattcgaaatcaagttatacaaatttacttgaccgcttttccctaagcttactctccaatacctataacttgattcatgtacgggaagcaacaacctcttgttacttcttagtagagccttcggccacttcgaagggacgatggtcttcaatcatggttcaaagttgctgtattggtcactgactcggaggatcctaaaacacatcgatctcggtttggtataagacaatctgcaaaatgagatagttagaaagttgaaaaaattataaaaatattgtataaattataaaaaaaataagtataattaaataaggtaaaaaattaataaaataaaaaggatttaaacataaatataatttttataccatagaaaaataattattgatttcctaatataatttaaaatattataatacaaaaaaatacatgatataataaattaaaaatgattcaaatgtaaatataatctgtttatcatataaatacatgtcatataaagtcgatcaacatataaatgcatcttacctaatccatgttattatttataaaatttgatgttgcatataaattataaaattacaagttttttttttaattttttttaatttttaattttataatgtataaactgtaaattacaaaatattaatttaccaaatattaaatctgatggtacatataaattaccaaatgtaactttaccaattattaaatttgatgttgcattataaattataaaattacaagtttaccaaatatggttctccttgtcccaacaaccacccgtaaatccccaaatcccaatcacaatcaagggttgtcagagctggagaaggaatcttatgttcattccactcaaatcaacatcagcgatgatgagtcaccatccactggcatcgaagcttccattgttcatcaaaatgtagtgaggtaagggagccctcatccctcttatcttagggagcgctcatccctcttatctctcatcttaatagattttgaaggaggtcaccgttgggttaaactggaatagttcttcttcttctttaatcttcatagtggacgagattgatggtttgaaattgggatttgagaatcccataatcggactcgtcgaacctgggatcagactcatcgcaactagtgtcgaggtggatacgacttggccaagtcgtactagactcggctaatattttgaatcctgtattcaaccaaagattcaaagaattaatctttgaatgagagattgagaatggtgtggcacttcaaacttctctcaaagagatcatttcttaaggaatgaaaggtctctcaacattctatctccaatatccaaggtctctcatgaccgcttgagccaactcatggaccacttgagtggtcttgttcaatttaaaaatccaattttaaatcattttaagttcaaaataaaaccgattgtcttgatacctcaacaaagcctaatttcccacaagccaaacctctttagatgtacctatgatttcccggttgaacgaacaacaatctttgatcgtcgatggagagcaagttactatctaaaaagacttttaggccaatcataaagaggaataaaattgtcaacatataaacaaactcaatgtcctaatagaggataaaatgagttggaaggtctttaaaggaggccttttctctattaatttgttttattcctacctagtttggactaatagggagtcttttcctaaaagaattgcatgcaattcttgggctcctacgaaggtgagttttttacaagagaacattcattgtgatatgtgtcataattggaaaaggataaaatgttaagtttaaatctttaattaaactaaaatatttatttgaattttgaagggatgagaaacctatccaattatgcatttttctttatgagaacctatcccattattcatagttctctataaataggggaatatttctttaaggaaaaaaaaagaggagaaagaaggaagaacaaaggaaatagaaactttgcaatactctttaagcaactttcaacaatctttagttttcaagtgtcatctcaagtttgaagaagattcttaaggcaaaagagtcaaggtcaggtctagtctacccttcactaaactaatcaagagtgcttgatcctctttgaatcattataaacatgggagacaaaatcagaggaattatattgtaaaagaatacaacagaggattgtacatgcaattttcttgacattaatgcattaaatttgttcactttatttcttgtctatctatttcactagacagggcaaaagttaatggagaagaggcaacatctctattagacttcatatgctgcccattgtctagatctaatgcttgaaaagattggagagctctctcaacccaaaaatgctttaaaagcaagaaaggtaagtaatttcatatatgaacatggatgggtgttgggattgatgagatcattcatgaagaggcagcttattcgcgctgctactactagatttgctactgcatttctaactctacaaagcatttatcaattaacgcagctcttggaatctatgtttacttctaagcaatgggcaaggagtgcatgggccgataagtttgaaggaaaggatgcagaaaataattttgaaggacacaactctctgggctagtctagcttatgctcttaaaaccacaaaacccttagttgcagtattgtgaatagtagattctgaaaaagtgccagcaaatggggtttctttatggtgccatggatttaacaatagatgagaagtgggaatatcagttgcatcaacatttgcatgttgttgcatatttcttaagtccccattttcaatatgatgataatttttccaaccatccagagattaagctaggcttgtacacttgtatggacaaattcattgttgatcaagttgaaagaaataaagctaatattcatatagatgcttttcgaaagaaggaaggacactttggttttcagcaagcaaaagcaacttgcaaaacaagtattcctggtaagttagaacttaattatgaagttgtcctcatcaaagtctgaaggcgagagtatgttttagtcttctagattttgaagttcaaagtttaaattatgtttttattttgatctagctgattggtggattcaatttggtgatggcacttcggaacaacaaaaatttgcggtgaggattttaggccttacttgttttgcatctggatgtgagcataattggagttcattcaattaggtattcataataataaaaactatgatgctaaaatgctaatgaatttttaattatcttagacgattagactttattttaattatttaacctttaataggtgcatacaaagaaaagaaatcacttgacaacaaaaaagcttaactcattggtatacgttatgtacaataaatgattgaaagtttgacatttgaagctaaaggcacttaaagatgatgatctgttgcttattgagtgtgccatcagatgatgagtggcttgttgagaaagaagatgaaaatcaagaaggtcgaaatatattaaggattgatgatgatcttgatgttgatctttttagggagaacaaggaagtggaggtgcacagggccaagatacgaaggaaacaaggaaacaagggaaaaagtagtacaaaatcaaaagctaagggaggaggtgcgtttcattatctaccctgagtacatgatttataagttaacatatacttaattctcaatccaataagtcatataatttgatactaacatataattttggaagaatggaattagggaagttgtgattttgtagagagaattaggtaatcctgtgatcaaagggattcgttataattgtgtgaggaaagttcctaatttaggtaataggattttttatacatatatatgtgagtctctgtacaaaaaataattgagaaaaagaatttttactttttattctttcatctcccttctacatggtattagagcttagtggcatggacttagtattttcctaagctcgtgtggcacttagacaagccaaaaccctttatcttgctaagtcagccttactctcgatgcttagcttgttaggctaagacgcacccgacttagaagctttagagggtgtagtaggcaacacttaaagaatgaaagctttattgctttcaaaggaagttatacaatgcttggaagctcacttgcttggttaggaagtgattttgggtggtgccttggccaaatgaggcatttacctatttataggcaccttaggaagtctctagaaccttggaaggttccttacaaatcaagaataatctagaagttcctacattagtctatgtacaggatgccttggaagactctagaataccccacactattccaatgctctcctagccaagtgtagaaatgtgtggacatctctagccctctctagaagtttccatactcttccactttgtagctaattgtagatgtttctaggggtctctagaagcttcctacctcctatataagcctatggggagggccatttgaagcatcttgtgacattaggctcgtaaatcttggaagcgaaacaatttttttttcagcctttattgttgagttgaagactagtcgaccttcattgtggaccttaaagttccctcttgtttgagttggattgttgcaacaaacccaaatggcgaacgcagcaaagcaactagagtcatcacatcgtcataccacaattataagagaattgcgttgtcaccttcatccccacccgttgccactgagatcgtgtctccatcgtgttcgggccatctttggcacaacttgcacaacctataaaggtcaccaaaaggacaccttgctgttgcgccatcactgccatccttgtgcctcatcattgtcgtcgtcttagtatcgtcatcctccactatgtgtctttgcttcgcactactagagactttccaccttttttgattgtgttggagttcttgctatcacctctcgccattgccattgccgttggcttaggatctcaccgtcattgtctagtaaatagtcaaaggtaaatacacaaccctacactattgtagggctatgactaatttggctatttaaagccaaaagaaaaatggaaggaaaaatgttatataaggcactaccactttcattgcttaatataaaggagtgattactagtcacaaaacaggagaattgcagaatattcaaacagcatagaggcttaatgggaagaattatttcaaatggttgcaacttgtttgtacttctttgaagggaaaaaggaaattatgttatctattgggaatgggaccaaggagaggagaccctcggtttgatgcctgggatgagcaagactcaacaattataacatggttgttgaacttattgacacttgaaattagtgatacttgtatgttcttgacaactgctaaagacatctaggatgaaattcaccagacatactcgaaaacactagatgcaacacaagtgtacaaaattaaagtcaagaccgaagtagggaaacagggaaacaagacaatcataaagtatgccaatatgttgaataacctatggcaagaacttgatcactatcaatgcattaagacaaaatgtcctgaaaatgcaacaattctaaagaattatatcgaagaagatcgagtctataatttcttagttggtctcaatgctgagtttgactaagttagagttcaaattcgaagcaaagagcttccgctttgaatgagactatctctattatctgagtagaagaaagcaagagaagtttcatgcttgaaccttagaatatggagggctgggttatggttgctaacaaagggagtgattaggaggttgacactgctgataacaaaaggactgattgatcaagagctttaaactgtgataatcgggataacttatggtgcatttactgctagaaagcctagaaatacatgggagaaatgctggaaacttcatggtaagccaaccacatctaacaaagagtggggttacaatggagggcaacaaagggataatgcgtaagtaaacttgtcttttgttcaaccagttgaaaaaaaaaaaatccttggaccaaggtggattcaatcaggagaagattgagaaattgagagttttattgggaactcttgagaagtcttcaagtaagaaatctttaggtacttgcttactgtcaccttcaggtaagttccttatcaattggattaaaattcttggatgaaacctttgctaattcttaggttttagatttaggtgttacagattaaatgactcattcatcacaccaatttaacaactataacccttgtccaaatagtaggaaaataactacaacagatggttcattaatcactgttgtagatgtctaaattagtcctacacatttagaaatgtgcttcatgttcccaagttgtccattaatattttgtctctatgcaaaaccttacataagatttaggttgcaatgtgactttttaccctactcactatgtattttaggactaagacttggggaagatgattggacttgctaaggaatgtaacgggttatagtaccttgagacattaagcgagtcattcgtatctcttctttttgagaaccatcttgtcaataaagaaaaatctgtcttcatcatcttagacttggacatccatcatttagaactcctaagattgtgtttcgttttctatttaggaaattagataatgagagtttcgattgtgatgtatgtgaatttgtcaaatacaagcgttcaaccttccccaccaataataataaaagaagtccagagccctttcatctaattcatagtgatatttggggtccttttcttgttcttaatatatttgtggtacgttggtttgtgtcttttatcgatgattgtactacggtcgtttgtattttcttacttaaacacaaatctgatataagttttgttcttccaaactttcataacatgataaaaaccagtctgatgtcactatttaaaggtttcggttcgacaatgccagattatttcaattaagtcttaactctatactttcaacatgagggaataattcatgagtcattatgtgtcaacacaccacaacaaaatggagttattgagaggaaaaatggccaccttcttgatacaacatgagcttttttatttcaaaaatacgtacttaaatcttattggagggaagctatcctaaccaccacacatctcataaatagattactttctaaagtcttaggtttcatgagtcccatgtatatactttcattgttttatgttaatatgagaaccacaaaccatctcattcctaagatatttgagtgtgtgtcctttgtgcacgttcacagtccaaataagggaaaattggacctaagagctatcaaatatatttttgtgagatattcctcaactcaaaaagggtataagtgttaccatccactatccaaaaagttttttgtctcaacaaacgttattgtcactgagagtgagtcctattttcttgctcgtcatctttagggggagaattccatcaaggaagacaaggatcaagattcctatctcattggttcctttttcattcaccttcctatagtctctggtccaatgtatgatctaacatctgtaccctacttttttgaattcaagtcgtctaatccagcatccgtacccctcttctttgaacccgagtcgtcacaacttgagcttgttcctgagtatcgaatggttgacaaagtgtactcaaggaagaaagttgcagtccctaaacttatacgagtccaagaatctgaattggcttttggaaatgaggtaatagtttgtcatccttcctcacaaaccgagttagaactttagtttgaaaaatctatagatcaaaatctccctattgccattaggaagggagtgggggaatgcactaaatgccctttatatccactttcctatgttgtgtcatttgaaaagttgttttaatattcatattcctaccactctattcaaggctttatctaatgaaaattggagacaagtcatgaatgtagaaatggaggccctggagaagaataaaacttgggaggtggtagatttgttgtaggaaaaaaaaaactagcgggatgtaagtgggtctatactattaagtatagaataaatgagagattagagaagtacaaggcaagattttttttttttttgatcagaaacgaaaaagcttatattaataaaagaacaaatacagaagagaacaaagaaacaacagaaagagaaaaaaaccaagggaaggatgagaggtccttcctacacaagaaccaaggaaaacacccaacaatagaaatctaaaaacaaaagagaacccaacaaacttcaaactcttgaaacgcaaaccccaatccaattgatttgtagaatgcttagaggaactcctctaaaagcttcagtacaagaagcccatagagacgagtaaaaccgaatcaaatcccaaaccacctcttccgttctccctttatcctcaaagattctattattcctttcttgccacaccatccaaatcaaagtaaggcaagcaatttgccaaagaatcttgcctcttactgagttccccaagcctttaaaagaaataaccaacatatcctcaatgctccttggaggaacccaaatcacacctactagattgaacaacctgtgccaaagtccaatggtgacaggacaatgaagaaaaaggtggtcaatcgactctccatttcttttgcaaagaatgcaccattgaggacagagggctttgtagggtcttctcaattgcaacttgtcattagtgtttaccttcccatgtgttactaaccaagcgagggccttaacctttgaagggacttttgagctccataaaaacttagccggaaggaacattaaaggatttgaatctcttgacaatgcatagaaaaaagatttcactgaaaacgagcctgacgaagacaaagaccacgctcttgagtctgatgaagaaggggaaagaagcacagaatgaagagaggacattaatctctgaaggagatcaatttctgaatccgttagattgcggcgaaagttaaaattccaagacaatggaaaggaattgccaaggacgtttgagacagtaaggtttctcacagaaataactctgtagagatcagcaaattgagcacacaaagtttggtttccctaccaaagatcttcccaaaaccgaattctctccccattgcccaccactaggcgaacaaaaggggagaactcttggaaaacttgagcaatagccttccaaggacatctgtgagaccatctaaccaccatgttggcgtcccatccattaggatgggtcccatatatactcgcaataaccttatgccaaagaccgctcctttctctaggaaacctccaaagccatttccctaagagggcactatttctcatagaagtcttcccaaagcccaaacctcccatctcccttggtctactgacaacctcccatctgataaggtgatctctcttcccttccccagccccagactaaagaaaatccctttgcatcttctcaatctttgaagctatagatacagggattttgaagagggaaaggaagtagctagggatgtgagacagacaagactgaattagagtaatcctccctcccaaagacaaataggccttttgtacaaggcaagattggtagctaaagaattcactcagacatatagtgtggactatttagaaacatttgctctagttgtcaagatgaataccgtcaaaattttgttatcattggcaacaaattataactaagatcttcaacagttcaatgtcaaaaatgcatttctaaacggagttttgaaagaagagatttatgtggaagtccttcatcgatttggcagtgacctaagcactaaaaaggtgtgtaaattgaagaaagctctacataggctgaaatagtctacaagggtgtggtttgaaaggtttgcaaaagtgatgaaaaacatgggatacaaataaagttagggagatcatacgttgttcatcaaacattccgattcaggggaagttacaactcttttcgtatatgtagacaacatcatcatgacgagaaataatgagctagaggtaaactttaagacaatgcttgaccaaagaatttgagattaaagagttaggaaggttgaaatactccctaggaattgaggttacacattctaaatatggaatttttatttctcagcaaaaatatgtaatgaaccttctcaaggaaacagggaagttgacgtgtaaatcagcaagcataccaatatatcctaatcataaacttggagaggctgaggaagatactgtggtagataggggaatgtatcaatgtctgataggaagactcatttatctctctcacacaagactagatataatatatgctgtgggtgtgattagtcaattcatgccaatctaaaagaggttcatctgtaagttgctagttgagtactactgtacctaaaggggtctccaggaaaagacatcctatttaaatgactcaggacaagtacttgaagcttacatagatgcaaattatgttggatctatggttgatagaagatcaagtattgggtattgcacctttcttggtgggcatctggtgacatagagaagtaagaaatagagttcagtgacaaggtccaatgtagaagcagagtttcgagcaatggcccaaggagttggtgaactactatggtttaagattattttggaggatttgaagattaaatgggatgggccaataagattttgctacgatagtaaatctgcaattagtattgcacataatctagtgtagcatgatcgaatgaaacacataaaaattgatagatatcttatcaagaagaaaagatagtggattgatctggactctttatgtatctatcgactgccaacttatggacatactcacaaaaggtttaagtagtacaaagtttcaagcaagtgtatccaaactgagaatggaaaacatctattcatcaacttgagagggagtgtggaagaacgaaattagggaagttgcgattttgtagagagaattaggtaattgggttaagaaagtttctaattttggtgttaggattttttatatatatgtatgagtctctatacataaaagaattgaggaaaagaattttctactttttattcttccatctctcttctacaataactattattgatagataaaggaaagagaccattgtagttggtggatgaagaagaagaatgggtggacttcaacattgatggagaggatgatatggaaattagatatcatgatgattctttagaggatcctacttgttctagtgatcgtggtgctgaagaatgaagactatatgattgagccaaaataatgctgaattttggaagagagaatgacaaaccaaattagaaaccattagtctatcatgacaaacaatgaattgtcttattatgaattctatagctttgttacttcattttttttatgtgattttattagtatttttttgattatttatttattgtttaagtcgaggcttatgcctcacctcatttaagtaaaacatcttaaggctgcttttagcattttaaaacactgcacttgctgcctgtgattgttgaggcaattactatgtgcttattaatagaattattttggagtggttggtagttcagaatggcctagggtcattaatgacaataattgagcatttgcccacttgtttcaaggagaggtgatgttttgggttggatttcctttttcattgttcttttaactttttttttttttaacttaaatgagaagctgaaatttaataaagatgacaagactacaacaggcttgaagatcaaggcatccttgatgaaaaaggaaaaaagcaaaaacaaatagaaacacagctcctcctataatttacaacaaagatgcaaaagcgcagaggcaaccacaaccctcaagagagaaaaggtgaaaagagagaatcatctctttgggggatccattccctcttataatttgaaacagagatgcaaaagcaccaaagcaaccctaaagagagaaggtgaaaggggagaaacatctctatggggtagttagcatggtctggcctccttgccaagtctttcagcatatctttagtctctttcaatggatagttgtagtgccaacattccaaacaatgctgtctgacatgataacaacagaggcctcttcttatctccttggacaacctggggcctgcttgattcccatctgaaataggtttttgaagataagaagatagcattttctgaggatatcattagtattctctgaggtactacctgtgtgccagttctggccctgctctttctggtgtcttttagtataactatgttttgtctatatagaacatgttttctctgaaaacactcaactttcatctttttcaaagaaagttttgtagcaagactcattgaaacagtttttgtactgttttctattattatgctctccatggacggaaccaaataatcccctattcttttgcctcttaaaggcctttcaattcagttccaattttttaccttttgcaagagaaatgtataaaagatgatgcaaaggaagtcccaaaagaaggttaaaaaagaaaagaaaaagaaccagactaaagaaagcaatagaaaagaaaaccctgatgaaacaaaaataaagatagaataaggcaagttcaaactgaacctgctaagaaaagctagttatagctttgctgttttttgatgggaagatttggttttccatttttttgtaacctcatgttacaccttgtgtacatggggtgcacccccaattttgttgggcgcattttatcaaagtttttgtttgcctatcatatttttggttcacaaaattaaagtttcgaaaagccattggattgttgaaaaagttgaagccactgagttatacttttactcctaaaacaagatttttttactagagtacccggtctaatttgtgtgttaattatataaagttttttactgtgttcaggacatgcaaatctaggtaatttagatggatgattgacctagcaactataagaagctttcgtatagtttttaaattgaatgattatttagtcgatattaaggttcttattcatgtggtagagttcatgtttaattttcttcttggatcatggtgcttcacactgagcccactaaaaaccctacattctgataagaactgtttttcttctaacagttgctcttcttcttgaccatatgtttattattcaaatgctatctaaatcacaatagagcaattccagttctgcagaacattcagaggcaagctgttagagttatatgataattaatttcaattctatttgcatatgtactgttgtattcattttttatgaaaagaattggtttatttccaacaaaaaaaattcagttctatattcatataaactttgccttgtctattctttaacctatctataaattattccatttatttaatgcatagtttatacagga

SEQ ID NO: 11342 - DNA, 13333 bp, Vitis vinifera
  Intron number 13 from transcript GSVIVT01012531001 (locus GSVIVG01012531001) derived from phytozome v7.0 (chr-ID chr 3_random; pos 686337 to 699669 reverse strand)
acttggcttcccttcttgaaaagcattttaaccctgtaagtgttcattttatatgtttgattcttcattatcattgtaatcagaagcagcatcaatagaacaatctatctagtactgctgattaattgcttattcaagaatgatcaagaggaaaactatatttttcttatttttcaccatgagcaataatagtacataaataggaaagatggcaacaacctatcatggataattccttaattctaggaccataaagttattgttaaaactaagggataaacacataaaattgaaatacaaaaatgagatttggaattgatccttatctctttatttaaaaggagataaacaaatcaactaatccctattaattgatccgtatctctttatttaaaaggagataaactggtcaactaatccctatttaataataaggattttattatccgaattcctacactcccactcaagctagggaatagatgtctatcctttccatcttggaaatcaattcctcgaacttcacccttggaaatacagatgcttatttatatacaactatgtgtgctgaattctatctacagaataggaattgaaaactgaattagaataaaactaattcctaaacttcataaatcttcaacaatctcttactaaaaaagaaattcgatgttgtttagcaaggacacaagattgacaatagaaattactagaattactatctttaaataatgaaggaaatagtgttgttaagactagaaaaggaggatgtcctaaatggtagtgtcatagccaaatcttttcataagttttcttgaaacttgagaccaatccttaatagactttcatgcctccaagttgtatctaagtggtatattccatctctcaactcagcatgcctaatcatcttcctttaacatggtcctaagaatgacaaccggttggaataaatgtaaccaaccaatcaagatctttggtaagctttcctatgaacaaattatatgagagttttggaacatgtaaaacaaaagttagagacaataaagagaaatttgtacatttccctgtctagctgtgggtgaatatgttccatcaacaactttaattttttaccttcttgaacattggattcctgaaactagccatatggttagaagtatgtgaatctatgatccatgtattgagaaaacaaggtttttaagaaataataactattgtgtttccattcttcaactgttcagagctcttctcctcacaaataagcacaaatgccttttcaagatcaggaaagggaaaaaatcgaaaaaattgtgtttccaatgccttatcacatacttcatcaaactaaaggttaagtcccaccaaaaattgaaagactcactccatctccaacacatctttcaacttcttcgtgttggcaacaaacttcatttctaaccttttgataaagatctaactttgtcagtagacctttaagagtgtcgtagcaatttgtaatgttggatgatccttgccttgtcttgataatatgccgttttatctcaatattttgagtagcgaaacctatgttatggtaggttttattcacagcttcctaaatgtgtttggttgtgtgaaggagaatgatgcaacacatgatcatcgttggtttctattttaagctcatcattagtttcctttaatttctattttaagttcatcattagtttctattttaagatcattagtttcctttaatttctattttaagttcatcattagtttcctatttctagttttagtttataattatctttgtttcttatttctttcctagtttttctagtttctaattatcttcgtttcctatttctagtttcctatttcagttatttcctttatttttgcattacaaacattatttaaaaacttattgtgattgttagaagtagttcaatataatttatcaaaattattccctaattttcaaatcctattgtgatctttgtatttgttcttgagtgtttttccatttcgttttgaaacaaaccttctgcagcaccaaaattggtatcagagcaaggatttttacctcaatttgatggctaacaacggttccaatgggaaatgaaccatcgacgatgaacaattgttcgaaaaaaatcaagtaacaattgaaaaggcaaaaaaaatagaactttgatgaaggtttaggcacgatgaactgcaaagttgaaaagtttgaagtggaaaaaaagtcttttcaggtgaagtttgaaggatcgaatggtggaactcgggtttcagtaacagaaaggagccgtggttttgttgtatcagtaggatttggaagggaggaggtggtttggttaacggagcatttaaagaaagctgtggagttggagaataccaggggattcacacgaaagttcaggggcgagaataagatccatttgatggagatttgcttcaacaatagagggcgtttcatgaaaatcaccgagattgccacaagaaggaatcctttacttcttgtcatccccgagggtgataaaggtagtggatgggaagtccttaggagggcgattatttcagtgcaagattattctgatcaagtcggagaagagcggaagaagatgtttggcattaatcagttgagcaaaagcagatatagaggtggccggtcatacgcagaggtggttgcagaggatggaattaggagtggagttccagtagcagctgaaaaatgggccagagccgtaatatgtgaatgcaaagaaaaagttcaagactggactgatgaaggcaaggccattgcgaggttgctgggagtgaaaggtatggtgtctataaatcccatttccgcctttaaggggtgtttctttgtgagtacagcaggaagagcaaaatggttacaagagcaggagaggcttttagtgaaaggaaggcttgttctcctaagaagatggtcgccaagagaaaatatgtttactcctggaaaattcagaaggggttggttagtgttgaaaggccttccttttcacttgtgggaggtagaccagctgaaattcatcttgaagaagtgggggagggtgacggaggtagcaagggaaaccgtgaagctgttggatttgacgaaggtgaagctgtgggtggagatgcatcctagagtcgtgcttccagcgttgctcgaggtggaagacggggcctggaagcatactgtagcagtttcagtcatcggagaagagggtgaagacggcaatgtcacgtccgagacatcccactgcaggtacgagtggttgaaagaagggggttgcgtctctcagacgccaaaatttgcagaggggctacgaggtagtatcaggggtaatgagtgctacaggagggagcttcttccccgggcacgctatcggcgttcaagtacgagcatggcggccaaaagggagaatggatgggaagggagcagattgggttttgtagaggaagtcattcttgggcccacagggcctgagtcttccactaaagcccatccagttagggcccaaaaagggagaaggagtcgtgggcttcacgctggcccagacgtccctcaagcccatgacgctgccgcatccctttcttctccacagagagcgggctcctcagcaaaggcgaccacgcagcctcgttcaggtgatgagagggccggcgtcgaagcaaatcttggagaggatggtcgggccgatgagtttcaggccctgatttcatccaaccctagcccaccttcagagatagaagaggagagttatggtcgtcggactgtgggttgtaagtcatcaggcccgtcggggttgggccaagttcaaggcggctcgatgtcgtctggcttgagatatgggtctcgagagagagaaagtgcagcaagaaaggggaaagcttcaatggatcagaaggaagacttcacgcaaggggaaaaaacgatggattcaagggagatgtggtccaaactcttccttccaagcgcggatcgccgtcatggacaacggagtagcagcgagactcttcccctacggagcgcagcgtcatttagcgaaggccacaatctggaagtggatggcgggatgggatctcatcagactcgaggtatcagagagagtcccatcttccgttgtcttctgccaaggaattgcaacagttggtcgaaggaggaaacctcgccgtcaagaggagtggtggaatcgcgaaaatcccaactcaaagaagacaaaggaggatttacgggccgagcggggtatgatcctggtagctcttcagtcacggtgtcaccttctattccaagaaccagaggtaaagacatcattttgggaggaaattgtgaagttccgggagtggaaagcttggaggtaagtcaacctttttcttctcagccacccgagccttattcttctccgtcctgtaatctggcaatgaatcttccgtgtccctccggtcctcatctcccatatttagaaattctttcccagtcttcttcggtaaatcaaggtaaattcaaaatttttcccgaaataggcgatgttggcccattaaattttgttggcatccctgtccatgttgaggaggagaatcagagagctgtttttaaccagatgtccgagagttccacccctgggaagtcttctaacctgatgccaggcagtccgggggttaatgaggcatccccgccggaagactttcttatagatggcctgtcccccaggaaaatggctaaagtacatgaggtcctaagctctctggacattaaggtgtactctaggaggaagaatagaggtccataggcgtttgaattcaggtggatttggtttggagggttagggcctgcgtgtttttccatgaaaatcatcagttggaatgttaggggtttgggttcaagtaataagcgaagagtgattaaagatttccttaggttagagaagccggatgttgtgatgattcaggaaacaaaaaaggagaagtgcgacagaaggctagtgggcagtgtatggacggtcagaaataaggattgggtttttctctcggcgtgtggggcttctggtgggattttgttcatttgggactcaaaaaagttgagcaaggaggaggtggtattaggctctttctcgatatcggtcaaattcgccttgggggatgtggacctctttggatttctgcagtttatggtccaaatagtccctcacttaggaaggatttttgggtggaactttatgacatttgtggtctaactttgccgttgtggtgtgtgggcggtgattttaatgtcataaggagaagttcagaaaaattggggggctctaggctaacttcaagcatgagggactttgatagttttattagtgaaagtgaattacttgatccacctcttaggaacgcatcattcacttggtcaaatatgcaagagtctcccgtgtgcaagagattagaccgttttctttactcaaatgagtgggggcagctatttccccaaggcattcaagaaacccttatcagaaggacctcggatcattggccaattgctttggataccaatccgttcacgtggggcccaactccttttagatttgagaacatgtggctgcaacatcctagtttcaaggagaactttagaaattggtggaggggttttcaaggaaacggatgggaaggccacaagttcatgaggagattacaatttgttaaagccaaagcgaaggaatggaataagctttcttttggagtgcttaatgaaaagaaaaaaagtatcctcaaggatttagctaacttagacgccatcgagcaggatgggggtctcacctctgaattgttaggtcaaagagccttaagaaaagaggagctagaggatttaattttgagggaggaaatccattggagacaaaaagctagggtgaaatgggttaaggaaggggattgcaattctaagttttttcataaagtggctaatggtaggcgaaataggaagtatatcaagtcattggaaaatgaaacgggcttagtgttgaataatgccgcgagcatcacagaggagatcttactctactttgaaaaactctacgcgaatcctataggagagtcttggagtattgaaggtttagattggtctcctatttcggaaaaaagtgcaataagtttggttgccccttttacagaagaagagatttctaaggccatatttcagatggatagggacaaggctccggggcctgatggctttactattgcagtattccaagactgctgggatgtgattaaggaggatttagtgagagtgtttgcagagtttcataggagcggagttatcaatcaaagcactaatgcctctttcattgttcttttgcccaaaaagagtacgacaaagaaaatctcagactttagacccattagtttgatcactagtctctataagataatagccaaagtgctctcagggcgtctaagaggggtcttacatgaaaccatccattctactcaaggagtttttgttcaagggagacaaataatggatgcagtcctcatagcaaatgagatagtggatgagagaagacgatcaggggaggaaggagtcgtctttaaaattgattttgaaaaggcttacgatcacgtaaggtgggattttttagatcaagtgttggagaagaaggggtttagtcctaaatggaggaaatggatgaatggatgcttgtcctcggtatcttatgcagtattggtgaatggtagcgctaaaggttgggttaaggcatcgagaggattaagacaaggagaccctttatccccctttttgtttactttagtagcagatgtattgagtaggatgcttgtgagagcagaggagagaaatatgttggagggtttcagggtgggtagaaatagaactagggtatctcatttgcaatttgccgatgacaccatcttcttttctaacactagggaggaagacttgcagactctcaagagtcttttgttagcatttgggcatatttctggacttaaggtcaatttaaacaagagtaatatttatggcatcaatttggatcatgctcatatttcaagattggctgagacacttggatgcaaggcttctggctggcctatactatatctgggtcttcctttgggcgggaaccccagggcaagtggtttttgggatcctgtgattgagagaatttcaagaagattagatggttggcaaaaggcatacctatccttcggcgggaggataactctcatccaatcttgccttacccatatgccctgttactatctttctttatttaagttacccgcttcagttgctggaaaaatcgagaggttgcagagggattttttatggtcagggattggggaaggtaaaaaggatcatttagtcaggtgggatgtcgtgtgtaaaccgaaggaaatagggggtttgggttttgggaatatatctctaagaaatcttgctcttttagggaaatggttgtggaggtaccctagagagggttcagctctatggcatcaggtcatactaagcatctatggttcacactccaatggttgggatgctaacacaatagtcagatggtcacatcgttgtccttggaaggctatttctcaagtctttcaagagttttcctcgtttactcgatttgtggtaggaaatggggaaagaattcgcttctgggaagatttgtggtggggggaccaacctttgggatcccaatatccaagtctatttagagtagtcttggataaaaacatacctatttcttcagttctttgtcctactcgtcctttctcttggaatttaaatttccgtcgtaacttgtcagattctgagattgaggacttagaaggcctcatgcgctctcttgatggagtgcatttatctccttcggttccagatgccagattgtggcccttgtcttcttcaaggcttttttcagttaaatctttctttctagctttatcccaattttttggtcctcctcaggtttttccttctaaattcgtttggaattctcaaattcctttcaaagtgcagtccttcatctggttagtggcacacaagaaggtgaatactaatgacatgctacaagtgagaagaccctacaaagcccttagtccggatatttgtattctgtgcatgaagcatggggaatcagctgatcatatttttcttcattgctccttgacgattgggttatggcacaggttatttcagttagctaagatggattgggttcccccgagaagcatccttgacatgatgtacaccaaattcaatggatttggttcgtctaagagggggatagccttgtggcaagctgcaaacatcgctcttattcggattgtgtggagggaaaggaatgcgaggatttttgaggataaagcaaggaattcagaggctctatgggactctattgttttccttgcttctctttgggcctattgttccaaggtttttaaggggactccccttaatgcgttacttcttgattggatagctgtatgtactccataaggagtggtctttttagagcgtttgctcgtttttcagtgtatttttctatagtttagctgtctttggcaggaggattcctcatccttcttttgtactttttttctatcaataaatctttgtgtcgtttccaatcaaaaaaaaaaaaaaatcaagtaacaactcgacgggatcgacgaaactcttcgtaacctcacacatatggtggctgcgttgactgtcaaagggaaacgcgaacccatggagcaacgaccagaccagtgtggcgaccggcctgtgggggctacaacgaccaatgccagccacaaattgagccaaaaatcaacaacagaggcgcggttcgcatgggcccagtcatgaatcacaattttcgcaagccctttccattaggagtgtatgagtggcggaattggggagttcctaggtgacgtgacaatgatgacctctgacaaggagttttggccgataacgatagcgagtttgaggctagtggtggctttccacgagtggctgcaagggtttttgatgaacaagatgagtttttccacttttttgagatggtgatgattttttacttccacaatggaagaatattcaacaaaggcagcaacggaggttgaagtatgcatttagagaagaagatgattttcattttgattatcatgctaacgatcaaggttaaaataacaaaggatttaagatgaagaggaatttactgagtttcaatgaccgattacatattgaagattttcttgatcgggttcatactgacgaaaactttttcgactatttgaatatttcagaagaaaatcaaataaagcttgtggcatactagttgaaagatggagcttctgcatggtgggaacaacttatatatagtcatcaacggtagggaaaataacgtgtttgtacttggcccaagatgaaatgattgttacaaaggcgatttctccctttgaattatgaacaatttttataccaacattatcaaaattgtcagtaagccaactgtacaatgaatgaatacacggaggaattttatcgattaaatgcctgagttaatttgtctaagacagaggatcaatcaattgctcgttatattggaggcctaaagctagttattcaagatcgactggctcttcaaggggtttggaccatggcagatgcagttaatttggcagtgaaagtggaaaatcagatcaataggtccacagtgtggactcagagtaacttttggcaaccaacccaataaacttcttttgctttaaaggggtcaacaactttaggcaacaatgataataacaataaagaggccccttcaactcaaaattcggtgcaaaatcgaagtggaacttcagctcttgtttgatctaatactcaaggccagaactagcagcaacaacaaatcaataatgatccttatgtgtgtccaaatcttgggaaatgtttccggtgcaaccgaccagaccatctttcaaataattgcccaaacagatgataaagaggaacaagttctcgaagaaaatatctacgagagtgctgagtttgcagaaggggatgtggggaaagaagtgacatgcattatccaataacttttgcttgccccctaaagaagctagacactctcaacgacataaaatattttggattcgatgcactattcataataaagtgtgcaatgtgatcattgatagtggcagtagcgagaatgttgtttccaaggctttagtgaacactaaatttgaagactaagaagtacccttctctaaacaagattgcatggattaaaaagggttcggaagttcaagtgccagaagtttgcaaggttcctttgtcaattgggaagtattacaaagatgagattgtatgtgacgtggtggatatggatgcttgtcatattttattggggaggtcgtggcattatgatgttgatgccacttataagggttgagataatacttttgtcttttgatggtttgacagaaagattgttttgatgccactgtctcaattgtcaaaaaacaatttggttactgagaaagataagccgctattcaccaatataatgggcccaaatttctttaagcaagtcaaggagccgaattttgttgtagcattggtagttaagggccaatgtgaagcaactattgatattcccaccaaggttcaagaggtacttgctgattttcctgatttatctcctaatgaattacctaatgagttacctcctatgcaaaatattcaacaccatatcgatttaatacttggagcttgtttgcctaacttgccacattatcgtatcagcccaactaagtatgaagagttgtagtgacaagttaaggagttgcttgatagaggcttggtttgtgagaacatgagtccttgtgcagtcccagctttactcgccctaagaaggatggtagttggcgcatgtgtgtggacaaccatactatcaacaaaataatggtcaagtatcgctttcctatcccacatcttaatgacatgcttgataggttagaaggttttgtggcttatatatatatatataaaagggttagaaggtgttgtggtgtttaccaaacttgatttacgaagtggctatcactagatttgtattcgaccaggcaatgagtggaagacgactttcaaggctaaagatggcctttgtgaatggctagtgatgccatttgggctatcaaatgcatcaagcacattcacgtggttgatgaaccaagtgcttcatccatttattggaaaatttatggtggtttattttgatgatattctcatttacagtaagaatgaggagatgcacttatcacatctcaagattggtggtttattggaagattggtgatgatgcttacaagattgatcttccaattgatatgaacatttccaatactttcaacattgctgatatctttgaatactttcccccagatgagttttctttgtagccacaaaactcgaggacgagttttcttcaagtggaggggattgatgtagcacacgatcatcattagtgtctattttaagttcatcattagtttcctatttctagttttaatttctaattatctttgtttcctatttctttcctagttttcctagtttctaattatcttcgtttcctatttctagtttcctatttcagttatttcctttatttttgcattacaaacagtatttaaaggcttattgtaattgttagaagtagttcaatataatttattagaattattctccaattttcaaattctattatgatctttgtgtttgttcttgaatgtttttccatttcgtttcgaaacaaaccttctgccacactagagaaggtatgttttgctgatctctggctgcctagaattcagcaaccaagacctcaccatcgagttttcaagctcccaagtctcatttttcccatttgtctctccaatagccacaccattattctgccgattggtatttggcttgactacatcaaaagacgatcctttacttggtgggccttctaacatgactgtttcttctattagcttctaacttacaattgacaacacttcattgagagatggaagtgtttcttttccaagaatctgcactcttaacctgatcatatttaacatttaatccagcttaaaaaactctcttcctttcaacaaatttttgtagcatggctcatcttcacttttcatcttgaaattttgatgatagtccaacttaagccacaaactttttaaattattatagtaatcaattatagacaaagtaccttgatggatgagatctttgttttaatttcataaatctgagtagcatgttgtaccttggagtatgattgcttaacggccttccaaatcgccttcactcctaatttgtggttgcgttgagttgcaaagccaagacattataattgaattctcttcattccatgcaacaaactttgtgtcattcagctgtcacggtttgattggaattttgggtggggggaagatttggacattactagatatgtcaaacatattgagaaaacaaataaaatatagagagcatgggaaaaccaccaatgacagttctatttctgtctattgattttggcaatgaaggccaagaatcattaaagttgcagcaagaagactgcacttagttatgacaattaaggctgaagaacagagaaagaatttgctctgataccttgtgaaccatcatggaattgtatttcttgtattgatggaggaatttacaatgagtatacacagggtttacagggacttgagagagtatgtcatggcaacttatgttgtaatcctaatttagtctctataaatacaagattcaagtgagtacaagcacactgcattaggaatatggagttatttctctcattctctcttaattcaaacaatttcaggcgcttataattatttcattatgttgttctctcttaattcaagcaatttcagacagttgaaataatatctttatgttgttctctcttgattcaagcattttcaggcacttgaaattatttgtgtgtcaattctctatctgtagttttacaaatattactatatatttgttgaaagtgttttccctgatttttcatgcttaagaaaaatttcactttttgacaattatcattggagtgatttgtgctattgtatgatctgtagcatatattatgcagtttcagaaccaaaattgtagaaattagttaacattttcatgttcaaatcttattgagttcagtaatttgatggaagtactgaaacttgaagtcttcttgcagaactattgtcagtgaagtaatcacaggataccttc

SEQ ID NO: 11343 - DNA, 12674 bp, Vitis vinifera
  Intron number 18 from transcript GSVIVT01016183001 (locus GSVIVG01016183001) derived from phytozome v7.0 (chr-ID chr 13; pos 6967325 to 6979998)
cttgctgtctcaaaggatcacatccaggtttatcatcttaatacattgttattaataacatcatatatatagtattgcacctcttcattgaattattttatttagtcatagcatttatatttagagtaatatgtgaatcaagttgcagtaacaagttagtagccttagtgttcacggaactaaagtgctagcgcgctatactattcatactgctgtatctgtgaactaactaggggttgctgcttacttgtagtattaatatgctcactgttctaggattaattgttgttaggtgttaaaaagttataaaaaggcagccgttctatccatgtaaggttttctatccctttaaggttaatgaatgattgttgtgaattttcccctttgaagatcttgttcagaggcagtaattgccttattttctaagcccaattgctcaggaaaccctaggtttggctgctgagaattttcctccttttttcttccctcaattactttgaaaatagagactctcttatatttttttttgatcagaaacgaagaagattatattaataaaagaacaaatacaggagagaaaaaagagacaaaagaaagagaaaaaaaccaagggaaggatgagaggtccttcctacacaaaaaccaaggaaaaacacccaacaatagaacactaaagacaaaagaaacaccagcaatcttcaaactcttgaaacgcaaaccccaatccaattgagttgtagaatgcttagaggaactcctctaaaagcttcagtacaagaagcccatagagaagaataaaaccggatcaaatcccaaaccatctcttccgttctccctttatcctcaaagattctattattcctttcttgccacaccacccaaattaaagtaaggcaagcaatttgccaaagtgtcttgcctcttaatgagttccccaagcctttaaaagaaataaccaacatgtcctcaatgctccttggagggacccaactcacacctactagattgaacaacctgtgccaaagtcagagactctcttatatggaccttggaatttctacattagagagattagtagtaaaagaatggaaggaaagtgataggttttcataggacacaaactaagatatgggaacaactgtacatgacttgactcctttcataagggtagtggggaaatctacgtctataagatcattttcaatagatgaagctgagatggaaatggaattgagattacttgaattattttggtttgccactactgattcaaagtcttaaccatgaggagacatgagctgttgtttgctttaaggattggatctccttgaataaaaaggaagccctggttgctttagcccttgaaaatctccccctgcttctaagttttcttgatttggtgatgacatagttggttcagccatgacacaagaagaagaaacagaagggattgaagcaggatcaggcaatgataattcctagagacgatcttcacttggttgtgtctcctctcgaagagaagtggctgggaaatagggatgagactcaaaggtcacacctttggacacctagaatttttttgtaacgtatagtagcatttgtaattcttttgagtaggtgaatagctaagatagacacatttaatggcttggggttcaagcttactttggttaggtgaatgattatgagcaagtgctatacaaacagagatttgaaagggtagagggttaacggacttgaaatgaggatacgatttcataaggcttgaaattggagtttggtagtttagaaccctggatggcattctatttatcaagtaagaggcagtaaggatgacctctccctataggtacttaggaacatgcatagtgaacattaaagcctttgcaacctttagtaaatgcctatttttccttttgaaaacctcattctatgatggagtctccacacatgaaatttggtgaattatcccttgtttagctaggtattctcccaagatagaatggaacctaaatttgtgtttggaagtgattttggaccatggagtggaaattttgaaagatttggctagttccaaatttttcctttgagagataaacccaacataatggtcatctataaatgttaaaaccatttttttttctagagatgtttgtcactctagaaggtccccaaatgttgctatggattacagaaaatggctttgaagatttatggggttgagcaagaaacattgcacgtttgtgtttggcacgttggcatacttcacattggaatttggaacaaacatggatttttatttctgaaaaacaatggagacaagtttttcaagtaaggaaagttaggatggcctaacctacaatgccaaaacattatttcttgaatactagaaagagaagcaaatttgcaactagaaactaaaccttgttaatacttgggttcttcctccttaaagtagtacaacccctcatgttttctagcattgccaattgtcttccccaaaagtggttcctaaaattcgtagcaagatggagagaatttaccaacacatttttttttatcttttgttagtttgataattgacaaaaggttgcaagacaaatttgaaacatggagaattgaaaaaagtgtcaagattttttattttttattattttttttattgaaccttttcttacaacaatggaaagtgaccccttgactatctttaccttgtagttactagacatggaaaataagtgttagataatgtatagttatttaggttatttacttttccttttccttttccttttctttccttactgtattgtgggtcccactagcatgtatatatatacccaagtccaatgtgtattttttttacagtttttcaataacaataattagggattctcccttttctctctctctcttcacatgatatcagagcctagggagaaaaaaaccctaattatttccggtttatccgtgaatccattttgggaaatctttcagtgactgtgtttcattctagtcatccttcccatcttctaaagtttccaatcaaccctcaccgccgtcggaaaaccctcaccgccgacgaattttccggcgaccttttctggcgaattttccgacgaagtccttttccgacaccgaccataccatcaggtgcgcaaggaggagatcttcaacttttctcaagctaactctcgaggaggacacagtggtaactgaggtagaggccaacatcctcattgcacctattgtaataagcttggccgcactcgtgatcggtgttatcagttacatgggcggcctacccgcactgcccacgtggcccagtcctctgatcctcagtcgcctcagcttcctagttcctccacatctcagggtattttccttactaacagtgagtatgacgactatctccgctatcaggccaccaagttagcttctgttgcccagactggtaatgcttctgcttgtcttacccacacatcttctcttggaccttagattctagattctggcgcttctgatcacatatctggtaataaggatcttttctcttctattactactacctctgccttacctattgttactttagctaatggttcccaaactatggctaaaggttttggtttcgctcatcctctcccttccctacctctccattctgtcctttatgcccctgagtgtccttttaatcttatttccatcagcaaaataactcgcactcttaactattctatcactttctctgataaatttgtgaccttgcaggaccggagtacgaggaagacgattggcataggacgtgagtctcaaggcctctatcacttcacctcgccttcacttgcagtttgcatttccactgatgctctcctcttcatctacagtcgcctgggccaccctagtctatccaagttccagaaaatggtccctagtttttcatctttgtcgtcgcttgcgtgtgagtcctgtcagcttgggagacatactcgtgtctcattcccaaagcgtttgaataatcgggcaaagtctccttttaaacttgtccacaccgatgtttggggtccttgtcggaccgcgtctactttaggatttcagtattttgtcactttcattgatgactattctcgatgtacttggttatttttaatgaaaaatcgagctgagttattctctatttttcagaaaatttatgctaaaatccaaacccagttcaatatttctattcgtgtgttgtgcagtgacaatgccagggaatatttttctacaccatttacttcatttatgtcccaacatgggatcattcatcagtcttcttgtgctcatactcctcaacaaaatggggtagctgaacgtaagaatcgacatcttgttgagacaactcgtactctccttctccatagtcatgtttcttttcgttttgaaggggacgctgttcttacagcatgttatttgattaatcgtatgctatcatctgtattacacgatcggattcctcattcccttcttttccctgaccaaccactttatttccttcctccttgtgtttttggttgtacttgttttgttcatattctcactcctggacaggacaaactttctgccagagccacaaaatgcatcttcttgggatattctagacttcaaaagggttatcgttgttattcctctgagactcatcgctactttctctccgctgatgtcactttctttgaggactcaccgtttttctccacctctgagtctcttcctgtttctaaagtcttaccccttcccattatctccccacctgatgcagtgccttctcgcccacttcaggtttatcatcgccgtcatcgtgtcgctgttcctccttctttggccacggtacctactgactcacctcctatcccttcggcttctcctgccccggccctgcctccttttgttgacttacctattgctcttcggaaaggcaatcgatctactcgtaatcctcatcccatttacaattttttgagttaccatcaattatcttcaccctattctgcatttgtttctgctatatcttctgtttctcttcctaagagcacccctgaggctctttcccatctaggctggcgacaggcaatggtagatgaaatggctgctttacactccaatggcacttgggatcttgttgttttaccctctggtaaatctacagttggttgtcgttgggtctacatagttaaggttggccctgatggtcaggttgatcgccttaaggtctgcttagttgctaaaggctatactcaggtttatggttctgattatggtgacactttctctcctgttgccaagatagcttctgttcgtctattgctctccatgactactatgcgttcttggcctctttatcagttagatattaaaaatgctttccttcatggggatcttgctgaggaagtttatatggagcaaccacctggttttgttgcttagggggagtctggtttagtgtgcaggttacaccgttctctatatgacttgaaacaatctcctcgagcatggtttagccgttttagttctgttgttcaggagtttggcatgtttcgcagtacaacagactattccgttttctatcatcataactcttcggggcagtgtatttatctggtaatttatgtggacgacatcgtcattataggcagtgatcagaatggtatttagaaactaaagcaacaccttttcacccactttcagactaaagacttggggaaactcaagtatttcttagggattgagatagctcaatccagttccggtgtggttctttcccaaaggaagtatgctttagacatctttgaagaaaccggtatgttagactgtaaaccggtagacactcctatggatccaaatgtcaaacttataccaggacagggggagcctttaggagatcctgggagatatcggcgacttgtaggtaaactgaactacctcaccattacttgtccagacatttcttttcctgtaagtgttgttagtcaattcccacaatcaccatgtgatagccattgggatgctgtaatccacattcttcgatatatcaaaagcacaccagaccaaggtgtgttgtacaagaacagaggtcatacccaagttgttggttacacagatgcagattgggctgactcacccatagatagacgttccacttccgggtattgtgtttttattggaggtaacctaatatcttggaagagtaagaaacaagatgtagtggtcagatctagtgctaaagccgagtatcgagctatggctctggcaacatgtgaactcatatggctgaaacatcttcttcgggagttgagatttggaaaggatgaacagatgaagctcatctgtgacaaccaagctgctttgcatattgcatccaatccagtcttccatgaaaggaccaaacacattgaagttgactgtcacttcattagagagaagatcgcatcaggatgtgtggcgactaattttgtcaattcaaatgatcaactagcagatatttttactaaatctctcagaggtcctagaattaaatacatttgtaacaagcttggtgcatataacatatatgctccagcttgagggggagtgttagataatgtatagttatttaggttatttacttttccttttccttttctttccttactatattgtgggtcccactagcatgtatatatatacccaagtccaatgtgtattctttacagtttttcaataacaataattagggattctcccttttctctctctctcttcacaataagaaataaagaaatgtggactacaggtcatatgatttgaagcgcccaaatcaatgatctaggtttcccttttattttgatcaacatgaagagtagtaacaaatgtacttgtttgggctaaagtgcatgagaaagtatagaccattggttgtgactaagattaagactaatttgggagcttatataggttgtctagttgctctttaatttcttccctattgagtgaatctcatccaatattgttggatttgatggtagcatgattctctactctagcttagaaacctcttgcattagttggtctgcttggtttcagtttggtggcttgccatgtagcctacaataggcctcctttgggtggtgagtgttaggatagaatccttaaaagtatgacataatgtaacatttttggaatacattattcatttaatgagatttcaggttcactttaatccatccttaatctttgcattattttttataagcattttggcctaacatctcttacattgtacatgatttgggtgcattaaaagttgcactgaagatctaagtcatgggtttcttgcaagtagatgatttgttcacagttgattcgtgaacttagacaatccatttgaggctgtactgtaccaccttataattggagggatgactggttttgattgtcgggatggggttcccatgatgagtacactaatgtgtatggttacatattggacaggacctacaatgagtcatgacataaggctattgggtagtcatgactttaccaagttgttatattgtattgtttctcaacattgaaagaatattgagcttgtatagaagttagcattggttttgacctacggatgagattgtaagctgattatatatttcctatgaatttggtcattgttgatggaaaccaataataataggtattctcaataaagactccatgatatcttatggattttgagatagtgtccttttgggtgatcctaaggacgtgtgatcatgaaatttgtagatgcatattaattcttttagtgaaatttgacatatgctcttagtaagttaaagtaagtcatttgatcacataataggaggatctgtaattcaaggattgtagaggtagtcttgaaaggttgataactttcaccttgttaaactatggatgaccaattcatggggagattgtatacaatgaataagaggtcatagacccgatcacttgctgtcttgttgtaatatacatagggtattagagtgtagttgactttctgtaatgggatgttgtgtcaacttcaaaattaaattatgagggagctaataccctatgggttccagtggttttgacttgagctcatattccttaatgacacaatttatgggggttgaatgagtttttagttcacttttgtgtaaaatggcgttttggtaattatgcaaggtggcacaaaggtaagtaagtgatatcactggattgagctaattgattaattgaagtcttgttgggttaattaatcaattagcaacctttttaggttagattaagtgatccaagctcatggtggacttaagtcacttaagcctgtaatatccttttaggggagaaaccttttgtcattctctccctacagtccagagagagaacctagcctccaaccttgaaactccatcatctcaatgcctagacttaaggaggagtcatcgggtggaagatcatggtgtttatgagatctactatacgctgactagaatcgatttgggaacatttagatcaaaggtatgcgacattattctctagatctatgttttctatggtatcaatattatttttaaataccaagtttttcgttgtgatagatttagagagcctaggatagatttttatgcactctaacaatctagggcaagagaatagagcaatccagggtttcccaatagtgaggcctatgacaatggtcataccagtttctttttccttttttggttgttttttgatctccacttccatggcctaggttctcatagccccttcatgccaaagcagaacctttggtattcaaggatgttatgtctgattctctgccttctcccatcattacttttcttctactttcttctcatctgaactcaacaaatacttcttgaattgaaggtaatgattccttcctaagaattctccctcttactttatctaggtctttattgagacaagtgaggaactcaaacactatttactattcaatcatttttttttaattcacactacactagatacacctctaatcagctttgtaaaataaatcaagctcttgccataagttcttcaatgcattatagtagagattcacggattggcttccttgttttgtatcttgtagctttgattttatctcaaatacttgtgcggaattccccaaatctgagtaggccatttttacatcattccaaacatcctttgcagtaggcagaaaacggtatgtttggccaatttcaatctccataaaattaatcacacatgcaattactattgaattttctgcatcccatccttgaaaagtaggaccatcctccttcggtggtttagtggctccaatcaagtgttcgagttttcctctcccttgaataaccaatttgattgattgagaccattgcaggtaattttttctgttcaacttatgggctgtaatttggagggaagcgtcctctcctccctgcaatatgcttgtcccaactctgtccattttagccattaaaccctagaaccagaggtactactttgacaccataaacagaggctagaaaataaatggaatagctcacttgatttattggaatgaacaactaatacatttatagagaaaaacctaacaaacagatagaaactaggttaaaataaatccctaaaaaataggagacaatcggatagaatccaggctaactaaatcccttgaaaataggggcaaaaaattcaaagggataaagcttcctgatcacctactattttgaatttaaaaatacagaatattaataaaacaaaaacataacaaacttgatttctacaaaagtgaatctcagacatcgattagcacctgtagggaaaggggagttgttaatgtggtggtggtaccaaataggtgcctttaaaaattagattgacccacaatattataattcccttgatctttcttcttctttttttttaattaacaaataaaaacacattctccaatatatatgcagcaatactcttccaacaactaaaatatgcaagttctatacaaataaaatcaacactctcccaaacaatacttaaataacagtttatatcaccattatgactactgagctaatacttatctctcatccacatcatatcaaataaaatgaaccaaatgtagctcttaaaataccaacatcttctaaaggtagaaaatcaatcaataattgctggttagaattaaatgaaaattgagagagttgatgagagatgaacaaacaaagatttaacatggaaaatctttgaaaggataaaaaacaagggtctctaacgattgcaaaatccactatgaagaaaacactgagtaccaggttttatctagcccaaaactccagtcctgcctactacattccgaacttcagattcacaccatcttcatatggagcatattgggaattactgctaaacatgattttgacctccttttggtaccctaacaaaaaaacactttggttgtatcccaatagatgaaaaactagtgagaagggttagttggacaataatcaacccattttgtagatgaaaaatctaggcaaacatttagttttcggcttaaaacataaggttttctcaagaaacaaacgatcccaatttataaatagcttcaagggaaggtctctcgtggctgttctctctcaaactctaatctggaaaatttggttacaattgacagtaagagcatcaatcaaacaggtcatatttgatcaaaaaatgtgtaaaaaaaatgtatgtccattgattaaactttgatctggaaaatagattcatgtgccaaattgtcccttcgagttcttaagatgcattgctcactctaaaggttggatcaattgcatatttggctatttgactgatcttggaagataactgcataaacttcctacaagatttcaccacaaacacacatttgaaaagcctggttgatcaggtttacaaccatccacaatcttgagccaccaaccattgccttttgccaccttgatggagatattgatctttaacaaaactagttcaagggaggatttgaaagtaccaagttgggaggatagaatggattttggtcctggaattgccaacacaataagacgctcataggctacccatgaggcaaaatgtttgggtttagtccatattggcttgatacacattgttggcctattacttaacaacttaagcttttaggtcaaattggtaacttaataaatagtaggccatatgcctttgataaagagtagataagaagttggaaaactaatataataagttattgtggcatatattcaacattccctctcaatctcacaaggtttgaaaatgagctaatcctggaaccttgtttatgaaatcctccctgcatgcatctatgttattcaaatataggggtggcatgggtaggatagtaaaatcctattcctgtcctaaatccaatgtggtttgcttctaaaaacacttctacccctacttgaaataaagatgtattgtccccatcccaataggaccgagatgggtaaccaacttgcaagttacaggtgcaattggcatccttagtcagctaatactggtcatctgaaatgacattccgaatatctattgtttatgcctgattcaatgatataaatattgtagtaaatgattttcattatggctaaataagaagacttgcagtctaaggctcccttttatggctggattgtatctttgttgtgctttcaaatgggacattagggattcaggtcctagtggaatgctcattaaccttagttagcagtgataacgtattccacacccttttggtgggcaaattgcttgaatctaaggtaatgccttctggcaagggcttgagtaggacgctgaaaagaaaaagaaaccttgagctttactttgttcacacaagttagctaatcctttgtaagaatggaaattatcagaaaaagttgttcatacacaaataagttcagaccaattcagcatgtttatcactggatattagtttaatatcagcaaaaaagtgtctctactttctaaatttttattcctgaatactctgattggtgggtaaatttattttctctagctacattgttattttattttggagattgaagtgggtatgcatagaagtttgatttctatctatgctggtaaaaaaacatagatgaacatgaatatggttataggggacgctagatatactacttctatatatgtcgggaaaagaacatgtagacttatataggggatagctggaagtttgaggctctaggaaaccataggaggcatgtgtataggggagagctggaagttcaaggctgtggctagtagctcctccttacccttaagttgaaccctagacctttcacaatgaggagtcaggagagactactaggccacacaagacagtcctctattgcctggtcttcctcagggattttgagaatcttgtatagaactttatggaaataaaaaatggatcaaaaagggaaaataaaattcttggccatttctatcaacaatatgagatgaatctttgtcttcacatccacatttttttgaaatttatgttatttgtactttcttcattatacttcaaattagagagatttcttgtaattcaggttggg

SEQ ID NO: 11344 - DNA, 2156 bp, Vitis vinifera
  Intron number 1 from transcript GSVIVT01024018001 (locus G SVIVG01024018001) derived from phytozome v7.0 (chr-ID chr3 ; pos 1723170 to 1725325 reverse strand)
cacagatcgtagcaggagcttcccagcagcgaaaggtgttgatttctatgcaattcgtgtttgggttcctgagtttggatttaggtttttagtttttaaatgccaattgacctgccgttgcttcaaatccatggatttgtgggtgtaagttctgaaagcaatgaacttggatttgtagggttatcttagcgtttcctcttctgggtttctgtgagatttctaaaagatttcagggtgatgattaaattttgtgttgtgatgttcatcaggcttttgagaggttaggctcaaatgggaacaagtcagaatccaccctaggccctcaatagttatgaaaatttaatttggaatcccacccacaactttggtgcagatagaatttttaatttttctttctgtttttctctgtgttttcctctacccgatgtagcatgattttaatataaagcaaagtttttgtagagaaagggccccagtcgatgtgtttcttctcctagtgtttgggtggaagagttttggtgtctcatgtgttgtaagacttgattcttgcttattaacctgtgatgattgtaagaataagatatacataatattctgaatctctgattcagaagtaatctactttttgttgtatgtttgagctgcatcatatgattatttattgcatcctttgggtggggttgtggtggggagggagaagtagaagtggggaagtttgtggttgggtgaggacttatggtgttgatgtgggaagagattccccatggtgtattagtttggaacagattttcacatctaggacaccaaaaaatggaatcgatctagatgctgtccagatgattagatatgttttgaaatgtgcaatagggaactacaaaaggtttcagttcaaagaattctgagtgctttggtgatagaatgcttctatttgttctggcttgtacagtgttgaaggcttattgtcatgataagaagtttttggaaattttcaatgggaaactataaaaggtttcaactcaaaggattcaactgttttggagagagagtgatcatattgatgttctcttgcctatgcaatgttggagggcacatcattctgatgagaagtgtttctgaaatatacaattgcaaattctatatattttcgaagtgagaaattgaaagagaaacattcttggaaacaaaaccacccccctccccccacttcttactctttcacataaatacttcggctgcccttatgattctgaaaatacgttaagcaactaataggcttgatatctgtctgatatgcgctccttttgttacaatgctttagaattctttgtaatttaacgagatctggtaggttataacttctatgtctctcataagtaaaaattgagatccaggagataatgcccaaatactcttttcaacataaataaaagcaatacattttagggctcttacattttagcaagatattggcatgctttgtgcatgagcctagttgtagaagcattgccagagaaatgagtttgccttatttggatcaggtcgttaccagagtttgaataaaaggcatttatttttattagttttaattaacagcattaagttttggtatttgatgtgggggtataaaaggggagagcaagacagctcctctcttgattagatggtatgggttttgatgacttaagttgccattttagtttttgtcaccaaaaatcgagccatattgatggaggactgtaataatgagagaagtgagtttagttttcctttcaaaatattagggctgtaggaagcatttttaacgaactaaaggagtgtgtttgtagtttgccaaattgtggttgtgcttactgttatcattagtatctatatttactgtgccctggaccaaggattcatgacctggtgtttttttctctttcccctttttatttttcccattttcaagttgaaattgattttaactagtgtgttcattcatcgtaacttccccaaaaagttgatggtatctgcacgctgctagttgttggtgatttcaccttctaaatgttcaattataccattcattttggcagaactaagaagaatgttgatgttcttaccattcttaaaatgtttcaggcagcaactgctgggacaataacactactctcagc

SEQ ID NO: 11345 - DNA, 3216 bp, Vitis vinifera
  Intron number 3 from transcript GSVIVT01012862001 (locus G SVIVG01012862001) derived from phytozome v7.0 (chr-ID chr1 1; pos 6324147 to 6327362 reverse strand)
ggtaggcatcttgtgcatccatgtaagaacaagacatctagattgcttctcaaacaatcattattattattattattattttttttataagcaaccaggaaatattagagatataggtaaggcttaagctaagtacactggagtacaaaagggtacctagagaaagggacaaagacaggagtaaacaagggaaatagccagcagcccacaattatttactcctgaccaatcaataaaatggatcaaagacagaagtctttccttctatatgatgcctagtataatccaaaaaggaggattttagcaattgattcgtggattccacatcatcaaaacccctccaatttcttttacgccaaatggtcttttgcctttttcctacttgaaccccattccagcttagcaacatcaacagaattgaagactaaatcacctgctgtgacccaaataaggaaaagaccaacagaggaagcatgtggtcgatggattcctcctcccttttacccatgaagtatcaatttgccaaaaaccaactctcattgggaccgtggattccaaactactctagctggaaaagtctctgtaccccctgaggccaaaaaagaatggaaagctttaacagagaactttccattccttgaactgatcaagtcatttcctctatatcacgcctaatagaatgcttttgaatttcctgtagaaaggcttccacaatctctaactctcaatcatggaactgtcttgagaaacatagactctaatgaattggcagatactgccacctccaactgccaaacctccaccaccttagtaccccatcgtgcccccacatatatgttacccatgattcgtttgaatcgtcaacggaaaatcaggtggggaaagactcttttagctaggtgtcaccacaccacttgtccaaccgaaactttgattctcctcccattcctaacaatggagctgactttgcttttaaaaacctcctagttttttctaatagccttccaaaagccaacaccataaccctccctaagcacccaaacgtcaacctcctacttcttccccaaacttcccaacaatcactcacttccacaaggaatccttttccaagcaaatctccaaccccgcttatccaacaacaccatgttaagaacaaagagattcctttttttggtaggtaaataagagcaaagagattcctaatgcccagacccccctcttttcttatccaaacacactttagcccagttcactaggtgaggttttttctcaaaagctcttccacttcacaagaaatatgtttgaatctttgcaatccttaaacttacccttcttgaaatcagccttacaatttcctaacttcttgtttctttttttgttggtaactcaacttgtttatttatgctttcaatgcattatcaattaagaaagaaatttttgaaaccatgaaacatttactcatgctattttctacatgtagtccaagtagaaaatgacatttaaatggttcataatactcattgaagagtagaatacatagccaaacactgtctttagttacatggcctaaagctatcagccataataatgcagccaggcagccatcttccttgatgtacacccacgttgaactttcactaggtttctagtgttagtttatcctgaataccttgggtttggggctgggtaacactcatgacaattcgtttgaagaatttcctatagcattatgagggctctatcaaacagcagaatacatcttatcctccttggagaaccattctccactggttctaggctgtcccccaatcaatctaaacatgagatcctttccttctttttaatttttatttcttagaaccttaaaagcagagacatacaaatcaaaatgctccctacagcacagacaacagggcatctattaactaggtggaagatgcagagcatgtttgaaatctcaaatattccccttatccctacttctccactatggaccttgtccttactactgctatcatgcagtgctttacacccatgtttgtgatgggtgaattgtctataatttcaagtgacctgtcaactcaatcctgaaaattagagtctccttcatttttcattttacatgcatacaagccatcctaaacttctacagtgactctttatcatctcaaaaaatcacatcaaaacacagcaatagtagtgaacgctggattgatgagaaatcttttgatgttttagttattacgccttgtgtttggttcctagaaacatgctttgcagctgtctcaaggatcctgaacccatgagattaagatgaaaaaatttctttggagatggtattaaataaatgacaaagcacatccatggaccatgatgatatcagacttgttggtctggtaatgacaatgattttgaatatatgctgaaatctggtgaatctcatgctttagaatcctaaaaagaaacttttagataatttttaataagcttgtgtaatcaatcttgaatttgggatgatcaaactcttcatgttgcattcaatccttgttccaatgataaccttttcagaatcattaaaaagtcaaataaaaataaaatctacaatatttttctttttcatagttgtataagttcttagaaatatggaactaaaatttcaccacctgcttaccacttctgccacatgataagtaatgttctctggcaaaataagccatgtgatacaaacaagtaatgtacttgaatttagcaataacaatgtaaacatgcaatcatctcaaaccatttgggaatctttaaaaccaggcatgaatagcagcattcttattaagcctagcgtttattatattgttgttatcattatctatgaactttgagcaattttgttttcttatccaacctaagtatgagttgcatgctgctccaatttctcaaatgtttatttcttgattgggaaaatatttactccctcaataagcatgttgtgtatgcttgtccttgaaatgtcaaacaaaatacatggccaataccaggcataaacagggcaaagattgttaggtttgcttgtgaattttcctttttctcagtcaagatagttggccttttggcatttatacaaaaaaatctgcttcttatccctttgtttattgatttgtgattcctttctggcttccatccattaaaagagagatagacagggaggaatttaggagagtg

SEQ ID NO: 11346 - DNA, 20324 bp, Vitis vinifera
  Intron number 1 from transcript GSVIVT01007559001 (locus G SVIVG01007559001) derived from phytozome v7.0 (chr-ID chr1 7; pos 12128558 to 12148881 reverse strand)
ggttgaagcggaggatcaaaacgtcgcaaggatttgtaagttcaaatttaattgcagaatttgatattggtgcgaataatttgttgttctatgcgtttattttgtaccgtgttactttgttgattattgacgttttatgattgatggggctaaagttaaaacaaaagcaggttttgacactacatgttagatgaagctcagttatagagtttccataattgagatacgaaatttaaaaggccagtgtatggattaggtgttgaaatgggaaactattgtttttctatgtaattgcagggacataaaaatgctcatgaagtgggttcattttagtttgcaacataagtgtgcgatcttttgcaaggcaccaaaaactggatatgatgtaaccaatgggttgaatgcttatttaaatattgttatgctgctgtttatcgtgtatactgaagaaagctattcaaaaaattgatcctattgctttaaacgttatttttgcataattaaactctgttttgaaagctattctaaaaatctactcaatctttcttgtgtggtatgctaaagtttaatggttggcagaatcttctggcttatttttccccaacttaccataattgtgaatagggtcgacattggaaatttgaaactagaaggcatcatcacaactactggtataaagttgtagtacacctggttcatgaaatactaaaattgtagcatatcatcaagatctgatgatggttccctatttcctcaaagtaatttatattcagtgttacatttgagcattataatactatcaatattgcaatggagtcattaaatttgcttggtcatctaaattgctgcctagatacttaaaagattattattattattatttttaagtaaacacataaatatattaaaagtgtaactcgaaggtgcaccaaagtacacaaactgtatacaaaggaagcatagaaagcaaaacaaaatagaaaattatcaatgtacatcctaactcatacatatcaagagattacaaagagaagagagctttaatgcaagttttgacaattctttgcttttgaaacatctttggttcttctctttgcataatgttcataatacacatgaggggataaccctccaaactttcttactttcttatccatgaaggaaccatgcttccagtcactcttctaccaaacatggtatcacccatgcaacaccaaataaaatagaaaattgaattccatagaccttaagctcagtcacaatgtaggggaatgtgaatgactgactatgccttgagcatacaaagaaaacaatgattgaccaaaaatgtcaaaacgtttccccaagaagcttcccatgtaaaaaagcctactttgatagggaccatcaagttccaaatagcggtcatagagaaagcaatcacactttcttaccctaaaaaagagtaaaaagatttaactattaattatctcttcttaaaatccatccaatccatcctatcagctttatactggctgaccgcctttccttagggctttgagaggaactcctcaaccctttctaactctcaatcattcaaattcctcgaagaaaagagcattccaaagcctgcctttgccttgttgatctcaaacatccaccacctaagcatcctttgtcaaggatatggaaaataaagacgagaaagattctcttaaagttgattcacaataccaaatatcttcctaaaatttcacacttttccctttgcctacaatgaaagaggtgtgtccattgattatgaattttgatggcctttccagcccaacgccaaaaccgttagtactttccttggaacactaactcccatccttctccccatacttaccaactgaaagcatcttccaaagtgtctcattttcgagacaaacctccacaaccacttctcaaaagcgccttattgagaattgaaagctttctagtacttgggcctccattacatttctctctacaagcaaattctcatctcactaaatgcgactttttctccaaagaacgctcaccccacaagaagtccgcctaaaactcctcaagccttaagcataccaatcttaagcaagatagaaagagacattttttttttttttgttttgtttttaattagaaacaagagatgtatatatttatattaatgaaaacatgagaaagatgaggagtcctccccacgattacaaaaaaaacctgatcataatatgattgacctcctctactatagtaagagtctatacaaaaggtttagactataatgctatatacaaagatgtcatctgcttaagttctaactaagctcctctcaaggatgttcaaacccttttgatttacacacctaaagccagttaagttggataacattgagaggaatgcctttaagacctcggtgcatgatacccaaaaagagaatggaagtgaagtaaatcccataatccctttgttgccctccacttaccttaaaaaattctggcatttatctcttgtcacataattcaaaccaatgtgagacatgctatttgccaaagggtcttgcctttaatggatctcccaaaacccccatatgaaatgatcattatgtcacatatgctcctggtgaaacccaatcaatcttggcttgattgaataggcaatgcccaagtctcaaagttatcaaattatgtagaaagagatgatcaatagactctctgttctctttgcataaaatatatcggtcaagcttaagggatttaaaaggtcttcttaactgtagcatgtcattggtatttaccttcttgtatgctactaaccatgcaaatactttaacttggatgagactttagatttccatataatttttgtcagggataaaaaataatatatgacgtattagacaaagccatgaagaatgatttgaccggtgctgattctaaagaggttaataactatgttcttgcatttgggatggatgaagatatgtgcacatgagtaagggataacatgagtctttcaaggtcctcaatcttcgaattgtaattttatgatggaaattacaaactctttaaccgtgagtagatgcaatcaggagatttttaaccgtgtcaactctttaaagacataaaaattgtgaccataaaggttgatacccaaccacaaatcctcccaaaaacgaattttgatcctttcacccaccacaaaatgagtgtaacttgaaaaaacttggaactcctattgatgaggatgaatattcaagatatatatcaagaaagggaattagtattagttgtaattaaagtaggattattattacttggaattaaattaggattaatatttgttggagtctaattaggattagctagttgagttataatataattagaatttgagtcatgataggttattagagtcctagtagactttggatgttataattataattagaatcataataggttattagagtcctagtagactttggatttcttagaaaagcctataaataggctaatcaatgtaaatcaaagggatgaattttgatgaataatattatactttctttcattgcaaggttgcaaccctcaatgatgagactccattgattttcttctaggtgagactcctagaaggccttagtgagactctaaggttttccatcttttcttcattgttttttctttctctctatttcttatcttataattttctctaccataaagtttattccttattcctctccttacaccctaaaaataaaaccctaacccacctacccttgagtgtaggcaaccatcctagagttgtcctacatcaattttggtatcagagcgaaaattcttggcatgaaggcatatgtaattgaggagtagagcaacgtatgcaaacatggttgaaggctacaacttttttatgcagccattggtgaacataccaaggctaaatgaagaggaggattggcgacgtactagcatcttccaaactcgtgttgcttgtcaagggagactatgtagtttgattattgatggaggtagttgttccaatctagcttcagaggagcttgttgagaagcttaatctaaagacagaagatcatccaaatccctatcaaatagcatgggtaaatgatgcatctattttggtgagttctcgttgtctagtgacgtttaatttcagtaataattttgagttatcagcatggtgtgatgttttgccgatgaaagttgcccatattatgcttggaagaccatggctttttgatgaaagggtccaacatgatggctatgagaacacttacacacttgtgcgcaatgggcgaaagaagatccttcgtccaatgaaggaaattccaccacataagcaatcagaggaaaaagtagcacccttgaaactagaagagccatcaaatattcttattaaaaagcaagtcgaagttactagaaaggacgaagaaatcatcaatgatgaatctagaaagcaagaggtgatgaaactaatcttagatcaaccaatagaagaactcaaagaagttgaagaagtttcagaagaatcgatgtttgacttcccaaggccaaacattatcgtgagtggtggcaaacatgaagaatctgttgaaatttcttttgaatatagggaattcaagaatcttattcttccacaaaacaatttacaagaagagtgtgggaaacaacttcccacaagtttgttgaagacacataattatttcgagaattatcaacttgttgtacaacatcaaaaagtttttcgaagtccagtatttgtcttgcatgaaattgaacaagttcaagagatcttgagatcttgtcttaccatgggaaagagacgacgaagaaagaaagggtggaaggcattgctcggaatttcaattgatcgtggaaaatcactaaaactcgaggtcgagtttttttcaagtcagggggaattgatgaggatgaatattcaagatatatatcaagaaagggaattagtattagttgtaattaaaataggattattattacttggaattaaattaggattaatatttattggagtctaattaggattagctagttgagttataatatgattagaatttgagtcatgataggttattagagtcctagtagactttggatgttataattataattagaatcataataggttattagagtcctagtagactttggatttcttagaaaagcctataaataggctaatcaatgtaaatcaaagggatgaattttgatgaataatattatactttctttcattgcaaggttgcaaccctcattggtgagactccattgattttcttctaggtgagactcctagaaggctttagtgagactctaaggttttccatcttttcttcattgtttcttctttctctctatttcttatcttataattttctctaccataaagtttattccttgttcctctccttacaccctaaaaataaaaccctagcccacctacccttgagtgtaggcaaccatcctagggttgtcttacatcacctatacaacggttttccaggaacacctttacgatcatctgactactcaaaaggaggggttggaggattcccaatagatgctacatgttcaacgaagaagaagaaacgtgtaatcacattcttcttcattgcacaaaagcacatgttttgtggtagttgatttttgctctgtttggtgtatagtgggtgatgcactctttaattagagggtttcttcttatttagtgcggttcttctgttggaaaacaaagaaaaaaggcttggaagattgctccattatgcgtgtctggatcttttgtagagagagaaatatgggagcttttgataattgtgaatgtgtgactcaaacaattaagagttctttcttgaatcttttttgggagtgggtaagaatgtatattggggatggatttgtatcattgttagagtttgtagattggatagactctttgtagggcatagtcgatgtttttgtattcttgtgttgtttttgggttttttggttcctttgtatacattgtgtatacttttttttattctaatacatttacacttatcaaaaaacatgttggcgtcccatccatcaagaggtgtcttgtaaatgctcaaaataacctaatgcttaaggccaaaactttcctttgggaacctccaaagctatttccctaagagagcacgattccttagagatatcaacccaagtcgtaggccttcatactctttaggcttacacactagatcctaactaatgagatgatcttttttaccctccccaactctttattagagaaaatcctttgcaattgctcaatcttagacgctattgaccctagaatcttgaaaagagataaaaaatagttaggcatgtgggactaatatgaatgaattagattaattctactctttagagagaaaaagaccttttttcatccatctagtctcctcaagatcttgtcaatcattggatcccaaaatgtaaatgcctttagatttctctttattggaagatccaagtaagttaaaaggtgagacacctcctctccttcaacttcactaccattttaaccgcgaaacttaaccccccccctttgccctctttaaaagacaactaaaagataaggccccttgctttaggcccttaaagctttaaaagaagttgactggaattctagtcaccaacaccaaaaatatcatagtagaaatacaccatttgatccaaccaatccatctttgtccaaaccctattttgtcaaagatttttagcaaataggcctagtttacagggttataggcctttttcaatatccaacttgcaaattaagccattcaattctttcctcagttttgagtctattgcgtcattgacacttaaaactgcatccaatatttgtcttcctttcaataaaggcatttcgagagattgaaacaattgatgccatcactttcttcaacctatttctcaatattagagcaacccacttgtatatcccactaagctgataggccaaaagtctttcaagttgttcacccctcccttctttggaatgaacacaaaaaatgtgtcatttaaacttcttttaaaagactaaagatcatagatctctttaaaaaatacctataaaaaaaatagatctcttttcgacatgatgaccattaattataagggattgggaagatccgagagaggcctagtattgtggcaatccgcctgtattgctttaatttgggttgtgtggtgaaaaagaaatggtaggatatttgaggacaatgcaaggaattcagaggttctatgggacactattcacttccttgcttttttttgggctcatcacatcttttgagagccttcccctcaatgtggttcaactagattggttagcggtgtgtagctccaagggtgtgggttagtagggagaggttgctttttgtaattactaaatagctttttgcttttgattttcattttgtttagctttcatttgtgggagaattcctcatcctttttttgtatttcttaatttctatttcaatataattcattcttgtttcctgtaaaaataaaaaaaataaaaaataatagatctctttgaagaaacccatcacttatttttttttttttgataagtaaaagaatttgcattaaaagcatctaaaaagcacctataagtatacatgatgtatacaaggctaaaaaaaaggagggatatacaacgcttcacttacaaccgaaccaatcaaagaaatcaaataaaggcaaagtggagattttcttctgaaaatgattctctttagaaacatgtgattgtagggaagtatggagaggaagaggggggataatgttttggagctttgtgggaaggttatgaggtgggccattggaaggcgatccaaagtaggtggaagaagtttaacattatggttggttttagggttggaaatggtaggagggtgaggttttagatggataggtggtttggggaagattcctttgctgtgacttttccagagttgcttcttatagctattgataaagatgcttgggagtgttcacaaggtagataaatgattgggaattctggaggggtggaagagttgctcaaaaggttgcaagagcaagtgatcaaaaaaggtgttgaggatgtaatggcttggcggttatctaatggagacacctttatggttaagttcttttagtcctccttaacaagtctctctatggaaggattcctcacaagcattgtgtggaatccttgggtcccaatgagagtttgcttttttgcttgggaaacaatttggaaaaaaattcttactttagaccaacaaaaaaggaggggttggtatcttccaagtagatgttatttgtgcaaaagtgaaaagaaagtcaacaaactataccttccttcattgtcccaaggcaattatgttgtggcatcttatctttgctctctttgatgttgagtgggtaatgtctctttttttgataggaaacgacgaaggaatatattgataaaaaggatgtacaagagaaggatgaggaatcctcccaccaaagaaaaacaaaactacaaggaatcaaatacaagaaaatacaaagtaaaaacaagcaaactttctaggttaggccaacccattgggattacacactgctaaccaattaagttgtaacacgttaaggggaatccccttaaaaaccttagaacaaaaagcccaaagagaagcaaggaaatgaatagaatcccaaaggttttttgaattccttactttatcttcaaaaatcctttcatttctttcctaccacaccacccaaattaaagcgatgcacgcagcttgccataaaacaatccctctcttagaagattcaaaaccgttaaaattggtagatagcatgtcaaagatgctctttgggggaacccaatccatttttgctaactaaaataatctgtgccacaaccccgtcaaagagcaatggaaaaaaagatggtctactgtttttccatgtttcatgcacaacttacaaatatcgggactaagtgctttgtaagtcttctcaactatttttttttgataagcgagagcagaatatatattaaagaaggccaaaaggccgcaccgcatacaggaagtatacaaagcagccacaaggccaaaaaaaacaaaagcaggaacacctcaccagtccttaggggaccgctacccactccaagaagcctaaaagtgaagaggactcctctcccctatacaacttagcccaattccacagactacatacaaaagagttcttaagagtctgaatagccaaagaaccccctctaaaagctaacctatttctttccttccacaccgtccaaaaaatccataacggaatggacttccatatcttcttcctttttttacccacaaaagggccctgccaacagaacaacgcctctttgaccttctttggaaatacccactgaaccccaaataaggcaaaggcgatttcccatagggccctaaccactgtacagtgtaaaagaatgtgatttacattttcctcttcacaaccacacaaaaaacaacgatttggaagctgccacccacgcttttgcagcctatccaatgtgaggattttttcccaagtaccttccatgcaaaaaaagcaactttggttgggaccttgtccacccaaatattttttcccggaaagacgagaggattaggggctgccagcagattgtaaaccacccgaatccgaaaactggcagaatctcctcctttccaaagcactgagtcctcctctggggttaccctgatgtcccttagcaagaagagcaagtcttctattaacaccaactcccaatcgttagaatctctagccaatctgagattccaccctccttggccaagccttgggtcccacacatcattcaccaattcgttattgcacactgccaaggcaaaaatctggggaaacgcttgggacagcgctacgttgccgcaccaatgatcagtctagaacataatcttagtccccctccccaccttgtacttcatgttattccaacaccagctcatctccttcaaaatctccttccaaactcccactccaaagggcccccgaacttccttagatttccaaccacaaccctccagcccatgcttcaccccgatcaccttcttccacaagacgtccttttcaacgacaaatctccaaatacacttggccaataaggccttgtttagtaaccccatcctcctaataccaagaccccccttctccttttgagtacacaccaccttccaattaattaaatggattttcctacccgtgcttccccctccccaaagaaaatctctttgtaatttctcaagccttttaaccactgacttaggcattctaaagatggacatttgatagatggggatgctggccaaggtactcttaataagggtgattctcccgcccttagacaagtattgtctttccaaagggcaagtcttctcctcattctttcctccaccccgtcccacgtggacaaggccttgtgccgggccccaagtatttaaccggaaagcttccaattctgcagcctaattccacagccatttcctcaatattatcaatctccccaactggaataagctcactcttggccagattgatcctaagctcagaagccgcctcaaaccacaccaaaatccatccaagatgagttaattggtccttactagcctcgcagaagataatagtgtcgtctgcaaagagcagatgagacaccataatctccgcatcccctctacctcttagcctacaaccagagatgaagttcccctgcactgcccgcctaatgagtgcactcagcacttccatgcccaagataaaaagataaggagaaattgggtctccttgacgcaggcccttagaactggagaagaagccttctggtacctcgttagtaaggacagaaaattttgccgttgaaaaacaccaccacatccattccatccaacgcgacccaaagcccatctttttcaagaccttcataaggaagctctagttgatgctgtcgtaggctttctcaatatccaatttacacaccagccccttctctttcctcttctgccaatagtcaaccacctcattagctataagagaggcatctagaatttgtctccccctcacaaacgcgttctgatcagccgaaaccaccttatctaacaccatttttagcctattggccaacactttggccataagcttgtacagcccccttagcaggctgatgggctgaaactcccctagatcctcagccccacctttttttggaatgatgaccaagaatgtagaattcagacttttggcaaaagacttctgatcgtaaaattccttgaacagctctactacctcctccttaatgaagtcccaacaaacttgccaaaaggccatggtaaacccatccgggcctagggccttatcgccgttcatatccatcaaagcagagaatatttcttcttcagtaaaggggacctccaaagcttcagcttcactaaggtcaagacttttaagttgcagaccctctaagtcggctctccaccctgggtcttcccttagctggtgctgaaaggccttcacaatcccctccctcacctcctgttcctcaaccaattccaccccatttattttaattctgtccaaaaagttatttctccaatgggcactagccatcttgtgaaaaaaccctgtattcttatccccttctctaagccacaactccctagacacttgtctccaatgggcttcttccaaaagaacccattttttgaagttctccttagcttcatttgtcaactatagcaactatagcaagtcattagtatttacctttttgtgtaccactaaccagacgaaggacttgactttgaaagggacttgagaattctagatgaacttagtagggaaaactggaggcaaaccaaaaaattgggataaggcaagaaataaagatttgactgtaaaaagttttgaaggagataaagaccaggatctcatgtctggaactgaaggtgataaatgtagacgatcaagagaccgcatgaggccttctaaatcttctatcgtagaatcggaaaggttccgatgaaagttaaagttccaagagaaggggcgagtagagccgagtattgaagaaataggagtatttttatccgtgactactctaagtagtcttggatattggacccccaaaggctggtccccccacacaagtcttcctagaaccgaattcttttcgcatttcctaccacaaaccgagtaaatttggaaaactcttgggagacttgtgcaatagccttccaaggacaacgatgtgaccatctgactacagtgttggcatcccaaccattggagtgtgatccataaatgtttaaaataacctgatgccacagagttgaaccctccctaggatatctccacaaccatttccctaagagagcgaaattccttatagaaatctttccaaatcccagtccccctttcgccttctgattacacactacatcccagctaaccagatgatctcttttgccttccccaacccctgaccataaaaaatctctttgcaatctctcaatttttgctgccactgaggcgggaatcttaaacaaggagaggaagtaacagggcatatgggtgagacaagattgaatgagagttatcctgcctcaaaaagataaatatgccttttaccacccatctaatcttcttgagatcctctcaatcacaggatcccaaaagccacaagccttgggattccctcccagaggaagacccaagtagagtataggccaccccgaagccttgcaatcgagcaactcagccaacttagagagatgattctgttcaagattaatgccataagtattacttttgtcaaggttaacctttagcccaaaaatatgcctaaacactagcaaaacactcttgagggtcagcatatcctcttctcgagtgctagaaaagaaaatggtatcatttgcgaattgtaaatgggacacccttgttctgttcctacccaccctgaaacacccttcaaggcatttctttcctctgctctcaataacatcctgctcaaaacttggaacagggatgtgtttggtaggctggaagtcaacaaaaacctagccttgcaacaagtagaattttgggataggatggagagtgacaggagcctaactgaaagagagacggagctgaaaacagaagccaaggatgtctttaaaaaatgggtgcttttggaagaaacgcattggagactattgtctagggagttgtggcttagggaaggagataagaacactggtttctttcatcggatggctaatgctcatagaagaaataattccatggaaaagattaaaatcaatgggaggtggctagaggaggagcaggaggtgagagagggggttgtgaatgcctttcagcagctgttgtcagaggagcaatcctgggaagctgatattgaagggctgcagctccaaagattaaaccatgctgaagttgaaggcttggaacaaccatttactgaggaagagattcatgtggctctgatggggatgaatggagataaggccccaggctcggatggattcacagtggccttttggcaatcttgttgggagttcgtgaaagaggagattgtggacttgttcaaagagttttttgaagaaaagtcgtttgccaagagtctcaactctaccttcctagtcctcatccccaagaaagggggggttgaggacttgggggacttcagacccatcagtctgcttgagggtctgtataagctcttggccaaagtgttagccaatagacttaaggaggttttagacaaggtggtttcgctggatcaaaatgcttttgtgaagggaagacagattttagatgcctcgctcatagccaatgaggtgattgactattggcttaaacgcaaagagaaagggctgatttgtaaattggatgttgaaaaagcctatgacagtattaattggaatttcctcatgaaggtcatgcacaagatgggttttggggaccggtggaagaaatggatgtggtggtgtatctcaactgcaagtttctctattctggtcaatggggtgccaactggttatttctccaattctagggggctacgccaaggagatccactctccccctacctctttgtgttgggaatggaagtgctaagcgctcttttaagaagggctgttgatgggggtttcatttcaggctgtaggattcgagggagggggggaatggagataaatgtttcccacttactttttgctgacgacacgattattttttgtgaagcaaggcaagatcaccttacctacctaagctggattttggtgtggtttgaggcagcctctggtcttaaaataaaccttgctaaaagtgaagtaatcccggttggggaggtggaagacattgatgagttggcggtggagttagggtgtaaagtgggggcctttccttctgtttatctggggctgcccttgggagccaagcacaagaccatggctatgtgggacggggttgaagcaagaatgagaagaaggcttgcccgttggaaaagacaatatttgtcaaagggcgggaggattaccctcattgaaagcaccttggccagcatgcctatttaccaattgtctctttttcgcatgcctaagctagttgctaaaaggctcgaaaaattacaaaggggtggtgagtgttgtttttgcttaggctactatgtatactccttgtatgctttgtggctttttgcctcgtaatatatttgcgcacttatctaaaaaaataaaaaataaaatcctgctcaatacatcttgctgttccctaaggggtggtgagtgttgtttttgcttaggctactatgtatactctttgtatgctttgtggctttttgcctcgtaatatatttgcgcacttatctaaaaaaataaaaaataaaatcctgctcaatacatctgcaactaaagtgaacaaaaaaggggataaagggtctccttgtattaaacctctatataccttaacccaccctttagcatttccattcactaggattgcaaaagatatcgaggacaaacaacctctcatccatttcctccatctaggactaaaccccttcttctccaacacatgatccaaaaaatcctaactcacatggtcataagccttttctaagtcaattttgaagacaactccttcctcccctaatcatcttttctcatccactatctcattggctatgagaactgtatccaaaatttgtctccattgaacaaaagctccttgagtagaatggatagtttcatgaagtacccctcttagacaccctgctaacactttggctattatcttgtaaagactagtggtcaagctaataggtctatagtctgagattttctatgacatgctttttttgggtaacagaactatgaaggaagcattattgctttgattgataatcccgctcctgtgaaactctgcaaacactctcactagatcctccttgatcacatcccaacaattttgaaatactgcaatggtaaagccattaggcctcggtgccttatccctatccaactgaaaaataaccttagaaatctcttcttcagtaaaaggggattccaacctagacgcaccctctccagataggggaccaatctaagccttcaactctccaagactcttcagaagggctcgcgtagagcttttcaaaataccttaagatcttctctttgatgctttctgaattattcaacattaggcctctttcattctccaacaccttgatatatttcctatttcgcctgccattagccactttatgaaaaaattttgagttacaatccccttccttaacccatttcaccctagctttttgtctccaatgtatttcttccctcaaaatcaactcctctaactccccttttcttaaagctctctggactaaaagttcaggggagagaccaccttcttgctccaaggtatcaaagttagctaaatcaaacatgatactttttttcctttcatttagctctccaaaagaagccttattccactctttcaatttggcgttaatgaattgtaatttcctcatgaatttgtgaccttcccacccatttccttgaaactctctccaccaacttccaaagcgctccttaaaactaggatgttgcaaccacatattctcaaacctaaacggtgttgggccccacttgaacggattggtttccaagactatcggccaatgatccgatgttcatctaggaagaacttcttgaagactttgaggaaataattgttcccactcattagagtaaagaatctatcaattcacattctcttataaaatcaacaaagtctttcatgcttggggttaaactagaacctcccaatttttctgaatttctccttatgacattgaaatcaccacccacacaccaacacggggaagaaagtccaaaaatgtctaaaagctccacccaaaaatccttcctaagtattgtgctgtttgggccataaattgcggataaccataatggtttgcatccatccaatgtgaagttgattgagaccgaaaaggaacctattaccacctcctcactacgtagttttttagagtcccaaataatcaaaatcccacccaaagctccgcacgccgaaagggttgcccattccttatttctaactgtctaaacactacccacgaaccctctgtcgcactccgccttttttgtttcctgaatcatcactacatccgacttttctaatcttagaaaatctttaaccacccttcgcttttttcttgaacccaaacccctggaatcccaactaattatcttcatggattaaactcacagaccctaatccttcaatccagttccaacaggtctcacaaacctgtggagcatctgctcttcctcctgaaaaataccttaatatccggagattttaaaacctcgcacacttttgccatattcctgggggacagtccttcaatttggaacacacccgatggggagcccgcagtaacaccctggctaactgtaaccaggttggaggccttattaagcgaaattggtttaggcaaaaatgggttaacactctcggtcatctggtatggataagcaggttggatcacctccattacaagattagggatgccaacaaaagattgacctacagaaccatcgttgtcttttttggaaaaaaatttagagtttactcgattttccaaaggaaactgagactaaaaggctgaactgggaagattgggaacagaaggactcagaaaagaagaagtcaaaccacaagaagggagtatagaagacgagggtgactgaataggtgaagacaggattacctccaaattttccgcgaccaacaatccacaattccccataaagttaagccttttacctctgatttcaggtgtagagggcaaaacaatgattgctgagccacgaagatcgaaccccactcggcccaaaaatccttccctgtctttgtcggaggaaaatttgtttaaagccacttcgtttcttgacgacgaagccccttcccccaaacaattattccgaaaccttggaaatcaacgagaaaagagaggactcgcactagatcctcgatccgcctgaaaatcggccccggtagcctcttcctttgggtcctcttcgctgtctgcttgattcttcccatgcaatagaggctcgctgcgacaccaaagaccttgtcggctctcagagcttggaggaaaaagggtaaaccacaacttctttgaaccaaacatcaccttcttcttcgcggaactacttgatcgaacctcaagaaatacgaaaactgttttcccctttcctgttgcagaaggatcttcttcctttcgtaatgacaccaccgtctcatctgggttttttcctcctaggcttaggcccaaccccaacgggcctttggaattgcagcccacttttgcatattttggaccagtcttagacaatgattgggccttcctctcgtaggctcgacaaccctcaacagcggaggcctcgtcccctccagccctaactcttcccgcttcctcaatctcaacaagcccatcgtccgttttatttgaattcaaactaggcagcgatggaatctgaccatccttaccatgtgtcccctatgaaagaaacgcaaccatacccctttctccccccttcctcattctgctatcttccccgacacggcatcttcccccagccgttgatctaactctctcccccggcctttctccacctgtccttgaatgagatgcaataacctcctcagtcgacttgccctttatgctacctcttcgaccgtcttcatcttcgactactacgacggaaactgtaaacacccaatccctgtctgtcacctcgatcaaagctgggaggactgacctatccttcattgcgattcttaccctcgccttgctaagatcgaacagtttcaacgttcgccaatcaatttcagtcaccgtcccccactgctccacaattttcttcaggtgtacctcagaccatagatgaaatggcaacccccgtaattcaatccagcctcctcctgaacttcccctctatttccgaattttccttcggtgaccatcttcgcaactggactgtattccttccctcaacccttaaattcctcaaatcttggagaaagagagcttcctctgttgtttcaacgaaaaatactccttttccacctgagatgggtacaatcgttactacacctttcttccctaagcttctcatcatcgctcggccaacctcaacccatttaacgctatcatcattgcgttcacactccacggctcgtgcccacctcccgacaggaataaggcctcctcctcttggtccttcaccactgactactttcgcgaaggaccgatgcagaggacccatgtgattgtgggaaaatctttcccctctatattgccttcctttttcgactacattcgaatgggggaccaccaacattgaagacaacacgcttttaatattctcccatcctctgcccttctcgcccttaggaataatcagaaaagaagattttcttttggtagcaaactccgagatccttatgaaccttccgtggttgttgaagccaacttccatcaagtggacacaacattttcccttgaactttctgttgaatcccaggtgactcttcattttgatggctttcgtcaaatgttggatcatccacccgactgcatccttttcaaaacctaggacaaaaacaaaggctctactatgctctataatcgagcaccaatttcctccgtgcttgccttccaacctaaccaagaaagtcttcctctccacaaagaccttcaacgtccttaccatgtcttctcccaaaatgcaaaggtactattgaaaccgccttgctctattgcttcagatctcttgcggcagtttcaaaaaccattcccaaatgtctttgtgaagtagaatcgtacaactttgggtaatgtctttttcaatcaaggatgccctccttatgatctattacaaaatattagtttttcttgaggggcttgttcacttttggtgaagttgatagcgttttgttggagaaaatgtgagtatctttttttatttttggaatcataaacaaaaatgttttcattaaaagagtaaaattgagaaggatgaacaatccttccctaattacaaacctgatcaaacaaagaaaaagaaaaaagatactagaatatataaaaacgtctcaacgttactattttgacacttttgaactacatatcaaaatccaatcaagttgaataaagttgagaggctgaccttaaaagttgtagtagtagacacccaaaatgatgaatttaaatagactaggttccataacatttcggatgtccttcacttgtcctcgaagatccatggcatttcttttttggtcatgctatccaaatcaacgtaagacaagcgatttgccatagaactttgctcttaatagtagtcccaacctaaaagaaatggttaacatatcaaatacaattctaggaggaacccaaaccaaattggctagtctagaaagcttatgccttaattccatagtcattgggcaatgtaaaaaaaaaggagaaaatgcgagtatcttagcttgagcatttcatcatggataatctctactatttcaatgaactttctggtaattattaatttttttttttttcatttggattttagtgtgtgagcaagcatacact

SEQ ID NO: 11347 - DNA, 1587 bp, Vitis vinifera
  Intron number 4 from transcript GSVIVT01020005001 (locus G SVIVG01020005001) derived from phytozome v7.0 (chr-ID chr1 ; pos 11727106 to 11728692 reverse strand)
tttaaggcaagcaaaaagcaagcaccgtaagaaatgtaagtgtagttttattctattactgtcctatggtttgtgacctttcacactctcattttaaacattttaattttgaattctttaacattgataagcagtttatttctcttacatgtgactgttagaagatttggaacagtttgtcagccccagataacagttttgaattgttaaatacttcaggaaaaaccagtaactttggacaaacttattttagtagcataagttttttcattgagaaaatggtgtgcccttccatttgacagtgtgaattagactccacccatcagagaaacaaaatatgacattttacctttttggtcttcatagaaatttccaagaatttaccatgctgttgcattgcctaaaagcaacatattggttgcaccatgcactgaccattactatagtttctatctaacttctaactcttaagcaaaatggaagagccctgatttgggtccagaactttttccttttttaatagttatatcattagatatgatggtggaggtattgcatgtgtatacacaatattgtataaatataattagaatttgtgtaaagatgcaatgcaatgaaatagaagaaaataaaaaataaaaagctcaaattttgggtttaattttatcatatttgtttttaaatgaacaaacctttaataagtgtataaagaaattgaaccgtattcatatattgatttaattagtgctacaatacaatcttgatgcaataaaaaagttaaggtttctgttttttagaaaatggtagggtttggaaaacttgagagatatgggatttctattttgaagaacatgagcggcaggtattctcattctaattgaaatatttttctgttagaactctagaaacagggagatgtagaaaggagaagttgggagaaacaatgcatgatgcaatatttttctggaaaaaggggtataatttttttcttgtagaacttgcgggaaatagagatgaaattacagttttgttttctgaaaacaagaggaagtagacttggttttgttttaccagatgaaggaagttgagaaacaaggaattggagaagtagggctagagtcggttaatttttttgttatggaaaatgacatttttgtttatacttcatttgtagttttaaattgcatagaataggtattttacagatttggtgtacaaaacagttaggagagacaggaagcataaaaatgactcaacactttatgtgtgctaatttgaaatgaacaccagcacattaaagtgtaatttttttattttaatgcaatctgctaacttagaattaataacctgctaggatgttgctctttttgtgttaatgcattggtttctttaaacggtgaatatatattgactggattatagttgattaattttaagctcagattacttgtatcatctcattagttaattcttaaacctcatccaaatattttgcaaatgagttcctttgtttgaacatccttttgccttttgttctctatatatctttcagatcctccctgtgaggttgggctttcagattctgtt

SEQ ID NO: 11348 - DNA, 5495 bp, Vitis vinifera
  Intron number 2 from transcript GSVIVT01021316001 (locus G SVIVG01021316001) derived from phytozome v7.0 (chr-ID chr1 0; pos 3944785 to 3950279 reverse strand)
aagattgaacaggagaacaagcgtgcaaggtattgtagacatctctcaaaacctcaatttcatgtgtgttagcttgattcacttgaatgtgtactgtaagaaattttcttgacattttattcaagtatctagcaactctttaaacaccttggtagagataattgtggtttttaacctaaacttaataaacaatacaattgtttttttttttttataatattttttcttacttttttggggggttcaatggtggcaatgggttaaacagccatcatgatttcagatatttttctgctcagaactgatctggttttaagcctgcctaactctagaattgattttcaaatattacctgtagaattgtataaatcatatctcttatttaattaggcatattgtatataaatcaacatgaaagatccagatgtggttttaaacccagatataggttggacaaaaaataccatgattggtcatttaatttcctcatcctttgggatatggggtttaaacactttaatgctactccaaatagtaaataggtttagttacgctgaactcctcatctttcccaagtggggacagagttaccttggtctattctttcattgatggttggaccacacatatggggggggggttcgggatttcttctcttctactccttcttctgggtgtgattgggctttggtggtgaggggcccttcgggattggatgagactgttgaaggtgttgggtttcaatccccgttgtgtgcagtgttgaaggatggcagcccgtgggtgatggacttggtggaggaaaagtacaagggtaatatgtcggatgctgttgaggagatgcaagaaagggagaatcctgggaataagtgggatgaaagtagtttggtgaaattcagtaagtcgttggggttctcaactaaaggcgttgaaggggaaatcctaaaattgctgctaagattgaaaaccagaagagatcaaggcaagaaaaagggaactctaggactgactaggtttgatcgggaagtaaaaaagttagaatgttcgattaattacgatggagagagcagaaagaaagggtcggacagaagaggaggggacaaagctttgtgtattaaatgaagataaaatttttatcatggaatgttcgagggatgaatgacagaaataagaggaaactaattaaagccttaattagatcccaaaaagtggatttagtttgccttcaggagactaaaatgactgagatgtctttaggggtggtgcgaagcctaggggtggggagatttttggagtggggagctttgaatgccaggagtgtagctggaggggtggtagtattatgggataatagagtgttagagctaatgggaatggaagtgggtcttttttccattttgtgttgttttaagaatgttgaagatggattcagatggattttgtcaggaatgtatggtcctacgttgagaagatacagagaattattttgggaagaattacgggccatccgtgggctatggaatgatccatggtgtattggaggagattttaatatgatcaggattccggatgagtgcaaaagaggaggcagagtgtcttcttcaatgagaagattctcggaggtgattgatgatctggatttgagggaccttcctcttcaagggggcccgtttacctggagtggagggttgaacagtcaaaccatgtcaagacttgatcgttttttggtgacggaggattgggagggctattttaatggggtggtgcagagtactcttcctaggccaatgtcggatcattttcctatcctattggatgagggaggggtgaggagggggcttgtcccctttcggtttgaaaatatgtggcttaaggaggagggttttaaggatttgctgaagggatggtggcaaggtttaagatttagtggttcattcagtttcatccttgcagagaaattgaaggctctgaaggtcatcttaaaatcttggaacaaggatgtttttgggaaggtgggagcgaataagagactgaccttggacaaagtggatttctgggataatcaggagaagaggcgtattttatctatagaggagttggaagctagaaaagaagcaaaaggggattttgaaaaatgggttctcatggaggaaatttcatggaggcaaaaatcaagagaagtgtggttgaaggagggtgataaaaatactggtttcttccataagatggccaactcccacagaaggaaaaattgtttgtctaagataaaggttaatggaacttggttaacaaaggagcaggaaattaaggggggggggtggttggagcctttaagaatcttttgacagatcttggtgaatggcacccatctatggatgggttggattttaataggattgatggtgaggaggcagctaggttggaggaggcttttacagaggaagaggtattctctgccctcttagatctgaatggggacaaggctcctggtccagacaggttttctctcagcttttggcagtttagttgggattttgtgaaagaagaggttatgggctttttgaaggaattccatgagcatggcagattcgtaaggagtctaaactcaactttcctggtccttatccctaaaaagacgggtgcggaggatcttagggattttagaccgataagtttggtaggggggttgtataaactgttggcaaaagtgttagttaataggcttaagaaggtcatgggaaaggtggtgtcttcggctcaaaatgctttcgttgaaggaagacagattcttgatgctgtcctaattgccaatgaggcaatagactcgatgctaaaaagaaatgagagcggggtgttgtgcaagctggatatagagaaggcttatgatcacctaaactggaatttcttgttgttggtattgcaaagaatgggtttcggggagaaatagactggttggatatcttggtgcaattccacaacaacattttttgttttaatcaatggtactccagagggtttcttcaacagttcaaggggattgcgtcagggggatccactttctccctatctttttgtgattgggatggaggcctttagtaggcttatccttagggttgtgagaggggggtttctttcaggctacaggataaaaggaagaagaggagacgggactttggtatctcatttgtagttcgtcgacgatactttagtattttgtgatacatcccaagaccagatggcttatttaagctggttgttgatgtggtttgaagccatatcaggtttgagaatcaatttggataagagtgaaatcttgccggttgggagagtagagaatctggaggtgttggctcttgaggttggttgtaaagtgggaaggctgccaacttcttacttggggatccctttgggggcgaatcacaagtccgtggccatttgggatggggtggaagagaggttctggaaaaggcttgccatgtggaaaaggcaatttatctccaaaggcgggagaatgactctaattcacagcaccttgtcaagtatgcccatatacttgatgtctttactaagaattcttagagtggttagtttaagactgaaaaaaattcaaagggattttttgtggggaggaggagctttggagaggaagcctcatctagtaaaatgggataccgtgtgtttggataaaaggaagggtggtttgggagttagacgtttgtctactctcaatagggcccttttatgtaagtggaactggcgctttgcgaatgaaagagatactctttggaggtgcgtcattagtaggaagttcggggaggaagaagggagttggtatactaaagatgtcagggagggctttggagtaggcttttggaaggacataaggaaggaaggcgctcttttgcaaaacaaagtgggcttttctatggggaatggtagaagggtgaaattttggaaagataattggtgtaggaatttcactctctgtaattcctttccctctttgtatgcctttgcaacatataaagaggcttggttagaggagttgtgggatcattcgggaggagaaggcgtttggagtcctaacttctctaagccctttaatgactgggaggtggaggaggtggagggattacttttgacaatccggggtaggaggcttaatcctcttatggaagatagaatgctgtggaaagagacaaaggatgggattttcttagttaaatctctttatagtattttagtttcaagaagagttgtttagttccctatcaacatcatttggaatccttgtgtgcctactaaagtgtgtttctttgcttgggaagcttcttggggtaaggtgctaactttgcatcaactcaaaaagaggggtcggtgtttagctaacagatgctttctttgctgtgaggaagaagagtctattgatcatattcttattcagtgctctagggcaagagtgttatgggagttattgtttgctctttttggtgttacttgggtcctgccttattcggttagagatacccttagtggttggtgtggctttaacttgggcaagaagcgcagaaaggtgtggaaggcagcccctttgtgtatttttttggcagtttggaaggaaagaaataggattgcttttgataatgaggagctttcgatgcataggttgaaaaattcttttgtttgtaatctttggttgtggactaagtcggttgtaaatgatggtcctctctctttactcagtttttttgattggctaagtgctagttgagggctggtattgtatttctgattctttttgtgcccttgggcgcctcttgtatactccttgtatgtttttgggcctgcctcaaggggcccttttctaatatatgttttttgtgtgtttgccaatcaaaaaaaaaatgaagtagcttttcatttgtcatacggggatagggttaactatgaatttgcttgaggatattttgtatatggcatatggatgtttttgagtattcatgtgtagagctagccattgatataatgctaccgtcatagtcttttttggagtttgggacaagctatgtaaaagatatgccaccagacataacacagtgttcatgttggataacaagctattggaacattgcttgttcaattgattcaagttgaatatatgtgcaactacacagatactcacataaacacactctaagttgtttttgcattagaaacaataaacataagaagcatttaattctaagaaatacatgcaattttgcttatctcctcctgaatgtaggcatactactaaaccttgtaatttgtgtttgagatcctcgtttgattcatttgctgcacttatcattaaattcatgtaatttgtggtaggaaaggaattagttctgagatttgatagccacattatgtgtctaatgatagattttgaactaaaaaaaagtttatactacaaactagggtgaggaaggaaaatcttgcacgtgctattgagc

SEQ ID NO: 11349 - DNA, 3956 bp, Vitis vinifera
  Intron number 25 from transcript GSVIVT01021285001 (locus GSVIVG01021285001) derived from phytozome v7.0 (chr-ID chr 10; pos 3456352 to 3460307)
agagactttcgtcaagactagagaaaccagagtctatgagtgaaggtcgtcaatccctaaatttaacaggtcatacagcgctagagctttgctctacctctacatctggccctgatttctttgaaatcaacccacattcggaatcctgttaataatgaagtgtttttcttttaaagaatgctgatcctactcctgaaggctctgaatggatttgctgatctgcatctccatctcaatgagcatcctaaagttttggctatttaatcaaacttctattcaatggggctacacccgcatcttgtacatcaattttttatttatttttatttgatctgtagttctctttaaaagtgagagtttgttgtataaaatttcaagaaattttgtagtagaattagattttcatattttaataaatgtgctcctggcaaaagattaagggagaattgggctttagacccatttgactttgataattaataaagagtctttcaaacacccataattgattataaggatatgagatgggaatagaccaaaatgttcatttgacttatttttgtctttattttaccacccttcacatgtcactattctttgttatttaaccattttttgatttttcattatttttttaaactcttttataaataattgaaaaatcaacattgttttttttatttttaaattataaataaaaaaaattatattaatgattcaaagactattttggaaaatactttctaaaaaaatattaatttaaataaataaaaattatattttatatttattttttatcttttatattttagaagtaaataatttaatgattaaaatactatttaaaataaatatattcactgttttaattttgtttatattaaaaagtattttaaagttttttttactattataaaataaaaggtttaattttttttaatcttttttttccttattttaataactttttgaacatgacttttagtaataagttatataaaatgttacaaatttgtttattatgaatttttttaatgatttgaattaattaaaaatttattaaaaaaaaaaaaaagaggatggatggaatgtttttattttaagtactcaattaaaatgttttcatatgacctaactttagaagtaaattatattagagattgaatttttttatataaaaggattgaaaggtatatttatttattttagatgaaaacaaatagttaaaaattatatagattatatttgagtttggttttaaaatatttttctagtttttattttttatttttaaaaataatttttattttctatatagtctttttttttaaaatatttttaattaaaaaatgaaaactattttttaaaatgaaaattgaaaaccttgtttagtactattttttatatgaaaataaaaaaataataaattttatttattcatttatcgcatcattgtacaattgtattacactaactgtacaagggaaatatactaagtgtacaaatgagtacaaagctaccctttgtgaaatatataatcgattataagttattccttttttttttttttatcactcatgaattgtacacatatgtcattcactttatttaattcctgcatagaaattccaatatttttcctaataataatatttggagaaaattttttttgaccttaaatcatctaccatcttctcaactaaattattggaaatatgattaaacactcctacgtgaacacctaacttaggagggatataaaatttgtgtcattatacaagagtattacactaactgtacaagggaaatgcattaattatacaaaggtgtataaaattaccctttgtaaatgattttaattgattataaactacttttttattttccttgtcacccaatgattgtacacctatatcatgcactttatttaactcttacatgaaaattccaatatttttcccaataatgatatttggggaaaaaaattgaccctaagtcatccatcattttctcaaccaaatcattgaaaatatgattaatacacctacatggacatataaattaggagatatatgaaatttgtgtcattgttcaagggtatcacactaactgtacaagaatattatactaattgtacaagggaaatgtgctaagtgtacaaaggtgtacaagacttataataggttttgtatgatttttaaataatttgaatttgacattaagacgattattgatagttttgtttttcttttttttaccaaactatgtcattatgacattctctacaaaaattaacatataggaaataaaattaaaatcaattatgtttgaattgttcattataagtaaactaaatgaaatatatatttttactattttacctttataaatataatttcattgttatcaatagagattaaaaaaatcatatttaaatggcattaaaaataaacaaaaattatttttataacatttttatttttaaaaatcattaatttaaattatgaaattagttttaaagttaaaaatatttgttgtaattatagttttgaagatttcatgatttttatcttactacttgaaaaacttgccttaataagaaaatatttattttaatggttttaaatatttaaatctttattgaaaaatatttaggattagtgtggagagcaattaggtaattttggaattgagaaattttgaatattttgaagaccttaattcggccaattaccttatgtacactttcaaaattattggaaggttggtgaattagtcttagaaatattgttttcttaattatatatatgcatgtaagtgtttacattatttatgaaaaaataataaacaatgtttaatttgcaagttagaaaagaaaattaataatattttatgaggtatttaaaaagtatttattatatgttctataaatttgaaaaaaatataatatttgatgatatctaatttacagaacaaacaaataatgttaatattttatgaggtgtttaaaaattatttaatatatatgagaaataatataagtttgaaaacaaaaataatatttattatatattaagtaagttttcaatatatttaaaaaatatttattatatgttatgtaagtttgaaaaaaagaataatatttgatgagacatttaaaagttattcacttcaaaaatacatttggtaataataatttttaatcatcttttatatttgatgaagaaaaatgattcaagttggttccactattaaataggtaagagaagggcaaaagagtcaaagagagaatgagaaaggtgaggtgatttgttagttttttcatttaatggttaagggtattttagggatttttaaaagacaatacccttactctcaatttctattctttcattgggttggacttaaatatggaacatatatggatcatagcttaatttttgggcccagttgggcccaaaacataattttcccaaagattaatgtaaatatgtaatgcagaaactggcaaaagatctggtagctgtttagtgaagtaacccacttttctcatgcgaagaaaatcacatatttaacagcattctatggagtgaaattccagcaaacatattcaatgtcacgaatttaacctcacaagggttggagttcaattttgattcagattgaagtccattctggccttataaggatacattatgtagcctatacaaattagaatcaaaatctaaagaaattgccttatcacatgggatcaagattttttcttaataaaaaaagatgaaccattattaattttaagaaatagtgttagtgaaatcaacatattaggaaagatatgtttgtttcttagaaaggaaaaaaaaaaaaaattaagaccatgaaaaaatgtgaagaaaaaaaaaattttaaggaatataagaggaaaaaaaaattcttatcattttcttttcttatat

SEQ ID NO: 11350 - DNA, 1142 bp, Vitis vinifera
  Intron number 2 from transcript GSVIVT01021982001 (locus G SVIVG01021982001) derived from phytozome v7.0 (chr-ID chr1 4; pos 4732113 to 4733254 reverse strand)
gaaaggtacagctttgagttgtgttctattttatagggacccaatgtacttactttattttaatccttgcaaaaattggtggctggtattagaaaaaacttctacttgtgaatgttgcatgcaaaggaagaaattaagaggaaaagataaagcatttattgagttcattggtactcattatgagcttgtttgggagcgatttaggggaggttaaaagcgcttcctaatagttggaagtgcttttcatacataaattagatgttcacaaagttaaaaaaaataatttttttttaattttaaaaatcacttgaagtgtcttcaactggcacttcgtaggtcatagatgcgtcttctaaaaatcactttttattttttatgtaacacattgccaaaaatattatctaactcctttccttttttttggcttatattgataggagaatccgcttagaagtgattcttaaagagttaaaaactttttctaaagtttgaaagcgttttccttgcaaaaattaggtgtctaacaaagtgtgaaaaatcaatttaaaattatagagaattatttgaagtgatttttggactatcacttggtaggtgcttttctaaaaccactttttttattgaattcttttttgatttatggctaaatactaattgattttccataaaagtgctaccaatagaagtgctataggctaaaagtgcttttacaaaaatcattccccaatggcacaataatcattcccaaatggcccctaactgagttttcataaaagcatttacaaatctatgatagaagtatcatagaaaaaaccactacaacctaaaagcactttccccagaatcacttccaaacagttgctaaatttcgttgcataccattaaatcatgattttctttatctgaatggattgagagatttgatctcttaccatcaaggctgtgttatgcaaccaccaaaagctaacagcctacattaagcgtgtttgaaagataaatatataggatctctgatgatagacttgaacctatgatggtgtgcctacactctcaaaactaataccttctttgatattaacttcttcctaacgtgtcctcctttcacaggctcatttggcaccaagaagttttttcggggtaga

SEQ ID NO: 11351 - DNA, 9278 bp, Vitis vinifera
  Intron number 2 from transcript GSVIVT01015660001 (locus G SVIVG01015660001) derived from phytozome v7.0 (chr-ID chr3 ; pos 15151717 to 15160994)
taaattacctctttccaaagtaggaggtactgaaggtgagcggtagtagttgccatttattagagacatatatatcttggttccttggtgtggaatgcataaacctgagaacaatatcatacatttgtttttcttttcataacacatcgtatctgtaacccctccaactttaccaaaaagtttaagttgttaggtaatggtgaccaacaatatatattgatttgtgctacaaccctaacaccatacctcatgggtagcattctttgggattgcacagggactctataaatggggaaaataaacaagaagtgaggtttgaacttgagacctccagcaaagtatttattcattttaacttcagtatcttgtaaaactattaatttacctaaaatcttaagctgttaggtaatggtggaccaacaatgtatatcaagtagataaaggtgatatcatcatattatgtattgtgtggttggttggcatttattaatgacatgtaaattgttgtttattccttatttttgatatacaatatgtttaggtttcgattagatgaatctagcaagttgtaaatcatatcatgtgtcatgtttctatttcttagtatttcagtggattttaaatggttgtttcttataaaagaaatgaagttaaattctaagtgctaggaagagaaattttattatagtgaaggcaaaagaaagcaaaagagtttccgatctggagagtctagctaatgacctgggttacaggaggaggaaactttcttcaaagtgttgtaggtatgctgttgggtgctcagctgaagtccttatttttgtgtaattcactggaggaaaaattcatgaaaagggttggcttcttcgaactgcaagtatctatccaaagaagggggagttaccttgttgaaaagcacaccatccagccttttgatttatttaggattgggttatgtaatgtctagaaggcaagaatcaggctggtaagaattcaaagagattttctctagggtagaagtcttctctgaaagaaaattcatctaacaaggtggttgactgtttctttgaaaaggcaataggggtgtttgggtatgaggagtcttgatcccctctacaaaggcattagggtaagtggtgaaggagatatgttttggagcatgacaatttctggcgaaaggtggcaatgtgaagtacagggagttggaaagggactatttctttaatgaagggaggggtgcttatagctcaagccatttgaagccatatggaaaggtggggctgatttcttccctagagtgagttgtgccatttggaacggcctaggtgtcgagttttgccatggcccttggtgcaatgaagatcccacaaagcatcatttatgggagctcttcaatatgatggctcaaaaggatgtttggatcggaattgttgggatggtgattgttggaacctagatttagaaggagcattttagatagggagaggttttcaatgaaattgttgttgcagctgttaaatctctatcaatgtttagtgatatgaacgacaagttgatttggaagattgatagaaaaggtttattttccatcagttcatgctactcatcccttgtctctaagaagcccttgttctttcctgttaagctgattgggaacttgagagtgtcttctaaggtgtgggttttttttcttctttttgtttttttctcatgggaagcaacttgagagaaagtcttgactttagacaagcttatgatgagggggtgaagcttggttagtaggtgttgtttatgcaaagatgatatagaatttctagcctacatcttcattcactacaaatggacctctatattgtggtctttggtcttctctctttttggagtgtcttgggtgtgttccttttttattagggaagtctttagctggcatgactcttttgatagaactaagcacaaagctattttcactttcgaggctgatcccgctttgtattgggtcacttaaaaagagtgtgataaaagaacatttgaaggagcggaatgatcttttgtagagctgaaagattcagttcttaagggtttatttttgtgaccaagtggggatttgggctctcataaatcattaccctcccgtccatcaccgtttttttttttttctttttctttttcttttagattttgtatgctgtatagggattggttaccatagcagcagtgttttccagcatttatatgttgccaatacacatcgtgtgtacttgggttgcaccctctcttttattaggggcctcttaatacattttatttgtttgcttatcaaaaaaataaaagaaaaaaaaacttccaaataataatataataattatttggaaaatgttgaaatttgatctaatgcttttgttttagttaactaataaggaggctaaagaggtggtttaatgcttctaaagtttaaagacaagctagaggttagtataatggttctagactagaatgccgctctaacgtggctgggagatttttgctctgctcggtcagagatgtggaaaggaaaaagttctgtctagtatttcctgagggaaatggcttagtagggggttggttcttgttggctaagaatttgagggctcttggggtctcttccacagaagtgaggaatagctaccagtgtgtgtcatccatgggtaaggaggagagcaatgccaatacctcagagaatgagtcaggttcgtatgcagaagtagttaaagggaagaaaggtgtgtcagtggattctatgagggtgcacctaggggaaaaggaaataatgtacagggaggaacagcttgggcgatgcctggtgggttgttttggtggtagtcctgagtctatcccgtcattgccttctttgaagagatgggcgtatgaggtttggttactgaaaggggagttaagaatatccaggttgggtggggccctggtgctgtttgagtttcaaaacaaatgggaagctgatatggtgcttcttagagcgagcagtcgttttaaggatagagaatttctattgcaaaggtggggaatggcagtggggtgcacttggaaagagagccatgctaaggaagtttgggtaagagttgtaggacttcctcttcatctttggagtagggaggttttcaagcgtattggagattgttgtggggggtttgtagctgtggatgaggaaacgactctcttctctcagctgcagtgggctcagattttggtcaaagattcgggaatgaaatggccagggtcgatgcaggtggaggctggtaactctaggtgggagctttgcttgtggtgggaagccacaccgaggctgttgcaggctgggtcctgctcttggatgcagatgagaagtgagtgggaggttagggatgaagttgggggagcctcacgcgttgaatctggagtacaggagccccaagctatttttcaaaaaagggaggctgaagtgaaggtggcgtgtggcagtgaaagtaggaaggctgacagagaatggggtaggcagactgatgaccctgcagtgggctgctcagggaatgggcctgggcccaaggctggcagaggggctcttttaaaaggagctggtgggccgcttacaaaggaagacgcgggttgggccgagggcccgtcttccctttgccctaagttattgggttggactaaggggcgtgaggagcctattgggcttcttaagcctgaggcccatttggtccttttaagggagcccgtcccttctagggcttcccccgagactgtcaggactcttgcggagctggagcaggatcctctggttgtgggtagcgtcggcggcatggagccatccctcggccacctgaagcccaccgatgacgcgcttttgaatgaagcttccaggtacccccgtaacttcaaactccctattttctctgtggggtttggggcttcttctccttctcctcctttcttggggtcggatggtgttgtgctggggaaggtgggggttatcagtggtctggttggggccatggaagaagcgaggagcagggactctccgcgtgaagagtggctggtagacctctcagtccacgaagataggaacttgtctccgagagcgtcgggtggtgaggcaaatgggcccgatctagccattgttccttttggaggggttttagaaagcccattagtggagacgatggcccttcaggtggaagttggggggggggggggacggagaggaagaatggagctccagttgccttgcgaaatttagtcactgcttgggtatgccgacagttgggtttgaggaggaaatcctatacctgttgaggagaatgagggggagaattgaaaagaaaaatcaggacagggagaataataagacaaagtcttcggtgtcaaaatccagtagggaattaaagaagctggaatggacggtaagctataaaagagctaagttggcttccaatgaaggcaagtttggaggggcttcaggatcagggattaaatgaagataaagattttatcttggaatgttagaggggcaaatgatagtgaaaagaggaaaatcattaagtccataataaaatccaataaggtggacatggtgtgcttgcaggagactaaaatcaaggatatgagtatggggattgttcgcagccttggggtgggaagacatattgattggagagcaattaactctaagggggcagctggaggtgttctggtgttttgggacaatagagttgttgatttgttggaggtggaagaaaggatgttttcagtgtcttgtctgttcaagaattgtatggatgggatgaggtgggttttcaccggagtttatgggccggtgtgcagaagggatagagaggttttttgggaggagcttgggtcaataaaagggttatggagagatccttggtgtgtggggggagactttaacatgatcagatacccggaagagcgcagtagggggggtgagttatctgcatcaatgaggagatttactgaagtggtagaggatttggagctaagggactaccccttacaggggggtctctttacttggcgaggggggttaaacaatcagtctcaatctaggctcgacaggttcttagttacagatgagtgggacagaatgttcaatggagccatgcaggggattcttgctagaccagtttctgatcattatcctatcctacttgaaggtggaggtttgaagaggggtccgtcacctttcagatttgagaatatgtggttggaggaaagggggttcatggatcagatgaagaggtggtggggcagtttaacttttactgggtcttttagctttgttttggatgcaaaattaagagccttaaaagggcttttaaagacttggaataaagaagtttttggggtaattgagactaagaagagagaagctcttagccaggtggtgtactgggatgcagtggagaatcattcaactctgagtttggaggattgtgaagcaaggaaggaggctaagtaggcttataagacatgggtgttgagggaagaaatttcttggagacagagatcaagggaattgtggttgaaggagggggacaataatactaaattctttcataggatggcgaacgcgcatagcagaaggaactggttgtctaggctgaaagtggatgattgttggcatacggaggagttagatttaaaaaatagtgtggtgggtgcttttaaaaatctgtatactgaagaaggggggtggcgtcttggtgttgaggggctgcccttcatgagattagacagctgtgaggctgaggggctggaaattccctttacggaaggggaggtgtttgcggcactttcagatctaggcaaggataaagccctcggcccggatggcttcaccatgaccttctggttgttcagttgggatttagtaaaggctgaaataatgggcttcttcaaggaatttcacaagaggggcagatttgtaaaatctctaaatgcaacattccttgttctagtcccaaagaggggaggagctgaagatttgaaagatttcaggcccatcagccttgtaggcagcctctacaagttgctggccaaggtgttggccaatagaattaaaaaggtgttggggaaagtgatctcagagtctcaaaatgcctttgtggagggtagacagattttggatgcagtgctgattgcaaacgaggctgtggacttaagattgaaagacaatgtgggaggggtgttatgcaagttggatatagagaaggcttatgaccgtgttagctggagctttttgctggctgtccttaaagagatggggtttggcgagagatggataaagtggattgattggtgtatctccacagtgaaattctccgtgttagttaatgggtctccttccggttttttccaaagcacgagggggctaagacaaggagatcccctttccccttatttgtttgtgatcgccatggaggtttttagtagtatgatgagaagggctattagtgggggttacttatctgggtggaaggtgagtggtgggaggggtgaggggatgcatatatcgcatttgttgtttgcggatgatacgttggttttttgtgaggagtcttcagacgagataacttatctaagttggcttctcatgtggtttgaggcgtgctcgggtttgaggattaacttagagaagagtgagatgatcccggttggaagggtgctgaatatagagggtttggctttggagttggggtgtaaagtgggagggatcccttctagttatttgggaatgccccttggggcagctttcaactctttggtggtgtgggatggggttggagagcgttttcgtagaaggcttgctatgtggaagaggcagtacatatctaaagggggaagactcaccctaattagaagcactatgtccagtatgcctatttatttgatgtctctctttcatttgcctagaaaagtgaggttgagattggagaaaattcagagggattttctgtggggtgggggaactttagcccataaacctcaccttgtaagatggaacttggtatgcttggagaaaagaaaaggtggactaggggtgagaaatttatctttgatgaataaccgcccttttgtgtaagtggaattggaggtttgctaatgagagagatgcgttgtggaggagtgtaattagcctcaagtatggcgtagaggaggggggctggtgtactcgggatgtgatgggaagaaacggagttggtctttggaaagcaattaggaagaagtgggggctgttcgatggcagggtagctttccatttgggtaatgggcaaagagtgaaattttggaaagacaagtggtgtggtgatgggcctctttgtgagtccttcccatctcttttttccatgtccatgtcgaagaatgcttgggtttcggaggtgtggaatcctgttggtgatgggattggttggactcctctctttgcaagggcgttcaacgattgggagattgatttggtggagcggttgttgcagaagatccaagctttcagggttcaaagggaggaggaagatagagtgatatggacaacttcaaataatggggctttctctgttagatccctttattctatgatggagccggggggcctttctttgttccctagtgaaagaatttggagggcaagagtgcctcccaaggtagctttctttgcttaggagacttcttggggtaaagttttaacacaggagcaacttcaaaggagggggttctctttggcaaacaggtgcttcccctgtctatctgaagaagaaacagtggatcatcttctactgcattgtgtcaagacgcgggtcctatggaacctccttttctctctttttggaatatcttggactctttcgtgtacagtgaagacaacccttcttgggtggaatggagggtttgtgggaaaaagacgcaagaaggcttggcaaatggcgcctttatgtattttttggtcagtttggaaggagagaaataggttagcgtttggggatgaggatctttcgcttcaaaggttgaaatattcttttgtatgtaatctttggttttgggtcaggggttccttagcagagagtcattcttctcttgtaagttttgtagactggatagactcctagttagggaaggtggtgtgtatactccctgtatacctagagggcaccggtttttggtgtttcctcttttcgtttaatatacttcttttacttatcaaaaaaaaaaaaaaaatggttctagagtctgaggcaaatggtaatagagactcttggatggatgactagtagggtggaagttttaggcttggtggaaggtttttctgtggggagtggattcaacttttatgcttccatttgtgaataacacaccatcatcttctcttctactggagaaacaaaacttacagtgctacaaatgaagtccaagacttagagttgactttgggctttagatggtcttagctccttcatgggctgtcttttgaaggtatggacgttttgcatgggtgttttacagtaaaatcctccttcaaggagctaggaggattttccagaaatcaagatttgtagaactttctctttgaaggtggctttttgtatgtatacgacactggaaaagggtattagacactaataattccttgagttggcactataaattaattgatcctgtgggcaggaatgggtgtctacttgtttttgtggaaagagttgagctaagggtgttttggaatttcttttcctgcaatgattttctttgttgtcatcctctttatgtttgctgtcttagttgggtagctctgtatgtactccatgtactgggttcatcttcttttaatgctttattattttttttttatagacaaagagaaatataaattaaaacacgccaaaatagggggcactccctatgtacacaggcagtatacaaagaaagccaaaatgctttattatacgatcacacacttagaaaaattagaaaaaagaagcggaaaaaaggttgatacagtataaggatttcctgacacagattcagttatgaaattattcaatgtggtggataggggcctattaaattagtaaattcaacatggaatttcatgtggatgtgttgatcttgggaattagaataatttgtcatacatgtaagatatctatgttatgatgatagcttagacttgaattctctgagtataatgcatttctaatttgatctttttctttttccctttttttgttgttaggaca

SEQ ID NO: 11352 - DNA, 11058 bp, Vitis vinifera
  Intron number 13 from transcript GSVIVT01013621001 (locus GSVIVG01013621001) derived from phytozome v7.0 (chr-ID chr Un; pos 1750742 to 1761799 reverse strand)
gattaagtcaggtttgcaattgtatgtctcttgagtcatgatgcatgtcttgttttatcttagatctagattgtatacattctcctcagcagctcacataaacctgtctcttcccttatttttcttgaatacgtactggatctagcaaattttggacttggaaatcgctatcctcatttcagatattttgccaattaacagtttgtttagtgcaaagtttttgaagcacatactttttgcatgctattcttattcttgtgtccgttggattgaattttgacattgtaatgatctttattttctgatgaactctaccttcctctctaccccccacccaaaaaaaaagaaaagaaagaagaatgaaaaaaccaagtaaagaaaataagaagagaaatagaagttatgtcacatgagtgtaactgaagatgttgcctaggtaactgtgtcaatcacttcaccaataaggccttacaatctcttagtatgagtttgagagctggccctgaggcaaagtttcttgggtattttatgattgcttttgtcattgattaaggaatactctcttgatgtttgattagagtaagatgaacattgtgtttgagagtgtagatattggatgttttggtgacaggaactcattggttggtctgatattttcttctatggttgaaagcatacttccaggtctgctatagaaaaaccagaactttttagattttgaatcttgcaatatagtgaagacaagtaccaagttcacggcagaaatttcattgtgaatttggatcatagtacaagagtaaaaaatctcttgctgctacaaccagtgttagagaagattctgcttaaaaaaaaggggaaaaaccaatgtaaagaagataaccaacaaagagttgtacaacatggcaaaatggcctcttgcatgatttgactttatgttgggatgaagtcagattgtcttatgtggaattattccatcaagtcataaagtcaaatcatgcaaatatatatacacacagctgtatggaattattctaggaaataatcaaatcagtctagccaccatttgaggagcatatacagcctacatattagccttcatatttacaacaagaatacaattaggaaagaactatcagcctgcatgtttacagcctacacttcagcctgcatatattcaacatgtggagaaatatcagcctgaatattttgcaacattccccctcaagctgggtcaaatatatttcccattcctagcttgcctagaatagattgaaatgtagaactcaataacacttttgtaagaaaatctataagttgacccttggaagcaacatagggaatacaaatctctccgctctcccaattttcattgataaaatgccaacctatctccacatatatagtttggtcatgatggacaagattatgggcattgcttatggataacttcttgtcacgatataacttcataggaccttccagcttcattccctattgagagagcttcatccttatccaaagtagctgatagactccttgggccattgatttgaactcaattgctctccatcttgtagggaaacttggatatctccatttcaaaccttggatctttgagggtgtatgcaatctattcctagggctctttagatctaatatagcataaaaacttggtaataaaaaccattaaaaacatacatctagagagtgcagataacatacttgtgatctggatggttctagatcaaatctaatctgatgaagaaactctataggtgtcatagatcttgtagacacgaaaatcttttgcccaatcactcttttcactaatcttgacacaagagaagggtggtcttctctctaaaagggagggctagggttttttctttagaatctctaaaaagagagtggaagaccatagccctaagcccctaagagggtttatataagcttcattatgggcttaagactttcacaaaaaacaacaacaaggttacaagatagaaaatagagtcaaccttactagtagttctaaactttcacaaaaaaaccacaactaagtcacaaaataacaaatagaattgaacacatatgactaaaatgtttcaacttaaatcctcatctccaatgtcatcatcatcctcatccaatgtatcaatagtaggaaggtttccactatcaaatcctcccatttcatctaactcttcatcttcatgaattggtatcaaattcatctccttcgctttgcctttgccaccaattttgtttagcataaagtattaattaggtgtaaatattataagttcattaatacatttagtcacatttataacttaaaaatttttagtacttacttgcaaattcatcatgtttctttttcttggaatgcgaagccgataactcttgaggttcttggtctttggatgacacaactctaatgacatcaacattgaataactcattatctttaagccaacaaagatcaagtaggaggaggggagcttctttttccgcaatccattcatcatctgaatcaatctcatctaccaaaattggataaacattttgtttcctttgtagactttgctcttttaatctagttttgtacttcacatatattagagcatttaacctcttatgttcaagcctatttctcttttttgtatggatctacaaataataaaagaaacaaatttatgtgttaagaagaaattaaagttctctcacattagaatagaaacctatgtataaaaattttaaaaatagaagtactaccgattcaaaagttctctttctctcacatcctgaagcattgcaagtaaggctaaggactcgaataacaaacttttgcaactccggtgttgaaccccaaaacgcatccaccaacttgtaggacttcttaatttttgagaatcaattgcaacatgacttccaaattcacccattgcttggtcttatgagtctaactaaatgtcaacttttaaacgttcctgataatccaacatcttatccatgcattcaaataatcccttcctcaccttatttacattagagaacttatcttcatatcgcaattgaggattaagataataacttgttgcatgtaaaggtcgatgaagttgcggagtcaattttgcatctatttttctccaaattgggccatattttctcttgcctccacaattaaatgcaatcttcccctttgcttagtccatcaactcataaatataacccatggctggcctttcctcttaatcaacctctctcatgaaactaactaatggaatagtagtctttatacaaaaagcaacatgaggccaaaaatttggatcaaacaacattgtacttcgaacttttacaccttctacctttttggtccatgtacttgaacaccatttttcagaggagaacattgttataagagcttgcttttgcttataaagactttggagagtaagaaatgtaataacaaaccatgtaattgttggacgaataagttcatggttttttgtaaatgttcatatatgaacatttagctttccaacatcctctaaaatcaaatcaatatatgaacttcactacttgcctagctcgtaaaagtgtattagcatgaacatttagctttccaacatcttccaacatcaaatcaatacaatgagcagcacaagaagtccactacaatcttctcctcttttccataagcctcgttccaacattcacataagtagaggcattatcaatgataacttgcacaacattctcctttccaatttctttaaccacctcatcaagatatttgaacatcaattctccattttttattgtatcagatgcatcaattgatttcataaaccatgtgctagcaggactattcaccaaaaatttataagacacttactttttccatctgtccaactatttgacataattgaacatccatattgcttccaagcttttttgtgttcttccatcatgatgtttatgtcattcacctcttctttaagaatccatgtcctcaattcatgcatagatggaggcttaaaaccaggcccgaaatttgcaatagcatcaatcataggaacccaataaggatcattcaccatattgaatgggagcccttttgagtacataaatcgatcaatttttctacaaacttccttcctttcttcttgcttccacttggaattcaaagtactttgtctaggttgtgaagtggtgaatttatccatgggtcccctagttattgggtcccctaggtataggttccccactcccacttatactcccactctcactcccacttccactccccaatgtccccaatgtccccattgttttagaaaaggcactctcatgtgttgaagttggacccataccaatttcttggagtaattcatttcttttttattttttatccttatagttggtcaatgcctccttgcactctaatctagtatcttcactaactttgttgcatggtttcataccatgatgagttccggctaagtgatgtttaagtctattgacctctctcgtgcatctttgattgcaaaatttacatcttatatatttctcctcggaaacttcaatagcatacttccacacaatcttttcgtgaagttcttgaatcggaggaactcattctaaaataataataataataataataatcaaaattttatatataataataaaattgatttaacaaaaataagaagatataattgacttgaaatttaattttacaatttgtgattttaaaaaaaaaagtaaataacacaaataagttttttttttcaaaattgaagaaaataattttttaccaaaatcactattcactatttgttgccttgtttttgtaaacaattgggtttttttttttttttttgtaaaaaaatagaacattgtattggtagaattctaagagaaatcggggtagaaaatttgagtggagtctgactagtgaacaatggtcaatgttgtggaaattgggagtggagttgttagaaaatgagatgagagagaagagcaaaaaaattcaaaaactagtagtgaaaccaaaattgagagaagagcaagaaggagagatgagaaccagtctcacaccaacctgtgggaaaatttggagatgatgcagcagttatcttcacaccgcatcgttgttgaatgtacaaggtagcaagaagatgtcgtcagaaactcaaagtgagaaaggagttgcaatttcgtcgtctcttctttgatattcagttcgtcatagggaaggagagctagggttaggtttctccttcaaaatcgttttttatttgttcttcagtgggtttttggggtttaataggtttttcttcaatttttttattttttattatttatttattggccaccttagcaaacaaaaggctcttgcttcactgagggaggcgtcaaaaggcatacgcagctttcgcctcagaagcgcctcaggccaaaatgtgtgcgccttttgtgttttgcgttttttttccaatgccttcgggcattttcaaaacgccttgcctcaaagcacgcctcaatgcgcgcctagaaagcacctttcaaaactttgattgtaattgaggatgaattttctctggcctagtcatagtcgtcttcactgtgggaattttttgacaaagagcctatgctctgataccatataggctttgaggaaaatatatttttattaatcctcttttttgaataaaatacaaagaatacaatataagtttatatagagactcctctagctagaaaataggaacttcctaaaaaatagaacaagaaactaactatatctaaatctgaattttaaaaataaatataaggataaaatttggatttaaaaataaatatcaaactttatccattttcctaaaaataacaacaatattcctaaattctcgacacattcatggccttgttgtaaagtaggtgattacctttttgggctgaggaacaagaaggggattgatttaaagagacctaagactgaagaagtttgtacaaatgctccatatgatccttagtaaaaggagatctttttaaggaaggttgttgccctcattcattgcttctagcttggtaggcatgactctccccaccaagtttcttcttccaatttgacagcttgttatgaatcttccaacaagtgtcacgagtatgctaatgtttcttatagtggtcacaccatggtccatcaccctttttagaattccttttttctccttgatcgaaacccttagtaataagagtagaactattaaattctgttctagcccttggtgactcaaggttcatcataacggatcttctagcttcttctcttctaacttaagaaaaaacttcttggagagatggcaatggtcttctccccagaattcgacctttcacttcatcaaggtctttgttgagtctcgccaagtaaacaaagactatcattctctacttgtttcatgtacctcgcactatccttagggttccaacattctctacttgtttcatgtacctcgcactattcctaaggtttttcaattccttttcataacacaaattcaactcctgtcatgaagtcaaaatcttgttataatcctcagtcacaccatgatccccttgtttgaattgccacaacttgattttcgatcaaatatcaaagaaaaaatttctagatgtgagtatgtttctcggacttcctcccacactcccattgcatttttttatgaagggataagactttcctatttttggctccatcgagttgataagttaggttgttatagtcaacatatattcatagctatgatttacaaccatgatttaggtaatttacaactattattgattgtataattgtgatttatacagttgtagattattttgtatggttatctattattctgtataattggctatcctaaaataaccttgtgtaccatgtataaatatcctttagctatatgaaaatattattcaacaatttatcaagtttgtatcagagcaaaagcagagaatatccgttgttgcctagtcgacacttcttcccttcttttccactctcattgttaccatataatgtcttcaaaaacatataggagtatttctaatagcaaaaggtcatccatggtgaccatttatgacactccaacaatttctattaagttggatggtgctaattatcgtgtttagtctcaaattttggagatgcatattgttggtagaaagaagaaagggtatatcataggaaagaaggctgcgcctgcaaaggatgatccaaactatgatgaatgggaggctgaagatgctctagtcaagtcttggttcatcaattccatgactgactggctcatgtcacacttcgtgtagtatggaatggttacaaagatttaggatgcaatcaagaggagccatcttgatgtctctgactcttctcaagtatatgaattgatgacgaaatccttttaatcacgccaaggtggtcgctctcttgcagaatactacaacgaattaaactcaatattcatggagcttgattatcgaaggcccaatgatatgacataactgatattgagaaacaaatgaagtgtactagtaaggatcaggtttatatatttcttgtaggtcttgatcacagtttgaatcaagttagcagttgtgttttagccatctctcctttaccaagtttagaggaagcttatccactagttcgttgtgaagcgtaaaggtaggtcacgatgggaacaggagatcactttgaagcttccgtaatggctatccataagaataactcatggccaacatcctgtactccttctattgactcttcttctcgtttctgcactcactgcaatagcatcaaacatacggtagatgtttgctagaagaaaaacatggttatctgtagtggtactagacaattgaggccacaggttgatgtagaaaaaaaattctgagtaacaaaaaaccataaatctaagagaaatactagacagttgaggctgagtttttcaaagggaaaatataaataaggtggatcaaagggaagaaaagaaagccttcacaatgaaggtagagtaagagggcgatgaaggccaccaaattctggcaaagaatagactaggaaaaaaagactttaaagcagaactcttaacctactccaataccatgtggagaaatttgaatttcattcattcaaatatttatattacaatagggatatctatacaactctatgaaattagtttgaaaaactatcaaaacaatttagccaccattctagaagaattgacagcctatgtattagcctgcatatttaccacaataatacaattaggaaagaaccatcagccttcatatttatgttatttttttatagttgtctattattctatataattgactatcctaaaatagccttatgtaccttgtataaatactcttgagatatatgaaaaaattattcaacaatttatcaagttggtatcaaagcaaaggcagagaatttccgttgctgcctagtagacacttcttccctttttttcaccctcttcattaccatatcatgtctgcaaaaccaaataggagtatttctgatagcaaaaggtcatccatggtgaccattcatgagactccctctccaacaatttttattaagttggatggtactaattatcgtgtttggtctcaaattttggagatgcgtattgttggtagaaagaaaaaagggtatatcacaggaaataaggttgcacctgcagaggatgacccaaactatgatgaatgggaggctgaagacgctctattcaagtcttggctcatcaattccatgattgatgaccgatgtcacacttttgcagtgtggaatagttgaggaggtttgggacacagtcaagataagctatcttgatgtctctgactcttctcaagtatatgaattgatgaagaaatcctttcaatcacgccaaggtggtcgcccttttgcagaatacaagttaaatcaatattcatggagcttgattatcgagggcctaatgatatgacgtagctgatattgagaaacaaaggaagcatactgctaaagatcagagtttatatatttcttgcatgtcttgatcacagtgtggatcaagttagcggtcatgtttgggccatctctcctttaccaagtctagaggaagcctattcactagtccgtcatgaagtgtagaggcaggtcacaatgggaacaggagatcactttgaagcttctgcaatggctatccataagaataactcatggccaacatcctgtactcctactgactcttcttctcatttatgcactcattgcaataacaccgaacatacagtagatgtttgctagaagaaaaacatggttatccggagttgtactagacaattgaggccacaggttgatgtagaaaaaaattctaggtaacaaaaaaccataaatctgagagagatactagatagttgaggttaggtttttcaaagggaaaatataaatgaggtggatcaaagggaggaaaagaaagccttcacaatgaaggtagagtaagaaggcaatgaaggccaccagattctggcaaagaacagaccaggaaaagaagaccttaaagcagaacactaacctactccaataccatgtggagaaatttgaatttcattcattcaaatattgagattacaacaaggatatatatacagctctatgaaattagtttgacaaactatcaaatcagtttagccaccattgtaggagaattgacagcctatatattaatctggatatttaccgcaataatacaattaggaaagaactatcggccttcatatttataacctacacattagcttgcatattttcaacatgtggagaaatatcagcttgcataatttcaacatgcttctttttagggcattattgaaaaaatcgtgatgctttttcttttgtgagaattgtaggtggtcatatgggatggcttattgcactgaagttataatctttggttatttagacactagtagttctatctatatgttgaatggcttgattaataataaggttattaggtaatactctcaaaatatgaaaactcattaatatttgttagtggttcatattttagtcttattattgtccaaactccaaaggatgccacccacccacctaaggtaagcttctggctttttgaccctgatctgacatgcttgatgagacatcattttgagttcatgtagtaaattaatgtgttgatcttgtagttgatgaagtgacattcacctgtgaaatgcattggagattgtctatgcttgtacaaataagaaaggagccaaatcctactctgctttgtctaattcaggcttgatgaaaccataaaagaatcaaaccctaaatattactcttacaaatataggatgatataagatgaaagacgattgtcctttttggaactgaccgtgctatttttgtttaaacgactatttgttgttacttttgtgacaagtgatagcctacctatcaagtaacttatatttttacttttttcccattttgaatattctgaaatgtaagcttgctaatttcaaaaaacaattttagacattgacacttctctccaagttaatttttgcgctaggcgaagaagaagatgaaactcctgttattccttggtgctaagacaatcttggtccctctaaaaacataggattttattagatgaaatacaaatgtcctcagaacttggccgtgctatttttgtttaaacaactatgtgttattacttctctgataagtgataacctacctatcaagtaacttctatttttactttttccccccattttggatattctgaaatgtaaccttgctaatttccaaaagcaattttaggcattgacacttctcttcaagttctttttttctttattctcaccctttttgtatcaaacattaaggctcttgctagtgtcatacattgacttctcttttttcttggcttgcatcctgcaggaatttagtggctaataacttcacatttgatagct

SEQ ID NO: 11353 - DNA, 7781 bp, Vitis vinifera
  Intron number 1 from transcript GSVIVT01037494001 (locus G SVIVG01037494001) derived from phytozome v7.0 (chr-ID chr6 ; pos 12714026 to 12721806 reverse strand)
gtgcacctccgccgccccagccaccggttgtgcaggtgagtgaaatttaaggtttttgtggctgttttgagccgtttgatttttcaatatagaagaagtagaaaatgtggctatttgtgtttgatttctgattttcttaatctcatatatttctaatgagttgaatatctaattggtagttttactgcattgttggtacgtaggtctctttggataaaaaactgaaacattatgccttgtaataagcggaaggggagtgatgaggactacctgtaaccaacttctaggtcctttctgcggttaagattaagaaacaatggatgaaaagggaggaaaactaatgctgaaaattttattaaagttagtttttgaagttaaattttgcattttcgtccccttggtttgaccttgtatcccaacaccggcatctaaattccatatgtggtcttttggagcaattttaggcggatgacaggccactatgggatctgttcttgaaagatttcaaaacaagggtttggatgtgaaaatatctttattttccaaagatgaccaacaccttgcatccaggaatttgaaaggaagatttcatcaagtgataggataattgacgtaagatcctcaatttctcttttgatgatattactaaaatgtttaagtttcaagggatgagattattgtagatagattggttagagataaaaggtaacccattttcctggcaaggaagaggtggtgaggatgttcatcttcgagatgatagcctcctactaaggtaacatcttcgagatgatggcctcccactaaggactgatgcagaacatattaaaatattctaactcttttatggttcacttagaattagtaataaattacttagcccatattactcgtgttagcaactagatcaagttttagcaagtaattaactgtggtgagcatttcacatcaatgcatcacatcacaattcacattacttttgcattagattgttattttttttcctatttattcagttggtatttaattcagaggggtttcttgggttgcaaatcagcctaataggaacttgaacttttagagagttcctatttttgagaacttcaaattccacatgtatttttttttttggataaataagagaatatattagaagcgccaaaagacaatttgttattatgttaatcccacttatttgagaaaagcttgagttttgagactgttcagcaagttcactagattccataaattatctatcagatggataatttttgagagaggaaaactttttttttttgggtttttatttttatttttaattttttcatgcttagaacagcgaagagcatgctactagaccatttataaggaaaacatccttaccatccttatggaatcaccattgcaatgcaactactcgaatgatacactgggacgtaggaagattccaaaagcaaatggggaaataattcatagtatataactctcatacgtatgtagatgtgcatacttacagtcaaatatgtgtttacattccatatgcatgtatatgttactatattaaggggactctcctcatgggtgtttgataagagttactatttatgtccatgttttttttcttaaactgaagaaggaaaacatggaaaatttttaaaattcaaaattttccaaatcatctatggtataaagtccatgaattttcagattttcattgtgagataattgaaaattatggacaggaggatgaaggacagagcaagtgcataatgatgcaatacctctaatgtttgtgtgttgcatggagctccttgtgtttgaggtttatgaagtatttgtgtgaacctgaaccctcgaattttgaaactttatatgttcacttgaggtttaaatatgatagtgataaggaatggcataatttctcttcgtctttttctccttttccttcttcatatgctgttggattttgatgttttaaaatattgaggatgtgaatttactaaaaatccttgaataaaagtgcaagaaacaaaatatgctaattactggtcttggctttccttttctcctcttcttttttatattctttgattaaaatatttatatgtcacaccctgagtggaaaacctaatttttttggcctaatgttagaacatttgttgttgttaaagggtttctagttcctgatatcaatttttaagctatttacatgcatcgtcctatggatgttgttgcttttataagtacatgtatttgacatcacatgaattaagtacatagcttttggggccatttttatctttttatcttttcagttctcattaagagtgcctagctcctcaatctcatttccttttaagatatttatatgccaaaatgaatgttattaggaatgatatatattgcccttattactagtatatatatatatagacaataaatggtactaatattattgcataggctaaagagggatttcttttactcaaaagtttgctttgcaattggggatgggaagagagtcatgttttggaaagatagttggtgtagtcaagagcctttaaaagtgatgttgactattttgtttgctttatctgaggctaaagaggtgtgggtagcatgattgtgggagcaaagggagggaggagggttttggaacttccattttgctatgcatctaaatgattgggagttggattacgttcctttttcaattgcaaggtcattcggtgaataggaagcaagatggtagattggttgggaaaggtgatggcaaaggaaggttttccgtagaagccctttactcgttgttggaactagattctgctaccccttttctagtaggggttatatggaattcttgggttccctctaaggtgagtttctttgcttgagaatcttattgggggaaggtgttgactttggaccaattccaaagaagaggttggtcattagtcaacaggtgcactctttgcaaagaggagtcagaatccattgactacattcttcttcattgtgctaaggcaaggatcttatggttgttggtgctctctttatttgggatcccatgggttatttttgcctcggtatgggacaccctactagtgtggcaaggttcttttgtggaaagaagtagtaggaaggcttggagagtggcccctttatgtattttttggactatatagagggaaagaaattgaagagtgtttgaagatgaagagatgttggatcaatgtcttaaaagttctttccttaacaatcttgctttgtggattcaggtgtacattcctgggaattttttgtccttaattgattgtgtagattggttgggtccttcatgagggtggaagttgttttttgtttacccccctttttattctgtttttttgcttattgtatactcccagtgtactcttatgcgttctatactttcttaatacaatatcttataaaaaagaaaaagaaaattattgcataggctatctttggtatgctggatataggtcatttttttgattctcataaaaaaaaaatatttgtacacttgtatgtgtggatctccgtacttgggacttgatagcatttttaatgtgaatatgcaccccatattagaaatcctgccaagctgtttataccctgtacataggatgaaatcatccctgtagtgggatgagatgctgtatcctggaagatagcatggtgatggatagacaatctgcttgaataaagataacctgcttgaataaaaggagggtttggattggggttcatggcctgattatgaagaggaacctaaacccaacccaattatgcattggctgggtttgggttttttgattttgttttgtttttgttttttgtttttgaaggaaacaaacattttattaatgaaaaagagcatgaaggatgagaacccggacacaatctgattaatgttaattaatcaatcagaattttttttttgggatgatatataaatagtgctgtttttactagtttattattttcaaattaaaaaaaaaacttttaacttgattctaatctgggggtgtttaggtcagggttatgaatttcaaatttattttaataaggctggactgtgtatactgtaattggcttagatcttcttggtttgttaagatttgaatcagatctacttaattaatcagatcctatacaatttatcacctaccacttccagatctgattaatgttaattaatcagatccacttgatgttgaattgttaaatataatgtgtattattccatttttaatattattttaatttttgaaatttttttttaattttcttctgagttatatataatatttttttctgtgtgtttacttatcaaaaaaaataaaataaaaaaatcttctgagttagcagtttagcttaaaatcaaactagttgatatggattgacacatgtgaatccagttataattttctggcctgatttgaacccagcttgattatgaacatgtgggtttgaatgaagcctattgtccttccaatttgtttaatattaattaattagtatttaatttaattattttaatatgaattagcactgttatatcattttaaatatatatatatatatatatatttttttttgagtttgagggttgctctgatactaaccaacaaatatacccaaatatcttactgctatctctattttgaaatattgccactaccggcaatgacttgcatatccatttcagaccaaagtgtaatttcatttgtgaaccaaataaaagagtatttatgatagtttcatttgtgattcagacaacagaattggatgttccatttatttgcctagtcatggatatgcatattttctccagcccccttatggaattggatatcccatttatttgtctagtcatggatgtgcatattttgtccatacatggctatattattttggagccatatcatattatcattttgacttttatctttacaaaattttcttgttgattgattaattactttttgtaaatgaatcatttgggaaaagtttggaattcatgttggacaactgtaggaaggttgcttacaatcaagtgaagtgggctatggctttactattttaggatttaaagagaggaacgaggtcaccacttcaatactaaagaggcttgaattcatgacttttctttcattaccgaagggaactattgctgaggtccacctcaggaggcatcattcttcatactgtacatcaaatagctttgtttgtaggctttacaaagtccagcctatataatgacttattagaactccttattctttcctaatactttttaatcttccaagtaactgtattaaaaaatttcaaactttgagaaggtagagaatttctagaaaatggaagtttttaaaaacaaaaaacttttcaaaaaaatagattctttgagaagtaaaaaccttttagaaaatggaatctcttttttagaaaatagaatttttttaagaaaatagaattttttaggaaaaaagtcactttcttgtagaaaatatgaaccttggacctagatagcttttatttgataaattttttttttgatagacagcttttatttgataaattgtaatgataaagaggagagaggataaagaatttcaagcattgtagcttcagtttatccatccatgtagaaacacacaaacaacaatgcaataaccaaatgaaacctcacttgtatgaagtcatagtggttcatttgatttagactgtctttggttcaccttctggataaaatatcacttctattagataattagctgctttcttgctttgttcctgagtgaaggtggaagagaagacataacactgcagaaggaagtgacgttatctcatgtagttggaaagcgcaagggagaagagtttaatggacggaaaggaggaaataaataaactttttcaagttcatttagttttcttcttttaactgccccaattcttttaggatcaccccttgtcaatgataataacacaatgggcttccaatgcttgctttgcatgccttttttggcaagattctcactttctttgcatcctttggatgcatgcctttggacacatgttatatgtcacatgctaacctagctttgcatgcctcttttggcaagattctcactttctttgtctcctttggatgaatgccttttgacacatgttgtacattgtcacaaactaatctacatggattgcctttgatatgcctagtcattttttagaacatgatattattgtagttgtcaaaaacttatgatacatggcatatacaacaataattttttttttttttaaatgaaaattgagatgtattgcaatccatatcttattttaagcgtactttatgatatatacatatgttacacaatatgatacatggtacaacattacaatgacacgtatgccttaaactatttttcataatttttttaaaaaatcaagtaatttttttaaaaagaattattatattaattgtttgcaatgtatagtaagattagaaattgatcataaaatggagaaagataaaataattttacatgaaaagctacattcttcttgttaaaggccatgtttggaattaagtaaatttatttttatgcagaattttaattgaataatttgaatattgacattgaaaatgatgatgattgataaataaaaacttttactcaatatattagtttttatttttatttttttatttattttaatttttttttttttttttttgatttttttgattttaatttttttgatgagaaaggaatgatggcgagtatgaaaagttgtaactttgtagatgacaaaaaaagacatatatcaacaacacataaaagtaatatggttagttagaatttggaactaaaaatcatagttaaagattcaaaaaggctttgttttggtggattttgtgatgaacccatactaattagctatatattattgcatacttcatcctttcaatatatatgtgtatgtatacatattttttctatttatttttccctatttaaaaaattacaatagagatataagactattcgccatttgatacaatgtattatacagaaaaataaaaaaacaatacataatacatttcacaagttaacaactatacatattactaacatatttggcaatcaaaatttacttcaactgcattgatgagtttgtattattatatttgacatcttaacttttattttttttcctttttcctttcctaataggttcttcaaaatctctttggttttcattgtttttgtcagaatgaaacacgctgatcaattatttgatataggcttggccttcagtttggaaactgttagctagttgagtttgtccttttgatggtttattagacaaaaagaagggagaacttttaaaaaatatattttttaccaaacaaggcataaagctatctaggcacttcatcaatcaatctcatcctttaaattagaattagttctaattgtttttcaaaaccctatatcataccttgctaataactgctatggtagtgtaaacaacagtgttatagtaatatggtcctcaatattacagcaacttgctaccgtgatctttcttgctgtgttgcctctgcatgaaaccagtatgaattgttgtaaggctgcaataacttttttctttaagtgatttaaatacctgatgttgctgtaccttactagctttggttaatgttttttggttgctgttccagggatcagttgggcaacaaaaatcac

SEQ ID NO: 11354 - DNA, 7390 bp, Vitis vinifera
  Intron number 2 from transcript GSVIVT01017822001 (locus G SVIVG01017822001) derived from phytozome v7.0 (chr-ID chr5 ; pos 3760277 to 3767666)
agaaagtgtcctttacctactctgttcacttacaggtttggtaatagagtttcaataaattatgaacatttggttcttcttattttcaattatatgaatttctgggaaattttgaattaaaacagacccctgcgcctgactttaaccgactacccccttttccttcaaattcaaaagccaattcatcatccgtaaacatttaatgcaccactggcactggttttcaagtttcaattttgttagtaattgggaagactggacttatatttggctgaatttggataatcagttattattattttttatttaattaaattttaaattattgtgttgatgttcagaatttcaaacattttcaacctagttaataaaagtttgaaactgcagttttgaattctgaaccaattttctcagtaagagtaattactgattattaaataagcttataacatgtaagattatttaatgcagtaaagcttcaaattcctgaacaatgagctaagtgaaaccaacaaaaacatagacttgcatgatgtatttgtgaaattactggtataattcatggttatatatttctgaacaatgacaatttcccattcaaaattcaatttgtatacaaatacctcataacattatagggagacaacactaagaaattagcaatgaaaaaacaattgtctttaactatgggattttggcatgtggtgaactaaattagataactaagattttagagattacataacattatcatagatgtttaggtatattagtctttggtaaagggtgccatcgctcatagtcaatagaaaaattctcttgtattcattattagtgtggggagactcacattgatttgaagcactttatatacctatttactacatgtccttatttgcaatccctagaagggtaaggatgggggtagagaagattcaaaaagattttttgtggggagatgaggctctagagagttcatttttagtgaaatgggctacaatttgcatagataggagtaaaggaggtatgggtattagaagtctttcatctcttaattgagctcgtcttaggtagtggaattgatgattcgctactgaaggggaagttttttggaaaggttatggaggggaagtatgggaaagaagaagggggttggtatttctatgaagtgagagatggatacaagattggagtatgaaaagctatcaggaaaggatgagatttatttgacaatagggttttgtagtgggtaatggaatgagggtgaagttttggaaggatcggtgatgtgggaaggagctcctgtgtctattctttccttatatgctttagcttcatcaaaaagatgtttgagtggtggatttatgggatgagacaagtgcaacgggttattggaattcattttgctccagacacttaaacaattgggagctagttattgttgggacttttttccaaagatcgcaagataagctgataaggaaggatgttctcaatagggtgatctaggagtcaaacaatggagtttttttttttttcctaaatccttttactctatattgaagttgaggaggacaagtcccttcctatcaaggattatgggtgtcaattaaagcgagccttttttttgcttaggaagctagttgggaaaaagttttgaaggtagatcaacttcaaagaagagagtgagaaggctttgcaagttgtccttagctataaggagattctcgaaggttattgaggacttagagcttagggatcttcccttgcaagcaaggatgaaagtttccatttttttcaccgaaattttgggtttcggtggccggcgatatgaaagaggggggcgaaatgtcgatgggagaaatttcgccaaattttggttagaattggtgaaaaatggctacaggcgaaaaatcggcgaaatcttcaaaaaattgtcgggcattgcaatttataggcgaattttcggtttgcatcgccgatttttttaccgatttttcgggaaatttccttatatttcctaccagtccatcctgcgcactggatacaaaatctgttcaattttttttttttttttttataaaaaaaaaacataaagatgttatttggtaatctaatcatgatttgcaggcaaaggttgtgtcttttagcctagctcaaaaatagtggatttagggttcgtgaaatttaaatccaatggcacaaaagcaaagcgacctatagaacagatctagaaaacataggaagcaaaaaaaaaaaaaaaaacaatctttctggttttccttgggggttttgcatggattttctcggaaatcaaacgaggatgaattttcccggaaatcaaatgggggatggattttcttgggaatcaaacgggggttgcaaaaataaaaaataaaaatgattagattagaacctgtgaggattgagagtggaagaggaaagtagggccttttttagggattctgtcgtttggagggcatcttcagagaagggcttcttgatgctcgagtgagagaagtgggtctagcctttttgattgttagatttaatagagataaaaaataaaataaaataaaatcatgacccctgtgcatctgatggtccaaattgaagctggatgtgatccaacggtcagaattgaacctcaagctatgtgataatatgtacaaattattgatatttactaaaataagtttttcatgaagcttcataatgagtgtacaagtacaagcgacataatataattatgtctaatatcgcaaatcatattttatatatatagcaaattcttcaacaaaacaactttaaattgtctattatacttctaattacattactacgaggttttttttacattttcatgagttaattatatatatatatatatatatatatatatcaaattcttcaacaaaacaactttaaattgtttatcatacttctaattacattactacgaggtttttttacattttcatgagttttgatcaattttttgcttaccaaattttttttccaaaatattcgtcaatatttctccaatatattcgtaaaatcaagttaccgatatatccgtgattaccgatattttcatccttgcttgcaagggggtcttttcacctagaggggtggcttggacaatcaatctcagttgagattagattggttcttggtgtctgagggttgggaagcctttttcaataagatagtgcaatgcatgttacctagactaatgtctgatcattctcccatcttgctagataagagagggtgaggaaaggtcattccccgttcaaatttgagaacatgtggttgaaagaggaaggattcaaagatttgttgagatcttggtggttggggttcaacttccatgattcctttagtttcattttggtagaaaaattgaaagtcgtaaagtctaatgtgaagtttgaacaaagagctgtttgacaatgctacagttagaaaggagatgtcattgaacaaggtgttcttttgggattccaaggaagggactagtgttttgattatggaggagcaacatactaggaagcagattggggaggagtataagaagtgggttcttttggaagaaacttcccaaaggcataagcgagttatggtggaaggagggtggcaagaataccaatttcttttgcaaaatggctaaggctcatagtagaaggaacttcttagccaagattaaaatcaatgggacctggattttagaggagaatgagattaaggatggggtgtttcaagctttttgaaatcttttgcctgaatccgggaattggagacctaacatcaacaggttgtcatttgatgtcttaggtggttaggatgtagctatgttggaggacccgtttatgaggaataagtgtttgatgccctctcagaccttaatgggacaaaacatcgggccttgatggctttttctatggcattttggcaattcaattgggattttgtgaaggaaaaggttttgggcttttttagggacttttaggagtagggtaaattcttaaagagcctaaatgcaattttatttatttatttatttttaattcccaagaaagagggagtataagaccttgaggattttaggcttatcaacttggtaggtggcctttacaaattgttggttaagtgttagctaataaacctaagaaggtggtgggtaaggcagtgtccaaatcccagaatgcctttgtgacggaaaaataaatcttggatgcagtctcattgctaatgagaccattgactcattgatgaaaaacaatgaatgtggattaatatgtaagtttgatattaagaaggtttatgatcatgttaattggggcttcttgctctcaattttaaaaaagatgagttttggggagaagtgggtcaattggattaaattgtgtacttctacaataaggtatttcattctctttaaggccatttcattagacttttttcaaagctctcaaggattgaggtagggggaccttttctcaccctatttatttgcgattgcaaaggaggctcttggctgtttgctcaagagggctaagattggaggtttcttgttgggttggagggtagggtgaatgacaaaggtggaggagtggaagtttctcatttgttgtttgtcgatgatactttagtcttttatgagccttctcaggactagttgacttatttgagctggatgcttatatggtttgaggctattttagggctgaaaattaatttagaaaagaggaagtcaattctaatgggaagggtggagaacttagaagagttgctttagagtttggttacaaggtgggtgcacttctatcttcttatttaggtattcctttagttgctccttttaagtttgtggcggtatgggatggaagagaggaaaggttttgcaaaaggctatctatgtgaaaaaaataatatatctccaaaggtgggagacttaccctgatttatatctagtatgcttatttattttatgtctttgttttgcattcgaaggacagcgaggttaaggttagagcaagttcaaagggatttccaatagggatgaggagcccttgagcaaaaaccacatctagtaaggtgggctattatttttttagacagaagtaagggtggcctggggggctaggagtctctcgatgcttaataagcccttttttgtaaatggagttggtgttatgttgagaatagaggagctttttggaacgttataagtggaaagtatgggaaagaaggagagtggtgctcctgtgaagtgagagaaatgtgtagggtagggttatggaaaaccatgaggaaggattgagatcttttgacttgtaaagttgcctgtttagtgggtaaagagtagagagagattttggaaggataagtggtgtggtctaatccttctttatttgctattgttgtttcaaaggaggcttgggtggcagatgtttgaaatttgttaaatgaaaggagttgtttagcccctcgcttctctaggcttcttaatgattgggagatggaaattgtggagtgttttcttatgagattgcacgaaaggagggtggcaaggaagaggaagataagatgatcttgacataatcaaagaatggtaagttttctgtcaaaaccttatacttgactttggagctaggaagtttaagccttgtttggtaattgtttttgaaaacaattttctattctctagaacaaagaaacaaaaaaatatgtttggtaaccacaaaataaaaaagaattaacaattttctgttcttaaaaacatggtgtcttcaaagtacatcttttagttgttttcatttgttttttgagtactatctttaaaaataattatacaaatatggaaaatgattaaaaataacgcactacatataaaaattaattttaaaatatatttaaaacatagaaaacatgttaaaaatatttcaagttttgaaacaaacttttgttctacaaaacattagagaatggttttcaaaaactattcttaaaaactgtttttgaaaacgcttcccaaaagggctctagcttcttttctggaaggtgttatttggaactcttaagtgccgccaaaggtggaccttttttcttaggaggctacttgggaaaaggttttaaccttggatcatttacaaaaaagagggtggtctttggcaaggagtgtttcctttgtcattcagaggaagaatccattgatgacatccttagccacactatgctaagatgagggttttgtgacatttattgttttccctgtttgatgtggcttaggtgtttccctcttcggtcaacgagacactattaggatgacatgaatctttcgtgggtaaaaaatagaaaaaaatgtagtgagctgctttcttatgcttattttggacaatttggaatgaaagatatagtagatcgtttgaaaatgaggaacattcttttcaagggatgaaatgctcttttctctttaatctctgcgcttggtctaagtggtttatagtttttggtcctccttctatagtggattttgttgactggttggactcttattgagggggcattgttttttattgcctctatattcttttggtggcgtctttaggcatccattctatattttctgtgtactttgaggtggattgttgatgtttcttttttataatattctcttgctttacccataaaaaaaaattcaaagaagagggtggccttcggagaacatattttagctttgtaaagttgaaggggaatcaactaaccacattttcttcgctgtgccaagtcaaggatttcaaggcagttgttgtccttatttggtgtagtttgggtgcttccttccacagtcaaagaagctctactaagctgtcatggctttttttgggggggaaatggaagaagatttggaaagccactcctctatgtattttttggacattgtagaagggaaaaagctgaagagtgtttgaaaatgagaagcattctgatcaaaaattgaaatctttgttcctaagtaacctattagcttggttgggatgtagattgtagaaggctcaatgcctttgattattggctgggtgagatcttgttgagagagagagagagagagttgtattcttgagttctttcttttgtgatgttgccattctgtgcccgttgtttatgttccatgtactttggtgtactgtttttttcatttatatatatacacacatttctttcgcctataacaaaaaaatatcttcaatgaaccatttagagccattcaatgtccatgggacataaagatgcgccaatttcatgtagttccatcttgcaacttaacctttttagagtgttactgtataaaaatttctaatttcctgcatatttctagaccaaa

SEQ ID NO: 11355 - DNA, 17638 bp, Vitis vinifera
  Intron number 2 from transcript GSVIVT01020074001 (locus G SVIVG01020074001) derived from phytozome v7.0 (chr-ID chr1 ; pos 10707082 to 10724719)
gataattatcccacaaagtattcctttgcctttttagctacctagtttatattgatttatcaagcaatatgcatttccacctacacaaacacatattcatgcatgggtatactcacatacatttatctgcatcaggacctgttttgacaaggtgtagcttggcttataagcaggcaaagattatttattatactaactacttgaacctactgtttccaccttcttgttctcatcaaatttgcacttcaaccataaacagaagtcttccttgctgtcatagttttaaaaagcatgcctaggtatgggacaatgtgacgtggggcttgtgcctcgcttgtggtcagacccaacccatttgaagaggggcagcttaggtgcaaaaggtacgcacgctgagccaggcgcaaggctctcttaagggacacctgtgctgtccctttttttttttttctcctggctaaaaaacgacgtcattttggactgtttcttaggccgaggagagaagatggaagatgagtagtggagaagaagaaacaagggaaagagagaagggtgtccaatacctggtggctgctggcaattcttggagagggctcatttttcttttttcctcccatgcatagaatactcataacccactggtatttatgaatttatatctatatatttatattttatttatttgtttatttaatttatttttatgataaagcgataattagatactgaagatctataatttgaaaattgaaatacttatttatctactttttttattttttatttttaaattgaatatattgtgaattattttgatttatttattattcatttactaagatagttatatgatgaaagttttaaaattttgaaacttcttattattttgcatgctttttcttttttaaaattaattgaattatgtagtatttctattttatataatattttatttatttatttatccatctatttatttataatgataactaaagctactaaactatttatccatttcttttgaatatatattcctatattatataaaattgtacatgtgactagggatgcacctcaagctcgtgtcttgggttgtgccttgtgcctaagctccaagataacattgtgccttaagtgcgccttcaccttttaaaactatgcttgttgtccctactatatgcaattactatctactacattataagatctagttttttgaaattgaggggaagtcttaaagaatttatggtgtgtccactcatcttttgtttcctttgagcatagtaattttttctcattagaaacaaactaatttattgatatgaattgataaattcaacaaaagacaagaagtccttccaaagtatataaaggttggtcaaggaatgtaaaaggtaaatagaatgctcagaagggctaataaaacaagttggacaattgaaaggcataacaaaaacttgtacgagcaaaaaaaactcttacataacttaggagataaaaattcatccccccccaaaaaaagaaaagaaattgttgtttggcttattgatttgcaatgtgtttaggtaactgtggatcctaggagaaagagcaccctaagtgactaatgacatctataatgaagccattcattatactttcatgaacttctatctcaatagccaagtctacctttttcaattgtttgtagagacttaaagcgttaacttatagcaactccctttaaaagtgctaaaatatttgcctcaatgaccaaacctttccttgctggtttaggaaaggctcttaacatggtttcatatctgaatgcaccttcaatccttagaccaccatgattacctaaaaaacatcttcagaattaacttaagagaattagaggtggatttagatttgttgcaactccagttccaattccttggacatataaatcgggaagttgcaaaaggcacaaaggaatgctaacaaaagctgctaaggtgtaagctaatagaaaagcatagaaaaataccacatctgaagtagtgtctgcagaccaccatttattgtagaaaattgtgatattctttgctctctacattatctgaatttagtaaggctagccttacttcaaaatagcttagctttaagagatgcacaaaacttgtagagaagatgatcttatctatcatgcttcttggagaaaatagtttcttagaaaatttgaacaatgcatgccaaaaccttaaagccaccagaagttcacatggcctccttacttgtagcatattactgccttcttattgaccaaaatccatgcaaaggtctttgtcatggatgaagctttaaattttcaaatgagattggctagattcatgaacaatgaaagagttaaagagaaagaccttagttacataaaataacctaaggaactcaaggatcatggcttgaggtcccgggaatgggcctgcttggatggtaaattgaatgggtcgtcctcacatggtccaactttgggccttaaagagcaggagaaggagggtgggctggctaagagagatgggtctttgggccaaaaattaaaggataaattaaaggtggctggtgtgccagaggcaggcccatcgtctagcaattgggctgctggactgggctgccattcttctgctgcgatggaaggattggaaagggagggccctaatgctaaccaggagaaggctgtgttattgggctgcttatcttccagaaaaagacccactccagaggatgtcttgacgtgctgggtgccagaggagatcagtagggaacagagggttgatggtttctccacgactgacagtgcgcttcaagaagaagctaagaggtatgccctgcatttctatcctaaaggaaatcaggttatggggacgtctcttcttctctcttctaattttgatcgggctacggagggggagtctttcgatcgtccaggggaagtagaggaggaattatggggggacaaatcaacttggctaacagtctatgaggggaatgacgagactgtgaatgaatcctggaagttgggagaggctaacaaaaacagagacaaggttaggggtaaggagggaaatgatggtgtctcagggattcaagtcattgaaaatgagaaagggtaattatgggaggagtgtagcttggcgaaatttagccaatttctgggtttctctacggagggtatagaaaaggagatattgaatttcctgactaaaatcaggaaaaggagggaaaagattcacagcaaagaactcttggagaagaccaaatttgaaagggaactaaagaggctggaatgctctgtcaattatgagagagggaataagcagaaagctctctcacagggcaaagggaaccaattgatagttgtccaatgaagctgaagattataagttggaatgtgaggggagctaatgatagctctaagaggaaaattattaagaactatatcaggagccagagggtggatctaatgtgtattcaggaaaccaagattcaggagatgtcggagggtatagtgagaagcctgggcactgggagatttttagactggagagctctaaatgcggagggggctgcgggtggcatcctgatatgctgggacaagagggtcttggatatcttggactgggaggagggtcacttcactttgtcttgtagattcaagactatagaaaatggggttacttgggttttcacgggagtgtatgggccctttactaaaatggaaagggagggtatgtgggaggaattgggggcggtcagagggctttgggacgatccctggtgtcttggtggggatttcaatatcattctgttccaacaagaaaggagtagccaaagaagaatcaccacagctatgaggagatttgcagagactatggatgagttagagctggtggacatgcctcttcaggggggagaattcacctggaatggggggctcaacaatcaggtatgggcgagactagacagatttttagtttcccctacctggcttgagatgtttaatggtgccactcagatcagattgtctcggccaatctcagatcacttcccaatcgtgttagaggggggtggaattagaagaggtccaaccccgtttagattcgaaaatatgtggctgaaggttgaggggtttcaagatgttgtgagaacatggtggcaggggattgatgtcaggggtagcgctagctacagattggctattaaaatgaaggaaattaagaagaggttgaaagtttggaacaaagaggtttttgggaggttggaaaccaataaagcctcagccctagaacaagtagccttttgggatcgggtggcaagtgaaagaactttgactgtggaggaggctaagctaaaaaagggagctaaggactccttgaagaaatgggtcctgttggaggaagcacattggagacagcactcaagggagatttggctaagggagggggatagaaatacggggttctttcatagaatggcgagtgctcatcgaagaaacaatgttatgggcagaattaaggttaatggggagtggctggtagaggagcaggaggtgaaagaaggcattgtgaattcgtttcagcagttgcttactgaagatatggtttggcaggctgatattggcaatattcaggtgggttgtatcagccagcaagatgcagagagtctagaagtcccttttgcagaaactgagattcacttggcgatgatggagatgaatggggacaaagcccctggcccggatgggtttactgtagcattctggcaaaatgcatgggactttgccaaagaggagatcatggagatgtttaaagaatttcatgagcataatacctttgttaggagcctcaataatacttttctggtgttgatacctaagaaaagcggggcggaggatttgggagactttagacctatcagcctgttggggggcctatataaacttttggctaaagtcttagctaacaggctcaaaagagtgattggtaaggtggtctctagtgctcaaaatgcctttgtaatggggaggcaaattctggatgcgtccttatttgctaatgaggtgatagactcgtggcagaagagaaaagaaaagggccttatctgcaaattggatatagaaaaagcttatgacagcattaattggaagttcttaatgaaggtcctccaaaaaatgggctttgggaacaagtgggtgggatggatgtggagctgtgtatcttctgcgaaattctctattcttgttaatggagtgccagctgggtttttccctagcactagagggcttcgtcaaggggaccctctatccccttacctctttgttatgggaatggagattctggacgttctcattaggagagcagtgaaggggggatatttttcaggatgcaacattcggggcggtagtagaacttcattgcatatctcccacttattttttgctgatgacacgattgtgttttgtgaggcaagcaaagatcaagtctctcatctaagctggattctcttttggtttgaagcagcctcgggtcttcgtatgaacctagccaaaagcgaaatcattccagttggagaagtggaggagattctggagttggctgctaagttagggtgcagggtgaggtctctaccctcccattatttgggtctccctttaggggtccccaatagggtttcttctatgtgggatggagtggaagagagggtcaggaggagacttgcgctttggaaaagacagtacatttccaaaggggggtggatcactcttataaaaagtgccttggccagtatgccaatttaccaaatgtctatcttccgtatgcctaagtccgttgctaaaagagtggagaaaatccaaagagatttcctttgggggggtggaaatttgggaggaaaaattcatctagtaaaatgggatgtggtctgcacagaaaaacgcaatggagggctaggattaaggagaatagccactctgaatagagccttgttgggcaagtggacttggaggtttgcgtgtgaaagggataacctttggaaacaagtgatttctacgaaatatgggcaagaggattatgggtggagggctaagaaggttagtggggcggctggagttggggtctggaaggagattatgaaagaatctgaatggtgctgggaaaatttggcttttctagttgggaagggctccaaaattaaattctggaaagacagctggtgcactgatactccgttgtcccaatgtttcaaccatctttttgtccttgccgtgcatagagatgcttcgattgaggagatgtgggaccaccattcgggccaaggagattggaatctggtttttgtgagggacttcaatgattgggagctggatatggttggtgatttgctccgtactttgaggggtcataggccttccctggaggatgactcagttaaatggaggcaaggaagagatggtctcttcagggttaaagaagcttacaggatgttggataaacctaatgccacattgtttcccgcaaggggaatatgggtggatagggtaccaactaaagtctgtttttttgcttgggaggctacttgggggaaggtgctcactctggataggcttcagataagaggggtgcaactcccaaattgttgcttttcgtgtggttgtgaagaagagaatgtaaatcatattcttttacactgtatagtgactagagccctttgggatattatttttgggttgttagatattaagtgggtcctcccagaaacagttaaggaggctttaacctcctggaggggttcatttgttggaaagaaaaggaaacagatatggaaatccattccgttgtgtattttttggacggtctggaaggagaggaataggttagcctttagggggggtgtggtgaatgttcaaaggttaaagaattcttttgtttgtaacttatggaattgggccaaagtgtatttaggtgaggaggctttctcccttataggtttcttagagtggatagcttccacttgaggggaggtagttctttttggtccttttccttttttgaggctgtagtcatcttgtatactccctgtatgctttgtggcgtttagccttttttaatgcaatcttgtttacttatcaaaaaaaaaaaaaaagatggaaaaaagtatacatggattgaagacaaaatgagaagttcaaggcctctatttttggataaaaaatgttgcagtagaaattaacattccaagacacaagaaaaaggagattcaaataggagactctcttgttttcactagtaaaagaaatgcaataaagaaaaaaaaaaaggggggggtggggggtggggtggggagaaagaaagaaaagaaaaaaggttgagtgtcttgttttcattactttgaaaagaattggaaattgaatatggaagaatgatcaaattttggaaagatcgatgtggtggtgactcctctttggaagaatctttcccatctttgttctcagacaaagatctctaggtagtggatatgtgggagtaatatggggaaagtgtttggtggagcccttgcttttctagacagtttcattaaaggtgtgaatggctttttacataactacaagcttgcttagttaggagaaaggaggatcatactttggagtggagggattccaagggtggcaagttctttgtcaaatccttctacctttcactgctctagggaagtagaaagcctttccctgtaagttgtgtttggaatccttggatcccattgaatgtgtttttttttttttgctggcagaatttcgactgtcaatcaacttaaaaggaggggatgaagtatgctgaacaggtgttatatgtgcaaaatgaatgaagaaacaactaatcatttgctccttcactgtcctatcacaggtgtcttatggcagttaatcttctctttgtttggagtggtttgggtgatgcattcaacagttagaggaacctctattaagctgacatggttcctttgtgggtaagaagtggaaaaaagctttgagggccactcctatgtgtttgttctggatgttgtggaaggaaatagaagagtctttgaagattcgaagctaacaaaacaaacgatgaaactctcttttatgaatacatttttagaatgggttagattgtagatgatttttccatgaccatgacaggttttttagattagattagctcaaagtaaggagaaggggtgaggggtctttcttttgttcctttcctcttatgtttgcttgattttaggtgacttatgtacgctttccgtgtacttggttacgcctttgattcaaacgcttctcttacgtctttatatatattcttttgaattgcctataaaaaaatgagccatcaaaggtcttctcaaaaatgaatcttcaatatcattatccataataaaaatatgcgtgaaacgaaaaatcaaagaaaatttggatgatagtcgtccgaaggcaatggtgcaaccacctgagcacattgttctcattattggaatgtgatttctagatacttaaaatggcctcatgcataaagcattactctcattgggaaacctccatgcccactaccttaaaaaggtttcattcctcaaagaaatcttttgtaaaccaatacctgattctcttagacttaaatacctagttcccattaaggaggtggtctttccttttatcccacacccttatcgagaaaacgcatttgcaatttctcaattctttacaagtcattttgattaaaatctgtaacataagaatgaagtaaatggaaatatgagacaaacaagatcgcataagggctattcattgctaaaggacaagtaagctttctttcaaccatcaggtctctaagaaatcttgtctactactgaatcctaaaatgaagcaactttgtcattccttctcaagaggagacccacgtatttgtggccttatattccaacaatcaaataatttggttttggataatattgtaccttgacaataggctcttatctagacttatcttaagacgtgatatttgcctgaaaaccatcaaaatgagcttaagatttggtaatttcttacctagtttctgaaagaatatggttttgcttgtgaattataggtgagacaccctagttctagtttttcccatttgaaacattagtttgctgaaacatcagccacagtggtagaaaggatacatgaaaggggaacaccttattttaatcttcttattcgccttatgtattgtctccatattgaactaaaaccttttctttctaaagcatggtttagaacatccaatcctcattatcatgtaaaccttttcaaaaccaatcttgaaaacaattctctcttctctagattgtcttttctatgatttcattagccaccaaaatctatttccttaataaaagttcacttggagagatgaatggttttatgcaagtcttcttaaatgtgatgagacaaaaacttgactataatcttgtaagtgcttgccacttaaatgatgtgtccaaaatctgaaattctattaataaagtgtataatataaagaacacaccaaaaagagtggaccaaatcacataggacatatacaatggtcatcaaaaggcacaaaaaaaaaacaagagggactacaaaacctactccctccctcagtgagaacccaatcaattagtaaatttaatttagaatgaacctttcatccatgtacaactttgcctacaacaaaagattgcaaagaaaagtgttttttcaatctttgatcagaatgttcctcattttaaaatgagctctattcttttccttccaaattgtcaaaaaaaaaaaaaaaagcacaaagaagctgcttgtcacgtcttttctcatttcttcccccatgaaggagccgtgtcattctaagaaagtctctctaaccatggaggatatcacccaagacgctacaaaaggagtttgattcctccaaagttttataacagcaacactaatgccaccttgataggtcctgtctctcagtttgattcctctatcagacacgagttatcgaggtggcattagtgttgctgttataaaattttgaaaataccttcaaaatcctcgactatagattctaacaatcctggtacaaaaggaaaaaaaaatcttctgcatctaaatccttctcctaatcgaactgaaagaccacttttggaatttcatcctccatggaaggatggtccacagattagcacttctagaaaatgagggagcaatgcaaacacactatactccaaggatcttcatgtgatctacgataaaatcttccaaaaaaactcaaggtttcctctgagatactgtctttgttaccaagtatacctcatctttcttcattccccttcctaggttgttatatgatcttcatagtaaatctttgccattgggtttggacataaagtttgatgtggtcaaatgcacataaacttgattgcagcctttttgggagcttacatgatctcttttatttgcgctaaaccaagcagatgaaattccaatatggttgaaaatttgagtattagttaaggaaaagagggaattctaggattgaatcttgatatgttatccaaaatatatgagtgtggcacctagtatgtttggtatcgtgttttgtccttttccctctccttgtcagttacaaacaacctagattattgttttgcagttcatatttttggtccattacatgttcaaggggcatagaagaggcaaaatgatggttacaagccttcactccccatcattccccccaaaaataaaaaatgcaatttaaggggcagaaggaaacatagatgaagtgggctgggggggttgagggttgcccttgtcaattgaagaagaggttggctggcccttcttggcctggagagcatctatgccaagggaagaactcaggtcattttttactttttcagcagtttctttgtctttggtttgggtttgaggtggctgtttttgctttctgcttggttttcttttaccctttctttcttgaatttcttctctctgaagcgctccttgtccttgataaaaaaaactatgtaaatcatctcttgggagaaatagggaatggcttaaacagattgtctttttatgcaattcctccaatcatccatatccttgatgtgctgctttgcaatcagctcaggcataaatcactctaaagcttacgcttctattgtttgtgcagattaataatttgatgcttaatttagcttttttgagtggctaggctctaagtaagggtaggctgttgtttatttcctcctcccttggtttcgagcctttgggctacttttgtatactccttgtatacctagagggcactagattggtgtttcctctttctgtttaatattattctctttatctataaaaaaaaataataatttgatgcttaattattgatacatagctaatttgaatggactcagttgaacagtttgaaccaacatgggaagtaaatctaagaatcattaagtgaacaacaagttacttattgttttactaatatcataatcaagatgttaacaaacttgctgtagcttgctcttcaagttgaaatttccttgttctgtttaaagacattataacattcttaccaaatataaggttatccagacataagtttatgatcagaatattaccatctgtttgatcatgctgaaggtctcatgaatcttaagatttttttttttttttgttctgcatccttgtcaatacccatctaatgttgtttcctaactcggtcgttatgcttcatttcttcagttttattttcatatttaattaatagtttgcatttgtattcctaaattttgcacttttttatatgcttgattaattttgctttatatcttctgaatcatatttaagtcgtatttttactttatttctttgttagcttgtgcatgtgatgtagcacacaatcatcattagtttttatttttagcttcctacatcattagtttctattttagattagtttctatttccattagtttctatttttagtttcctacatcattagtttttattttagattagtttctattttagtttaggttctattttctacattattagtttctattgtaggttcatcattagtttcctatttctttcctagttttcctagtttccaattaccttggttacctatttctagtttcctatttaagttatttcctttatttttgcattacaaatattatttaaaggttcattgtaattgttagagaggagttcaataaatttttttagaattattttctaattttcagatcctattgtgatctttgtgttggttcttgagtgtttttctgtttcaatttgaaacaaacctttcgctacaccaaaattagtatcagagtaaggatttttacctcggtctgatggctaacaacggttctagtggaaaacaaactatcgatgacgaacgacagttcaaaaaaattgagcaatgacttgacaggatcaacgagactcttcgcaacctcacgcaaatggtggctgcattgactattgaagggacacgtgaacccatgaagcgacaaccagaccaacgtggtgattggcaagaggatggttacgacgaccaacgccgaccacaggttgtttacgaaatcaatggcggaggcatgatttgcacgaatccaaccacaaatcgcgattttcatgatccttatctgttacgagtatatgatcaacaaaatcgggaagctcctaggcaccatgatgacgacaacctctaacgaggggtttttgatgaacaagatgagttttgttcaccttttcaagatggtgatgatttttgacttccatagcggaggaatattcaacaaaggcaacaacggaggttggattattcatttggagaaggagatgattttcgtttcaattatcgagctaacaatcggggtcaaaataaccaagaatttaagatgaagatggatttacccagtttcgatggtcgactaaacattaaagattttctcgattgagtccataccgtcgaaaactttttcaattatttgaatatttcagaagaaaatcaagaaaagcttgtggcatataagttgaaaggtggagcttctgcatggtgggaacaactttaatataattgtcaacaacaagaaaaacaacgtgtttgtacttggcctaagatgaaacaattattacaaggacgatttctccctctggattatgaacaaatacatggaggaattttatcagttaaatgcccgagttaatttgtctgagacggaggatcaattaattgctcattatattgggggcctaaagctggtcattcaagatcgactggctcttcaaggggtttggaccatgatagatgcagttaatttgacaatgaaagtggaaagtcaaatcaataggtccatggtgcgcactgagggtaactttcaccgaccaacctaagaagcttcttttgctccaaaggggtcgacaacttcagacaacaatgataacaacaataaagatgccccttcaactcaaaatttgacacaaaatcaaagtggaacttcaacccctatttgatctaatactcaaggccgaaaccagcaacaacaacgaatcaataatgacccttatgcgcgtctaaatctagggaagtgtttccagtgcaactagccaggctatctttcaaataattgcccgaatagaggatatgttaactttgtagaagaaggtggtggcgaagaggaacatgtgcttgaagaagatatctacgagggtgctaagtttgcagaaagagatgtgggagaagaagtggcgtgcattgtccaacgatttttgcttaccccaaaaaagtcgaatgactctcaacgacataaaatattccgaactcgatgcactatttgtaataaagcgtgcaacatgatcattaacaatggaagtagcaagaatgttgtttccaaggccttggtgaaagcactaaatttgaagactgaaaacatccttctctatacaagattgcatggattaagaagggtccggaagttcaagtgctagaagtttgcaaaattcctttgtcgatcggaaagtattacaaagatgagatcgtatgtgacgtgatggatatggacgcttgtcatattttattggggaggccgtgacactatgatgttgatgccacttataagggtcgggataatacttttgttttttggtggtttgacaagaagattgttttgatgccataggctcaatcgtcaggaaacaatttggttactaagaaagataagccgctattcaccaacataacgggcctagatttctttaagtaagtcaaggagccaaattttgttgtagcattggtggtcaagggccaatttgaagcaattattgatatccccaccaaggttcaagaggtacttgctgattttcctgatttatctcccaatgattacttaatgagttacctcctatgtgaaatattcaacaccatatcgacttagtacgtggagctagtttgcctaacttgcctcattattgtatgagcccaattgagcatgaagagttgcaacgacaacttaacgagttgcttgataaaggcttgatttgtgagagcatgagtccttgtgtagtcctagctttactcaccccaaagaaggatggtagttggcgcatgtgtgtggacaaccatgctatcaacaaaataacggtcaagtatcgctttcctatcccacgtcttaatgacacacttgataggttagaaggtcatgaggtgtttaccaaacttgatttacgaagcgactatcaccaaatttgtattcgattaggagatgagtggaagacaaatttcaagactaaagatggcctttatgaatggctagtgatgccatttgggctatcaaatgcaccaagcactttcatgcggttgatgaaccaagttcttcattcatttattggaaaatttgtggtggtttattttgatgatattctcatctacagtaaggacgaggaagagcacttatcacatcttagggaagttctcttagccttacaagctaataaattgtatatcaatcttaagaagtgtagctttatgactagccattttttattccttggatttatagtgggaaaggatggtattcaagttgatgagacaaaggtgaaggcaattcgggaatgaccagctcctaaaactgtgcgtgaagtgcaatgtttccatggtttagctactttttacaagcgttttatttgaggatttagtacaatcatggcgctcattattgattgtttgaagaaaggccagttccaatggggcaaagcgcaagaagacaactttgaattgataaaagcaaagttgtgcactgcactagtgttagcactccccaattttgagaaagtgtttgaggttgaatatgatgcatcagttctgggaattagggttgtcttatctcaagagggtcacctagtggaattttttagtgaaaagttagtgaaccttgacaaaagtggtccacttttgtgcttgaattttatgtagttgttcgagccttaaggcattgggagtattatttgttacattgagagtttgtgctatttaaagatcatcaagctttaaagttcatcaagctttaaagttcatcaattctcagaagacgatgaatcgaatgcatgctcgatggatcgcctttttacaaaagttcacttttattatcaaatataagtctggccaacaaaataaagtagctgatgcattgagttgacaagcctctttactagcaacaattagtattgaggtggtggggtttgtttatttgaaggatacttatgctgttgatgaggattttggtggcatatgggcgcaatgcaacaataaggagtttgttattgacttccttgttcaggagggatttttatttcgaggtacacaattatgtatccctcattcttctttgcgtgaacatttgattagagaattgcatgctggcagactaggaggacatgttggctgagataaaacaatcagcttggtagacgagagattttatcgaccccaactcaaatgggatgttgggcgtttcgttcagcgttgcccaacgtgtcagaaagccaagggacaagttcaaagtactggtttttatactcctttacctattccagagacgatttggcaagatttaaccatggattttgtttttggcctcccaagaactcaacgtggagttgattctgttttggttgtagttgaccgatttcttaagatggttcacttccttgtaaaaggacttcagacgcttcttatgtggccaatttatttttccgtgaaattgttcgcctgcatggcattcctcattcaataacttcagatagggatgtgaaattccttagtcatttttggagaactctatggaaattgtttgacacttctttgaagtatagtagcacgagccatccccagattgatgggcaaactgaagtggctaatcgcactcttagcaatgtgatacgatccgttaatggagataagccaaagcaatggggtgctgcccttccacaaattgagtttgcttttaatagtatgcctaatcattctactaagaagactcctttcgaagttgtctacgctagtgttccaaggcatatagtggatttgattcgtcttcccctttctcatgatgtcaatcctaatgttgaggagtttgtagagcgtattcaacatatttatcaagaagtgaagaagaatttagaagaggaatcttcgttacaaaactgctgcagaccgacagcggtgccttaagttgttcaatgaaggtgatctggcaatggttcatctctgcaaaaatctttttcatagtggcacatacaataaacttaaagacaagaaaattggtcctttccgcatccttcagaagattggagataatgcttacaagattgattttccaactgatatgaacatttccaatactttcagcgttgctgatatctttgaataatgccctctggatgagttttctttgcagctacaaaactcaagggcaagttttcttcaagtggaggggattgatgtagcacacaatcatcattagtttctatttttagcttcctacatcatcaatttctattttagattagtttttattttcgttagtttctatttttagtttcctacatcattagtttttattttagattagtttctattttaggttagcttctattttctacattattagtttctattgtaggttcaccattagtttcatatttccttcctagttttcctagattccaatcaccttggtttcctatttctagtttcctatttcagttatttcctttatttttgcataacaaacattatttaaagactcattgtaatcgttagagaggagttcaatatattttttcagaattattctctaattttcagatcctattgtgatctttgtgttggttcttgagtgtttttctgtttcgttttgaaacaaaccttccgctgcaccagtatggtatttaatgtgcaaaatcaacgtgatgttctctttagtatatctaatgatcggtatgttcttgtagaggaacttcctgataattggagag

SEQ ID NO: 11356 - DNA, 9468 bp, Vitis vinifera
  Intron number 3 from transcript GSVIVT01013687001 (locus G SVIVG01013687001) derived from phytozome v7.0 (chr-ID chr1 8_random; pos 2634536 to 2644003 reverse strand)
gccactgttttcatagtgaagggtggcacaccagaaactagtctccttccacctcctgattacatgcctccctgcacaactccatcccctattcgccttgaagatttcaatgatgcagatggagtagtcaacactataagtaagatttgatccaagtataccatatcaattccaagccacatctattaagatgatcttagatgtaagaataaaagtcctgttagttagacagctgcttttgtatttttctaagagatgagctggagttagttacagattatttacagtactctttttgcccgccccctgtaccaagaaccttgctactcatatttctctgtatgatgaatgagaatgaaatgagcactctgtttcttcttctcttctctgctcttgtttccttttcataatagctctgtttcttcttctcttctctgctctgtttccttttcattataacatcataactcaatgagggtagctggtctgcttatttgacaatccaactgagagctcctccttctggttaagaaaacaggggttctctctgccttgtcgttggaatagggccccccacacctcataccatgctcttatatgttcataacagtttcttttcttttttaggtgataaataccattttcctttttcctttttcttttctaaaaaaattgtatgtgatgggatgaaaatgtcctcaccttcttcacacctatcaaaccttaagtctcccccctctcctctgcttactctatttctaaaaaagttgattgaaagtcttcgtttagttgctcaattaaggctcatcaaaacaagttggtcaaaatattgttcaacttattttactcaaattaagagaaaaaggaatcacttagcaggtagggcacatacagttgttaccaaatatttctcctatgaatcttttatatatacgtgacaccatcttatcaattatccaaaaattcttaataaatgaaaatttatatgagaggactaagagtttttttactctctaaatatgttctccaaacacccgaattaatgtttttaaaactcaaccaatcactaaaccgaaaaagttattataattattattattattattatatataaaattaaaattaaaagtaattatgagaaattagaattaaatataaataattaaaatttttaaatatttcattcttttatcttttatatactactattaaatcatataaaatgtaaatatattaatatttttaatttaattaaataaaaaaattataatattttattgttaagaagatatttcatatataaaaataaaataaaataattttttttacatcaattaacttcatatttattatctttttattcacatttcattagctttatattttattattttatcctaatagataagagatgttgttaacctagttaggatgtggaaacagatagggtacttaaagaggggaaaagttgttttctactgttggtcaaaatctaattcccctctcctccccttttctcattttaatcaaaccgttaatctaattaatcaattttccaatctaattagtcgatctactagttcaatactggttaatgttgcttaaaatggctcaattttttttttaaaaaaaaagttaacccactagtctaatcaatcaattctctaatatgtctaattggtcttactaggacccctagatctcttcgttcccatactctggattgtataggtgcatgcaaactaccctaagcctttagatcctatgtaacgaaagcaaaaaaataaaaaatttaacgttctccttgtctagcaagtttcattatgagttcttttaagatgaaacatttttccaccgggtggataacaatttggtggtaacgatagtagtcagatcatcaacacaacccatttctttcgagcgcttgcactcaggtatttcaataacctttttatagagcaaatcttccaacatgctaggcacattagagtcagaaaaatgatatttcttctcctccaattccttcaaggtgaaccgacacttctcattttcttgggttgatgcaacctcttttacctcctttttatctcttactaaaattttaatgggagtcgtatttaccatcattgactcctggacaggtttctttgaggtcaggtcacacattttcccatcatttatctccctttgttggtcgatgataggatctttcgttacaccatggttggctatgctgagttctatgtcatgtgcccaagtagccaattcttcgaaggtgtaaggtcgtattccttggaggatatacaaaagacctcaatgcattccttatatgcacatttccacaactgaacctcagataatctattcttagaatcaagacttaaggagcgccaattattgatgtagtcaacaaccgactcatctttccattactttgtattggtaagctccatcatggttagtgctcataaggtgctatagaagaggttgaggaattcacgctccatttgattacaattgtcaatgcactcaagtgcaaggtctataaaccaatcaaaggcattcccttggagagatcaaacaaattgttttaccaatagatcaccttccatgcttgcattattgcaagtttggacaaagtgggaaatatgttgctttgaatttccttttccaattgaatgattgaaattgtggaggttgataacctacaggcatacataggttatcaatcctcttggtgtaaggcttagagtaaataagtgtactttctgagggtctaccataatgctctccgatggtgttagttatcatgtcctaaagtttttggatagacaacgatgccatcgaggcagattcaacagtttgtctctcgacttacaccgacttagacacatgtggtacatcacttggagatgcgatcctcgaggggtgagtgagtccttaatttgactcaatgtgttttgtgcttgtgcctcgaccttgtttatgaaagaggttatttgtagatctttctcctatatagtcttggtgagtttatcgatggcacaagccatttctactagttgttcttccacagatgtaatgccagtagccattaccaacatggtcatcaagaataaagaagtgaaaaaactagaatggtcaaagggattgttttactttaactccccaattggtgagcaagtggttgagctagcatcaacaatagagtatagagacttatcctcaaagtccttcattgttgaatggtatttttccctaccatgaaaactctatccctttggccccaaagaggccaaggtgatgactagttggtaactgtcatacgtctccgttgtttttaacaaacaagtgtgctcgcttgctaactttgttagtggtgcagtagtcaattttgctttgctacatgtgataaggttgataaagttgctatatgttgattgggtaatgacaatcttggcatcacccttgtcaacatgtgtaacttcagcctttttaaatgtcattgtcttggtagtgatcacctttttggaaaaagagatgagaggcaaagaggttccaacaatcgtgctagaaatttatatgcacaaatttcatgaaagttctataatgtaagcaaaacaataggaaaaatctgcgaaacaaaatattttattaaaattaataaattatggggtacaatttttgtggtaatattcttttataaaagaatatatctctctgattattttaccttgatcacaatttgaaagacaacgatgaaaacgttttcttgatttcagagatcaatcgaggaccacaagtggcttgttcccgaatgaattcattgaacaacgaagatcatgtatgtagttcttctatgatttcttggacttgtaaggatattttgtgaagcctattcttctttatggagccttgtttccgtgtggagtcatttttttcaatcctcaaaagcctcttttcccatgagagtcattttgttgatccgaagaaatctctccattgaaggaagtcacccctgtttatagttgaaattaaggaattaaattttggaactctccaagatttagttgtttgattttagcagcttgtcttctttgttaaagaaatttgctaataagagaatatttatttgttatttattctcttttgacttcggttgacatatttgtttcctttaagaatttgtcaacaagagaatatttatttttttacttctctttttactataattgaaaattttaattttatttggaagacaaaattttttagtcatccaaattttaccatgtgccaccttttaatatatgtcacatgtcaaatgtgtttaagacctatcacttgtcgatcccaaattttatcaattagggagccacatttttttgaagaccaatttagcgataatttatttcactaaaaattttgatatccaaggtgagatgctaagtcaattttagaattggattatgagggattcagtactttcctatggatcctaatggtccttattcaagctcatatcccttgatagaacattatttgagggatagttaggttattattcatatatgtgcattaagggttaagtgacccaagcccaaggtgggctcaggtcatttaagcctataagtaaacctatataaactcctttaaggatttagagatcgaatctttgctattcggtcttctaaagagaaaaattctagctttcatccacacaaagaagattgtaccatcttcaagctaatctctaagagagagccattagaccaaagaacgcaaagcattcaagatccacgtcaacttgtgatcatttggaattggtctaagaacattcagaccaaggtaaagttttttgagcacctaaatctaaggttcaaatttgtgaatgcttcccttacataaatttagagatctttaggatagttttgcatacaccccaacgatcgaaggcttagaataaagaagtccaaagattctaacaactagtgttggagccttgagttagggaaaagcatattaaaaccttactatggtgtgctcacttggttttgtaaattttttttttttttcatcccatggccctaagggatgaatgaatgaatgcatgtatgtcttgaggactattgtgaatggatgtttaaattttttgttcttttagataggttttttattaataccatatttttgcataaaaatagggtcaatatcacatcctaagtttgagtatatcattaaaagaacccttcaactaagcaattatatgtcatcttgtatatgcccaactttctcatgctttctttgagttttttttttatatttataggcatatttcatgaataatgatgaccttgaaatcctcttgggacatcttggatgtgaggatgaagggtgaagtaaatcgaaaaaaatcaaaacttcaaggatttctcaagtgcaatctatgttcaaccaatagaatgtttctattatgctccattagtgtacaatgcttctaagtaggatctcatcccactactccactcccacttgcacttacacttgtaattaaattaaatgaattaaaaatatagaactatatatataaatgatattttatatacaatagactataatttaatttgaatataaaacttatattaaagttaactacaattgaaagttaactatgcattatatgaaattgaataaacaattaactataatttaatttcagtactatactaaatttaaaaatactaaattaaattactagtttttattgaaaatgtactaattaggtgatttaaatataatagacatttaaacttataatataatgttagtaaataaaatgaagattaaacaatgcatataaatgaaactcaatatataaacacaagtgactataattaatgtttaatgttaaactattattaaaattaaactaataatttcaatcatttaaattattaaatttctactaattaaataatttaaattaaattacatatataccttaaaacaatttatcaaccatgatttagagttaatccacaactttaatatcaaattcccaaatttataaacttttgatagcaatcactaataaaatttgagtaataagagatcaaaagagcttcaattaaattgtgattgaaattgattaaaaataaagtattttttaaaagaataaaaaaaaaattaaaccaaaatagttattgaattgtcattttaacgttataattcatttctaaccatcgaaccaaaagaacgttttttccagttgggcacgttttctcttctatgtcaccaaaaaatgggagtggacaaaaacatcaccgatatatgggcgattgtttgctggcttaatctccactccatttcattttgcggtcagccgacatccaaaatttccgcaatatttctataatatatcgtaaaatttttgtcgtcagtttgagctacctaaattccttgcaccctcgtacacacaaaacatccgtgcatgcttaattactataatcattttgcttctttgctttctacatgcaattcaagggttaccctcaaacctaactttcttccacactcaagaaaaaggaaccacgaccaatctatacacctaactattattaacatttcttacgagtcttcaactaaaaatttaatcagttagtaaatctcccaaaaaaaataaagaaacgtttattttaaccataacaatcactcacaaataaaagctaagaggatatctgataaaacttaatacttattatcttttagttaacttaaaacttattatttaattaatttttaaattttaagtgttgaagttatctagtaacctaaaattttggattaaataggctgatttgttcggaattttatatatattttccaattttttcttccaagttttttgcctggatttagccttggtcatgtacatatttagcagcagtcatgtatacaattcaatgagtcagttatggacgctgaatctacgcagaagactggacagtggcttgcaaaacattactgcctatcgtaggatagtcagttatggaggctgaatttaagcagaagactggacagtgatttgcaaagcatttctgcacgtcataggatagctatcagctggtgatacttttttttcttgtgaaattcttgtcacaatagggccatcgtttactttgcaaatcggggagagtctacttttaattttttttttttttattatttttgttctactaatccatcatgtttggatgacattttgggaaccgccaacaattaaatcatgatgattgagtaatctgaaatcaataaatttaacatgtctctgtggcacaatatgacaagagaaatggggcaaacaggttgtgaataatttaggtgggagccacctggtccttatcgtttataatggctggctatacaacttgggaattggatattaagagtggtcgagattgcaagactaaagtgaaataaaatttaggagaaaacaaaccggctcaacctaaaatattccaaggcaagaccaccaaattgatcacacactttggtccatggacattgtcatattgttttagatggtgggggaccttttaaaaaggcagtgcccatttagttatgcatgtcgcactccaactgttgaattgtatagagtctattttaagctatgattagttttctccatcaattgttattgtcacggccaatgaaactattggaagtgaatagttacaggacaaatgggagcatataaaaaataaataaatagataaaaatgagaattcaataccccgaagtcattctttaccacaatgccctcgagtgaaaaatgattaggttttggggagtagtgagacacatggcaggtgcagagaacccccgccaaattctgaaccgattccgacagaacagaggggagaaaggttggctaaccagcgtgtagaagctaaggattatcggtgggcagagacgtgtggtgggtgtatatccctcggagggggatcccaaaagcttggctttcacagactcgagtcttaccacgttgtactgataagaagtccctacaagatcttctttgaacctctaacatccgcataattttcagagcagttatatcctctttttttcaaggtctgcgcgtggtgtgcactcccatcgcacagatgatgcattgatgcccaccatgctagtgcaagagacaaaactctaaagtagaaggaataaagcgtggggagaggagatttttttataaaaaataaaaaataaaaaaaatcagagggagaaaagaccgtttggatgatgggaaattctccagggcagaaaacaaacaaatagagggtaagaaaaacgaagtcatggcaagcaaagaaatgaattttaagaaatccaaatacacaagtatacagaggaagctttacatcaatataaatataaatatataatatataatatataatatattgcatcagcaagattttcaaatttaaatcaagaatggaccacatgaaggctttgtttagtgagattagatggtctaaactaaagaaagccttgttaggggaatcttgtaacagcaacctgagttcagataacgcaaggaagatagatggagctcacaacaatgacatccacatcagtctcagtatttcatatggaagcaagttcaacaataaaaaacctaaaaggggaaaaataaaaaatattaaatgaccattaggacgtctcaatataaatgtcactttcaagggcaaaccaaacttaggcgtctctttgacactataacaggacatgtggtattaattcagccacgcttaaagtaactttaatgcccgaaagttaccgtaatagaatgaattgggattatatgatttcaacgcaatctacctcctccatatttaaagagatttaactctaccatataccataggcttgtccttaaaaaccactggaaaaggtgaatatttttcatattctatacaccacaacttggccattctactgatgcatttgaacaaggtcctcttcatttttgcaatcaaaaagtaagttcaacgtccaataagttgaaagcgtctcttttaatgtccattctggggaattaatcagcctgatagagtccaatacagtagggcccctttgcttgtgagagggaatcttatcaaagttgttcaatatactaattagaatttacaaggtgcacatcagtttccaaaacctaggcttttgaaaagcgaaacctggggcaaaatggtttgtccacactaaaactggaccatctcagtcggatcctatctcaattgctcacaaccacaccataaagctagtaaaagatacttgtttccatgctgatcaagccctcaaaaaaatatctccttcaattttattcaagaaatagggtacttggaattttcagtaatacatggtgctattgtagttttgccagctgaaggaaccacctatccatatccc

SEQ ID NO: 11357 - DNA, 9121 bp, Vitis vinifera
  Intron number 2 from transcript GSVIVT01034328001 (locus G SVIVG01034328001) derived from phytozome v7.0 (chr-ID chr1 0; pos 18067537 to 18076657)
aaggaagatcgagagacccggccgcctctggagtaaatggttacaggcttacagcgagtccgtctagggtttaccgtctagggtttacattgtggttaacacttgcttctcaaaattccagaaatctttaattgcaaacagcaacctttaattccatttcatgatttttagatctttgataattcactgaattggtaagacttcacaaactccttgttcaaatctgtcctataatcaaataaattctaatatttttttccctaatatcatgtctacagccatttcgcttcatatttatcatccctgccattgctgatgctgttttgtatattgtccctggtgttgattatcagtaaattctcacattataaattgatttctgtactaattatgctatataatcatggtggtgttttgcaaatttggttgtttgggttgtttttttttctttctaatttctatctttccttcttttgccccccttttggtgccgtatatgcgtgaaagatatgttgtgggatgtgattttggaatcttgggatctgattaagcgcttgccggctgaagggattagaaaacccaaagcttttggatatagtctgcagtcatcgaaatggtggaatagaaaagcaagagaaattttgttggaattttcgatgagtgtgcaagaatttcccctaagagaaaaatgaactaataaattaccattgcctttttctatgcagaaagggattggcaactttcctggttctttgtcatgaaaaagttctagacaacagttttggttgtcttcattcaggttgagatataactcaagtggagtttctgttggaaacatattattgtgattgaatgatcaacttagtcatggctttttttgctggctttagttaatttatatctatacttgacagaacgacaaagacttttctgccacttctaactcctggaggcttattgctaggtttgaatgagcctatatatatacatatatacacacacacacacacatttattgatttgatgcaaactaattcattaataagagtttttaagtacaaatgattcaatgaaggatgagaaatcctttcaaaatatacaaagtcttaattaaaaaggagaaagagagtggactcctgaaaaggaacaagaggacaactatacatttcaagaatatctacattcctcaaagctgtaaaaaatgccctagaaaagaagtctagtgcttggcatcttgttttgctaaatgatggcaatgtgattagttgaatagggagactaaggtggtgtttgtttttttacttaattctaaaaagaaccttaatgcttaatagtgttaaatcttaggttgtttgtttttgtagtattttatttctattaagtattaaaaagtaaaaaaaatcaatgtgttattttttctatttagaaaaagttacatattttggctttttctatttagtaaaaagtttataataagtcatgaaaaagtagaaaaacaaataacttaaattctaaaactaaattgctttcagcaaaaagccaaaaaaacaaacaccacctaagagaaagatcaacccaagtcgctaccaacatttagaatttggcaaagccactcgttataaatccaaggctttttctctgaattagatacccaagatatcacaatagggaaatcccttccatccatatgttagaatttttttttttttttgataagtaaagcaagatatattaatgaagaggcagaaagttacaagtatacagggggtatacaaagcaacaaccccctctcaaagccaaaaaaacaacaaggctcaccaccccttagttggacgccaaccattccagaaaccctataagggacacacgctcctcaccaatatacaatctagcccagctccacaaactacaaacaaaagaattcttaagcttttggatatctaacactccccccctaaaagctagcctatttctttcattccaaaccgtccaaaaaatacacaacggaatggatttccatatctttttccttttctttcccacaaaagggcccctccagctagttaagacctcctttacagtttctggaaagactcactgcacacctgataacccaagaacaatatcccacaggactctgattactatacaatgaataagaatatgatttacagtttcttcttcacaaccacgtagaaaacaacaattaggaagctgccatcctcttttctgaagtctatcaagagtgagcaccctcccccatgtagcctcccaagcatagaatgcaaccttggttggtactgaatccacccaaatgcatttagaaggaaaaacaatatcattgggtctggccaccaaactataggcttctttgaccctaaatttgccattccttcctcccttccaacagattgagtcttcctccatagaaggcttgtaatccctcagaacatgcaataagttccctatcatatccatctcccaatcattaaagtccctcaaaaatcttagattccaccccccttgaccaaaattctgatcccacatctcctccaccgtcccattcctatgagcagccatagcaaataggtgggggaagttttgggacagccttgtacccttacaccaaacatcagtccaaaaattgattttgcttcccttcccaactatgaaccccatgttatcccagcaccaatcagtttccttccatatttccttccacacccccacgccgaaagccccataagccctctttgctctccaaccatgaccctcttgcccatatttcgttgttatcacttgcttccaaagatcatctttatcataagcaaatctccagatccatttaccaagcaaagctttgttcaagagcactagcttccttaagcctagtcctcccttgctcttatcctcacaaatcgcctcccacttgattagatgagctttcctttctgcacttccccctccccaaaggaaatctctttgaactttatctaatctcctagccactgacttaggcattcggaacaaagacatgtgatagattggcatgctagccaaagcgcttcttataagagtgattctccccccttttgagatatattgtcgtttccaccgcgctagtctcctcctcactttctcttccaccccatcccaaactgaagtggctttattaggagcccctaatggcaagcccaagtaatgagaaggaagagaacccaccctacatcctaattccactgccatctcctcaatctcctccaccacaccaactgggataatttcacttttgtccaagttaatccttaagcctgaagctgcttcaaaccacaaaagaatccagctcaaatgtgttaggtgctctttgttagcctcacagaacatgattgtatcatcagcaaagaagagatgggagatttttagattgtgtctcctatcaccctcgatactgcaacctgaaaggtagcctcccgcaactgcccttctaattagggcatctagcacttccattcccaagacgaagaggtaaggagataatggatccccttgacgaagccctttagaactcaggaagaatccagttggaacctcattaactagaactgaaaacttagctgaagatatacaactccacatccaccccacccactttgagccaaatcccattttgtgtagagtcttcaacaagaactgccaattgatgctgtcatacgctttctcaatatccaacttgcaaatgagccctttctcttttcttttcttccatgagtctatcacctcattcgcaattaaagaagcatcaaggatttgtcttcccatcacaaatgcattctgagttggggctaccactttgtttaacactctcttgagtctattagctaacactttagccatcaatttgtatagcccccccaagaggctaatgggtctaaaatctcccaaatcagccgctccccctttcttagggatcagaaccaggaaggtgttattgaggcttttgagaaaggagctttgctcatgaaactccttaaacatctccaagatctcctctttcacaaaatcccaacaactttgccaaaacgccatagtaaagccatccggcccaggggctttatccccactcatctccattaaggctgaatgaatctcattttcagagaacggaatctcaagactctctgcttcttgctggctaatttgatctaattggatcctctcaatatccgccttccaccccaagtcttctgagagcctctgttgataagcatttgcaatcccctcccttacctcctgttcctctaccagccaaaccccatcaattttaattctgtccaaagagttgttgttacggtgggcattcgccatccgatgaaaaaatcccgtatttttatccccttccttaagccatacctcccttgagagttgtctccaatgactttcttccaaaaggacccattttttatagctttcctttgcttctttttttaattctgtctcttccaaagacaatcttcttttgctttccacacggtcccaataatccacttgctgcagggctgcgcttttgttaccttccagatttccaaagacctctctattccaagctttcagtttctgtttgagctccttcatctttgctgccaatctatagctagcagtgcctctgacctcaatttccctccaccaactttggataaggtctagaaaaccctcaacttttaaccacatattttcgaacctgaagggagatggacctctccttagcccgcctccttctagcaaaatgggaaagtggtccgaaacaggacgaggcagccttctttgaatcatcccactgaacttatctagccaactaggagacaccaagaacctatccaatcttgcccaggactggttattcaggcccccgctccaagtaaacactcccccttgcaacgggagatctaccagccctaaatcatcaataatatgagcaaacctcctcatgatcggggttattctcccttggtggcttctttctctttgatagagggtactattaaagtcaccccctaggcaccaaggctcgtcccagattcctcttacagccccaagctcttcccacaggcaacctctttcctctttggtgaatgggccatagactcccgtaaacacccaaacagccccatcttccacattcttgaatctacacgaaagggagtactgtccctcctcccaatccacaatttccagcgaccttttatcccagcaaatcaacagtcctcccgccgccccatccgcatccaaagccctccaatctaagaatcttcccgagcctaaacttctcaccaccccctccgacattggctgaatttttgtctcctgaatacacagtaagtcaactttttgattccttataaatgtcttgataattttcctcttggacctgtcatttgcccccctcacattccaacttaatagctttagcttcattaatctactgcaagctgatcccctttgccctgtgaaaggcttttttgcttacatcctttctcatagttaactgagcactccagtctcttcaattccctttcaaattttgacttctccatcaattctttgctatgaattctctcccgtctctttcttattttgatcaagaagttcaaaatttccttttccaacccttctgtcgaaaaacccaaaaaatgactgaacttggccaagctgctttcttcccatctatcctctttctcagttttgacttcttgaagttctgtcctctctgaattccactccacccccctagccaaattggggtccttattgaattctaccaagtcccagcatccattgtcatccattccgggaccaacttcattactttcctttagcaccccagggtgatcgaaaggctcccccaccggagtccgatcaaaagaatacaagatgagatgagaagacccataacccctttccctctctatccttagaccagaatcatacctcatggcttcctctgccaacgccttgtctgttgctgaaagtatggctttctcccttgtcttccttgcttcctctgactcccatatgactaggtgttctccctctaaagagctcccgttgctagcaattctgcagtccagaagacttcctttctccaggggtcttttacctttgttttggaccatggactgacttgatctggccttttccaactcagccactgggcctctcccaacatgagcccatcttttgggccggctagtccctggtccattaggaatggtcatcctttcctttaatgtcgggcccctcactgcactcagccacatgagctcttctctaccccctttatcattgactcctgggcctgatctactttttctttccagcccaagttactctcctgccagcccagcctcttatttgaatttatcaactcctcgggccgttcaaagtgggccgtgggctgaattgaactggccccattcatcaaacaaccttccccgtcaaaagcccagctcttggacggcccaacctctagccccgccccttctttcatcactccctttagctttaggcccgaatgtttcggcccacagacccttctctcataacccatgggcgttgattgttgggcccggtcaactatcccctcccagcccataaccctcttctgtctccccatcccctcctctgacgataacaacacctcagtcttttcaatggcctattccacctccacgcgcgagccggagcgtgagatgttgtcatccctgacctccccccatcttcgactatcaaccctaagcttcttgactgacggcctgagctcccactagagggcgagggtgaaaacttcctcctcgatcccaatctccagcgtactcggtttgtctccgccgtccgacctaaccagattcctagcccattggagctcttccagcttcttcgtcttcgaatcgatgtcgatgaaaccaccgcattcatcccccacccttctcaacacagtcgggttccacaacgacactggtagtccaaagattctaacccaaatctcgttactttcttcctcctcctccctgcatccactctatgggctccatttctcgaaactcagccttatctctcccatcattttttcacctgatagggaaacccgttgagcttcttctaaatattcaaattccaacaagattctgcttctctccaattttgccagccctaggcttcctttcaatccccaagagctcgccagaaatctccctaatttttccaaatcttcttcatctctagacctagggttccaactcccgacaacacgatgctccaatttttccagatttctttggatttcctccctccataccttcacctgaactggatttataactctacagatcggtctcttcaccacttccgtgaacgttctcttcagatccatgtttccacctaccttttcttcttgcatatggttctttctatcgattgacctacgcagaatctgtagattttccgccattgcagtccatccctttttttctcctctaccttttgggatgtagatacagtattgttttcgttccaaatcagttaccgctagtcggaggaagcatcccgctttatttacacttcgcagcagagagaaggatctcccttgttccttccattccttcacccatctgtcttccttctcgtcccttatacagtggtttaggccctccattagaaaccctaaactctccactcccattctgatccaagacgagactccccctttgctttcctctataaatatttggggttttcctcttctctctaaaagctccagctcaaacaccttggattcaactgcgaacctgctcccccttcgcctccttcgagacccctccttatcttcatctccctcgccggcgtaatctcgcctttttccttcctcacaagctcgctcgctgccgcgctcactctctctctctcgctctctctctcgctctctctcacccatttttaatgatatataactttgtcactgataaaatcacatatgttagaaaaataaagagctttagccttttagcaaaccctttaagacaactaaaatatttgcattgatggtgaaaccctttctagtcagttttgaaaaagcccttagcactataatagtataggctttgatcatacctccaatccccatgtaacttgggttatccaaagcccatccattgaaatttaacttaaatgaatctactgcggcaaaatccatgtagggaacaaatccccatctaacattttagacctatataccaagttccaatcaagtggtaaaatagtgagaagagtacccctgaaatatgtcatggtagaggcctaaaaagagggatgaaaataaatcaagtcctaggtcatcactaaggttttccacttgttttaaaaagtccttgcacttctctctcaccaaactgtcgagatcaatgtgagataagtaacaaccaaagtactttgcctttgagaggactcctaaccttaaagaaaataattattatgtcactcacgcttttaagggaaacctcaatctatccctactagttttaataacccataccacatttctaatgccaccaaatattgggaaaaaggtgatcaatcagttcactactccctaaagacatagtgaacagtcaagactaagggctttataaggcctcctcacttgtagctattcattggcattgacctttgcttcacaatcaactatgcaaacacctttaatttatatgccaccttagatttctaaatggaattaaaggaaaaaggggttggagacacaagtttaggtagatctgaaaagaataattttatcataaataaatctgaggatgtcaatgatcaaactttctcatctattaaagctagaaatatgtacacataaataagagaggatagaagaaattcaaggtcctcaataggttacaaggacattgaatttttgtgattttatttgaattccactgctcctctctctctaacatacaccttcacaaacacatgaacacacaaacacatgttttttttggtattattcagattttaggagttattcctcatcaatatttttggtcatgtgatagtcttgtatcag

SEQ ID NO: 11358 - DNA, 3357 bp, Vitis vinifera
  Intron number 7 from transcript GSVIVT01028366001 (locus G SVIVG01028366001) derived from phytozome v7.0 (chr-ID chr7 ; pos 6678547 to 6681903)
cttacaaagcacacctgaatttcaggaaagatgtatgtaccggatcagttggctagttcattatgattttttcttctaaatggatgcaattttatctgcatacttccttgtctgtcaccccattctgtttttttcgtacctttatgggtattttattgccatggttcacatactttgacgtgtaaaaggcttcatcaggggttgagttggagtttatattgttctattctgcccagccaaatttatatggaaatctaaagtcccatttaaggttaaggtttttgtttggttagtggcacacaaaaaggtaaataccaacaatatgctatagttgagaagacctttcaaatcccttaggcttgattggtgcgttttatgtaagcagagtggagaatctattgataatctctttctgtagtgttcgatagctctaaggctttggcattgtctatttagacaagttgggattgattgggttccacccaggagtatatgtgatatggagctctagtaaaggcatcatcctttggcaaatagctaatcacacattgctttggattgtgtggtgagagagaaatggtagaatttgttaggataattggaggacgatagaggggttgtgagatttacttcacttctattcctctttagggcctcgtgcattgatgcttttaaatgcattcttctcaatgttatccaactcaattggctttcgatgtgtaaatcaaaagggtttggagatccttgagagaaaagacgtttgtagttttaaaccttttgtgtagactccttttatagtagaggtcaatcatattatgatcaagttttttttgtaattggggggaggattcctcatccttctcatgctttcattaatataaatatatatatctctcgtttaataacaaaaaaaaaaaaaaatattgttgtattgtaatagaaagatttacgttgtgtttgtttctataaaattcccttatgtaaagtgttattattgttatttgataagaaataatgatttcattgcattgaaatataatatacaaagaaggatgagaagttcttccaaaaagtgcacaatgctctatatgaagtctgataaaaaggtagataaatgtatactagttcaaaaagttatatctagctacaattcagggaagtataaaatctcctataaaagaaaccatatgtctagctccacatgtagcttatgcatctgctgcttgattgcttaagcgaggagcccaagagatggaacatccttacttataagaaatgtcaataatttggctcaaccatccatcaaacttccatggtcctctctctttcttatttgtccatggtatgacaatagtagaatcatcttttactagaaaattggaaagactggaagcatttgccagtaacaacccttccaaaagggcaagaatttcttccccaatggctaaaccctgacttgtaggtttagagaatgctcttaatactttgccatagtgatctctatgcaacccttcaatcactaatttcctcgagttgcccaaagagcattcatcaaaatttagctttaacaaaacccactggaggtgatgcccattcacaaagtgtctccttagtcaatctagtggttgtacaaactatgttccaatctagcataatgaggttcaaaaggatacttgcaaaaacttcactagtagaagctcatagtgaaggagagaagttaaacaagttccaagctgcttctagagtcctcaacctatcctaaaatctccttgcattcctttcccaccaaattgtccaaatcacagtgagacagctaaaaaatcttgcctcaaggaagtcccccaaaacctgtaaatgatattatcaaaatctcttccactcttctgagtagaactcaatcaatccccaaaagtcaataatctacttcataatgttaatgacgtagggctatgtaaaaaaacctgatttgtagggtccccactcgccctacacatgacacaccagtttgggctaagcacattgtatggttttctctgttggagcatgtcattagtaaagttcatatggttcttacgccctacacatggcacaccagtttgggctaagcacattgtatggttttctctgttggagcatgtcattagtaaagttcatatggttcttaccatgtccattctttctagatggagtgtgagaaatggagcacaaatagtatgaagtacgtgctctctctctctctgtgatgttttctgagtagaatttcatgaggtggcctatcctacctatcatgtatagtatggtagaagttgggtttggcttgtccaagacctcaatctatctgtaccctggtagaggttgattgagttgtttcaaccccttaatccaacattaactcgagctatcacaatactagcctgatcactcccaaggtcatggttgggcctggtagagatgggtcagaattttttgttttcataatacatccattttcttgataacatcatcaatccactttgagccttatgcattgtgactccttggtagtacgtataatttgaaaaagctttttgagctactttctagtcaagacatttctttttatgaaaatgtttgaaaagaagaaaaaattatattgaagttagagaatcatattatttttgcaaccttttgagttgcgaatctgagtaagcctgaacagcaaagagtactttcctcctacttctagaatgtcagaaagctggaaagacctttaaagttgatagggatgtatagttcatgggaccagtaataatctataaggaaaaaggctcgtgattaacaaatgcggcacaactaacaggttcatatgatgcatcctagaagtgtagtctgtgctgtttctttaatttgttagatattggattctgtttattgctctctgtgctatatgcgtttgattcttttaaacaaaaccatttcgacaatgtgtgtgtgtgtgtgcgctttcttctttttgttttcttttttcgatatgatctcttcattattatgcttgaggtgttcttttctattatatcttggatatgatttggtcattaattatggttgacacgctctttattgttatttcttggatatgattttatcattatttaggttgactgagacatactatgctgtaggttggaccttggacacagagtttcagttttattttggatatttccaacatagtatgattattgttgttattactattataattattttctgtaaacaactagatatttaacattctgctactgatatgctttcaaaataaatttgtgtggtaatggtccagctgaaactgtcatatacagaatattttactacatc

SEQ ID NO: 11359 - DNA, 6363 bp, Vitis vinifera
  Intron number 5 from transcript GSVIVT01016426001 (locus G SVIVG01016426001) derived from phytozome v7.0 (chr-ID chr1 3; pos 4037001 to 4043363 reverse strand)
cattccttatcttctgtacttaaaaccctttttcaataattctaaaattttaaatttgggatactaaaactctttataatcaattttaaaatcattataatttaccagataaatcgataagatcggcattcccagcccaccaagcaaaaccggtgatttgtttcatgactggttatatatattctattaaaaagaaaccctagtgaatgggtaaatcattcatttgtcaatggggatggatgtaatattaatcctcttctacttgctaatttgtaatttttcaaacttctcctagaagttattattattttttatttataaaaataaaaaataagaaatatattgaaattaccgctaagtgttcatttcgatatatttctcactctatatttaaaaaaaataaataatgataacttttatataaaatatagtaactttaatataaaaagtatatatataaacttaccttaatatctctattattttaaatcatttttagaagttattatttttctaaaataagacctaaagagtttttttattttatatagaagtgactatcaattttttttttttatttcaaaaacacataagaagaagtgtgtcaaaataaataaataaataaacagggtctatttcatcattttttttattctatttgttttaaagaaagaacaaaaacagttttttagtattttataaatttaagtgtgtttggttagttgtttttaaaaacatattttaaaaaataaaaatcttggataagttgttttataaaattattttttatattataaaatattgtaaattcaatttatataatattaatttaattcaattcaattcttataaaaatgaaaatatttgtgtaattacaagtaaattaaaaaataaatagtttttagtgaaatatagatattaatatcaattatgaaaatatcgataattatgaatatatcgatatttagattttaccaatatatcggataaaaatatcaatagatattttaacaaaaaatatcaatgaatgaaagttgataaaaaaatatcataaaaatattaagaaaaactcaaaaataatagaatctggtatttattgtaaatcaatgtttatccataaattctggtatttattggatcaccatttaagtttcaaattatttttaaaattacttaacttgtcaattaatacatttaatgcattaagtcttattttatttggagtttatttgtctaataaaaaatatttaaaaaaatgattctagggagaagtgaaacaatcaagtcattctaaatcaatttttatctataaatttctggttttaattgggtcattatttgagtttcaagttatttttaaaaattattaaacttattaatgaatccaatatattaaatgttgcttcatttgaagtttattttcctagtgaaattttgcaaaatatgattacatgcaaagaagaaactagctaattaagtcattcaaattgagttttagtccatgactttctaatgttactgagtttcatgactttggagtattaattaaatcggtttttgagttttaaattatttttaaaaattaataaattttatgtatcaagtatagtttgatttaaaatttatttgtttaatgaaaatttttagagaagttaaaaaaaattaaattcgactaattccaaataatatcatatttgaagattttttttatattggtattggatcatggagagaagagaagaatgatatcataatcaattttatttgttcttttttaatttctctatatttttattttattttaaaattttttggaaataactcattcttaggggatgttttgaaagtgcttccaaaaattgttttttattttataaaacaaaaaacactgaaaaaggcatttggcattgttcttcatgttttcaaagttattctctatattctcatattaagaacaatctaaagttgttttctatgttatttatactattaattaaacaaaaaaaaatcatcaaaaacaatatggagaacacaaaaaatacatagagaacaaaccctcaagaaatgcatcataaaacaaattgaaacaaactgcatatccatttaacctcacatcaaataaaggggaaagttcatggcataatatatatagaggattcttttaaccacgtagacgcgttttaaagtcataaaagcctctttgaaccctaagcgaataatatttacagggttggaagtgggtcattataaatatctacaaagttgaatgtgaatcattacaaatggtatcaaggttaatcctcaaccctggtgtgggggtttgtttcaccttataagtgtgtttgtctgtttggccttacaatcccatagaacacaacgaggacgttgtgtatgcatggggagtgtttgtgatatcccacatcggataagagaggaagttactagtgatatatgttaacccaagggttctcctaatcatgttttgatgataacaactcatggttaagttgctaatttgtttgaattaaaaagaatttcatgttttagtttggaaattcaaaagaacatccaagaaattcatcaaatgaccaatggaagcaagatcgacgcatacaaaagaccttttaatcttatgaaacatccataagatgaatgcatgggtgcacttaggattttcgtatcttttcatgcatatttaaaaactcggtttatgcattaaagttaaaattccattaaaactcgagttttaacaaatgaaccttaagtaaatcatttcaaatttgacatattcattgacctaaagacttttcctaagtgttagaagtgaaaggaatagaaaaatataggtttttaggcaaaaaatgtgaaccagtcaagggactggtcaactggatcaatcaattaaggtacctgtcaaccggttatgccttcccggtcgagggtcgatcgagagatgcaaaaaatattttctctctcttccaatagccttgcattcttggtcgatggttatgtcttcctggtcgaggtccggctaagttacggtcaaggctttattgaattgcggtcaaggcttgattgagtttcgatcgagtttcgatcgaggctcgatcgagtttcgatcgaggctcgatcgaggcctaacggtcacatgtcatgcatttattacccaacgactagtcaaccaatcgacccccaacttgatcggttaaggttactttttgacattttggctcctaaggctataacctataaattgagagctccatttcatttatgagcacaagaacacctacattcaatcgttttacctattagttcttcacctaaaagctcacatacttttcttggtgcattaaatcctcacttgcatattctttagtgcacccctgtcattcttcttagcatttgagttgtatttgagcatttgttgaactaggtcgagaagtttaaatctgtactttgagtgttttgtgagagttagaagtttcaagtgagtataaacttgaagggattgtgtaagagcccattagaaccgaaatccaagtgtaaaggtattggaagcttagttgaaactttaggtatagtggaaccctcactcgattaagagtttaagaagagtggacacagatgaaaattttgaaaaatttcaccgaaattttgtgaattgatgaccaacaacatgaaacaagcatgcaaaaaatcaatgaggccattttttggaaaattttggcttgtttcagcgatttttcattaaaaaaaaattggatttttactaatttttcacttcaattaatgcgcagtcaaatcagttaacgcacagtcaaagcctcaaaaaatgtgaaattgtgcatgaggtgggacttgaaccccacccaaacccaaaacaaatagagtcttatcttggtaaggctattgagctaacttgcccacttgataaataatagacacaagataaatatatagtaaaactagcataaaaaaatattaaaaaatattttaataaacaaattaattctaattattttatttttaaatttcatttaattaatcactaaaaatataaagcctattgaaacaagcatgcaaaaaatcgatgaggccattttttggaaaatttcggcttgtttcaacgatttttcagtcttatcttggtaaggccactgagctaacttgcccacttgataaataataggcacaagataaatatatagtaaaactagcataaaaaaaatattaaaaaatattttaataaacaaattaattctaattattttatttttaaatttcatttcattaatcactaaaaatataaaacatatcattataattttcttaacagttttttatatcatttatatattaattaaatataaaaaaatataaatattaaaaaaaattatgcatatatcgtcatttattttatatcatttaatacagttgaaattaaataaattataattttaaactgagatatattataatcaaatatcacaatattatcattgaataacatttgatgtaatttaataaattgatcaaatttatatttttttatgtacacatgcactattattatcaaatatgattaattatatcatatacatacattattatttttttatataacaactttaaaatgtctattattgtttattatatcatttttacagttttttttcaatattttcataagttttaatcaattctagactatcgaaattttttttcaaaatatccatcgatatatccgtaaaattgaagtattgatatatttgtgattatcgacattttcatcaatgagtggatgtaggccactataaaatccgagtttgctctctctaacattattttctttatatttgtgtttttttcttgaatttattgtatttgaaaaagaatttttaaaattcaatttaccattttcctttatggggtgtttttctaattaagattagcctttattttttcactatatatgggttattcttaaccttgcaaacacgttttaaagctatgaggcctctttgggccaaaagcgaacaatatttacatgattgggtgtggatagttacaaatgttgatattatataagtatgaactcctcttaattttgaaaacgtgttttaaatttgtgaggactccttaggtccagagcaaacaatatctacatggttgagagcggatcgttataaattgtatcaaaactgatcctcgaccccgatgtgggggtttgtttggccccataaaaggtgtttgtttatttgatatcgcaatcttgtggaacacaacgagaatgttgtgtttgcataaggagtgtttatgacatcttacatcggatagggggaaagttcctaacactatataagtataaattcttcttaactttcaagacgtgttttaaagtcgtgatggctccttgggtccaaagcgaataacatctacacggttgagagcacgttgttacacaccaatcccaatttactatctagaaaaatgttttaaaaaaaatcctatttctttgtccaaaaaaaaataaattggcaacaatagtggtcgtgggtgatgctagtgacgttgcaatttgaacataaatgaggtaacggaggtgaatatgatgtagggtatgattatgggtgatttttaaatgagaaaatatatgggaaagagagaaagaaagagagagaaagaagtgagggaaattgagatgaagagaagagaaaggggaagaggagaaccaggggaggaaaccaaggtaattagaaaaaaagagggaaagagatatcataagagagattttaagagaggaaagaagaaagtgtataaaagaaagaaaaaaaattagggggtgaagggaggatagtgcaaaaagttaaaagaaaaaaccaatttttatatttaaggatggatacaatttttttaattttaaaattatgaaaatctacaaattttttatctaaaaattagttatttttacaacattaagttgattaaagaaagttacaaaaatacttgttaattaaattattttttactatttcaatcaaacattttttcttttagaccaaaaaattgttttttggaatttagttcgaaacataattttattactagaaacaacaaaaactattattaaaaaatattttttaaaactgttttaaaaaacacaggatttcattttttaaaaattatattctatttcactttgtttttaaaaatcgtaaaataaaacataacaattaaacaatataatgaatttttaaagacaattttctatttttaaaaataaaaaataatttttaatcacacagtcaaatgagctccaaattagttcaacattttataattttttatatttttaattta

SEQ ID NO: 11360 - DNA, 7342 bp, Vitis vinifera
  Intron number 3 from transcript GSVIVT01029816001 (locus G SVIVG01029816001) derived from phytozome v7.0 (chr-ID chr1 2; pos 15245403 to 15252744 reverse strand)
ccacagcttggtcagcttacaaatttgcaatctctgtgagtcatatttttataatgaaagttgtttgccatatctgtttgatgttcaagcatatatgcttgttatcttttgtgttcccttctgatcgcttttccccccattacagccaaagccataaattacaaggtttcatttttgtgtttttatttctcattgatatgtggtaatatttttagggacaattgtgttttcaaaccatataggtttgataattaaggtaaagtcctccaaccacccataattgattacaaggatataagatagtaattgacaaaaatacccatttgactcatttttgtctttattctaccattcttcacatgccactattctttcttatttaaccatttttagttttttcattatttgtttaaactcttttataaataattgaaaaatcaatatttattttttatttttaaattttaaataaacaaaaattatattaatgattcacagactattttggaaaatactttctaaaaaaatattaatttaaataaataaaaattatcttttacatttatttttatcttttacattttagaagtaaataatttaataattaaaacactgtttaaaataaatatatttactattttaatttcttttatactaaaaagtattttaaatttttactattataaaataaaaagtttaattttttttaatcttcttccttctttattttaataactttttgaacatgacttttaattataagttatatgaaatgttacaaatttgtttactaaggatttttttttttaatggtttgaattaattgaaaatttattaaaataagaaaaaggaaaagaaagaaagaggatggatgaagagtttttattttaagtattcaattaaaatattttcatatgacctaattttagaagtggattatatcaatacatagtaaaattgaatttttcttatataaaatggttgaaagacatatttacttattttaaatgaaaacaactagttaaaaattatatagattatatttgagtttggttttaaaatatttttctagtttttattttttattttttatttttatttttaaaaataatttttattttctatattgtctctttttgaaaaatatgtttaattaaaaaaatgaaaattatttaaaaaaatgaaaattatttttaaaaatgaaaattgaaaaccttgtttagtactatttttttatatgaaaaaaaaaaatcatttattcatttattgtgccactgtacaattgtattatactaactgtacaaggggaatgtactaagtatacaaaggtgtacaagactaccatttgtgaaatattataattgattatgagtcattcttttatttttcttatcactcatgaattgtacacatatgtcatgcactttatttaattcccacatggcaattccaatactttccccaataatgatatatggggaaaaaaaaatttaaccttaggtcatccaccatcttctcaactaaaccattggaaacatggttaaatactcctacgtcgacacataacttagaagggatatgaaattcatgtcattgtacaagggtattatactaattgtacaaggaaaatgtattaattgtacaaaggtgtacaagattatcctttgtgaatgattttaataaattctaaaccacttttttattttccttgtcacccaaggattgtacacctatgtacacctacttggacatataacttaggagaaatataaaatttgtgtcattatacaatgatattacactaactgtacaaggaaaatgtgccaagtgtacaagggtgtacaaggctcctaataggttttgtacaattttaaacaacttgaatttgacattaagacaattattgatagtttttttttttttaccaaaatatgtcattaagacattccgtacaaaaattaacatataggaaataaaattaaaatcaatcgtgtttgaattgttcattataagtaaactaaatgaaatatatatttttactattttgtctttataaacataatttcattgttatcaatagagattaaaaaaatcatatttaaatggaattaaaaataaacaaaaaatatttttataacatttttattttttaaaatcattaatttaaattatgaaattagttttaaaattaaaaatatttgttgtaattatagttttgaagattgcatgatttttatcttattactttgaaaaaattgctttaataagaaaatatttattttaatggttttaaatatttaaatctttattcaaataaatattgtcttcttgattaatagatatatatatatatatgcatgtgagtgtttatattattttcgaaataatatgagaaataataaacaccatgtgtctaatttgcaagttagacacatgaggtatttcatgtgtctaaaaattatatgttctataaaaaataaaaaaaaatatttgatgatatataatttacaagttagaacaaacaaataatactaatattttatgaggtgtttaaaaattatttaatatatatgagaaataatataagtttgaaataaagaataatatttattatatattatgtaaattttcaacatattttaaaaatatttattatatattatgtaagtttgaaaaaagaataatatttgatgaggcatttaaaagttattcatttcaaaaatgcatttggtaataataatttttaaccatatttcatattcaatttgatgaagaaaaattattcaacttggttccactattaaataggtgagagaagggtaaaagagtcaaagagagaatgagaaatgtgaggtgattagttagttttttcatttaatagtcaagggttttgtagggattttttaaagacaatatccttcctctcaatttttactcattcattgggtttttggtttaatcacgagtgataggaggaccttacctcaattacccaacctagcggggttgaaaacacaattctcccatatttttatgagctttactttagtttcttgtagaaatatatagccttgctccttagaatggaaaataaacttcaacaattctattggttacttcaataataatgataataataataataataatttcttcaataaagaagcatgtggtttaatgttcggttgtatcaagtttcaagggataaatattctcatttgttcttcttatgtgttcatgacttacattaagaattcatatttttcctggttacagattctgtcccaacattaaggtttcacatagagaaatgaactttaagagcttgtttggctgtgtttcacattttatgtttctaatagttagaaagcgaatacaaaatagttcaaactgatgctagtcaaatagaatggggaggcatgcttttagcaattactaatattggagaagaaaagttttgtagatattgtagtagaactttcaatgattattaaaagaaccttagttttcagacttagaagtagaagcaataatcttagtcttagaaaaaattcaactatttctaaatcaagaacaatttaccttaagaactgattgtgagaacatttaaaagttttttgaaaataaaaactcttcaaaattgtccaccaaaagatggataaagtttcaaaactctttaattgattttaaacctaaatttgaacatattaagggaaaggataatatattagaagattggttaagtagacaagtaattgttaataatgttgatgatactaatgattgattttattttacaagaaaatggctcaaagaaaacccactagagctagaacctttcaataggaaaccatatgtctgaacgaagtgttgaatccaaacttaaggtttaactctttatattctcaaaacctttttaaagaacataatgttatagtagataatttttggtctttgaaaccacaaagttttccaaaccaaaatttagaatatgcttatggaaaaactatgttagctttagcccaatatttacaaaaccttcaaaaccaattgattactttaaaaacccaaaaatttcaaacctcaaaatccaagaaaatcaagaaagactgataaaagatttgaaaaccagtacaatgtcaaccagttgtttagatagtcaacctgaaatgcttaatttaattaggaaatcagctcttctgtctaaacaatatgaaaaacttcttgttaaaaacctaattggagttgataactactctttagttgaaactttctttttgcaaacccaatataaaaatgtgtttaaaaatcaagaacttttatacaaacattttaaaaccaaaatgtcgaaataaaaatagggtatatggcatatcatgaccctgattttttatttgttctatacttagtttatgtgaatatgtctattgtaaataaagatttttttttttttttttatcttgtaccccagtttatggattagggaattttaaaaaatattttcatgaaccacgtatctcaaatccttacaaattttctagaaaaactaaaaaatattttagcttatcttttcaaaaccgaaaaatagatcgacatttcttttaaaaccattccaactttatttcaaaccaatggataaatagtaccagcctatcaccatgtttatataaaacacaataaagaaccgcttattcctcgataagaactagaatgggaaataacctgttcaaatgaatttttagaatcttttacttgttttcaagcttttcaaatttatgatcttagaccaacctaaaataaattatttcatctcattggagaaacaaaaaccatgtctatacggagaaataaacctttagaacacattattgctccaaaaccttttgttacccttgaagaacaagattttataatcgagctcactatagaattactagaaccatcttcttacctcaacgatgacacattattttaggaaaaccttgatgaagaaagttattacaatctacaaaatgcgatggaatggtgacgtcagaaatgacgacattgaagtaataaatgcttcttcgactacaagaattcaatacaacaatagaagtatagaatcgacaaaagatctaatagccatgtatactgcatgtgatggaaaagaagaaaaagacaaggaagagactaaacatgcggtaaataaagaaattagggagaagaaaggaaagtcaagacctcataaacagttacaaaaatttaaaacaagatgaaatatgagacaacaagattaacataaacagaattatagaaaatttaggacaaaatttacacaaatataggaaacttgaaataaaatataatacatataatatcatatgtcaatacatatcaacaaaataataaataaaaatgacaaacatatagatgagcagaaaaatttagacaaatgtatttacatacaaaatgtataatataatgaataaataaataaattaaattgatagagctctaaataaaatataggataaaatattcaactaccaaaatgctcacaaatataataaatataaaacaagataaatctaagaaatcctaaaaggaacaaaaacatgatacaaataaagagatgaggaagaaataacttacctgaatgtagccctaaatcaatcccaactctccaaacctccaaaggcaactccaagatacgaatacagtataagaaaacaaatggacagccggtaaatacacgataaggaaaaactttcactcaccaatgatatacaataaagaaagaaagaaccctaagaaaagtaagagaagaacactaaaaaacaaagtagcagtacctcgcctctctttggttatcctcccccctgcttagggcttatgtgccctttaagtatggttttcaagacttcctccccaagaaatctcatggacccctgcaaaacaaataaagcccaaaatgaggactgataacccaagcccaattaaaataaaataacccaagtccaattaaaataaataacccaagcccacaacttaaaatctaaatactcacaatctaaaaatgaaatagcccaaacccaattaaaataaactaacccaaatccaataaaatagcctaggcctacaacttaaaatctaaatacttataacccgataaaaataaaataactcatatccatttataaggaaatttgaatatcaattcatgcaattttggaaaaaaaactaaaattgaacctcatgcaattttctaacaaataaataaatttataagtaaataaaaaaatagataagtaaagaaataaataataataataatatagacattaaacactataatcaaaattcaaatgttaatctagtgtaattaatgataaaaaaaaaatgaaaagttgaaatctcacgactaaatattgaaaattcaatccaagcaataaaaaaaaacaaaaaaaaattaagccaaatactcacttaaactcataatcatgtaatcacaattcaaaaaacaaacctaagtgcactaagcctaaagaatctttcttataagtgaacctaagtgggttgggtggaattacctaaaatgtacctaagtgatctaaatggaaaaatctctcagtgaactaagtggaatctaacctaaagaggtgcctaaatgggcataggggagcctagatgggcctaagtgggcatagtgtcctaggaaatgcctaaatatattgtcctaaaagggttaacctaagagaaaaaggaaaaagaacctagatctaactcgaggttgccaatggtcacattgaagggccacataaatccctcaatcagagtctccaaagtggctcaagcaagtaagctacatgaatagcaatgggtcattgggaactattgtggagtattgaaaaagcacttaatagggcataagagaagcacaagaatatacctagtatcctatgtacatggaggagaaaattgagggtctacatgtagtttgttatggatgtagaaattcaattgcttttgttgtgaagccattgttgcatgcttttcttttttagttgcatgatccattattgcaaatattgaatatatatacattcactagtcatacaatccatgccttttgagtctcaattttatattatctaccccttggagttggccatttgattctgcttattgttatatatattgaattataggttatggatgttctatgcctttttttataaaaaaaaataaaaattaaatgcttggaatatgcttttgttacttctttttttgatccatgaatgatcaaaattaaacttttatggcagggaactttacagtaataacataagtggaaaaatac

SEQ ID NO: 11361 - DNA, 6980 bp, Vitis vinifera
  Intron number 4 from transcript GSVIVT01008876001 (locus G SVIVG01008876001) derived from phytozome v7.0 (chr-ID chr1 8; pos 3017251 to 3024230 reverse strand)
tgattttgcagaaccttttgaaggagggaaaggtaaacacatattgaaatgtgcttattttgttttcatttcgtttgaatggaaacatggtaaactatttatgtgatttaaaacttcgcactaatgatttcaaaatattttctttagcatggtttagggaaaacatagttgtttgatcttgcatggttgggccaacaagataagttttgtgctatgcactttgtttcctgcttagttgactcaatttgtcatgaaatttggtgggaaaagattgccatcatttggtagttcatattatttagggtatggtgctcctctttactaggctataattgcaaatttattttggttggtgtctaagcagatacacttcagaaatgtttcatacttgtgatgggagttctgtaaaatttagaaagacatggaaacataggggaaggcatttatgaaggattaattgaaattttttaggcatatatgcccacctccagtgttagacattagcatggattgggctgctggttttgaagcttaagtgtttacttctttctaccttgtgatgtatggttttgtgttttggcttggttgaagcaggttccttgattattttcttgatgatctacattctgtaggatggttttcctttatgttgttttcatttgagtgctgtatacttcatgcacctgttccaaaactggctggctgccctttcccctcaccttggcacttttggtgatctctttcttttcaaaagaataaaggcatatatatggtcaaaagatgatgtttttaatcttaagcatataatggcatgcttctcatgatttcatacataggcatggaactagcttaagcacatagaccttgaattatccatggataaaaaaggcatccaactaaggcagtttagataattacatgattaagacatatttatgaatttagccctagatatttagatttgagcacattctgcgttgtaaaatataaatatcatagacaaattttgaattgaaatgaatcaaggagtgataatttctggttttattgtggcacccataagcaagcttaaaccacttttttggtgatgtgatttgcaatttgttgaatactgtaataatttatcatacttaagttattttaaggttttctaggatgatcctagtcaaaacacctggaaacatttactcaaagtaaagttttttagtttagaatgcactcttcaatgtaaattctcaagttccacagctatcttggggttatatttcattcaattaagaaataagaatgattcagatgttttgttggaaacatttggaaatccaaaagaaggattatgcatactaggtttctccctcctgttatgttgggggctttgttgatatcttttcattttatttgcctatctttaactaaaaaattatagattatggactctgttgaacaactgattttcctgaaaatttaagcttataggatttgggtttataatgcatatcatgctctttaacgccctttctaatgtgttgcttcataccgatatgtggatagatgcataagctcataggcaaacaaccacaattagcctcctatgggccttgataagttagggaaataaatatgtggtaagatttgaatacatgacctcccgccaaatggggtttttgataccatgttgagtgagagaaagaaactagtgttttgttcataaaaaaagtgtacatatatcaatcccccttgaaaaaaaaaattgaagtaccttttactaaataactactcaaatctttagtaaatacatcatccaactgatctttagacttgatgtaaggagttattgcttttttgctcatcacactctcataaaatgataatccatctcaatatgtttggttctctaatgaaatatcgggttattggcaatgtgaatagcaacctgattattacaatatatagctatgtgcttttcaaaagaaattccaagctcttgtaaaagtttttgaatccacattaattcacaaactgtatgttccatagccttgtattctgcttcaacaccagatcttgctactacattatgctttttacttctaagtaactaaggtacaatacacactagtgggccttttgtcagttgaggatcttgcctagtttggatccaaaaactcacaacatcaaggtctaagttggaccttcttctgtagagtactcccacacttatagtacctttgagattctttagtatcctacacactgtttctcaatgaatccgcttaagtgctatgaattgactcattgtattaataggaaaagtaatgtcatatcagatgactctcaaataaatgagtttggccactagacttcgatatcttcttttatctgaaaaggcaaggctatcatttgcattaagattcacattttgctctataggagtgttaattggcttcatttctaacatgcgagtttcattaagcaaatctaatacatacttcctttggagaaaacaatctcacctctactatgtgcaacttcgttgcctaagaagtaacacaatagcctaagatcctttgtttgaaaggttttttttcaagtaacctttcactttttcaatacctataatgtcacttttagaaataataatatcatccacataaattgagtatcattatgccaatgtccctcttgagaacaagcacagagtggttaggattacatcttctaaaaccaaatgatagaaaaatagtactcaacttatcaaatcaagcttgaggagattgctttaaaaaaaaaagattgctttaatccataaatatccttatttagtttgaaaactttaatcttctaaaaccaaatgatagaagaatagtacccaactagtgatgagtttggaagaggtagagattgagttggatctgtttcattgtctctagctagtcttttccgttgatacacttttaatgatttgccggtcttagatagaacattattagtaacaacatgaagaggaacaatattagactgaaatgagttattttctaattgtaaacatgataagaaaaattagttccaaagaatgttatgtcaacactaataaagtatttatgagacataggattaaaacatttatatcatttatgagttctagaataccctaaaaatacacctttgatggatcaaggatcaagcttgtctttattcggagaaatattatgaacaaagaaaacacattcaaagaccctaggagggagagataatagggaacaatgaggaaataacatagaatatggagtcttttgatgcaatacaaaagagggtaactgatttatcaaacaatatgcaatcaaaatagcatcccccgaatcaaattttggaacatgcatatgaaatattataaaacaagaaacatctaacaattgataattttccttttagaagctccattttgttgggatgtataaatacacgaaaattggtggacaattccattttcaaaacaaaaagagaagaaaatgatcaatagaattaccaaactgattttttatttcttgaaaaaaaaagtttacatacataaggtacttcaaacctttctttaagcaaaaataaccaactgaagaacaatcatcaataaaactaacaaagtgcctaaacccttgagtattggggatgtgacatggacctaaaacatttaaatgaatcaaagtaaaaggactaggactcctattactaactctagatggaaaagtaacctatgatgtttgtcaagttcacatgacttacactcagttttatttgacaactttgaggacgttcccaatgactgtaattgctcaaaagaagcatgatccaatctgtaatgccattggagaggagtaacgaataaagaaagagcagcaatatctgatatttatcttccattagactgaagtatagattgactattgagataataaagcccatgctggatatcatgctctttaacaaactcaacacataggtttggaaactttagatcatgggagacttgactttacaagcttttggattggtgaaaatgcaattagtatgtttaagaaattactgattatggatcattggattgtataactctgcttcatattctgatgctaatattatggggtattgtgctttaatgtatttgatatgatgctaaggtgctaggtcgctttctttggttggttatcttcattttcctgtgacagttttctctatgttatttgctttgcaatgtaacaaatcctaaaagcctatcagaattggcatcaaactttgttcaaactatttgtttccctccttgttaggacaaactaattatttctttttgctattttatttatttattttttagccacatgttagcatatgcctacacattttgaattcagaccaccttatccacatcattactgagttggaccgtctagaaaatctgatttccagcaaattgcctctctctctctctctcatatgcatgcagcaataagatgctttttgggtcatggtatttgaatacagttattttctagtgaagtaatgcggtactgtcgagtactgcttattaataaccattattctaataaacttagtgataaatatgtttcatgaaggtttgaagttggttcaaggcttaccacttgggaggaaaagattgttttgaaagaaacatttagtcaagctaattctgaatagtgagaagtataatccagcctccaggacaagtattggcgtttcttcatcagttagactctgtgattgtattatcatcccttgggataaggaatctattccttgccataattctcttgttggctggtttcccatgtttattagtttttgttccactagagttggttctgattagtgcctgcctatttgagttgtatggtcttgatgagtctagagtcaaggttagtctatggggttaactctctaacctatataagttgttattgttggtggtgtctacatggtgatgttcatattatgaaggaagaaattaataaaacagaaaattgtttgtgaaattagtgctgaggtttttttttttgatcagaaacaagaattgtattaatatcgtagaaagattttatgagagggataagacattcttcccacaaatatacaaacctgatctaaaccactaaaaacttccgctatacaaggagatttgtacacaaagatatattacaaaagaatgtaccagaaaaacctctcctaaaaaaaagctaggctcctctcaatggtattccaaccctagtggtgtacataccgctagccaattgagttgaatgacgtttacaggacaacctttaaatttttcagtacaagaggcctacaaagaagtaaagaaatgacataaatcccatatagtctcagacgtcctccatttgtccacaaagatcctaacatttctctcttgccataccatctagatcaaagtgagataaataatcttccaaagtgttttgcttctagtggagttcccaaaaccatataagaaatagatatcataccacaaccccaaagcaaacggacaatgtagaaataggtggtcactcatctctccactccccttacatagtatacaccattttgaactaagagctttggaaggtcttctcaactaaagcgagtcattggtattcacctttttgtgtgcctttaaccaagcaaagaccttgaccttagatgggacctttgatttccaaataaaattggcaggatggaaaggagctgaatttgataaattggacaaagcaaggaggaaagaaaattagtgcagagtttttctgataggaaataagattgtatcaaggagcagctagaaaatggactgtaatgtgtatacatacttaaaacatgagttgtgccaaaaaaaaaagtgaaaaaaaaaagaagagaatctcatgccctagtgcctccgcatacttttaattctttttagtattttttcattttctcattgtggtacattaaatcaaacccggaacatctatgttattcccattccaactctttgcacttgagccagcactcaagggtcctttgcattcttctcatggagcacctcctattcaaactggcatccatgctaacattccaagtccaaacatatgaagatctgagcatgatccgctttttgtggaacttataagtctgaacccttcaagcagctgaattacttagtgttatgctataagttggcagagttcagctgaaattgtcagctccattcttagtgattactatgatttattaccaaacacttagcatgaaagatttagccttaaattatgttatcaaataagcccctaaatttcccattgaaagtctggaagttgttggctcactagcgataagagagatttttgtaatttgatttagttttgagatcttaaggaatcccatctcaggaatatttttacttggttggagatattcttgagggagaagttattaccattcttctttccccttcaattggagggtctataagttgtattctgaaaccatcctggaaatcttacttagatcccccttaaatcattccccaccattctgaattccctagcacatcgaattgaacctcatctatttctatgtgagaatatgtggcttattcatattgatcaaaaaaagaaaaagaaaaaggtgtattcacagttcttttgaattttccattgattgatgttgaaacgagtatggatggatggtttggaaggttttagttagtgaaaaaatatcagtttgtgaaatgtaaagagtgaaatatattggtgcttttcagttcacttgagagtcatttatgatgattttgtttataacatgcagaggataggtataaaatacctttatgaattttttcaaccattgcctttatgatagttttcttttccctttcttaattctttcttgttcgcctttctgcagggtgcaactgcttctccttcccggattgctgtttc

SEQ ID NO: 11362 - DNA, 11742 bp, Vitis vinifera
  Intron number 29 from transcript GSVIVT01029720001 (locus GSVIVG01029720001) derived from phytozome v7.0 (chr-ID chr 12; pos 13732939 to 13744680 reverse strand)
tgattggaagtgattaggctgacaattaataaatcataaccaatcacactaagagtctgtttggtactgattctataaagtgtttataatcttttcaatacttgaaaatttttatcattcaagtattaaaaagactagaaacgttttctaaaatcattctcaaactcgctctaaaagtctgtttgacagtatttttatgcgaaatgtatttagtagaagtgttttttttttttttttttgaagtgtttttagaagaataacctatcaaatgtttctttagaaaacactagaagtgattttttaatactacaagtaatttttcacattttaaaaagtgtttcttaaatttttgtcatacaccaatttttttttcaaaaacattttttaggcaaaaagtgttttctatattcatcatcaaatgactataagtgctttctaaaatcatgccaaaaaaccaacaaactaggtatttccattaaaatatcttatcaatttccttcaaaattttaatccatgatgaaaactaatcaaaactgaccaagagtggaatatctctaacaacttggattgggcttgcataagcccattcatccacctacgtaagttccagctcggctgcaagacaacaccattaaacaccaactagaattggaccaaatggagcgtgaattccctaaccgcttctatagcacccgatgaactataagcatgatggatcttaccaataccaaacaatagaaagacaaactagttgttgaccacgtcaatcattggtgttccttaaaccttgattgcaagtataaattgtccaaggtgttgggtgtggaaatgtgcatacaaggcatgcattagggtcttttgtacattctctaagggatatgaccccgcaccttcgaagagttggctacatgagcacatgacataaaggttgttgtaaaaacaaaagtaagtgaaaacatgtctattgaagaacttgaagatgatatcaatgggggcaaaaacatcaccaacgattataaagggagtgtgtcatcaaatttcactacatttgttttcaaaccttggcacttcattgttgctccttaaagcatgagcctaaattgcatattgctcctagcctataagagcttaaattgtaacaaaaagaaaaaaataatcaaacttatgccaaaggaaaaaaaaaaaaaaaatcttttttagcaaacttctttaattaaggaacaaactctttgcattagagaagtcaaattcaaagattctaaatttaaatctccaatttctctaaatgtaagtgtttttctgtaacatgaagcattatcaaaagaaagatgtaactcaaaagctaaatccacaaaatgaagctttaaaagacaggatcaaactccaaatattcttcaacaaactcatggaagaatatcaaaagtgtcattcatccatcttcaaagccaaagaagacaaagtcgggttcttcaggacactcaaggagattttagataagtttaattgagatcaagtcatcattgaccctcgattaaactttactcgaagaacacatgtttaccatcattggattaaaatcaagtataaactcagtacattcttcaacaagcttatgaaagagtatcaaacatgaaacaaaagtgttattcatccaccttcaaggctgaaaatcaagatatattcaaaaatccttattttgttttccaaaatacttaaaaaatatcttcacaagtttggttaaaaataaatcaactttgatccttagttaaactttgttccaagaacatgcatttattgttttttaatcaaaatcaagataagtgatgctccttaaattatgagcctaaaatgcatatcgctcatgacctgcatgagcttaaactgtttacaacacaaaaaaaaaaaaaaaatccactaaattgaaaacttgaaatagtgacttaggcaaaagttatgacatatgctcgtaagattaatttttagtcttggtaatagttagaacatttaaaaaaaaaaattgaactatgattgacatgatccattttctttgaaaggcatgtaggcaatttatggaaaccaccttagtttagttactatcacaaaataaataaataaataaataaaaatgaataggaaaagaaaaaatgtgagtataatttaaattacgaagttggatatcactatatatcagggtcaggctaattcgcatgagtgaaaatctgagcactgaagccacattaagtgtcgcaggtaacaatagcatgcattgtcaaggttatgacttgcctacataggtgtaagtgtaattccaattttaatgaagttttgagatataggtatcactttaagtcaaaccaattcacatgagtgaagaccttagcacttaggatgcattaagtgccaaaactacaatgttgcgtaacatcaaagccatgacttgtctacataggtgttaagtgtggttccaattttaattaaaagttaaagttcaaacatcactatatacccaagtcaaaccaatttgcatgactgaaaactttagcacttaagttgcattaagtgttaaaagtacaacattgcacatcatcaaggttatgacttgcctacataaatgttaagtgtagttccaatttcaattaagttttgagaagttagacatcactacacttccaagtcaaaccaatttgcatgagtaaagaccttagcacttaagctgcattaagtgccaaaagtacaatactgtgtagcatccaagttataacttgtttacataggtgattgattgattttgtcatcttttatcacatcaaaacacaatttataagctaattcactattctataatagcttgtacctgataaaaaatggttttaatacaaactttcatagtgtaatggtttttaagtgtcgtccattaggatggattattcttggtaattaaggcttgaatgagggaaaagaaatgattgtgataaagtgaaattgatttgacaattcatggtgaaaattcaaaataacaatgatttctaattgagaagaacaaaagaatgtaaaataagagaaaattaagaaggaaaaggaattctcgaagttaggattttctaaaaaacaatttccatggtgattagatgtaaagatctatttttcatcaagttagattaaaaacctaaattctcatctaaactgattttagatttagctttaagtctagacctaatttctcttcaaattagactatttaatccaagagatcaatttaaactatatattcaattaatcttaaatcatcttccaatgattcatacaatgcaactattcgatctcattaaatctagctttgagaaattaatgaatctatttagtttgcaatgtaatagtcattcaagataatttgaagagaaaaatcctcaaaattcaagtaatcaatcaattggatcaaattactttgacaattaaagcttatttttctaattcaccatggatcttgcctctagatcctcattcctttgagaaaaatgagatttagtcactcatgcttggagatttagtctcacaaggcatgtttggctagtgagaaaataagagaaaatgagaaaaaatagaaaattctattaagagagaatatagaaaattctacaatcaaaagtgtctaaaattatttttttaatgagaaattcaagtttctatttataggccaaggtcaagtggacacttgacatcatctaaaaagtcttctagaagtttctctattaagcaatctagagtttaacaacaaaatgatcatttcgcaggagcttagcaatttcacatggtcatgtgaaataagaggagtaacaacaacaactttttggaccatttcacatgattgtgcgaaactttcgcatggtcgtgcgaaatcaacttgcaaattctccttagcttatagcacaaatctctcttctagtccatttcgcacaatcatgcaaaatattcgcatgatcatgcgaaattgcaccatatgatttttaagctcctctttggtacttccttcattttcttcttttgactccactttaactacctccaattgactccaaatcccaatccaattacattgcctcttcctcaaaagattatttttccttttcaatttcatttctttcttttgtcactcaatgcatcaatatcaccttgaaatagctccaaaactttacaaaaataattagtatctcttgcaagggcaacaatgtattaattgggtatgttaggcataattactactcaaaatatatgaaattcatgagaattattttttaaaatgtattctttttgagtagtaatcaataagtattaagtgtggttccaattttaattaaatattaaagttcaaacatcactatacacctaagtcaagctaattcgaatgagtaaagaccttaacacttaagttgtattaagtgtcgaaagtccaacaccacgcaacattaaagtcatgacttgtttgcgtaagtattaaatataatttcagttttaattaaatgttaaatcttggataccactatgcattcaaatcaaactaatttgcatgggtaaagactttagcacacgaatgccgaaaatatgacatcaatttgcgttagggctacaacttgattacttaagggtcaaactttaaatatttatatatttttttatggatatttaagtttattaaaaattcctcatcaagtgttaaagtgatttctttctttctttctttctttttttaaaattacttatatctatcacatgtaatgggatcactattatttggatgtatgatactctattcatgataaaatgagatgaatatttgttattcatcttattaaatatgaaattggtgtttacacaaatatacacttaaaagtatatcattaggcagaagttgactctctcacttaagcaagcttctcagtcaatgtgtttatgagacacagtaataaataaatgaaaaatatataaagatgattattgttaccttgattaattatatcaatatgaggtgtatcataaatgacatcttaaccaaatttaataaactataattacatttttttttctttaaatcagacttgagttttagtatagaaggtttaaggagagcgatagatgcgaaacttatgcaagctactagtatagagttttagattaaggttcatgtggtggaaacttgacatatactttcaaagtaaataaaaaccaacataacatgtgtttcatactacatatgttggaatgtgacagataagaaaaatgactaattaatctttatatcctcactatgtaagatccttaggtctcagtacaatcataatagtccatataaatattctttgtacttttgaccaaggatgaaaatattgatttttataaaaatttcaatttaataaatattttatcttgataatattttcaaagaagtttatttctattaaattcctaagtttgcttaaacctttatttctatttctaatgtagattttatggatatatagaaaatatcataaattagcaacggaatttttaaaaaaatcttagtgatacgtaaattaattgaaacttataaaaatattgaaaaaaaactccaaaaagatgacaaaaaaaaaacatatatcaaagttgttttgtggaaaaaatcaatatatataatttgttactttcaacaataattttatacaacttgaaaatagatttaaaatacttggtttgaatgtattaaaaagtaggggtgataaagtttgatatgattcactaatatgacttgagaatgacatgttttttttatggtttgggttgagtataattggttttgggtcaaatttgtgtcgactcatataatttgtttaataaagagatagtttttgaatcaacctatataatacaaagtcgacttgaattcactcatttaataattgtgtcgattaacctaactacaacattaaactatttaacttatttaactcattttaattttctttaacataaagatgtttggataagacattaataatatagaataataaaagatataactcaacttgattattaagtaggagagactaattattaaatgggttaaaggggttacacagcgtattacctatctaataattaaatagtatttagatttatgtttttaactcgattattatttatgtcgggtttgagttgacctatatagtagaatgtcaaggttttgatatgacacaaacacgaccatgacccaccaatatgaatggtttatatatatatatatatatatatcaactcctttttcttttgtgcgaaataaaagaaaacccttatttgagcctcaatctctcatttattttggagttttatcaactttgaccttgactagtcaaactccaattggcttaaccaaagccttgactgaaatatccatatgaaaatcactaaatttaaatgaaaatccaaaattatcaaatccttagaaaaatttattaaaagggtttggtgggcatttcttcaccatttaccacatgggtagtgtttgacatacaaaatctcgttgaaatttccacgatattttaagaaattttcattcttgcttttgactatgttttaaggtgataaactaacaatgttttaaggtgataaactaatattattattttgatatgttttcaataaaaatgaaataatttattcttatgaaacatatttgataagcaatttatttgaatctaaaagacatgagctcaaaatgaaaaatattttagtaatattgacaagttatatttccaatcaatctattatattgttattgtagttaatataattatgaatacatttataatgttatagagtataaaattttgtgggactaagtgtatctattaaaaacataactaaataagtttgggggtagagtgagatatggttactactttttcctctttaattttggggttgagctattatatatctctaacaagtatataagtttataactcttaaattgtagatgtgctcattgcatgatctatttgtttgtataaatgacccttaaaagtgaaatatgtatgaatgaccttcaaaagcaaaataagatggatttggatgttattgattaagctatttaaattcatcttgcacgagtgatggaaatgagttaagtgtcaaagtgacccaacccaataaatgaaaaatcataaggaaacaagagttttaaaattacccaaatagtgtcattatatatatagaagaaatataaagaagacaaagtgtcttcatctttgaaaatgatagaacatagtttttcttctaaaaaggacttctcttgaagtttttagttttcttcatgaaaatgaaggtgaaagcttttataacatgaaaacttagagtaatttttatatttgtagtttcattcatgacttgaggtaaatgaaagttaaagcttttatatagtgaaaaaaattagagtaatttttgtatttgtagtattcattcatgacttgcggtagaaaatttgtcaataaaataattaaattacagtgcttccataaaaaagaaacttggaatttctcataaatgacgccaactaaaaagggaatttctttttcattaaaaatgagaaaaaaaaaaaattaaagttagatccccttcacatagttcattgggtattcataatccatggatgttaagggtgttatttaaagaatgatcttgatatagaggattgcatttctaggtggtgtgcctctcgcttaactttctacatgttacttttgacatataagtggtgcataaggaaaacgcccaaaatgtgtatgatcaccaagtgtcaaagacaacaataataataaaaaaaaaacaacaaacaactataatggacaatcatacgttaataaaggaggcggtatgaagaggccaacaacatgagtgattccaagatgaccttgggtgatgcttgttagttcaaggatataatcaataaacaaatttgacttaacccaaaacaaacaaacacaaacacaaacaaacaagaatcaaaaaaacgaaaaatgaatacttattgaaataagttggctaagcaatgacaagacaccgtccttaaagtagaaccatccgcctcaaagatgaactcggtgtacaagggaaccaacgttcagcctccaggattcaacatccaaagaaatctcgccttaggtgcactccgtagttgagatgttatacaatgtaggcaagatgttataaaactcagtttataatatattccttgacgggtggattactagggctacaaaaaatgtagagagtctacaataatcatgcaccaaaagtggatgcaacgggaaagtgtagtaatggtaggcataacttttagacacccttgtccccacacacatcaacaaaatgggaaagctaagaggaaacatagacatatagttgaagtagccttaactcttttagctcaagctcataggcctcttcaatattggtgggattcattctcaactgttgtgtatttgataaaccaacttccaactctagttctcaaccacctctcacctttagaagtcttgtttaaacaaaaaacaaattaccatttcctaattcaaatcttttggttgtgcttgctatctgctcctccaaccttacaacaaacataaatctgacgttcacacatccaaatatgtctttctgggatatagttcaaaccacaaagggtataagtgccttcattcatctggtcgtctttacattgcaaggaatgttaattttaatgagtgaatttcctttttccactagtcttttcctttcctcatctacttccaaacctgatacattcttatctcaaatcctttttgtaattccaactcattctcataacttccattcaactacatctcatttttcagattgtgtaattggtacaataactaaagcaaccattccaagagaagtccctgcatatgagcaggttcctcacaatcagcatatagaatttgttacgtccactgttagaatttcttcccctgcatctaaacctaatgttgagcttatttatgcttttacttcatccaatcctccttcaacctccattcatcccatgtaaacaaggtcaaaatatggtatctaaaaacccaaggtctttaactccactaccacaacaccaacatgtaagccatcatctccatcagaaccaacttatattgcttaggccctaaatgatccaaactggaaatttgcaatgatggatgaatataaagctcttatgatcaataagacttagagtttggtgccttattaaacaagaatgaatgtggttgagaataaatgggtgtttcgagttaaatacaaaccggatggaaccattcaaagatataaagcgaggttgatggcaaagggttttcaataaacacctgatttagactattttgaaacttttagtcctatggttaagccttctaccattagagttattttaacattggcaataaagggttgggacattcaacatattgatatcaacaatacatttattaatggtgatttgcgagaggtggtatacatggcacaacctataggctttgttgatgtagccaaaccaagttatgtttgtaggttacacaatgccttgtatggattaaaataagccccaagagcttggttcgacaagctaaagaatgcattacttgactggggatttcaaaattctgtagctgacactagcttatttattcacaagaaaggcaacacacttatcattttgctagtgtatgttgatgacatcctaatcacaggcactaatgcttctaaggtcaatcgagtggttaaagacttaggtggtgtttgtcctcaagacacttgggtcattgaattacttccttggttttgaagttcatcgagattcttctggtctctacctcactcagaccaagtatattacaaatttatcgaataaaactagcatgaatggagcaaagaacatttctactcctatgctttttggaaataaattgtctttatcacaaggagagccatttgaagatccttccctatactgtagcacaattggtgctttacaatatccaactatgaccaggccaaacatctcattttctgttaataaactaagtctgttttgacatgctccaaccattgatcattggaaggcttgcaagagagttcttagatatctttgtggaatagttggttatggcttacatttcaaaccagctaaaggtttatttcttgaagggtttgcagatgcagattgggccagtagctttgatgatcgaaggtcgactagtggctattgtgtgtacttgggtggaaatttgattcaatggagcttaaagaaacaaaaggttgttgctcgctctgacacagaatcaggatacaggtcgttagctcaagctgccactaagattctttggcttcagtcttcgtttcatgagttggaaattaaaattgttggtcaccctatactatggtgagatagtattggagcaggttacttagcttccaaccctgtgtttcacgctaggacaaagcatataaagatagatgtgcatttgttccctgaaaaggcattgcctaaagagtttagacatgagatatatttccactgaagagcaaattgcagatgtgcccactaagccactttcagaagcatggtttgaacaacttcaaaacaagctggcagtgactctacccccgttcagcttgagagggagtgttagaatcagttagctagttcagttaattggttaatcttaatctgttagaatacaactcagcaactttaaaagaatataatctctaaccaactgtagcagagtagtagagtttttcttgtccagttcagtgtatagattgcatataaataataacagagctcacataacagagatttttttatgattccaaaaccttctggttatctctgtgaaatctgatgttctccattaacatcctccctaagtttcttagcagctctcaaactcttgactcgttccacataggctcctcctcgattagactaagtctgagactccaacaaagaaagaatcagtctaagagagttgacacttgaagctcatgcactcttcctacaacgctttctctgtcgcccacaacatgagagccgaagctgaatgttgatcctcagcctccttcgcccccatttcctcataaccaatctaacgctgatgctgtaacagccgtccacatccgtctcaacactgtgtttttaattcattgaaatcatgaagctcaatttcgtttcatcattcaactgggaaatatacaattgatttctttctaagaatcagaaaatttacccatctaaataaatgattgattgagtaggtgggtttttcactaaagttcaggaaatataatctcataatcaatttctttttaaatatgaaaataaaataataaaaaaggggagaaaaagacagattttgacttttaaaatgtcattcaaaaccgttgtttagcattgaaatctggggtacccgtctccgtgtaaaagcctgcggggtggactttctgcgggaggtgtctatgattaaaaagttgcagagatattattataataggagagagcttcataagactttctgctcctttgtctgattgcgcctccctttttctctttccctctcggttatcggttgtcataggtcgatcatgaagttggtacccggagttcaatcagtcagctgcgtctttgttgccttgtgt

SEQ ID NO: 11363 - DNA, 4070 bp, Vitis vinifera
  Intron number 2 from transcript GSVIVT01029920001 (locus G SVIVG01029920001) derived from phytozome v7.0 (chr-ID chr8 ; pos 1490218 to 1494287)
gtgttgtaagctctgtttatactttataatccttttccttgtaacataatcacaagtcagtagcttattcttttgatttcattttttgcatgctattacaagtagcatcctagaacttaaatactgctggataaggcatcatgttttttttttatatcgttaattatatgaatggaatgatatatttcacaaataagtgcctctataaagtttgctctcattctatttccattttgtaaattgaagttagattccaaaatctgtctgaaattttatctattctgtactcttctaaattatgcaaagtataatatgatcttgtagatggcaaataagtcagggaatttgacaaagggaaataaattgaaacaattttgagcagagcctaagatgtagggtctttaatcaccttaattaagccaattcacttaaatttaaagcttctaacctcctaaatttttatcattgttaaatttaaagttgactttataaagaaaatttgaaccccatttgactggttttgatctcactgcatttaacatcttattagaggtagcaaaatgaattaaaaatgatataatttataattcccagagcattatgtggattaggcgaacaattcatttatttgtactagaaaatggccggcctgtatgcaaatcctgtactttgaaaccttaggcacaatgatactctaaaggatgtaggtgagagaaaaacttccaatctgaaggatcttagtctctttgatcatcttgaggggtcagttcttttgatgtgtaatcttagagcccttagaatttctaagaaagtgaagttagaagagatcttgttgagagaggaagatgttggaggctaaattcccaagtgaaatggttaagggaaggggattgcaattacaagttcccaagggttgccagtggtaaaaataaaaaaagttgattaagttcatccaggtggcacatgggcttgtgtcaattgattgacaatgtaactttgagggaatttcaagttttgcctccacctttataaagtaggaatgttaagaattagaggattatatgtttaggttagtgtttctttgtttacatggattcaaaaatgtggttggagtgcctttctccaagaaggaaatttttgatgtattttagctgtacaaggagaaaactttgggttctactgactttccctcagcatcttaccaacattgttggtcaactatgggaaaggaaatgctgaaagtatttctagaattttatgatagtggagtcaacaaaaaacctcttctattggtatgaaagattttagacccattagcttgtacaatttgttcttttaataaccatgtgccataatgtacacaaccactttcctaaaaaatctttactcctcactaaaatcttctcaaggcttaattggacttttcattttacctttcacatcttatccccttgtcatacgatctcacttttgctccctaacatccacgcatagcaagttctattgcattctttttttttgatgggtaagttctattggattctttgattccgagatgctacctttattgtgatcttgaaagctaaaagctagaattaggattctgaataattcatttcggttgatttgattgagttacaacctatttatacaagttgtatggtgaggggaagaaaaataggctaaggaaatagaaacaaattcctacaattactcttaactttcttatcttaccataaatatacagatttaatttgattttctattcaaatcctatgcttttagtccataatcaaatcaaaagaaatatttcatgctttccaacacctcctcctcgcgctggtgcatggatgttatgcattcctagcttgtctattagaggattaaatatgatgtttatgagtccttttgtgaagacatctgttagttgctatttagtagacacaaaaggagttacaatttgcttggtctcaattttctcctttatgaagtgtctgctcacctctacatgcttagttatatcgtgttggattggattgacctaaagactaaaagaatgagtttagaggttatgaatgccctctactctgtctttggaggaaaaaaatggtacacagcaacttgcaaataagacacctgaaaacatcttcttaccacattttccactacttaaaaaagaaaggaagacagtgaatctgttggagaagcctcaacccaacctcttgcttggcacttaccagcattgcaaaactaactaataacaagcaacagtgaatccatagacctccacagcaggtaaaccatttctaagcaaagcatggtccaaaaaatcccattacacatggatgtatgcttttttgaagtcaattttagatgtcactctcttctttctgtagtctaatttttaccttgaccaatttttatctttattaactatcttagtgcaaactatacagtaccttgatttttaatcctgtcccagttactatgatacttacctttgaggtcttggaaaaaatatatatattttttgataggttgaggtctcgcattcttttactcagtgttctgctttggctccttaaagttgggaagcaaatcaagcagggtattttgaccatgaaactcaactccatcgatttatattcatatcagttttcaacttttgcacaggcattttagtcttgtaagtacttataaaaaacattttggtaattgactacaaaaagcaaatatatttaaatatatgttctaggtttgacttacctttattatattacctttgtttttccttgggctagaaacaggtgtggcctgcatatgtatggacctggtccaacacatcttcaggcctactggtgcagcattatccttagccttagcgtagtcgaagccaatcaatgtaaagtctcaatatgctaatcttccagctagcctaaccaatgttctaccttaccttcaaggtcagcctgaactgttacatgcagtcactttatttacttgaacttagatgtccacatatctcttacctagacttggtccaattacctcaaagtatgcattgcagctctatggagagttcttactttccgctttaagtaattctttccaaccttttgctctacgtaaaggcctctgtctcgaaatcaccaaaacctggaatatcaaactcatacttccaaaattctgtctagcaatacaaatgagttgctattaaaattggtgaataggatgtactttactaacaaaagttggctatttggccattgtttcggtgtcattggtgaggacactaaatggaaaacatgcgtaaaagggttccaatagaattgggaacactagcaaggtaaccttacccaacaaagtacgtttgggaaaaacttatagaaaaggttatatttagttccatgtcatttaattggtgcttcattaatagttaacatggaattgttcacaaagcaagtaaaagttctcatgtcatactcatcaccatcccaatcaccacttcctcccatgcaaaaagagcctccatgaatgcaggttaggataatctctttctaagaattggtgtataggaaaagtaaatcactcaaaccccatatacctctccttttcagttgtttatagtaccctgcacaaccaccaatctagttcaacaaaaggaaagaaagagaagaagtgaaactgaaaacctttattgcctctaatcctaattatatgaagccgtatgtctactggaaaggaggagatgagcaaaagaacgatactccagctcaccatgttccatgatcttgacgaggactgtggcagcatgccacttaattttgttcaccaaagaaccatcttgtagaattgttgaaaaaacagatttatttttccttttctttccctttttttcttttcctttctctcagccttattgaatttatgagaatgtctttatttgctatcttctaaaatataacatagactaacaattagcttatgaatacacatcagaataaaattcctacctgtttgttttgcctgttgcagctaggcttatcaagtgcaaccgaaactctttgtgg

SEQ ID NO: 11364 - DNA, 5774 bp, Vitis vinifera
  Intron number 5 from transcript GSVIVT01036865001 (locus G SVIVG01036865001) derived from phytozome v7.0 (chr-ID chr2 ; pos 18517195 to 18522968)
gcagcttatttagccattcaggtactagattttcatttcatttccctttttttcttccctgtgaatgattgtaaaccattgctttaatagagagcatgcaggttttaaaaagtgaagaaagatgaggacatcctccatgcttagaaacagatcaatgcattctccttattttggctaaatatgtcgttatctcattttctatgtatatattagactggatcacagatcatcttccagaaaaactttaaggtggtttactatatgcacaagttgaacagcctggctgctagtccatctagcagaaattaatgaggtccttccattttaattttctgatttccatttctgtgtctatgcaatgtttgtaacattggacattatgtctttgaagtgtggttactttaaactggcctgcctttgttttatgcgcaagatcttgtgtggctaggcaagcatgctactgaggcctgtatgatgcctgtgcaaaagctgcaactaagcatctacctgtcttttgaagccgctgctttgtttataggggctttctgagttgagcttgtctggtagtgcagcataattgttatgctttttttagtattttatttaattttccccaatacggatttaataaagtagagcaagaaaatacagagggaaaattgagagatcctgctacaaaaaatacaggggcagaaatattacaataaatggttttccaaaaaagaacctaaatctctaacaataagcatggagggctgcccccttttgtgttttttgaactggttggaaggagagaaataataggtccttcaaggatgtggtataaacagatcaagtgctaaaatttctttcttatgtttatttttttggagtgagggagggcttatataatgcagcaatgcatatggtagacttagttcattggttaagtgttatgaaaggggaggggttatgttttttgctctttgttttcttagttttgatattgcctttggtgcctttgtatattgcttgtgtactctagtgtgctttttttgataggcactgttaatatatcttttttgcttgcttatcaaaaaaaaaaaaaaaaagaagaagaagacacatgcacacacacacatgcagtatttgcaggtattaacttcatcccaatctctgttgataggactaaagttcgaaagtaggttaatgcataggttctttctcaaccagcttcaatatccatttccatattctcaaggaatctattgtttctttccatctaaacaatccaaatcacagccatcttggcactaaattctagaaaatggtcttatgagagagatgagatgcaccgatagacactgtctactctcattctcaatgttgagtccatgccataaagtaatagtcttgtgcagtgaaggaaaaagtgattaatggacttgggccctatttaaatagacttttgagaagccaaaaactcttcttaaaactgaataagagcttttatagctatttagctaattttgttcaaagagcttatgactttaaaaaaaaaaaaaaacaaaaaacttactattaaagccaggaaaatattgcttcttgtagaagctctgttttggtttatgtttgaatttatttcatatttaatagaacttttataataccaatgctatcatttaaaaattatgattttggctttgacttcaacttccagctaaaactacatataggaagttatcccaaactaggccttattgtccttttaggaagtgtatcattgggggaaatagctttatgtagcttcctattttggagcacagcaaaagtgtttacctttccaagggcttccttcaatgccaagccttaacctttagaggaacttttaaagaccaaatcaagtggagaatgaccaggatgattgattaaaatttggaggcttggattagaaattgaggacccaacacccaaagtagacgaagacatcattaatgagttgaagaagggtagaatgagatactgatatcttggtcatcaagactctgattttttgaacttcaacaacactatctgttctaagtctttggatttattccaaattcttgctttagtaatcttgcatgatatacaagtaggctacaagggaagaatgttaggtcttgcctaattgatattagtatgaggtctaactttgtatatttaatgttatctgacttgatttgatatttctattttacataaattatttgattgcctatcaaaaaaaaataaaaaataaaaaaatgaacacaaaataaaaaaaagcttcgtccgtatttttgaatgtgcatcaaatattttgggatcacattcacttttaaagtttcttcttactgcaggtgatgatttcctagttttggacctgccaacatggtcatcaatttaatattttcgtttttatcttctcaaatttacactctatggtcaacaatacttgaggctggaccatttcttagttttagaagaatggaaggaccacttttcgggcctttctcaatatgtgtttcctaggcctatttcaaattattgtcccattgttcttgagggtgaagtggtcaaaaagagaaaaacacctttaaaatttgagaatatgtggcttaaggttgatgggttcaaagatctcattagagaattgtgtacgagttatgttgttagtggctctagcagtcattgccttgtagtgaagctaaaggctcttaaaaaggatcttaaggtgtggaataaagaagtctttggaaatgtttcatttaacaaggcaaagtctcttcgtcatattagcttttgggactttaaagagagagtttcttctctctcaaatgtggaggcagaggctagaagggtggctttggagaagtacaaaaagtggggctttaatggatgaaaatttttgaacacaagaatctagagaaatctggttaagggagggtgataagaataccaaggctttccacaaaatggctaatgcacatagtagaagaaacgtgatgactaaagtgagagttaatggtgctattttgatggaggttgacgggattaaggatggggtgtgcgatgcttttcatgctcttctttttgagatgggagattggatattgagcataaggggcttgtgttttgaagtgttggggagtgatagttctaggagcttagatgagcctttttcaaaggaggaagttttcaacgctctctctagtcttggtggggataaggctctagatctagatggttttattatggctttttggtaatttggttaggacttcaataagtatgagatcatgggtttttttacggagtttttcactcaagactctttctagagaagtttaaacaacaccttgttggtattgatccctaaaataggtggaatagaagatttacaagtcttcagtcccattagtcttgtaagggcattgtacaagttgctagctaaagtgctagcaaacaaacttaagaaggtggtggtaaaagtggttttagattttcaacattcttttatagagggcagaaaaatcaggatttcctaatggtggtcttaacaaaaatatggtttggacaaaagtggataagatggaaaaaatggtgtatttccatggcaagattttttgttctcaataatggaactttgtctagtttcttttagaattcttggggtttgaggtaaggtgattccctatccccttctttttccatcttggctatggaagctcttagtcaaatgttgactagaactaagagtgggggcttcgttttttgttttaagatgggaagaaggggtggggaggggatgtaagtgtcttatctcttgtttgttgatgatgctttgattttttgtaatgccaatcgtggttaattgagattatcgaactaagtgtttatgtagttaaaggcgatttttgacttaaaagttaattttgataagagtgaggttattcctatagggggagtagctaatgtggaggcattagccttgatgctaggttttagaatagggaaggtgcccacttcccatatgggtcttcctttggtagcctcttataaatcttcctaggtgtgggatgcaatggagaagatatttaggaaaagattaataatgtggaagaggcaattccttactaagggtgggggactttgatcaaaagcactttattaagtcttccaacttatttcatgttcttatttgttgtctcaagaaaggttagctcaagactcgaaaagatctaaagatactttttatagggtggtgctgcgctagagaaaagacctcatttgattaattggaatttagtttgcttgggaaagtaggatgaaggccttagaatttataacctttttgtcctaaataaagctttgcttgctaaggggaattggagatttgctacaaaaagggaatccttttggagacaaatcataatagggtaattcaaagaggaggatggggggttgtgttcaagagggatgagagatggttatagaatgggggtgtggaaagccattagacatgaatgggagggtataaaaagtagtcttgtgttttagtagggaatgagataaggattaaattctaaaaagacttttgtaaggatcaaacattggaagaagccttcccgaacttattctcctttgttgctaataagaatggcttgggagcaggatggggaaggaggtggttagagcccttgtttttcaaggtagtttaacgattgagagatcgatgaagacgagagtttctttcaaggtcatcggtaattgaaagggaagtgttgtacaaactgagttggaatgaatccaattgcggcaagttttcaattagatctctttattcttgcttttctaggggatatagagagccttttctggctagcattgtgtggaggtcctgagcaccaatgaaggttaattgtttttgtttggaacgtggcttggggtagaattctaatttttgaccagctctaaaggaggggttggactcctctaaataggtgttacttgtgcaaaggagaggaggaaatagcagaccacttggttttgcattgttccaaagcaagaatggtgtgatacaagattttttctcttttttcgagtggagtggggtgggttatacattctttggttaaagggaacttgttgggttggcggggttcttttgtgggggaaaatggaaaaaaagtgtggagggctactaccttatgttttttgtggactctttggaaggaaaaaaacataagggctttaaatgacgttgagtagtccaaccaagcaatcatatccattttcttgtatacttttgtgaattaggctagggtgtatatagaggggtttttttgttcctttcccttttcgcctttactcggcgtttttgtatgctttgtgcataatgtgctacacctattaggtgcttttaatacatgtattctcttttgccaatctaaaaaaaaaaaaaaaaaattacactctgccttctcccagagattgggctgcttccagtgacagtgggcttcaaccttgtgatatggaattatatcactagaatatgaataacaatattatttttggtttgacaatatctcatatgttgtgttacatcttttttcatttcttaataaatcaggattgtttcttcgattgtttgacagtattgttttttgtaactcttgacatgattaatttatctcttaaatttgctgttaagttaacctattgttccaatacattcaggctccacttttgaagaagtatccagccagcctttc

SEQ ID NO: 11365 - DNA, 9063 bp, Vitis vinifera
  Intron number 1 from transcript GSVIVT01038117001 (locus G SVIVG01038117001) derived from phytozome v7.0 (chr-ID chr5 ; pos 23590747 to 23599809)
ttgttgtattgtagtctttcacaaggatcttggttgtataatcaaattgttgttacatgaatgataaaagatgacttataaaaaaaaaagtcggaaactcaaaaggttttaattaaaatgaaacaaggatacaaataataatttagaaaatgatgtatatatgttacactcctcaagttatttgataaaaagaaatattatattataaaatttaatataaaatcaagtatacttatgtatcaatctttataaaatacattataaggataaattttgaatgaacaattatatatatctctatctcaactattagcatggctataactttttaggaaaattactttatgagcttgaggcattggtaacctattaggtaaaaccgttggatttataaaacattttctcaaaaattataaataaaatgacaagtcaaagtcaataaataaacctaaccaattattgaaaatcagattggccggtttaatcgtcgatctacaacctctccaattcgatccaaaatgtcatttgcaacctcttaaagatgtgttaggtatttataccatgcatggggtctattagtttccgatgtgggataggttttagttatattaaaaaggaactttacattgtggagatttaaacttgggacccgtggttatcaaaataagcaaagggtcatatattattggttcgatcacggtttaattatcgatctgaccagtaaaccgtgaacggataactttttcaattcaatatctatccgattctgaaaacattaaatctaacaatcatattatttatttatttatttcttacctcccttacaaaacttatgtaatatggattctaaagatattacatgtaggaattactacaatactaccaaccctcaatatccaaacatggaaaaataaaaaaataaaaaaggatttttagtgacatttcatcatattattagcactctgctcaatgtgttgcccatcctaatgagttttacacaaatattgtcatcaatttggtatttccatccgtaacaatcttagttcctaaggtataagatcttattgaaatcaatatatggtagtgatgtttaagaacattaccaccatgttatatattactttaattaaataagaaagaatgattattagacatgtgaccatgatgattttcattaatgatattgtggttatagccctaaaagctaaatatttatcatacctagacacaaagatggacacaaagggggacaagggaggccactaccaaaaggggtatatatatttacttaatgtagtgtaacaatattgtggagatcaattaaacaaataataatggtcacttcttcaaatcattcaaagatactcttaatttatgaagcaagacgtaaatgtatatgactaaagtcaataatccagcatattcgagaatcatgtggatcattttctatcaaagaaaatgctaccaagttacatgaagataataatacttatatttcaaaaattaagaggatttgtaaaagataaccaaggatgaaaatattaataatcacgaatatatcgatacttggattttacgaatatatcggcaaatattttaacacaaaatattgatgaaccaaaaattgatcaaaacttatgaaaatataagaaaaaacttttaaaaatgaaattataagtataatagacgttttaaagttgttttgttgaagaaattgatatatgtatgatataatttgcaatattaaatttaattatatagtgtcggttgataagaaatgtgaattttgtaagtgtatactcattatgaagttaaattattacaaatatactaattatgtgattcaaatatattactatgttaaattaattcacttacctctattgaaaatatattaattaattgtaaaaatgtagtaatttaaattcaatgctatactaatttaaaaatgtactaagttaatctattctcaatatactattattacacttgaatgtcaaaataaaataaaattattaacttaaaactaaattattgaaaatgtactaattatgtgatttaaatatatttatgatttttatttaaaaaaattgatacattttgacacaaaattttttatttaaaaatattgataattttgtttatgattttatatttgttttatatttaattagtatacaaaataaatcataagataattaaaattaacttatttataataatttatttttttttaccgatttttcactaatatatcttcaaaatttcaatgatattttcccatttagggtcgatattttgattgtattgccgatatatccgtaattattgatatattgtcgatatttacccatatttatgttagacgatatatcttacctatatattatatccaccttcttcgatacatgatatatttgtgatatatcatcaatattttcattcttgaaggtaacaaaactaagcaaatatccaccaaattcttttatacctccaaaagaattggtaaaatcgatgttcaacatatccagtcatacgatatcctagcaaatctattcacaaaaacattaccattgtctacattaaaagggttaaaatataacattggaatactaaactgagagatatgtcaattgacgcattgaaaaaagtatgatgaggtctacatgatgggaagaatattgatatagatagattacatttttttttctttgttcaggttttgttccgttaagttttactaacaaggtttttaatgaagcgattctaatgatcaaatcatttaaagaatattgtacttttttccttcactagggtttttcctagtaaagttttaacaagacatattcttatgatcgtctaaggaaagtgttatgttaatggaatttgttacaaaaatgtattaggatatgagaacttgtggatgctcattcaatttttggtatagattatctcaaatgtcattgtaaatctcgtcttgactttctataaaaggaagacctattaacggaatattattcaaagcattgtaatttgtttttcttccaatttcttcttttagtttattttacaacaaaatttacatattgttgaggttttatccaagttcctcaataaattgagatcgaacaccaatttaagacaaagaaaaactataccaaaaatcataaaaatagaataaaacaagcagaatttatgtggtttggatccaagatttgaatcctacatccacggatcaagatcacctccaaaaatccactaagattgaaccattttacaccctcaagaatctctgagaattattaagttctctctacagtacaatgaagaagacccacactctgaaatcctctcactttttgttttgtaattcagaaaactcacacacttttttttttcacacttttgtacaagtacatggaaaaatctaagcaaacaggtatgctttcaattagttaatcaattaactttacttacatgaccaatcaattttggaccaccaaattccacattctccactttggttcaaatattgaatttggattctttgaatgaagatctaacttaaacattagttccacattacctagaccaaatccaagcaatacctgaatttgcttactagtagaactttaattgccatgtcggctggattatcaattgtggaaattttctccagcttcactactcatgagcttacagtttctctaatgaagtgatatctaacatcgacatgtttggtcctttcatgaaacataggatttttacacaactaaattgcactctgactggctaaaaatatttccactacactattcaacactccaagctccttaacaagtccttacaaccaaagagcttctttcatggcttcagtagctgctatatattcaacttcaatggttgaaagtgccactatctattgtatttgtgacttctagctaacaggtcctccaaataaggtgaaaatataacctgtagttgaccttctcttatcaagatctcctgtataatctgaatccacataacttgtgataccaataccctctttagaagatccaaacttcaatcctataccaagagatcctcttacatatcttagcaaccacttaactccattccaatgttctctacccgagttaaccataaacttgctcaaaacacttactaaatgagcaatatctggtcgtgagcacaccattgcacacatgagtgaccctataacactagcatatggaacaaaattcatctctttcttgtcagcttcagattgaggacattgtgtcattaacaatctaaaatgtcctactaatggtatacttacaggttttgaattctccatggaaaaccccttcaaaaccttttctaagtagcccttttgtgacaagaataaagtatgatcctctctatttcttacaatttccatgcctagtactcttcttgtgttcccaagatttatcatatcaaattctgactttagaaccctcttcacctcttgaatttgtgacttatctttgcaagccaataacacatcatcgacatatattagaagaaacatcatcagacttccttgtaacttcttgtaatagtggctcactctcttcatacttcattgcagtcaatagagcataggtaatcagatctacaaaaccaaacctatctgggggttttatgttcctcttagccctatcccttgataagagaaaatcaagactagcttcttgtgagttggttcctacaccaccttcaacatttgaacttgtcaccttagtatcttctatctctaagccaccatgtgctaaatcattttgttgatcatgaccatcttgagatgataactccacctcaaactcaaaatggtctttgtcaagtgtcaagctcctgttttcaaaatcttcctctgtacctgcaccgttagtcctcgtagaaagcatttcatttcattaaacacaacatcacgacttattattattttaatacccgaagattccttattccatagcctgtaacctttaataccctctatataacctaagaagatacattttattgaccttggttctaattttccttcactttggtgaacataagctgtgcacccgaagattctaaggtgatcatagttaaaaggctttccagacctggagttctaaagtctattgcactagatggagttctatttactaaaaatttcattacaacttcaccctaaaaatgtttagataagctagaactatacaacatacaccttactctatctaacaatgtcctattcatcctccctgctaggctattttgttgaggtgtattccttactattttgtgtcttaaaataccttgatttttacaaaacatttcaaattcctcattgcaaaactctagcccattattcatccttaacacctttactcttttattagtttgattttcaactaaagcccttcactccttaacctttgttatgacagtatgttcatcattagtttttaacaagtgtagccaaacttttctagagtaatcatcaatcaaggatagaaagtacttgtttccaccatgagtaaaaactcttgtaggcccccataaatttgaatgcacatattccaatacatcctttgacttgtgtattgcagctttgaatgccaatctgtgttgcttgccaagaatacaatactaacaaaaatcaatattgttgatgttatccccacacaataggtcatgtttgtgcaactcttttagacctcgatcacttaagtgaccaagtcttctatgccaaagaattgttttatcagtttcaattcttaacattgatcctactaaacctttcaatgtgtaaccttctaggatatacaagccatttctcttctgacccttcatgacaaccatggcacattttgaaattgttaatttcccatcttctgctttgaagttataacttgattcgtccaaagttctaagagatattagatttctcttcaggtttagtacgtgcttgacttctttgagagttcttgtcattccatcaaacatgttaatagccaccgtgccaattccaaccacactgcaactcatgttgtttcccatcaacaccttttcaccattaacttcttgataggatgaaaaccaatctcttcttggacacatatgataggtgcaacctgagtccaagacccattcttcatgattttgattcaatgtaacaatgagtacctctgcattgtcataaccatcatctataatggcagcacttccttgtgcttgagtattttctttttcttgtctatctggacagattcttcttatatgtcccatcttgttgcaatgatagcacttgacattcttataatctttcttgcctttggactttgatcttgaatgagattttcctcattttccattgttatttttattttgaggtcttcctttggcatttaaactttcaccattgttagttttgtaagagggcttcatatccaacaccttagcattcaaggcattctgaacatcatcaaatgtaatggcatctttgccatatttcaaggtttctttaaaatgcttcaaagatttagggagagagtttaagagaatgattgccttatcttcatccttcaccttgatatataaactctttaaatccaataccaatttattaaactcatctaaggcatcatcaattggcttggattcttcaatcttgaaaccatataaatgttcctttaggtaaatgcgatttggcaaaactcgggttttgtacagttcttccagttttttccaaaccccaacaacggttttcttatgagatacttttctcataacctgatcagaagaattaatatgattgaattgtaagcctttctttgaaattcttgcctttccttttcagtcacgctttttggaagatctttatcaggcattaaagccttttcaatgccctatcgagtcaagatggccttcattttcatcttccacaacccgaagtcatttctaccattgaacttctcaatatcatactttgtagtcgacattcttctttctctattcttgatttggctctgataccaaagttgaggttttatccaagttcctcaataaattgagatcaaataccaatttaggaagacaaagaaaaacaataccagaaataagaaaaatagaacaaaacaagcagaatttatatggtttggatccaagatttgaatcctacatctacggatcaatatcacctccaaaaatccactaagattgaaccattttacaccctcaagaatctctgagaattatcaagctctctctacagtacaatgaagaagactcacactttgaaatcctcaccttttgttttgtaattcagaaaactcacgcctctcctttttttttttttttgttacacttttatacaagtatatggaaaaagctaagcaaacaagttagttaatcaactaactttgcttatgtggccaatcgattttggaccaccaaattccacacatatgatgtacaaagcaatgaaactcaaatataaagtaataaaatctaaaaaatatccacgatattatttgatttgtgatgtttttcgatagagagattgataataataataataataaagcaaggatatgaactcgtgtatgtaggtctcccttctccaaaacttctcaaatcaaagatcattgaaagactctaaactaacctcgttaaaatacgatatcatatcatccggaaaaatattccaattctcacctaatcttcaaagttatattaaatacttcttctaaccttaaaaagtgcctgaattaatggttgcaaatgttttgacttgactctaccttctgttcttcaaccatgggcggcccatataaatatttgccaaggatgatccacattcgttgtaaggatttttctaagcttgatgcctcctatcgttgatggatagataggaacacaatttattgatttatcacatgtgacgttacaccatattttacttgaaacctttgaagatacattctctcttggtttaaaatgtttttagtaatattttcttttaatttggagaatgttttttaatttttattttataaaaatagtttatatttcctctttttttttttttttgttttgttttcttttatatatatatatctatagtttttatttcatttttcatttttaactttttgggaaatggttttcatttttcttacttttcatttgatatggaatttttttttaaaaattttcattttgtgaaaatagttttttacatgtttaattaatttctttaaaaaaaataaaaacttcgaaatcttgtgtgattttgagtttttactagtattaaaaaatggtgaaaaaaatataattaaaatttccttgtttttaaaaaccattttcatttatttttttaaaaagtttttgaaagcaccccattaatgtttctttttttttttttttttcttccatgttttgaattcaaattctcaaaaaataaaattttaaaaaaagaaaaagaaaaaagctatacccaaccatatttctagacgtgaattttgttttgtttagaaatacaaacagaaaataatataaacaaacaaatacttaacttcgatctgaaattttatgtctcaaatccaaaaaagttattggatttgagattgatggcaaaccccacaatattgaaatattatgtcaatgtccttttctgtagtttctaaccttatgtgaatgtcgttttgtgcggagactattatatatggttggatcaaggcagtcttgatacaaagttgactctaaaaccctagattttaagaacccataatcttcttaatcaaatcattccattatcacaattccatacatttatttatagacaccaaaactcagtcttatcttcacaaacacacattcactctctagccattgtcaagcagagactgatcagtttttctaacactacacgcgacggaaaattaaaaactgaagttgaactgatcaggttctttgaattctattgacactgtagctgtaatgtaagtttataaataccccaccaaggtctcaaccttatca

SEQ ID NO: 11366 - DNA, 6903 bp, Vitis vinifera
  Intron number 1 from transcript GSVIVT01014748001 (locus G SVIVG01014748001) derived from phytozome v7.0 (chr-ID chr1 9; pos 9168953 to 9175855)
gtagttcagtttccacacctgttcaaatcgcccaggtaatttctccctcattcctcttttgtttgttgatatctcattgtttgacatcctaaatcaaaccacgcttgtttctggatcattggtatcagtatggagtagtgggtgaagattcttttccatttgtgtgcaattcattataatttgattggaaatttgaaccataggggttgatttttgagggaatgccatctgggcatttgcttattgagattctccttttgggtgttcatgaatgtgacattgaaatttatgaaacaaattggacgagggtcatttcacatagtttcatatttttgtagcaaaatcacttgcaaacttccttgaacaacattaaactgtcattgaattagacacactggaagttgtcttttgggttcctgtctctgttgaagttgtctttttattattttattattttattatttttttaaaatagaaaataattgttattcatcaagctacagtatactaattataaaaaaaactggtattgggtataaaaatgggtgttgtaatgttttaagagtttttaattgtcaatactattgcaaactgatccgaatgtttgcttttaaaatagaaaatgttaaatgtgatgaatgctttttcattgatttgttaagagtctgttcggtagtgattctaggaagttctttcagcataaaaagtgtttttgaaaaaagaaaaaaggtgtttggcaaaatttaggaaacacctttaaagatttgaaaaatcacctgtttaaaaaaaatcacttgtaatgttttttggaaaaacacgtgataagtgattttcttaagaacaattccaaagaaaacacttccactaaaaacacttcaggtagaaacactaccaaacgcattcttagtgtgcgtttggtagcaattataggaagtgtttttaggttttttaatacgtgaaagataaaaaatttcaagtgtaagaaagtctaaaaacacttactaaaattactaccaaatgcactcttaaagtctctctaattgtaattattttttgtcaaaattttcatttttatcttataattttttagctttttagctatcatatttttatgaaaaaaataataataataaaaggagagaaacaatctcaagcattccataaaaccaacaatttgcaatgatttgcccttttaattctacgaatttggcagataggaatagaaactaacttcctaaaagataggaagcaccctttattctctcacctatctaaacaataaaaaacagtaagtacgctaactctccccctcaagctggattgtacaaattaaacatgcctagcttgtctattaacttttcaaacaatggccttggaagtcctttggtgagaacatctacaacttgttttgtagtaggtacataagttatgcaaatagtgccatcctcgattttttccttgatgaaatgcctatcaacttcaacatgcttcatcctatcatgatgaaccggattgtgtgagatgttgatggtggccttattatcacaataaattcttaaaggcagcttcaccattacctccaactcttctaaaagaatttttagccacaacacttcacaaatcccatgagctactgatctcaatttcgcttcggcaatacttctagctacaactgtttgctttttgcttttccatgttaccaaatttccccaaatagaagtacaatatccggaagtagacttcctatcatcaatagttcctacccagtcaacatctgtataagctctattcttctttcaccatttttcccaaagaaaagacctcggccaagtgttcctttcaggtattttaaaatcctataaactgcctccatgtgtttcttagttggagcatgcatgaattgactaacctgacttactacaaaaacaatgtcaggcctagtgtgagatagataaataagctttcccaccagacgttgatatctcccacgatctactggattaccagcctcttgtgtgtcgatcttcgcatctgaatcaaccggtgtttctactggtttgcaccccaccaatccaatttctcccaaaagatccaacacggactttctttgtgatacagagattctagtcttgtttcttgcaacctctatacctagaaagtatcttaggcttcttaaatccttcatctcaaactcagttacaagtttttgtttcagcctttccatctcaattacatcatccccggttaatattatattgtcagcatagactataagaatagtaattttgccattcttatgtctataaaacagggtatgatctacttgagcttacttgtaatcctgtctctgaattgctttggcgaagtgaccaaaccacgctcttggcgattgcttcaaactatataaagccttctttaatctgcatactttaccatttttccttcatcaaatctaggaggcaactccatgtagatttcttcttccaagtctccacttaagaaggcgttttttacatcaagttgctgtagaggccattccaagtttgcagctaatgacaataaaacacttacggtatttatctttgccaccggtgcaaatgtctcttgatagtcaatgccatacgtttgggtgtatccttttgcgaccaaccgagccttgtaccgctcaattgatccatcaactttatacttaatagtgaacacccatttacatcccactggcaccttttcttttagtttcggcacaacctcccacgtaccatttttttcaagagcatgcatctcatctctgattgcttttctccaatctggattctcccatgcctcttgaatattatttggaattttcacgacagccaagttggaaactagagcttgaacagagtcgggcaaatattcgtaagtaacatagttggaccctgattgaagctccttgattgtaggcgtcggatttgaaatttgaattaatggactgattggcagatttgaattttgaattggtggactgatatttgaatttgaattcggagtttctccaagagaaaattcaggtgaattttgaatttgacaaatctggacagatttgaattggagaaactgactctgaattgacagaatttgttggatgaaaatcaggagaaaattcccaaaaatactcccataaccccaagtttgaatttgaatcagcactagaagacgacttcaaagaatcccaaaaaatatctgttgcatgcatattctccccttgaagataatttttggtaaaaaatggttggttctcaaaaaatgtaacatccctggacacaaaatactttcttttttctggtgaataacaccgataatacctgagaaaaatacacttataagaatgaggatcaagtttgcttcggtttggatccagattatggacaaaagaagtacaacaaaaaattttaaagtccaagtttgaagaataccatgaatctgggtatgattcataaagacaatttaatggtgtttggaacttaagaacatgagatggcatctgatttattaaataacgtgcagttaacacaacatcctcccaaaaacgtgttagaacattggatgtgaatagtaaagaacgagcaacctctaaaagatggcggttttttctttcagaaatactgtttttctgtggtgtgctaacacaagagttgtgatgtataattccatgttttatgagaaaatccccaaggatagagctaaaatattctgtaccattgtcggtacagagcattttaatactttcattgtatcaggtttttgtcattgaatgaaaaatttgaaaaacaatcccagcttcagatttttcctttaaaagatacacccaacaaacacgtgtgtgatcatatgtgaaagtaacaaaccatcttttattggtaagacttaaagtgtgtgaaggtccccaaatatccttgtgaatcaacatgaaaggtttcgaagcacgatatggttggggaggaaagaaaacacgtttatgcttagctaactgacacactacacattgaaatgaatcatgtttttgaaacaatgaaggaaacgaatatttcaaataaacaaaactttgatatcctagccgacaatgcaataacattgtttgttgagatctagaaagagaagaatttcctacagtcaattgaacatgaccacccatagaagatgcactctcaaaatagtacagaccatgaaactccctagcactgccaatcctctaccccaaaatctggtcctggaaaacacaaacagaagaagagaatttaccacacaattcaaatccttcataattttgctaattgataaaagattgcacgacaaattaggcacatgaaggactgcttgaaggctaatatcaggactgattttaacagttccaacaccagcaacaactgaaaaagaaccatccgcaatttttactcaatgattaccagggctcggtgcatatgttgtgaacattttttcacatccagtcatatggtctgttgccccggaattaatgatccgtggctcacctttttctgtaagaccgccaaacgcagtcataatggtgccattttttgccataagtgatgttgaggatgacaatgaagcagataacatcttccgaatttgctccaattgctcttcagagaaaacagtggatgtttcagaggtagcctttgtctcagattcagccatcacctaaaatcctttaccatcacggccacgagatagatttggagtccagttagcgggtttgccatgcaatttccagcaggtatctttggtgtggtttggtttctgacaatggtcacaccattttttattccctctagacttagcaaggttatctgaaccacgagtagccaatgttgaggtttcaatggtcgaaattgttgagcctcctagcataaaacgtcggtgacactcatgtcttacttaagcaaaaatctcttcaatttggggcaatggtttgatccctaatacttgctatatcggaagtactatatctgatcactctccaccatcttccgatatagtacaacatcatctgggtctttccatgctggcgagttgaaaagatccaattcctgtcatagtttggtcaaatcagtgtagtattgagtcacatcatgctctccttgcctcagatttctagctttattgcggagctcaaacatttgagatgaattctcaaggtctgagtaagctaatgtcaccgcgttccaaatccttttagccgtgggaaagaggatatacgtatcagcaatgttgtcttccatggaatgaattaaccaagccatgaccattgaattttgagcctcccaactcggataggaaggatcatccatgcttggttttttaattgtgccatccaaatagtctagttttcccttgcctcgaaccaccatcaacatcaagcgggaccacttcaaaaaatttgtcccatttaatttgtgggatatgatctgtagggaagaatgtttcgaattttcagaaattgcagtgggaacaattgtagagattggttgagaagtgccagaagcaacatcagaaccatcaactcttcttgttcctgtcatggctgttttgaccattgtctctctcaacttaatattagctctaataccatgaaaaaaaactcataaaaggaaagaaacaatctcaagcactgcattttattcatcaaaaccataaaaccaacaatttgcaatgatctacccttttaattctactaacttggcagataggaatagaaactaacttcctaaaaaataagaagcacccattattctctcacctgtctaaacaataaaaaaagtaagtacgctaacattttcagatcacccaatactatccgagatgccttgactcatctaccttcgaacctaccaagttctcgattgataccaacaactttgaatcatgatgccaaatgctgatgcgtgacccatctatctatgatctatccttggttagattacagaccatccttttgcttacttattgccttggcacttgttgattttaacattctctctgtccttcaaatgcctttaataagctttgataccatgttagccaaccattgctatatttgataggttaaaccaccacttgtattaaaaatttaagcttccaaggaatgtgccaacgatgcacaccaagctaagatctcctcatgtgcagtcccaagcaaccaatgtagacaaacaaatggacggacgaactaaaagataggcctgaacccaagatgtctatatagcagaactctgatactatgttaagtcactccttgtgccaaaagcttatgaactagtttgggctaggttcaaactagtcccaaaattgatctcaggctgactctggttcaacccaaagcctacatttcatttatgggttatcctcttgattactatgaggctgagcctccacctaagttcatatgcggctgagtaataatccgccaagaaaatgttggatctgtaacttatggtctggtccccaaaattcaaactttctggttgagcttagatttacataggtttagacaaatttagcagcttgcattcataaccatccaatacatcatatttatttcctacttttaggtgctctaattctttattagacccgtaatttctaacaaccagccatctcattccacatgaatgaaaacacatgactcatgatttatcttcagttatgtaaagttaagacgatgcagcatacatgggggggggctagttgtgctgctgaaaatcagctaacaatatcttttatgcaaacttaggtgttctgatatcattttgaaaagtccttgttttgtacagttacctttttatgaaccctggtttgttgagtggcttattgacaactactatgactttcacacaaaacagttgt

SEQ ID NO: 11367 - DNA, 10412 bp, Vitis vinifera
  Intron number 1 from transcript GSVIVT01018288001 (locus G SVIVG01018288001) derived from phytozome v7.0 (chr-ID chr1 5; pos 11842389 to 11852800 reverse strand)
ttcctacatttcaacaagcgattcagcgcctccaggtacacctactcctcatttctcttaagtggctctgtttggttcgcgaggaagtatgggaaaataaatggtatttaaggtttttatgttatatttttcttcggttgggacctgagaaagcagaacatttctctttttagttcccgagaaagtgcgggaaaaaggaaagaattgaagatttaaatattcattgggaactgagaaagcggaattctcttcacttttctcggcatctaaagggaggataacgctctgtttgatttgaaactagttgcaaaacttgtaggattctgacgatggcggttaaattcttaaagtgatccttcgtctctgacaccaattgaaattgcattgagacctggagatgataaatccatataaatatctgtagattatttctgaaatggccagctacgctgaattatttattattggtttcataaggtgttgtttggatcggggaaagtacaatggaaagaaagaaaagtaggaaggaatccaaaatctctatgtatggttcactgtggaaaaatatgaaggaaaatcaatataataaaacttagttacaaatttatgtattttcaaattcttcattgtttatataggacagaaaataagagaaatgaatttggggagctatgtaaaaaataatttattaatattaaacctatttgattttcctctacttttatttgcttccatttttcccttttattttctttctgttatacttttcttaaattttccaacaaccaaacaaaatctattttttttttcttttccagttaatggggttctagctggatttttcccgagttctaaagggcttcgccaaggagatcccttatctccttatctctttgttttgggaatggaagttctagatgctctaattaggaggacggttgctgggggttacctttcagggtgtagtattcagggtggtagaagacacaatctaaaaatttctcatcttttttttgctgatgatacaattgtgttctgtgaggctaataaagagcatctaacacatttaagttggattcttttttggtttgaagctgctttaggcctaaggattaatttggacaaaagtgaaatcatcccagttggtgtggtggaggagattgaggagatggcagcggaattagggtgtagggtgggttcattgccttctcaatacttgggcttgccattaggggctcctaacaaagctccttctgtgtgggatggggtggaagagaaaatgaggaggagactagcgcggtggaaacgacaatatatctccaaaggtgggagaatcactctcataaagagcatcttggctagcatgccaatctatcatatgtctctattccggatgcctaagacagttgctagaagattagaaaaagtacaaagagacttcctttggggagggggaaatgtggaaaggaaagctcatctaattaagtgggaggtgatttgtgcggacaagaacaagggagggctaggcttaaggaagctagtgctcttgaacaaagctttgcttggtaaatggatctggaggtttgcttgtgataaagataatctttggaaacaagtgataatggcgaaatacgggcaagaaggtcatggttggagagcaaagagggcttatggggtgttcggagtaggggtgtggaaggaaattttgaaggaaactgattggtgttgggataacatggtgttcatagctgggaagggaagcaaaatcagtttttggactgatgtttggtgtactggtacaacgctgtcccaaaatttcccatgtctatttgctatggcttcccataggaatgccacggtggaggagatgtgggatcaaaatttcggtcaagggggttgaaatctaagatttctgagggattttaatgattgggagttggatatgataggggaattgctctatgctttgaggggttacaagccctctatggaggaagatttagtttgttggaagggaggaaaaaacagaaagtttagggtcaaagaagcgtacaacttgttggccaatcccaatgatattgtttttccgtcaagatgtatttgggtggattcagttccaaccaaggttgcattctttgcttgggaggctacgtgggggagggtgctcactcatgataggctccagaaaagaggatgacaacttcctaattgttgctttctgtgtgggtgtgaagaagaaactgtaaattatatacttattcactgtgtagtggtcagagttctgtggaatattgtccttgggttatcaggtgtgcaatgggtttttccagaaactgtaaaggaggtcttaactagctggaggggtccttttgtggggaagaaaaggaaaaagatatggaaatccataccgttgtgtattttttggacggtttggaaggagagaaatagactagcttttagggggggagtgttagatattcaaaagcttaagaattcttttgtttataatttatgaagctgggctagattgtatattggagaggagcgtctatcccttatagggttcttggaatggttagcgtccaattaaggggtggtgaggcttttttggtcttctttttgctttgagaggtgagttgctttgtataccccctgtatgctttatagcttctcgcctctgttttaatacaaattgctttacttataaaataaaaataaaaatgtgagatgccacatcagggtggtcgaaaacctgaacgtacataaatctattcatccaccaaggaattaaaaatgttcaagcttgcagatttaattgaatgcctttaacttcatctcaagcttcattaagcgataattttcatggaatggaggggaaaattcatctagttaaatgggaggtggtttgtacagacaaggataaaggtgggctaggccttaggaagctagccatgttgaacaaagctttacttgacaagtggatatggaggtatgcttgtgacaaagataacctttggaaacaagtgattaaggtgaagtatgggcaagagggtcttggttggaggccaaagaaggctaatggggcggttggagtaggggtttggaaggagatttggaaagaatcagagtggtgttgggatgacatgatattctgagttgggaagggcaacacgatcagattttggagagatgtttggtgtactgatacaacgctatcccattgctttcctcatctctttggcatggctgtccaaaggagctcaacgattgaggaaatgtgggaccaaaattctggtcaaggagattggaacctaaattttttgagggacttcaatgattgggagctggatacggttggggatttactccatatgctgaggggtcataagccttctttggaggaagactcagtcctgtggaggcaaggaagaagtagtcagttcagggtcaaggaagcttatagtttgttgaccaattctaatgatacatgttttcctttaagaagtatttgggtggctagggtgccaactaaagtcgccttctttgcgtgggaggcgacgtgggggaaaatgcttactttggatagacttcaaagaagaggggtgcaacttccaaattgttgctttttgtgtgggtgtgaagaagaaaatgtaaatcacatccttatacattgtacagtggttagagctttgtgggatattgttcttgggttagtagatgtgaaatgggtttttccagaaactgtaaaggaggtcttagctagctggaggggctcgtttgtggggaggaaaaggaaaaagatttgggccgccattccgttgtgaattttttggacagtatggaaggagaggaatagattagcttttaggggggtgtgttgaatattcagaagttaaataatttttttgtttgtaatttgtagagttgggccaaactgtatttaggtgaggaggctttctcccttataggcttcctcgagtgggtagcatccacttaaagggaggtgattctttttgtctttgttttttgaggccttagccgccttgtatactccatgtatgctttgtggtgttatgcctttcttttaatgcatatcctttacttatcaaaaaaaaaaaaatttcatggattgccttaatgatatcccacaagcaagatctgtacctaataagcatagcacttcatctaccttgtttgctcctcttaagccttttgctcatcacatgcatccttccaccacatccaacttcctgctcctcataagcaacacctcttgcaggcgtgatttgaaaagaacacataattttatgaacttgaaaattattcaatttgcctcacacataacaactggttttttgatacatcttgctttacttatcaaaaaagaaaaaaaaaaaaaacctgaacatacataaatctattcatccactaaggaattaaaaatgttcaagcttacagatttaattgaatgcctttaacttcatctcaagcttcattaagcgataattttcatggattgccttaatgatatcccacaagcaagatctgtacctaataagcatagcacttcatctaccttgtttgctcctcttgagccttttggtcatcacatgcatccttccaccacatccaacttcctgctcctcataagcaacacctcttgcaggcgtgatttgaaaagaacacataattttatgaacttgaaaattcttcaatttgcctcacacataacaactggttttttgatgacaaattctcttcttaatatctctctaacaactcctaagagatcttaggtttacttttgaaacccagaacatcttatggaattcaaagaatcttagaaggttaggggaattctagaagagttttggtgaatggaaaatacagaaaacaagcttggctgtgcttcttatttgatcaaaggcgaaacttctactttcttgttggtgaagctgcaatctttcctcacttggtttataatgcaataaacttaatttggaaaattccaatggccaatgattttaaacacaataactttaatttatcactttattttgtgcttggttttaattttgaaatccacaaactacttaaggcattgtcaaagtagttttgaaataaagaaccaccttcatgatctatggtgattggtttagagtgagaaacacaacttgaaatttaattaaaagtctactttttcagaaaatcactagtgcaatggtttttttatctaatacaaagccctaacacacacacacacacacacacacacacacacacacacaatcacaaacccacacaatgacatctattataacactcttatcatctcatttataaaatagcttttttccaaccttttagtttttctttgatatacttaagaatttacataaatttgtgcccttcttacctagtaagcgagcctcattctcccaacacttcactatgttcctaaacttggggatgctgaggctacatattctcaaagtagaagggaaatgttccatgttgaattgtataggaattcaccactataaggcaatggcttgacaaaagtctaggctaaactggtcagatgattttggggaattgaacttcctgattcccagtcattggtcaacaagaatattttgttagaatctctcatgcttgatgaggtcttgaaacctcctagtttatctaaagcattgttggcctcctaataacattaaattcctctccacttcttctaaccacacaccataccatataaatttcttgctgaaatcccttacttaggctcaaattattcagcccatgtattgccaaagatccaaaggttcttccaaatatccatgcaaaatattgacaaacttgagaatcaaccaacttagtactaccacttctcaagcttttgacatgttccccaaatcaaaagaatctcttccatggcttagcttctaggtcccccaagattgcaaagagtcaatcttttatctctagtttcctaaataccctaggcaattctcctatttatttgccccatttttgtttcttggatcatcataatcaatgctttcttttggcttattggattctcatgccctagttgtcttgtttagtctttttgttgttcaatcgcaattgtaggtttatttttgataggaaacgacaactgaatatattgataaaaagacggtacaaagaaggatgaggaatcctcccagcaaagaaaaacaagactacaagaaatcaaaaataagaaagtacataaagagaaaagacactctagttacacgccgctaaccaatcaagttgtagcatgttaagaggaatccccttaaaaaccttagaacaaaaagcccaaaaagaggtaagaaaacaaatagaatcccaaagatactcagaattccttgctttgtcctcgaaaatccttgcatttctttcccgccacaccacccacattaaagcgatgcacgcgttttgccataaaacaatccctctcttggaaaatccaaaaccattaaaattactagataacatgtcagagatactccttggggaaacccaatccatctttgctgattgaaataatctgtgccacaaccctatcgtcaaagagcaatgaaggaagaggtgatctactgtttctccatgcttcatgcacaacttacatatgtcagggctaagtgctttgtagggtcttctcaattgtagcaagtcattagtattcaccttcttgtgagccaccaaccagacaaaggacttgactttaaaagggacttgagcattccagacaaacttggtagggaaaattgtaggcgactcagaatattgggataaggccagaaagaaagatttgactgtgaaaagacctgaaggagataagaaccaagatctcttatctggaaccgaagatgaaatgtgtagacgatctaaagactgcatgaggccctctagatcttctatctcataatcagaaagatttcggcgaaaagtgaaattccaagagaaagggcgggtataaccaagaattgatgaaataggagcatttttatccgtgactactctaagtaatcttggatattggacacccaaaggttgttccccccaccacaagtcatcccagaaccgaattctatctccattaccaaccacaaaccgagtaaacttggaaaactcttggtagactagtgcaatggccttccaaggacaacgatgagaccatctaactatgttgttgacatcccaaccattggagtgtgtttcataaatgcttaaaatcacctgatgccatagagcagaaccctctctaggatatctccacaaccacttccctaaaagagcgacattcctaatagatatctttgcaattgtaggtttatgccctaacacttttctcaccactcttatcatagagttaatgatcgtcctcataattaacagtgacctgcttcttctcctgctttttattttgcttcatttctctatctggtataaccatctttaaatctttcattcttatctagtggttttgtttctctatttaagtattatgtgcacttcatttatgaaattactcctcctataggcatcaattaatatatggagtccacatatttgagctacaacacccttagattttatctccaagacttcttttcaagcattgtcatgggattgtacccctccaaactagagtgggccaactcattagtcaaaagaacttcgttcctctccttgctttctcaatgactactacttctagacacctgctttgtgaactgcaatattgccaaacacctcccattccatttagagccttcaactttctatctaagataaaacttaggatcccttagactcatatgtatctcactaaattttgattaaaagcccaaaaactttgattttaagccagacgttctcgaaactgaatgaacatctcttcctcttaatgcttgtatgtattcgaaagatttcttgtctattgttgtacttcttgattcaacaccatcaagaagaatgggtaatgtccagaaactggtctaggaagaatgcattgagatgcatctggaaaatgtctatctcccaaaataaggaggccaatcaatcatatatatggcctacttttagccaacaccaagtaaaaaacactgcccaccgaaggaacatccaaaagggtaatcctcttgtcttctttgtatgtaaaggttgggccccttctcaattgccttgtagactttgtttatggttcaaaacaaatgtggtatttcttcatatatgcattccaccatgcgtgggcatgatctaaaaagcttaagttgcaaaaaaaattcattttggtatgtggtggaagaaaaataattttatggatgtattaaggcatgtggcatgtgtttccgtgtgagttctttgagtgaaccccctacaaacatgatttttgttgaagagagattgatctttgaggatttcagaaactgatcaaaaaaatctttgagaatttcaaatctgcattacttgggaattaaaaccaaaaaacaaaaaagaaaagaaaagaaaaatttgcttcactttggagtatgttgctctaataagatttcaaattccaggaggtggtgaatggggaaggagaggataaggtgatttggttggagacaaaaagtggaactttctccattaagtctctttactcaattctagagcgtgggagattagtgccttttccaataggggttgtttggaatgcgtgggttccacctaaggcgagtttttttttttttacttgggaggcaccttggggaaaagctctaactctagaccagttttagaggagaggctggatgctggctaatagatgttttctttgtcatatccaagggtcaattgatcacattacttataaaaaaaaaaaaaaaagagccaatgatcacattctgttacattgtgacacagtgaggattttgtggcagcttttattttcccttttggcatttcttagatgctgccttcctctgtaaaagagaatattagggtggcgtgattactttgttaaaaggaaacggaaaaaagtgtggggagtagcctctttgtggttcttttggacaatttagaaggaaggcaatagaagatacattgataacaaggagttttctaaccaatggctcaaaaccttgtttctatgtaacttgttgtcttcaaccaagttgtatatagtcgaagaaccaatgtggttatttgacttcattgattggttggctgtgtactttggtgtgccctttttcctactcttttcaggctagcatcccacaaatatgctatagtggtaaacctttgggggaggcaaggggatggaggtggttgttggaaggtgcattttagaatatcttttcaagattgggagttagaggaggtgacttgtttcttggaacacattccttcgttaaaagtacaagaaggggaggactccttagtatggaagaatgatgggaggggaaaatttagtgtcaaatcgtattataagtctctaagggctgagaacaatttattattcccagctaaagagatttgaggatcatgtgctcctcttaaaactcgtttttttgcttgggaagcagtttgagggaaaatgttaatagtagacacgttaatgaagaggggatggtccatggttaataggtgtagcatttgtaaagatagtgaagaatcaattgaccacgttttgattcattgtggtaggacaagggagttttggactttgttgttaacaactttcggtttggtgtgggtattcttggcttcagtagaaatctttttctagaatggaaattcaagggttagggaaaaagaagagttgtcaggccaaagtttgaaggatcactttattcgatcactgatatagtggtctcaacagtttttggagttggataatccttcttttctgaattttttggatgctctttattgtggctagccttgtgattctctaggtcttttctttcttttttggtgcttggatgggcttttggtgtatactgtctatatacgtagggtgcgccccctgtttttggcgtttcttaattcatgcctttgtctataaaaaaaacctataaaaaaaagatttcaaattctggtattctaaaagatgatcactatagaataaacttaggttgtcacggagttacataaggtataactatattgttaagggagttttgtttcaatgtatcatggtttctagttgtgtttcgtgtggccattgtagagagtggattattatttttggtttttttttttttgcctggtcttttcatttcggaaagctttattgtaggttgtcatgtttttttcccttatctttttattcatttgatactgttttatttttaacactgtaggaatattgggcttcagttggttgtgctgta

SEQ ID NO: 11368 - DNA, 6222 bp, Vitis vinifera
  Intron number 1 from transcript GSVIVT01017471001 (locus G SVIVG01017471001) derived from phytozome v7.0 (chr-ID chr9 ; pos 8899523 to 8905744 reverse strand)
cgaccatcattactgggttcttgggctctgggaaggtaacatttttgctttgttcgttctggagaatttttttttttttgataagtaaagtatattcattcaaaaggcaagacgccacaacgtatacagggggtatacaaggcatctaagcctcaaaaaacaacaaaaacagaaccacctcccattaagtggaagccatccactcaagaaatcctataagggaaaacgccttgttcgttctggagaattaatatgcgaattggggtgtcctcacgttttagcgttcgtttcgaaatgagatgggcactgccattattcattggtttcaaaatgttcaattttttttttatgctttgtagtttgtataacagcataaatgcagttgattttgctgggttatgtggattgcatttttgggagttctattaatttgtaggaaaatttgggggcgtacgaattgtctcttttggagaagcctttggagaatccatgaaggcctcatataggatagctttagcttttgctgctatatagtactgatagagaagtatacattatacaatagcgttttccgtaggcttcgattaggtgtttgaaatccgtgtttaggaactttgtattaccttgaaatgatgtgattgctttaatgataggtacttttctgtttgtttggtagcttaaattctgatagtttagaaaataaaaaagagtagaacttcatgagtaggtgagaattcaaatgcaccctgaaaagctggagaggtcgatgaatattacatgaatttaagctatcattactgaactctgtattttatcatccttcctgaactttattttcctatgaccagtcataagaaataggaaaaaaaaaacttacgcccccataattttttcattaagactagagaaaaccaaatcttgaagatctcactggtattaaaaatcattagcctttgatacaagctttttttttccttttcttaaccactctctttgctatccttagtattggagtggaaaaactttaagggcaactaattttacttatactagtctcattgttagagaaaaaacctcgtcattctaatctagtttctggatgcaaatagcaagtttgttggttttggtaaccatgtaaaacctaaggatattgtataaaaatcttgttaaagaacatgatataaattgtgagccaaaatcctacaagtttaagttttaagaaaattggtagtccaacatggtatgagagccttgtcttaccggaggtcatctgtttgagcctcaccacatatattgatttctgcaatttattaaacttgcatgtaagaggttaattgtggttgtttgcctttgggcctatgtatttctccatgtgtgggtatgggaccacatgtgatggagagtgttaaagagcgtgatatacatcgtgggcccaaatctagtaagtttaaacttttaggaaaattggtagttcaacaaatatgtttttatttattctctttgtaggtgaaattccttttatacactttgcatttacaactatccatgtgaggatgttattccacgttgcacatggctcatataatgttataataagtacatgcccttgaggcttgactcaagtggtaaagggatgggagggtttgtgggaggttttaggttcaagtcctaatggggacaaaaatttaactatatatattaaaaaaaatgttgtaataagtacatgtttcatattccaaaaaaaggggaaagtctagaatgtactcctacaacatattttaccatttatgatgcataagttgctagttgaaatttgcctcgaggttgaatttttttttttttgataggtaatttttttttaaattttcccctttttgtccctggtaggtcttgaacctaaaacctaccttaaccctttactacttagctaggcctaaagggcttatgctataaggttgatgtcatgtggtatggatgtacttaaaaattttgttcctaaaagaccaagtcatgtcagctagacaagggaactattaggtgatggtatataatgaattccattttataagttaagtattttcaaagatttgatgattggcatttattttaattaaatctatgggtgctggaatatctattagaatgttttgttaaaagaatgtcaaactcaattgttaaaccttgtcatggaaaaaaagaattatgaatggtgacatggtatctaatgaatttaatcaagttgcttaaatgtactaaaagcaatttggtgtgtgattctaaagcaatgtttataaaactggacttatcattgaaccagaaaagttactgcttcatggttcaatagtcggactgatggttaaatcaaaattgaataagtgacgtcataaatatgtaattgatatattaattaaaatttaaaatatagataaataaattaaaaatcaataatatttatttttttattcttgatattatcaaattaaaccttaaataattattaatattttaaattttattaattaaaatatataatatttaaatgtgaatgtattaaaaatgaaagataattcagttgtttaattttactatatgtttttacttatataatttaaatataaatattacaattttttttgtacaaaaaatattgtagttttgtttgcaacattgatcaataaattgcaatcattgaagtggtgcctcttccatattttgaacccaaagtccaaggtttaagttcccagctgagtttctttcatgaatgttcttaaactcatctcacatcagatgtggatgagaataaaatgggctttaaattccttatttagccaagcaagaatgtgcgtgtgggggggtggggggctatagtggagctcactaggcagcataatgggttgggcttacattttggtggtgaataagaccaacccagagcccagaactggctggtctgatccaccgtttcagcggtccatgttcgatgctggttcattatgtaatttagctcaaagcctcaaccggaccagatcaggtttcagtcgacagtccaactagtctggtccgattcttagaacattgttctaaagttaaggtcttcaccacattatatgaagattgcaaatggtggaaagttttgtggaatgttctagaatgaaaacgaagttcaaacttcatttaccagaaacgagcacataaatgagcaaaacaatgggaacagaagtgagaattgcagtctgtaggactcattgcatgaggtttgaaaagtggcgctgttttcttgtctgatgcatatataaagagcataataagaggaattttgagggtttggaggatcggtcagaattagcaatgaaagaccttgtctatgcttgatcatgggtttcttggaagatgggtattttttctatgccaatttcttcagaatgctagcacacctattgttttatttatttaaatattgagttgtcacatttgtgtgtgccttgcatactccctgtttacattgcatagtacccgtcttttgtttggtatctatctaatatatctctaatttgcctgtcaaaagaacagcgcagtctgaaaaatttatggactatgtgaacaggaaaattatttacaagctaatagaaatgtgttggaagactttgtgtgaatcttatgaagcaaatgtgcactatgaaaaggccatatggtgaatgtaaactttaggcaaaagtcattatagaaccaaaatcattccggtatttattattagattcaatcaaattgtaaacttaagaatgatttgagaaatttcagagaatgtttatgaaaaattatgagaaaaagacttgataaacataaaagatagattttgaagcatgttgtttattggttttcgctggattttgtagaaagtcttctaaaagttccaaataatcatttccaattatttttagtttttctgagtttccatattgcatgtgctaactttgaaatatttcttcattgtctcacaaacagggttactaccaaaactactctatataagatgaagctgatttttgttgactgctgaatgtggcccattagttgccctgtctcaatcctttttcttcttgctaatgtggcattgtaacttggaaaataatacaaatagaacttacctataaaaaaagaaaaagaaaaaaaaaaaaagacaaatagaactgaatgtgagatcctcttccttgttgcatacaaggaaatgctctctatgaggagttttgtagtgtaccattgtggtagaatggaggctttcccttcctatcctgtatggaacccttggatctcactaagagttagattttttgcttgggaaaatgggtggggaagaattttggtagtggatcaactcaaaagaagggggtggaaaattccgaatagatgcaacatgtgcataggagaagtaagaaacaattgaccacattctcctttattattcaaaagtagtcatcttgtggtagttgatcctacactcagtaatagagtatgtgatgcaatccttagtaaggaaagtactctttagctgagtatagaagaagtaagaaatacttgaccacattctccttactcttcaaaagtagtcagcttatggtagataatttacactctgtttggaatggagtgggtgatgcaatccttagtaaggaaagcactcttgagctgacatggctcctttgttgggaaaaagaggaagaaatcttgaagatttgctcctttattctttttttttgaccatttggaaggagagaaattggagggcctttgaaaatattgacaaagcaaagcgagctatcaaacagtgtttatgtttaatttttgggatggttgaaggtgtatataggagattacactttgttcatgttggactttattgattggttgagctttaggttgtggctggtagttgttttttgtctttactatgacctcgtggggccttttgatgcccttgtatacattgtgtatactttagtgcgtccgtttgttaggctttgttcatttaatcaacatattgcttttgcctatcatttaatgaacatattgcttttacctcaaatgcattcgattttactcttcttgcactccttgtgtttttgtcttccttttttttttttatattcaatagaatttaggtttatagtatttgtagtggctttcaaataagagttttggattgctctagaaaatttctagggagtcttttaggtttctctttatatcaagaaagatagtttatgctaagattttctaggagaaatttattttaagtagtttttggataggatgatactgtttgaggttgaaaaaaagtaggattgtcatgtgacatttttctagtgtttgagaccttgagtagcactggacttgctcttgacagtttaaatacaagatattagggtgtccacttcctttgcaacttaacccaaaatgttctctatgaatttccattaaaaatgtgaatctttttgttggaaatataatgtctatttaggaatgttttcacttctctgatattttctagaacaaaagtttgtctaggaatttgaaatgttctcaacttggtttctgtttctaagtatctcttaagaataatttttatttggcatgctttattttcaatcattctttagaaaacaacccccaaaaacaactgaaaacaattaaaatatgttattagaaaacaatctattttcaaaacaatcctcaaaaacacgtttgggaacaattgacaaccaaaggtgttttaatgtttttttgttctcaaaaataaaaaactgttcttgacaacagtgcccaaacatagccataactttagttttccctagaaatattttttgaacatattgtggactagaggggaaaggatattattttatgagagtgaatttattcaaatttgccccaagtttcacaatgaaatatctatcaagaatttaaagatgatacttcccctaatctatttgactccctgaaaaaactggagaaaacatatgaaaaaacgcttaaaaaaatgagcgataggttcttttctcattcttttttcaggttagcattttctctttatttctttctgtcgattcttttagagaattatttccttttttttttttggggaaaaaaaccagtcaataatattgatctgtttctctatggttttgaacagactactttactaaaccatatattaactgctgatca

SEQ ID NO: 11369 - DNA, 7059 bp, Vitis vinifera
  Intron number 4 from transcript GSVIVT01013686001 (locus G SVIVG01013686001) derived from phytozome v7.0 (chr-ID chr1 8_random; pos 2619407 to 2626465)
cacttgacaattggcacgaggagtttctcaaacaggttcatgatgctttctttattcctttgtttcttgttgttggtggatattcttttgctaattgtctacctgctgggtcagtgtgtgttttcttgaatattctttccgcttgttgtatccttatgtcttgttttatcaatcttcttaatgaaataaaggccaagtgtggatcaagttgttcattacatctcatttacaagaaataaaaataaattgtgatatcaaacagcagccatatatcaatctacttttcctgtttgaagtaattcctatcatttaggttcggtaatatggagagaagtcaattgcatattactttagcttgaaattctttcctaactattaatgttggtctcataaaacttgtctttgggacttcatgacatatagccagtaactgtgaattaaactggtttgaaattaaagaatattactatcaggtttttatttcctttttttttttattatttaagaatttctcattgtatttatgtcttgataagtatagggtctttaattttctaaattattgttagttcaataatggatatattgtaatctatctactctccatactcaaataatataaatatcaatttcaccatcattttaataatattaatatctttcaatagtcaatactattaaatttttgtacctaaagtcatgttagggaattagcaaaatgataataatggtttaaaacattaaatattgtatcccacataacacaaagtgtcaaggttatttagataaaaagttcaccttgtccaatccagtttcctagacatcaagaaattcaaaactaaacaaaattagaatgaacatccttgagaaggtttatactcttgatcttcattaaattgaaattatcatcgttgggtctgttttttaaagcaacaactcacctctttttgaaactgtgtttgccctcattgtcttagtgacttggttgaggcaattacctagatgccacttctttggagacattttgcctaggccttgccttgcctaagcaacctagaggatcaccttgtaatagcagtgtccttttacacctttctactttcgttcctttaaaatccattaaatgacaaacgtctttcatttgaaatatcattgatgttctagatatggcatttttcttattctttgaaaagcttttctaataatgataaaaaagaagcaaaggaaagtgtaaaaaggatgcaacctaaataatctagatgaattggtaaagtactagcaccttcctctcttcgttgcacaatcattgggtcatctaatgttaataactttttgccctcatttcctgacttcaacactcaacttattgaacactgccctttttaatctgcatactgtatgtaatgccttgttagaaacatacaaggaggttggtgcatatatattttcttatgcgttcttgatatcaagctagataaagacgtaagcagtgagatggtccctaaagtagtctaccacaagattcgtagctttttgcaataaattgagttttaaacatttcagtattctattagatttatatttggtaacccaaaccattggcatcccacaatttgctttcctagaggtaaaggggttaccttccatgcaccattcttgattaggacgagcctccaaagtttacccacaaaggtaatgagagggaacaaagaaatcctaagttgagggtatttgggtaatactataaaattagtttattttgaagtcaactttaatagtagtttgtaatttgagtttgtatagaatttagaaaataaaagttcaattccatgaaagaagattttctaaattctaataagactccaataagtaattactgctaatttgactccaaataatccaaatatgaaaaattacttaaatacccttaacttctttttgtcaataaacctaggaagctcatcctcatttgtttttttcccctttttgtttgtatcactctctttctctctctctccatccctttctcttattttttggattttgcctcaataagaagcatcggtttgatggaaaagaagggaagtttggagaactgcactttcctatgttattgatggagaataaggtggaaatatcctttgatgacttccaaaaggaggggacaggctagttccaatgctcaagtcttaatttgggacactaatgactatttaaatgtatcttaggacttcccataattagtttgttaagtttcaattttagttaatggttgaagttttgtcaagtttgtatttcttttagtcttcttatttcattaaaatttttttttattttgttttagtgtctaaatatcctttcttatatctttcctaaggaattatgaaagttgttgtgttagggaagggtaataagagtctatgtatacctatgtagtctttcaaattgagaagaagaattttaattaaagtttcagcatctatcatgtttgaggatgtgattgccttctttctacgtatgattgcctaggaaccctagcgtgattgccaaggaaccttagcgtgattgccaaggatatatatactagccatcttttgttttctttaccttatctatcacaactagaagtgattgaagttataagggaaattttaagatcccacctcagttatttttgtctttgatggaagaaaaggaattggagggtctttgaaggggtaaggctcttggtactaaatcttaaagtgtcttccttttgtcttgtttttttatgagattatggatgctcgtggaaggggtgttgtctcttcttgactaaatagagaggatatgatgggcacaagtggtcctttttggtgctgtttgctgttctgtttttctctcttttttcatccacttgctttggttgtctgtgttctccctatgtactagtttttgcccccttttggccatttagtatacatcatcagttacctattaaatttaataagcatgcctttttctaaatttgtttatatatgataaaaacacttaacaacttgaccggatcatttgccagttcttggacagaaaattgtgctaaacgagcataatcaaagacatggtatcaaattgaatactgatgctgcagctgcaacactatatatggtgcttcacctttgaaaatataggtagacaacttaaaatgtggccatctgtaaacaattgttttctaccaccccaccttcacctcaaagacaactttggaacatgcatgtggaacataatgtatctagagcaagttctatttagatatttggaccatgatggctattctgttgttgagcaatcaagttggaaccaaagctatgactagcatttggatcaatatcatggaaggatagatcatagatcatccttcattttctttctattgatccttgataagatctttcacattttgaggataagatatcacaaaatggccatggtttttggttaatactggtgcattgttggaacataatgtttctattaatccttgataagatctttcacattttgaggataagatatcacaaaatggccatggtttttggctaatactggtgcattgttggaacataatgtgaataatgtagggtagctttgtgcaaagaaaaaaagaaatctatccttagttgaaatataagcaaacatacccaatttaatcaggcatgaagtatgttttgaagtagcatatgtaacattacttggttgctctcaaaatggtggaaaattgttgtggcctttaaatgaaggcattgaagttctcatgggacaatgtagtcgtgtcttctaatggtttcatctaaaaagacctatggtcgcatgacctagttccctattccctaataagtctaattgttgactatacctcaattatttagaaaataaagtttgttattattgatttcagcatttgacatatgttcacaaaaggaagaaaatgatattttagtgatcttttatatatttaagttgttgggagtcaagctagtagtagtaggttaatttaagtcctacttaaaattatggaatcttctttactagaactttctatttttaaaagtttttattttccaaaaaccatgttttctaaaagttcctagtttttaaaaaatttctactttttgaaaaagttttgatttcctaaaagaatctatacttgagaatgattttattctctaagaagtttttattttcttttaattccattattttgaagggtgaggagttctaggaaaagaattagattcctaataggttattaccttaacttcatttctccattctttttttgtttccttttcttttctttttttgaaaagatctggtatacccttatttgattgtaggtggcttccttaaggttgcctttcattagttgcagtgtcatttattttattactctggggatgataactcttaatactacatgtaaacaagacctaaaaaagtaaatgaagttagcatattcaggttgagtttaatcatgattgtgttataatcatgtcgaccaacttaacccctttgttaaatgagttacattcagtttgaaagctccctccaattttgatccatttaattgtcaattcctgttgacatgatcacaactgaactcttatatgacctgttcgatatttgtgttaggttgaaatgattgtattggcttgtgtaagatcatttaattcatgtagttgtatattttaagattttcttttaacttaagagttttaacttttcatgaataaattatatttattttattatcttttaaaatagagtttttgttaataaattatatttatatcatacatttatacatacatacatatttgaatcaatcatgcccttgaggctttgctcaagtggcaaggtgctggggtggggacttgggaggtttgaagttcgagtccgagcaaagaaagaaaaaaaagattcctaaaaaaatattcctttttttttttttttttttctcttagaaaacaagtcttgagaaaacatgttgaagtataattaacgtaaatttaaagtcttaaattggttaaacaaaatatgtcaaataatatgattattaagcaacttctcacaatttgttcacaatacaaacaattagtttgacaaagtctgtctgaattttttgatgtggagctagatgtgtatagcggagctgcctactaaaaaccactaccgcattactcacagcttggcctggaatcaaaccatgctatgccatgaaatcattggataagatacatggacttggttcacaatgataggaatggagactcttggggcctggcttctaaacaattgcgttgtggtcttggtagagaatttgaattacatctaactttctcatgaccactagaagatcagtagaagtggggccattgaccattagagattgttgttaaaagtcagtgggttatgagtgtcaaattaaatcctgactgaaccagacctgtttattaaagaagttatgtaaatcttgtcatattacgtgtgtaataaatgggttgtattcatattaaaggactatgacatgattattaaatgggttgtatttgcttgaccagatttcgctatgatcttatctcaacatggaacaaactacatataacatgactttagtgtcacacaaatattactctacaaatccatataacacgattctattgccactcaaatgttgccattgccttcctttgttcaataaattgacacgtgatcttgggctgttgttgatagacctgatagtcaatcttctttaaatttcttcattttggtctactgtgtccctttttgcaaccatactaaaaactgaaaatcatgctgaaattatgaattctcaactcttcaaccagttttggcaagttacataggtttcaaatggtgaaattgacatttcttttaataagtcaagggatattttgaaatgtcttaattattatcttatggcaatctattattcaaagccttaacaaaggtccaaactcaaactcattgtcaatggggccataatatgtagtaaatggcttaaaccgagtctaatatctttgttaatgaaactgatgatttttctctccatagtttgaccataattattttcccttttgatattatgaaaacctgctacatgctttgcaagatgggggaaaatcacagaaacatgatccccttctgaaaacctaccatgcattgggtaagctcaggacttgaatctcaagccacctcctgttcctgagggggagtgctgttgtctgaggcttcccagtttcttattatttttttttttgttttgcacttttttttgtttgcttgtttagactgacaacttcatgaaaacttgttcaatggaaaaataggtatttaaattacaattttttttgttcaatggtaccatttgcttcaggatttcaactaatgaatgatctaatggtttgcaagagtttgacatgatatggtgtattaccattatgtgttgcctgtttcatgttctgatttttatgcttttcccattgttttctaatgtatggttcttttttctttttgatgtatgtaaaagagtctagaagcagatttgtcaaggattactatagcttttctctgaattatgttgtaatggccagtattttagtgtcagaaggtttgtgtatgctagcagaaatctgggaaatagtgctttaggggttgtaggtcattctatttaggaaaaatgtgtaccaacacaacatgatttctgacagtgatttgtaggaaaatcttggctagcttgagtcactaactgtatgatggtcttcttaccatgttttctggttcactgaattccagaggcagatttacagtaaatttaaaatgtagaccttgtgcattgtcaactgccatttcttagttagcattgaattgccttcatgacttgcacttctttgctttagatataatctctttttattttttatttttggatgctgaattggtttccatctccattgtgttccaggcaaatccatctgatcccaagacatttccttttat

SEQ ID NO: 11370 - DNA, 14723 bp, Vitis vinifera
  Intron number 7 from transcript GSVIVT01006478001 (locus G SVIVG01006478001) derived from phytozome v7.0 (chr-ID chrU n; pos 26338197 to 26352919)
agcttaattggaaatgtgagtgagttgaatgtgtgttgcatttcctttttcttttcattctttacaataagctaataatgttaaaattctcaggtttggaacctatgggaagaagacaaagccttggatttaatcgatccgtcactagaaaagtcataccctgcagatgaagtattgagatgcatccaaattgggctcttatgtgtccaagaatctataacggatcgacctaccatgctgactataattttcatgttgggtaacaactctgctctttcttttcctaaacggcctgcatttatttcaaaaacaactcacaagggtgaagatctatcatgctctggtgagggacttttatctgtaaataatgtgaccatgactgtgcttcaacctcgctaaatgcttacactctcacatgttgtatgtttatcctccatgacaatgaacactacaagaaaaaagcctttcattgactgtttttcaccatcatggtatggtatatctgtcaaggtatgttactatttatatatgtcatctatgctagtgtcaagaaaagtttaaagctgtcttgacatttacatatgttaaggttgtttctatttctaccaatgatggaatctttgttagtatgacatatgtcaattttctttcacttttgtcgaggttggattcaacatatgtcaagatttcttaatcttatgtcaaggttaacttgctcttctgttaaggttgctacaacaaatgtcaaggataagtataatatgtcaaggtttctagctattgcaatgtcaatgttgggcattggccatctgtcaaggttgcttatttcaaatttaatattattttactataatttttagttttaatggaaaatgaacctattaccatatgaaacttgtttccaaattaaatttgatacatatttaattatgataataataactaagtcctaaaacaatgtaaataaaccattactcaaggggaaaaatcttttttctacttactctctattttctatatacaaaaaaaaaaaaaaaaaaaactaattgcaaacattcaattaagataatatacaaacttaaattgaaaagtacaatactatcttcataagaggtggtcactaattcttcatcatcttcttctttttgctatatttcttgaatacctagtaggatagacacaacattaatagaaaagtaagcaacaagtataaaaatagcatttttcaaattataaggtactttcaattgcaagaatacattaaacatacatgcaatttgtagataccatatatctagcattaatcttcaagcccgaccctctagaaagaccccaaaattgtcaacacctctatctcaaacctatgatagaaaaaaaaacgatgttaacaaaaagaaaagctcaaattgtgaaattagatgtctaactacaatgaaatatttttaagattgaattctaagtttaattattgtgtttttatattatggacttaaataactataatagtatacttctttttaatttctaaaaggaatgcaaaaaggaaaagagaaaacaaaagtttcaaatatatctttcatgttattttggcttctaaatagataaaaactcacattatccaagaaattgttaaaattaaaattgagcataaattttaatcatctcaatcataaataatgaaatatctaaattcaaattcatagaaaccacactaactattaatttcatgcaccaaatgcatctaatcttaacaaaataaaaaatcaaggatattctccttcaattctaataggataatagatcttatgtgtgcaaattttgtctttatttcaagaattaataaatgcacaagctatctagttgagagcttaaatctgtaaatttttaaaagaaataaattaattaaataaacaaaaaaggtctaagaaatggaaaatctccaaaattaaagagaaaatcaagcacatttcataaatgggaaagagttatgcaatatgctgctattcttttctaactaatgtgaaattgaaaacaaatttgacacaaagttgtgtgagaatacatctataaggttcatagaaataatgtgtagattgccatttaaagctatgtaaactaagaatgacaaatagcaaattatattatttatatctatcataccttgttaaaataccatgtcaaatattccatagatagacaactacgcatgagtatgaaaatgttgtctagatgtttttctcataggcagctaatgcatgagttcattgaattcaaaacttaacaacaattaaagctgacaaagcacccaattatcaattattaaagaactcttaatgggagcaaaaactaaaactaataaagtaactaataacaaaatataagagttgcattggtacccaatataatgttcttcctaatgtaattgtgctcattaaaacaaaaaacttcacggcataaattaattgaagaccccgtacaagcaacaagaaaatacttcataccattatagtggtaattaaggattatagaaacaattttagttggcttgtgactatgaatcgaagaattaaaattttgtgagggttgatttattgcttatcaataagatagcatatcaatatttaacaaaagaaagagtttcaagcaatcatgaatcataacattaaaatttagccctaaaaagaggggaaaaaacaaagagaaagaaccaaaccaaaggagcccaactaaaaattcaagtgcataaataagtaaaattaaatagttaaccatattaaagagaaaaccatgtcccattatgcaaattgtttttgtgtgcccaaatatacagttctgtttcttcaaattgcattaaaagtccaatggtatctgtaaaggaaataatagagataaaatttaaaggtaatctactcataattatttcaattaacacatccaaatattatggatcaatagagaaatcaatttaaagaaaactaaacatcagcctttactagcataaaacgaaaacaaaatttttttttttaaaaaaaaaaaataattcattagatatcagattatttttggggcaacaaaattgagacacataattgcattaaccattgatgcctacaaactcaattcgaaacataaaaatgaaattgaacatgaatttcaagcttcaaaattgcgaaccaaaaaaacacttacaaaatgttagaaaagaatgggaagaaaatttctaaaataggatattctaagatgcctttttttagttatctttcttagtttttctataatcaaagagagtaaaaaaggaaaagaaaaagtgaagatggaagagaattagataatagagtaaaattcaccaattatcttaattgcaataattttcaagattacccttaagccatatttgactcattttttttttcaaactttcctcgcgttttaaaatgaacttctttacaaatggaaaatctcataacttaacataataaatgatatcaaaatagagaagtttgaacataagtcaataatttctctattgtgttattgctacgaatatattttgcatgagtatattatttggattcatagagatagaaagaaaccgaactctgttattatgttgaacaacaaattttcctaaaagtttaagcttataggatttgagatcaatatgtgttttatgtctgttaacactcaacacatatttcaataaaaaatttcatgaactcctcaaacatttatactacatacaacttagggcaccaaagaatacgagtaaaaggagtatatgctagaagtcattatttctaatgtttagtggatttaatatttatattattaaaaattaatatttatgtgaataaaaaatatctcaacataaaattacaaaattttaattatttctaaagaaatttattaaatttagaaattttaaaatttagtttttattatctgatttactattaaatgcttattattttggttttctttattttttcaatggtctttttcccaaattatttcatatatctataattttgtcgatctttgacacgtggattatcttggaaaatgttcttaataacaaagaaatattccttcttgtgatgagtatgaactagaattctcgttttttagcgaatagagctccccaatttggtgaggaaatgagatagtcactcttttttttttgtagttactcgcattatgtactcaaagtatttatccaaatatccaatacacttacgaaaccacactttttcatttccaaaatgtaacatacgtgactataggcttgcacacttgaaaagcaatactgacatttaacatcgaaggatttaattgtggtcttgtgtttttttgaggtcctataaacaggtgaaaacttaaaataacattgacttgaccaactcaacatgtgattacgttgtatacgtcaatgtagtcaatagaatttctttcccttgacttggcatcgagtacgctagtgccagccttatcttcccatgggaacttgaacaatttgagcaattggccattgccaaccacatttttaagtaatgtcttcttccacccttcaaatatcttaaaatccattaagttttatgtagatatcattttcacttttaaaccttacttattatcattaagctttgtaacgtagccgtcactcacaagttgcaccaaaattgaagtttaactgttgggtaggcgcaattttgaagtgatcaagctatgatacatttaataccactgcaacttggtctcattcataaatgtggtgtggagatagtaccatagttttaaaaggcgcaaggcacacctaaggcacaaaagtatcctataacttaggcacaaggcacaacacaaagcgctcacatgagtgaagtgaaacctaacctagtatgcatatcaattttataaaatatgatacaaaactcaatccaatcaataaaaaatttaatactttaaaagaagtattcaacaaaaaaatatatgtaataaaattatgtagattttaatatacaattagaaatttcaagaataaaagtgtttaaaaatgaaaagtaaagtagacaaggcacacctcttcaacaaggcacatgtcttggcaagcaatgtactatagctagggagtggttgtgctttgagcctaaccgtgctttaagcacgccttttaaaactatggtttggtgaccattttaaaaaacaattctgaaaaatagtttttgagaacagtttttgaaaactattctctgattcttgtagattaataaaagtatatttggaaacctaaaatgtttttatcttgttttaaatatttttaaatatgttttaaaagtatttttatatctagtattttatttttaatcattttacatgtttgtataattatttcttaaaacaattataaaaaaaacaagtgaaaaagtcagaaaataatttttagttgtcaaacaatttttctatgttttttgttctagaaaacaaaaaactattttcaaaaccggttcccaaacatgcctttaatatggggttgagtgttttttttttcttgctttcaagatattaaggatttatattcttaattttttttcccatctattttccccacaatcaaataagcattatttattgttatacttccatgacaaggaaagaaagacaaaacaaaatgttgtataatttgagacttggtgctacatggctgcaagactctctaggagataaggagcatgaagaaagtacaaccaattctgaattacaattctttgatatgaacaccatagctacagccacaaataatttctcttctaagaacgaacttggatgtggtggttttggctcagtttataaggtagttagtcattctcaaatttatgatgacattgcacaagtatcacgctaagctgaattttccataaactaattctacatgatgattaccagggtcaactatctaatggaaaagaaataactatgaaaagattatcaaaggattcgggacagggaaaaaaagaatttaagaatgaagtaacacttattgctaaactccaacacataaatcttatgaggcttttgggttgttgcattcaaggaaaagagaagatgttcatttatgggtccttgccaaacaaaagtctcgactttttcatttttagtatgtaccatttcttttctatcatttccatttctttaatcttctaaggttcttgcataatcacttggagaagttatttgcctaataaaaatcattattagtatatcccaactttgttttactgattgacattttatatatctttgggctagatggaaaaaaaaaaaaaaagtcagtgttagattggagaaaacgctttgaaattattatgggaattgctcaaggaatcttatatctttatgaggactctagattaagagtcatacgtacacagagatctaaaagcaagcaatgttctactggatgttgaaatgcttccaaaattttcagattttggcatggctggaatatttggaggaaatcaaatggaaggaaacacaaatcgagcagttggaacatagtaagtgtcatgtttgagatgccaaagaaacaaaatagttaatatgttttaatagtttcttttattttctattacagtggttacatatcacctgagtatacgatggaagggttattttcaacaaaatttgatgtctataatttcggagttttgttgttagagattgttactggaagaaaaaatagcacttattatcaagatagttcatctgttaacttagttggaaatgtaaatgagaatgtgtgttgcattacttttttcttttcattctttatagtaagttaataatggtaaaattcttagttttggaacctatgggaagaagacaaagccttggatataatcgatctgtcgcttgagaagtcataccttgtagatgaagtattgagatgcatccaaattgggctcttatgtgtgcaaaaatttacaatagatcaacctaccatgttgacaattattttcatctttggtaacaactcttctcttcattttcctaaacggactacatttatgtcaaaaacaactcataggggggaagacctatcatcctatggtgaaggacttttctctgtaaatgatgtgaccatgactttgcttcaacctcgctaattgcttacactctcacatgttgtaagtttatcctccaagacaatgaattgtgtacacaatatcacaaagagaacaccttttgatttagtgatcatagttagataattatccaactctgtaaatgtatgttcaaagatagggcaagaatggaagcttgtaggtatagtcaaataatcaattaagtatgattagctctcaacattaaggccctaaaatcatataattaaaatggttcaaatggagctaatagatcaaatagttccatatgggtaatggaagagcttggaatgaagcaatgcattggttcttatgctatgcctgatgatggaaagactgaatgttcaattggtaaatcttcaaatctgcaaaataattggagactatcacgaggcatttctcatattttcctttttgctaggatggtcaaatctgctttctcttttaaattcaaggcatactcgtggttcctaaaatgaattactagggccattcacttttcctatcaagcagtgagtgacaattggaaaatatgcccatttgaattttggatcgttggttgcctttaccataaggcatcttagtgttgtattgattcctgaagtagtcaataaatgaaaagaagtttttctattttgggcatggcacatgatatcaaatttggcagtatatggatgtttagtatatgagcatctttattgcaaatgattttacaaatcttcagtacattcttcatcggatttctacttttgatctattaaatactgtagatggtcgaacatgggtgccaactacaaggtatgacttcagatccaagacatctaaaattcaaagttaagaattgattatgtgaaatcaaggggaaaaatatcattgggaaatgaaaacaattttgagaaatgataattacaaagactttaaagagtgaaaagttgattgaccttgggtatagttggacaatccaaccgattatactatcatcgagttaggttgggagagggagagccaacatattcataactttaagatgaaaaatggtttagtttaaggacctcagggcatccctaatttggttggtttttagtactgactaatggtaagattttcctcttttttttctttactttttttccaatctcattgacaaatgagtgacaatgagtgttaaaagaataattaaagagacaacattacttcaaggcggggcacaagggaagaaagacaacaaaaagtgttataatttgagttttattgctacatgcctcaagaattagtccccaagaacaaaggagtgaagtgtaaatagtgtaaattctaaattatcaaggaattcaagataaggagtagaagaattaatataagaaaacatgaatataaggatcctgtgaagttcttaggttgttgcatataaggagaagataaagatgttagtctaagaatacttattgaacaatagtttgaactcttttattttcatcctatctttttattttattttatttttttattttgacaatttctaaatctcttcatctcttttgcttgtgatctcaccgttatcacatgaaaaatttgttttacattaaaactattgtggacccgcatttttcacgtgcgcccccactcgatcggcgagactcgctttttatttgtgaaaaattaatttttggaaaaaagttggagtcgccacttattttatttttatttttaaagggaaaataaaacaagaaataaaaccctaaaaaatgactccataatttttggaaaagcgtgtctttgaaaaaccaagtctcggtccgaggatcaggttacctattgggaaggtacctctaagaggtagcacccctttaagccctataagggtctctactaactaagttgagggaaatgtgacaattaattggttaattataagtacctaagtaggctaggtgattcaaaaaaaaatagcatgccaaacgaaatcaaatcacaataaaggagagttagggtacatacctggactgcctctcaagcgttatcacaagacatcaaagttagtatagagatatagcacgcaacatgcatcttatccaagcaagtcaaacatacatctaagcacccaaggattaaatcaaaacatggatatagctcatgatagcatgcattttcatagaattttggaattagaggatagagaacgtacttggatagcaagtatattttataagattcctcgaaaaatgctagattggttagggcaagcataaattatatgaaatatccattatgtctaatatacagtttcaaagccaaaattgagctaagacaaattaaatgactccaaaaataataacaatttcaagtaaggtataaaaccatcaacatgcggttagaaaatgaagcatcataaaacaatttctaaaaaaatggcttagagtggaatttgattacaaaaaatttcaggaaacaactcctacacacctagattaatataccgaaagccaaacactcattcaaaagacagattatcgcaaaggcacctaaaggttctacaaagtccagattagataaggaaaagtgacgtgcataaatgaattttttaaaactaataaatgatcatataaaatcattaaaaagaaatcatacatatttcaaaatgtctatatcacataaaaaataaattcggggtcgaatagtacttacaaatatttttaaaactataaatctaatcagatgtacaaactccagcatgcgcagtaggcacaactttgaaaaatcatatctccctcaaaaatgcatattttctaatattttatgtgtctaaaatcaatttcaagaagcttataattgagaaaaaaatattgaatcaattttaaaaagtcctctagtattttattttttccaaaagatcttgggtgtccagaactatgtgaaaacggagtccccctaaagactcatttatatcttctatctcagaatgactttctaactcaaacaaaacctcaaattcaagttcaagaagtgaggaaagtcataaaatttctggaaattttttacagatatcctaaagttttcaaaatgaatttttgaagttgaagggtcagtggtttgatgaaaactgcagcaaagattaaatcatttaatacctaagatgggtagttcttttctttttaacaaaccgattttagatcaagaaatctcagtaggaaggggtctcaacaggtatactgatgttatagctgcacctgagatgacaaagtcttgcgtattttgtaggaagataatcataaacagggtgcacaatggggaattcttgtcagaatggtagctactcccttacgtgttgaagctgatgtataatataatttccccactagctgccaccatccctacatatctatcactatcatccagccctgatcccaagggacccaccatttgaagtctcatttaaaaaaaaaacataaattttatgctgcaatctggatctaattccactacccttttgaccactgaagttgtgcaatgtacgaatgttttgtccaccaatctgctgctctctcttttaagtgtacaccactcttataaatctcatgcacaacttcctctttgagtgtatacaccctctctctcaagcacaaattagaacacgaaaccaattatagaacaaagtgataatatcactgagtaaggagttctcaacaaacatactgaggaacgctctcttctggcaaggagatcccactggtatgtcgtctgagatttcttcaaccgccctctccttcttctccaccaacagcttctcactagaaagtcttctctgaaactccaatttttccgcctctctctcttttttttttttttttttcttctatgtgctcaaagttctccccccaaaacctatctgttatagctttttatagcaaataacagtccttctacgtgaggagtcttcctctctccaaattttatcttatgcaccggaaaaactcatttttttttaaatttcaaacaataccaatccacgcatatcacctacaatccatgcatatcatttaaagagttttaccgttttcaaaaacttcttcaatggtagacttcttccataaaaatttcaaattattgaattaaataataaaataaataataaataataaaataaataaataaatcgaagaatataaaatgataataatagataaatgaataaataacaagataataaacaaataagtaagaatactaaataactaaataactaaaaatgattgataataatgaaaaaatattaaaataaatgaataaataaaaccataataaatgatcaaataaaagtggttagtaataataaaaaaataaaaataaataaataagtaaatgagataaatgagtcatacaaccatacaagtcatactaaaaaaaagactaatgggccaagtgggcctgagtgaacttagacaggtctggggtgtctaaatagaccaagtgtatctaaataggcttagggtgcctaaatgggtcaagggtgcctaagtaaagtctagtctaaatcaagactaccgaggatcacaataaaggggcggataatcccttaaccaaagtctccgaggtgactcagaaaaaggtaagtcgtacgagtagtaatgggcaaccaaggaactaccgtggagcactggaagtgaatttaaagacatgtgctaaaaggacaaaattgagggtctacaactatataatagtattttaatatggtgtcagagtctcatttggtgtgagatcatgtattcaaatctaattgtatatttattttccaatttgtagttgtttgcctattgggggtcacacgcgaggaagggtattaaaaacataatatagcttacgaactcaaatcttataagtagaaaaattataatttgtttaaacctttagaaaacttgtagtttaacatgattaaactttcatattttttgttttgatgagacaaaaatgtcaattttagattggataaaaaatttcaaaattattgttgaaatttcttaaggacttttaacttatgtttggtttcttgaaaataatatgaaacaaaattataagaaaatgattccctcttgtttaacttattatagaaaatattataaaaatttaaatataattaaaatgagtaagaaattaatgtatttttaaattatttaatctttatatagaagagaaaaaactatttttttttttttttcactttttccttctattttcacttagtgttttctatcccttacatttttcgtcaaatcttccaagaaccaaatatagggttatatcttcatcaagacttaaaccatacatagcgatataaaagcaagcaattaatattctactatatactaaaatgattccaaaaatttcagatagattttggtatggctaaaagatttggagggaaccaaatagaaggaaacacaaatctggtgaggttggaacatggttagtgtcatgcaccaaatgtcaaaacacaacattgaacaaatctttccagtttgttttatttgtcactgcagcagctatatataacttttgtgtcatctgagtaagtaatggaagggttattttcaataaaatatgaagtttatagctttggagttttgctattagaaattattttgggagaaaaaacaattaatgctcactaccatgataatccctccttgaacttggctggacatgtgagttacttgaatttcttatagcttacttcttcttcactgtaagctgatgctataaaaaaataaattcaggtttgtaacttatgtagagaaggcaaagctttggatatgattgatcctttattagaaaagtcagatcctgcagatggatgaagtgccgacatgcttccaaattgggctcttatctgtgcaagaatgccaactacctaccatgttctttggtaacaaccctactcttccttctcctaagccacctgcatttattttgaaaattagcatgtaacaatggtgagttcccatcaacatcaagtgtaggaagcttgttttgaagcttgctgattgctcaagctctgataagttgtaaaaattaattattttacctaccagaggtagtgtacacaaatatcattaaagttctctctctctctctctctcttctggtttttctccaaaggcaacaatgacgtaaaatattgagaagaaccacacagtctaacatcagcttcctccatgtcaagaatgagatacaaaggttgtagtgtaaaaagtttaaaatattgttccctggaatgatctcaacttcttgatgatttgtttctgcagcatctgctaatggttcttgacctgtttctttcagcccatagctgctccatccttggcccaatctttttctatttattattgcgaattaaacgaacccattcctatctgatcatgaactgatctcttggcacaaggcctagataagacagcctgttcttgtacttcttttaatgttgctactacttaactaacagttccaaggtagctgatgctgagggatatttcacaatattcaccatattttaggtaccattttaaattagtataatatataaaataaaaaagaaaataaagatattttatcctaggtttatttatatatatatattaacttttttttattacttattttgaaaaataaaattttttatttataaattttaaatatttttaatcatgagtattattaataaataaataaataattatttactaaatatcaaattattgaaaattttctaaatatcattaaatgtaagagaaaatttatattttttaatagcacatatagaaatataatataattttattttaaacaaatattggaaatttgagaaataatattcataagcttgcaaacttgaaaagccatattgacatttaacaatgaaggatttaaatgtggtcttgattttttgacgtcctaaaaacaggtgaaaacataaaataacattgacttgaccaactccatgggatataagtttcaatgtggtcaatagaatccataagcattaatcaataattaagtgggtccttctttcccttgacttggcatcgagtaggctagcgccagcctcatcttcgcatgggagacggcaaatgcaccaaatatagcaggaacaattgagcaattggccattgccaaacacctctttaagtaatgccttcatcctcccttcaaatatcttaaatcgattcaattttaggtagatatcattgtcacttttgacccttactttttatcattaagctccgtcatgtagtcgccactcgccagttcaattcatgcatcaaaattgaagtttaacagttgggttggtgcaattttgaagtgatcaatgctatgataggtttaatgcaactgcaactttgtccaattcataaatgtggcgtggagatagtacaaatgcaattctcacgtcatttgctccacttgttccttcacggtatgcctcgttagtttgtgttgtagactttctctgtctcttccaccagcgctcagcatcggtaacacggaagtcaccactttatcaggaagtcacat

SEQ ID NO: 11371 - DNA, 3841 bp, Vitis vinifera
  Intron number 2 from transcript GSVIVT01002093001 (locus G SVIVG01002093001) derived from phytozome v7.0 (chr-ID chrU n; pos 32808188 to 32812028)
agtcccgaaaataagcatttaagagcagcctctccagaagaggctctccttgaatggctagaactgcctctttgctgacatgcgtctttgctgttccagaactgaaagtcactttgtcggagattatacaactagagctccttttcgtgcaataactgcgagagatggccaaagtgtttagttatactgccagtgaacctattgctatgtagattcaaggaagtcaggtaaaggctagcaaggttgatcaactatgagaaaaaaggaattgaatcagaaaggatgtttacccagggatctggtgatttcattgaatcagctgtgcagcctaaattggcagtcgatcaaaattctaacaattcaagtttatcctcatctccaaagtctgtattaccagaaaaggtcccagtggatcaagtttccacatggagttttaatccagaggtcagcaggaaccatctaatccctcaaagaaaactttagaagtcaatatgattctgagcgagaataaagtagaagcaggtcagacaaacataaaacaaacttcagaatctgttagagacaataaaggcgattcccaaagttccatcagacaatttgttgttgctgaaccatcagaaactactgagatagctaattcaataacaatccaagatactgaaggcaaatctggataatcaacacatgataagaatgttatggacacgccagagccagttggggacaatgctactttagacaccattggagatgtcatggaaaacaatggtgaaacaacagatgaactcttggaaccactattaccatgatgtgaatctctgcaatcatgtggatctggcatcctagttgatggttgacttgatgatctcatccgaagagttgctacctttggaatggtattaatggagcttgacttatgtcagtaatatgctaggcatgctgaaacacaaatggatccagaagctggttgacatcaatggagcaggggatgcattcgttggaggaatgtttaaaggcctggaaaattcatcccaaagttaactatgccatgagtggctatgagttggaaatgttggtaacttcatctattttctcttggagcttggtaggctattttccaatatactttgcacctacatcgctaccgttggatggatatctctgctgttatattgattatgcaggaatgtaacatcagattatgtaggaaaacaatgtttcttgtggggaattagctgagtgtcaactggagaaggccctcattgcagttatgaatttcttgcaactcaggacaactgaagtactagttttcaaggactaccaatgtgggtgattggcaagaggggtgtatcgaaagagataaataatgaaggagatgtacattcctgatttaatgagatgcaccaaaaaattgcggcaaaatggagttgaggaatcagcttcagatatagcaatacggtctcagtcacaaccctaagcatccactctagcattggccaccttggtgcacactatcctccttttgatgcatttctttatatctttatgtgaatttacttgttttgaatcgaggtttcaaatctttgttccatcaaaataatgtcaattgtttttaaaactttatccttagaaaataaaattcagtttaaataaaggcttgctgccatatttcactttagcatgcactttttcttattttcttttaatgattttcgtgatcttctcaattttaaataaacataaataaattctctaaattccaaaataaaggaattcatctagatttctatgatcttccatcaatgatcattagaaagatgaaattttgaacaattaattcatgttaataaattgggaattggtaggggcccaatgatattttccttgataataatgccaatgaattgtttgtttgctatcatctcactttgatctacttctgtgatgcatgtgagatatcttacatttatcattgtgtactaatcttgtttcctataaaagcgcattattgttcactgttaaggtatgctcgcattctcgccctgtttatttgttcttcatgcatgatagggggtttttctggtttcccaagagcatgagaagtgtattgggaaatacttcttaggtaagtttactaggtatcccctgttttctcccattttgcactatttatcattattctttgttatgtttgagtgttatttgttgactggatgtatgcactagaaaattcatttggaatctgattgatttctatgtttgttttcgtccttggtgttgggttgtctatttctcatttatttggtttggtataagaataatctcatttcctttcaactacattgtgcattaggagattattttcctattcttgtttttaaatttgcacgcacaatgctcaaaatgtttctttagcttttatacactttgtagggggctgtgctaagtgggagtagaatgcttgacacgctgagtttatggcaggcactttgcttgatgggtttggctcttcaacatgctgatcagtctttgtatgaggttcctatttctaacataagagccacttcgagccaatattctcatatgcaagtggataggtcagcaatgcagcagaatccatctggcagtagttcatttccaagcaatcaatatgctacattcctaggtcaacctagcatggaagatggtaatttgatttccaagcggtgttttccaaggaaaaagtggtttgggcaggctcctagtgtgagtcactttttttataacattgatcctccaagctactgaacggtttgcaaatatgtggttttgaggtcattagcatcatcacaactatgtggaaagctcattgaaatgtttactgaccgtgacaagcagatattgatgggagaatacttgaactgatatacatgcaagtttatgctcctactacactggctcctgcatgtgatttcaagactttgagatatacttcaagtttagaagatggaagcctccttgttcactactctcatgcctgtatatgtttcactgatcgatctacaggattggagtgcttcagatccatctttattccttcttgctttcacagtctcaaatccttgggagtctacaagacaagtacagtcatctagattaagtgtgatagtgagagtaggggtacatctgagaaagtggaggttgatatctcaccaagtcccaaagtaaattatgtagagccttctaaaacagtagctacgactgacgaagcagttgcccttgtataagctagagtgcctgttattcgattagcagtaagagactggtaccttatttgcattcaaggactaatgcccatctgttgtgggaccaaagagttcattgaccaaaagagaatagaaatatctgttgcggagttcatcggttataatggctcaaggattctgcaaattatcatgttaatgctacaactaatgagcatgggaaaccactgctgtgtatgaaagacatgatggaattgaaagaaactagaaatttgcatctaaaagggtttgttgagaagtgggttgggagattctaatgaacctccttttagttttcctatgtcttttggaggtcaagggcatgccaccaataacgtggataggaggatacagaagacaaccttttgttatgtggggtggttttcatggtgttcatgctaagccagattatgtagatgctgccttaatttctatatttcaaattcatttagaggagggccctggtggtatacttgtactctagactgggcaagaaggggtgtaatatcataaagctccaaagagtcctttgagttctgcttacaaaaagcgagttgcaa

SEQ ID NO: 11372 - DNA, 2844 bp, Vitis vinifera
  Intron number 2 from transcript GSVIVT01011804001 (locus G SVIVG01011804001) derived from phytozome v7.0 (chr-ID chr1 ; pos 4018065 to 4020908 reverse strand)
ggagagcaagtctacaaacaagctactattggtattctatcttcgttctccctccctttttctatgcaatttctacggattttagtttcaaactttgcttttctatctggttatatgactttagcgtgatgggtgcttgtgaatttttaatcaggtttgtggattcttgtttgatttgatcagtttatacttgagtgcatgttatttgaatttaactgctactctttgtgacgttactctgtggaccgatttagtgtgggacatggttgaaaatggtgaaatattggttgttctttggttttgaaatgaaagggataagcaaatcctgggtgtgtagcattgatcttctttggatgcactgctactttgggggttgtgtggtgttaggcaaattgctaaactttcttctttacaggagtttgtaagataatggcttcatttatgaagtgtattccaggccatctctgtatgtaaccttaatttacccttagttcatatgaggaagaatcgggattcaaggaaacatgggaaactggggagaatgtagccccttggatagaaagaggattccagggagtggtattctccattgacagtcttttacactctaggtgtagcaactcatgctaaaggaacatggtttaccaagcgctatagggatggcaatgacatggaccacccctctcctaatcctgccctaaagtggaaatctgatcccattcctggttcaaacctgagatgggccatgcaagggacttccatccccattggcaaatattgaagtggatctgccctctccccattcatcccaattattcatccatttccaaacttgaaattgcaagacagcagcaagaacaaacaaaaatgcccatgaaaaggaactttcaaccaaaaacaactaatattcaattttttttgacattttcaattcttgttaataacattacagcaactctaggtttaggggttttctttacctaatttttctcgacaacgaaacaacagattagaggtatttggaaactaatcttttgaattatgtgcatgtagaaagaggaactggaagatcatgccttggaatagataggaatggcaaccaagcaggatgcacagtagtgagccactgttgtggattggcaaggaatgacaacaaaacactggggcatgataatacttcttactaagtttgagaagaaattccaagccatcccagaagatgagatgcctgagattcttcgaggcaattgctctcccaacagtagcattaagactgcttctcccaacagtaagggggtctctcccccttactataattttggattgtcccctagatgaaggagtggctggaagttgatactgcaatccatcccatcatttccttctctcattctccagcattaaatatcgatgtacccatgaagttcagatgaaattatttgaaatattaggcaagtacgttgtttagttttatgtcaggttgagattgtcttctgtacctaagtgaatgtggccatcgaagactggtgggtggggtagggtaaccctcaataaagaagaaatgaagggaggaggatgaggattcaggggtaaggctgtggtggtgggtaactagtagtttatatgaatggcaaatttgaaataaattaaactcttaagggtaacattgtaagatgctatagtatttggggtagggcaggacagaacccaggcccacaaggaaccagtcccgggtttttgaaaattttcccaaacagcccctaccccgtatatatgttactcaaacatgcttgattaggggcagggcaggggtctctcctgcttataaaatcttttggtcttgaaatgacttctggtttactggaagaattttcatgctgatgtgatagagttcattctacttgtagtgggttacatcaagaataaaatggttgtatcaattgaatgtagtgacataatgagcttatttacatgcttggagctaatccccttttgctttttaacttttagcatgacttactaggttaccaattatgtggatttggaaggagttgggattagtttgcttgttggccaaatcctcatggggccttgtagagtaattgtgttaaaaagtttaaggttatcttgcttggagttgaagtgtggttagctagttaagtcagtatacaagctggagaatccttgtacttttgcaaaatcaaattttccaagcttgggtctttcctggtaagggctgaatgggctttcaattttcctaaaatatgcttttgtagattgatctccattcagaatcataacttacctgattgggctcttttcaccctaatgaagatattatttccctgttttagctcatgatgtgttactcatataaacatcatgaataatttgcagcactaaccacaaccatggcgacataggtggttttctggtgaaatacttttggatatctataccccaaagtgtccaaacacaaaggactttagaacaatgaacaaatagtccatgaccacaagtgaaattgtggtatgctaatttgaaaaactatttgttggtatgcaatagcacagcactccagatgcaaactaggtaaattatgctctaaatgaccctacttattgctatctgacacacttgtttgctcgatattaaacactggtttccaatttatttatctattttaatactatttccatgtttaagcggaattgatatctaacatttcaagtcaacaatatcttgtcaagtatatcacttgagacttttttgatatttcttctttgcttatctgcctttcatatccaggaattaactttgtccttaattggctatgcagttgga

SEQ ID NO: 11373 - DNA, 1310 bp, Vitis vinifera
  Intron number 1 from transcript GSVIVT01016110001 (locus G SVIVG01016110001) derived from phytozome v7.0 (chr-ID chr9 ; pos 19143230 to 19144539)
gatttccatcctccttgtgttcctcttaagggaaggtatgctaatttttttgggctcttttctgggttttctttttgatgtaatgctcagttttgaagtgtagtttcctccattttctgggtatttattgtttccctttttaattggggtttgggtatttactgttctggtttaacgacttggattatattgaggatgggttcataatttatagcactattgtcatcatgttgatgagatcttgtgtgtttctatatttggctagtggattttggtaaaaaactgatataaatgctggaaaagattaataacacaccgatgtttcttttttcttgtatgggttatgatctaattggaagtatgatactcagtaggattaaagtttacaattatagaccatttttgtgattttttgatgaattgatgcaatagatattgatggatgcacgtatttcaagagatggaatcaatgggtgctatgtctttgcctccctgagccttggtgtttttcatgaacttgactgtaaactgccttgtgctccattattgaaaaatgcttgccttttcatatcatatcccttgtcctaaatttgactttggaaagccagaaaattgcagtcagctgagaatagtggctgactgcctttggtagatactgtgttttggagattcctaaagctgaatggcaagcccaatgaataatatgatactgtcagtttctttttggtgtttatttgtggatatagacgtaaatgtagagaatgggtttgtgttgctcatctattgactttttgtgattgatggttccgagggtgaaacagagtttgaaaaatggcatattgttagaatagtaaatttttgttggatgttattggtccatgaatctggttcatctaggtatcaagaatatcttataaatgtgttgatgctacatttaatagttcttatttaagttgcatctaaaaaatatttatgattctttaatataagaaaagacggatggttattgtttgcttgtttgagcatatgctatttcattctgtagatgtaaatatgatccttggaatcaaatcaatatgaaataaaaattactacggtatcccccaaatgggttttggcatacttggatacaactataggctagctctcttttgttgattggataattttggtttatgtgcatttgttccatttggcattgagaatgtgtaatatgtctaagtaccttactcttaagtcatttcccttactaaagtatgtgtggtttgctttcaggctgtcctcttccgtgtctacaatcactccaaggg

SEQ ID NO: 11374 - DNA, 3648 bp, Vitis vinifera
  Intron number 8 from transcript GSVIVT01030782001 (locus G SVIVG01030782001) derived from phytozome v7.0 (chr-ID chr1 4; pos 16039889 to 16043536 reverse strand)
gttgcactgttcagagctttgaatcttaccactcggtatggccttatgatgaaactaagagcagtattttattattattattattttttgagcagtatttttcagttttatgataaatacttttccttgtttttttattgaaagtggagcatattaggttttttttttttccttacaagttataacttatttggaggcatgagtacttctaccctttagacacaccaagtccattatttttctcaaacaaaaaatttaggttaaatgtcaaaagtctccccccaagttttcaataatatgaccaaccttgtgatgtgggacaaacctcccaatcaaattaggtgggctaggaatccaatgttttagtatttaagaagagaacaaggaatgaagttatttcagtagggacaagaaaataaaaaataaaaaatgaaataagtaaagaagaaaagataagaaaccttagaatctcattaagacctcctaggagttgcacctagaagaaaaattgttaagagtgcatgatatacattatgagcccaaatcctacaagcttaaacttttaggaaaattggtagttcaacatggtagtagagccttgtttagtaaaagtttaagtgtttgaacgtcaccactgcatgtttatttacccaatttattaagcctatatgtaagctcaaaaagggaggctacaagggtgttagtgtgtatgatatacattatgagcctacatcctacaagtttaagcttttaggcaaattggtagttcaacaaaaacaatagtcttatcattggaaattgcaaggtttgctgaaaaattcatattattcatcattcattcggttattaatcccatttataagttttagggaaaaaaaaaaaaaaaacttaataaaactatgaaaaaataaacctaacctctataggaacttattaggactcttatttgtttcctaaaactctcttcctgataatggaattgaaaaggaaataaaaaccttctttttagaattagaaatttaaagctttataaaaacttattataataaaattttctaataaagaagagattctagattctaaactcaagtaaaaactttaaaaaagaaactttggatatttcaagaagcattgattttcctcaggagcaggattgaacctttaaccaaggttcgcatttgagggaggcaaaagagtattttccaactgcttctcaagtttatcctttgccatacacaggaaatccgcttctttactctcttgtttaggcctttggagctatcttgttgctagcttttgcctccatcaacattgtagttctctaactgaaacttggtcacaggaacttgagtgagccttgcacatcctccatctcatcagaattgtggtggcaagtggcatccgtctgcttctttcttaatagccatttttgacaatagtttgtattaaaatagaaacagcagtctcttgttttgttgcatgcatcttttgagcaagatgcctctccagtatgcttggagtgcaattgtagttgttcaagtttggaccaaacccctgcacatattgaaactccaaaattgaccttgaataggccttgctaccccatccacgatctttgccttttttgaattcagaacaccattacaccaatatgattagcattaccggcgcatcatagacaactccttcctccttgctgtcagctttgaattatctcttagtgaaagtatttgatggttcttctgttttcaagggtgttgttctcctctggttgcttctatggtggaatttccttcattggatggagagtcttcttatgatgttggactctttcataaaaaaacccacaatcttccaagtataatatgacaaattttattggcaaaccatcacaccatatagatatctcaaaattattattaaaattaaaagttactagacgaagagaactcattgaaatagaggggtcatctacctatgctatttgatagggatttggatgattctctatctttagattaaacttctcaaaaaatgtctttaaagctacgttggaactactgcctctatcaataatcatagcaaatagtctcccttagcaaggaacacaagttagaagatgctagtatgcctccaatccccctctttgtttgcctttggtttagtcaccaaaattgcattaaaaaaattatagccttcaattattgttgcacaaattgttccactcctcaagtggaatgcattttcaagccaaaagcttctaataccaatattggtgtaggataaccataggtgtacaataaactaaaatggctaaggcttaaatcttttaggatataaggagaggaacaagtagtgaaattatgatggtagggaaaagaaaaataaaatatagagaagaaaaaataaataaagaagaaagataggaagtcttagagtttggctaaagccttattggagtctcacctagaaaagaaaagatggagcctcaccattcgaacgttgaaaggcttgtagcaaatttatgttattaatcgttcatcatttttttattaatctcattttacaataattagtgttatggataaactttagaaaaccgtaaaactaaataaaaccatgaaaaaacaaacctagcctatatagtagctcaataggattcttatttctcttttgaactcttaaatttcccaacttccaaataatggaattgaaagaaaagtgaaactttcttgttaaagttagcaacttcaaactttattaaaaacttcttgtaataaaaagaattttgaagaaaaaagactttctagattctaaaaaggattcatatagaaactttagaagactttggagactccttctcatcaactttcctttggtttctgaaattatctcctccttcctttgaggatttcatttcagcatgatagtattcgaaattcaacttctaatttggaaagaaggcatgggaaaatgtaatctttattgggaaattatgtaatttatgttatggactttcatttgaataaacaattgtaaggtaatttgttatgaatcttacaatgaatcaatagctccaaatcccttccatgtttgcaagtcatgtgaagtcccacaacttaaaatacattgaaatataatctattaggagtctggtaaaatagtgaaataagtgatgaaagaaaaagatgaattttgaccttttgatattttagttcttgatttctacatgattaacatgtcatgcaggccttataccttaaggtgtataggcattgtgattgagcctcagacatgtacttgagctgtttctcaaggtgcaagtttcacaggcctcagcggagcatctctagtgatatattgtaatgtgcactatattgatttcttatgctttatttcttgaacttcttctatagcacatgctcttcttaaggtgtatacataggtcctctctgatcatatgttctttattctttattctttattctgttttcttctgtgtaatgatatttagtgattgaaaaaggtcatattgcacttaggttcaacaaagactaggtattttttctcttaggtctggattttttggtttggcatatatcatgtgttgaagctttatatctattctcaggtttgtatccattctgg

SEQ ID NO: 11375 - DNA, 3855 bp, Vitis vinifera
  Intron number 2 from transcript GSVIVT01035823001 (locus G SVIVG01035823001) derived from phytozome v7.0 (chr-ID chr4 ; pos 4666757 to 4670611 reverse strand)
tctgttaagtaattacttttgctggtgaattatccatctgtatatatgaataaaattgtggttgagataaacaataatgtgcaaaatttaatatttttttataagggtaaattaatcatgtgttttactattcaatatatgaattaaaaggtaaattaaatgaatagaataacacctcaaccgaaaaatggaccaatatttgttatcattaaaaacatgcatgtggatgttgttactatgtatacatgtttttttcaaagaaaaaaaaaccaaaagcttttaattcatataaaatgtagaaattgaaagtttgcttttgattcattgaataaatagatcaagcgatttgttatatcctaaattttaaattatatctagattttattggttatcaatcaacttgatcaagatcaataatatcgatcaaccaatcaatataatgaacatcgaatacatatgaaatactacttactgaatttccgaaaaactttgtaaatatggtcaaacggtaaaaacatagttgaacatttaaactagttacagggtgtaagggtttagagcaaaattgtcaaccttgtctaatttaaaatactaacaagctcccattttaacaattttgtgactaaacaatgattaccgtgaattaaactcccaactataaaaaataagttcgaggaacccacacatacttcaagtcttaaacatcatgcacttgtaaaatctctcttcttgatttagtcttgacacattagcctatacacactcaaatatacctgcagaaaagtagtgttttgtgtttgggaagaaatattatatgcaactctctttttttttttaaaaaaaaaaaattaaataagtttgtattatttgtataggggttactattatttttacttctaaaacaaaaaataggtcttaatttatattaatattaattttttactgtattattttgcaattttttaattcaagacaaattttttacacctttttggtatcatatataccaactttttttttttaatttgagcctggatgcatatgattaaatatggattgttagaataaaggtttatgaatgaaattaaaagtagctagataccatcaactacaattattgtaaagatacaaagaaataaaactgatgtagccacgtcttctcaatatgttaccagagagaaaccctaaaaattgaagtgaggttaaaaatctctgatttgagttcaagctgggtcaaacttgagttgactttcatcctcattcctcaccagtctgcttgagctcgggccctatggtaagcactgggctctatgtatggcccagctcaatatctggccttaatgggcctggcacattctaacccagtggcccaattttgagtccaagcacccactttcttcttggtgtaaagataccaaactagagacaaggtgatcacaaaaaaaaaaaaaaaaaaaaaaaaaagaacaaaaaaaaaggataaataaaataattcttttccttttttttttttttttcaaatttgaagaatggatctcatggatgggtggaactcattttatttgtcacactgtgaaggctttttcagttaaaaggcatagaaatgaatgatgttcaatgggcacttgacaaaacacccatatgagaaaaggcatttacaaagcaattatacttgagatcatgatgaacttattattatgaaaaagcaattaacacatttggatcaaatagcaacaacccacagcccacatcaatacaaacaccaaaaactcatttttatgacacccacaaacatctctacaaagaaaaactcaaatcacactaggatccatttagaaaccaagaaaaacttggttggaattatagtaatgggtgtcacaagattctaaatcagaacccaaacccatgagaaaagtggaggccatgaaagctttgtgagatctgggacagtgagattaaggaggaaggttgtgagatggggagataaatgcggtgttcaacttgagatccattgtagtgggtgtgattttggttgtgagctctacttagggatgaaagcaaaatcaaaaaaatcgataaaccgatccaaaccaactaaaaccgatcatattggttttgttttcaaaaaaaaaaaaaaaaaaagtcagatcagtttgagaattttgaaaactgatccaatctgttcagttttcaattttcttgtctcctaaccaataaaaatcgaatgaaaccgatatcctaaaacttatatatgattatttgatatttgataagtttttatatattagattcgattaaattaattcatttttttttatattatggtcaagttaattttaaatgcatgtaatatatttttaacatcaaattcaagttagttttaattaattttaaaaacaaattagacttatggcctaatataaactcaaattaataggatttgggctcagaacaaacatgaatctacaactaagtttaagaataaaaaagattaataagttaggtcaaaaccaatccacaaaaaccaaaccaaaccgaccttaaaaggtttgatttagttcagtttttatcacatataaaaccaactatatcgattcgattcattttttatctaaaaattaactgaatcaaccttatttacacccctagctctacctttgtgagaacaaccaactttatagaaactcaaaagtgagaaagagaacgagagaaaataacacatgtccaagaagaagagatgtttattgaatgaaaggaaccttaaaaataaaagatgagggaagtatttataaggggagttttttggtattttataatatataatgagtaattcataattttatatctggagcaagaaggggtaggttattacaaaacttaaactcgtcccaatcctgattattatgctcttgtatttgttctaataggagcagagaggggaaggtaactcaaaaaatctcgtgaaactgttatccctaattaagtaataggtattggttatgtctctcgagctttaaatttatacttaggctatgtttggttcctggaaaatgctaaggaaaggaaaaaaaatataaaggaaaatgattttttttagtttggatgacatagaaaatacaatggaaaaaaaatatgaaggaaaatattaaagaaaatattgtaatattttcctcactattttccttaaaaaataacgtggaaaatataagagaaaaagagcagggaaaagaggaggaaaattttgtcggctcttgttcaccgaagcttcatctctaacttcctcttcgtcagtggctatggcttctcaaagtcgtcaaaccctttcaacggccaccactatcactccgaccaccttcgagtgcctctgaaaacctaccaatttcaggcactcgagttcccattgatgaagtgcgttcttcaaatcaagttcccatggatgacggatccatgtcttcaagtcaggtatgaattgaactcttttctcttaacctcacatcatctctgtgtttgatgttggtttaattttatgatctctttccctcattcagccttttccatacaactgactagaaattagggtttaaggtttccaatgggaatttcgagtttgtttggattgatatttgctttttatttttttttccccttcaaatgagggtttgaattcgatttgagttatttcttagggctttatggaccaatgatttcatgtttcagaatggggattttgaatattattagggttttgattctctttattgttaattgcaactttgaatgttaatatgaagaaatgataatttgtaattttgggtatcatgtgttgttgttattagccttccgataagattgaaa

SEQ ID NO: 11376 - DNA, 11018 bp, Vitis vinifera
  Intron number 9 from transcript GSVIVT01001716001 (locus G SVIVG01001716001) derived from phytozome v7.0 (chr-ID chr1 0_random; pos 435600 to 446617)
gcaatgtgagtagaaaatagcaagtgaattcctttaacaattatcttatttaaaaaattgagaactctttgtgtgttatgatgttgagtatgcattttcgaaactagaatgaaaacctttgttctctggtgctgatcacatgattatatcacatgattaatcttatactatcgtacaattggcattctatctcaaactagatgtatactttgaggtagtcctttaacatttgacttcaataggataagtgctcctttagtttgacttcttgttttttgttttttaaaataaaaaataatagtacctttctttacaaaatatattaattgttatataaaaactcaagctcactttattttcttaaaaattacttttaaaatttgagatgataaaatttttttaatacttcaatctttttaaacaatttttaaaatttattatcgttttaatgtaagtttcaaaaagatcttatattttatataggagattctattatttctacttggtaaattgttgaatgaattttctcatatatcccaagggtatatatacagggtataaaagggtgttttaggatagccaactatacaaaataatcaacaactatacagaataaatcacaactaatcgacaactatacaaacgattgtacacaactataccttcatttgtacacagttgtaccgaaaactgactctccccctcaagttggtgcatagatatcttgcaaatgcccaacttggataatgatgcataaatggaccactagtaacaacatgagtcatcatattcaccaactgatctgcactcttgatgtaaggaacctttatcatgccaatatctaggttatctttgatgtaatttttgtcaagttcaatatgtttagatcgatcgtgttgtaccggatcatttgtaatttcaatagttgtcatgttatcacaaaagagcatcataggtttcttgggatcaaacctaagctcgcttaagagtttttttttttttttttatcaaaaacaaaatatatgtattaaatgagaaaaaaaaacatgagaatgatgagaaatcctcaccatgaagtacaagcctgatcaaaagaactaagtgaacctccactaaccaaggaaggctatacaaaaggtatagaagtttgtttgataaaaaagaactaagtaaacttccactgaccaagaaaggctatacaaaagaaacaaaaagcctataaaaatgaaacaatcctgaccctatagacccaaccctagggtgtatataacggaagccaattaagctagattacactcagaggatagggcttaaaaatgtctgtacaacaagccaaaaaagaaacaaaaaaatgaagttgatcccacatcatctccagcatcatccaaatgtctttgaaaatcctagcattcctctctctccacacaatccacaatagagagaaacacaatgctccaaagagtcttgcctataatagaattcccaaaacacttgaaaaaaaatcatcatcatatcacaaatactgcttggctaaacccacttcatcctagcctatgaaaaaatcctatgccacaatcccaaagtaattggacaatgcaataagagatgatcaatcgtctttctgctcctcctataaaggatgcaccaatcagggctaagagctttaaaaggtcttctcaactgtagcatgtcattagtatttaccttcttatatgctactaaccaagcaaaagccttgaccttagaggggacttttgatttccacaaaaaattagcagggtagaaaggaacagaacttgagacgatggataaggttgaaaaaatcgatttaattgagaaaatcccttaggaggacgatatctaagctttcgcatctagaactgaaggaatcaagtgaacaagggaaagtaaggactttagtatttcaagatccacaatcttctcatcagttagattatgtctgaagactagatcccaagacaaagaagtgttgctacccaaaatagttgaaataggatgagtttaagtagtggtgattctgtaaagtcttggaaattgtaaacaaaaaggttggtccctccaccaaagatcttcccaaaaatgagttttagtcccatcacctaccacaaaatgagtgtgtgtggaaaagacttgaagaatatgagcaatggccttctaggggcaacgatgtgatcatctgactatattgttagcatcacatccattaggatgtgtcccatagatactcaagataacctgatgccaaagggcagaaccttccttagggtacctccaaagccacttccctagtaaagcccgattcctcaaagagattttcccaaactttaaccccctagactcctaaggcttacaaaacatgtcctaactgaccaaatgatctctcttaccctccccagaacctgaccataaaaaatctcttttgaatttctcaatcctcaaagctattgaagctagaaccttgaaaagagaaagaaaatagcttaggatgtgcgataaacaagactatattagggtgattctaccttctaaggacaaaaaggtttttttccatccatccaacctcctaaagactctatctagtactggatcctaaaatgagagcgaatttgggtcccccccgccctccctaaagggagacccaaatacattaaaggtcaatcaaatactatacactcaagcagagaagccaaccttgcggtgtggccttgactaatgtttattcctaagataatgctcttatttagattaatccttagccctgataaccgcccaaacaccaacaaaattagcttgagagagtacgactcttcaaaggatgctctagaaaaaaagatggtgtcgtccacaaattgtaaatgagacactctggtcctatttttgcccactagaaaccccttaaataaacctctttcctctgctctcatgatctatttgcttaaaacatcagccaccaaggtcaagagaaaagggaaaaggggatcttcttgccttagtcctttgtatgccttaacccaccccttagcgttttcatttactaagattgcaaacatcgatgaagatatgcatcccctcatccagggcctccatcttgaactaaacccttaagagaatttttagccaagtaagtttcatagttgcatgatggagcgcatgttatttagcttctatactagacaatgaaaccacattttgattcttactccaagtcatcaaatttcctcctacaaataacacataccctaaagtagactttctatccaatctagatctgataaagtcagattctatgtaaccctcaatatctagatgtccatgtttggagaacataatacatttgcttggaaaggacttcaaataggccaagatatgatttattgcattcatatgtcggtcactcatattatgcatgaattgacgtgcaacaccaactacatatgacaagtcaggtgtagtgtgggtcaaatagattaatttcctcactaatctctgatatctttctttgtttattggaatctgactagggtagatggacaagccatgatttatctcaatgggagtatctataggttcacaagcaaagttaccaattttaatcaaaatatctaatgtatactttcgttatgagaggaaaagtccttacttagatcaagacaccttagtacccaataagtattttagaggacccaggtccttcatttcaagttccttggccagatagctttgaagcttctttatttttgtaaagttactacctgtaacaatcatgtcatcaacataaacaaaagcaaagtaatatcatcaccatctcttttatagaacatagtgtgatctgccatcacttttttgaaaccatactccttcatcgagtaactcaacctaccaaacgattcccttagcgattgtttcaatccatacaaagccttttttagtttgcatactttgtctccttttggtgtaaaccccagaggagggtccatgtacacctcctctaacaaatcaccatggagaaagacattctttacatcaaactatcttaattgtcagtctagattaaccacaagagaaagaatgactctaacagtgttcatcttggccacaagagcaaaagtctcttggtaatcaatttcataagtctgggtgtatcccttggcaaccagtctactttgtacttgtcaattgtctcatttgacttgtactttattgaaaacacccacttacatcccactatcttctttcctcaagggagcttgactatctccttagtagagtttttccaaagggcctttatttcttctaccatagcaaatttccacttagaatctttaagggcttcctaaaaatgaccaagaatagacacataggacaactaaagagcaaaagcaaggtaagtcttagatagacgatgatgagagacaaaatccaaaatgggataaacaacattagaggatggttttgagaaaaccaacctatcaagttctttacgatcacgaagaggatatctcttaccttgatcaccatcaacttgtggattcaaggtagtagtgtctaaagttaaaggtgaagaaacatgtaccttaggattagtctcggaagactcatccaattgcatggtagtatcattaagaggagtattggagcttggagggggtatgacaatagcttatttgttcttccttgtatgaacttgttggaataatctaactagtctttcatcccttttttcctcatattcaaactcaggtgcctcccccttatccaagtcagttgaatcctccccttgacctgaaatccataccctcttctcttctaaccataacttttcctctttctttcctactactaaggtccccttaaagaggaaccagagacacattcgtgtaagaataagactccctttcgcataattgaacattcatgcagacatagtatttgcctatgggaggatgaaagcatttaaagcgaggttagtggcaaaagaattttttcagacctatgaagttgactattaggagacgtttgcactagtagcaaagctaaacactgttcaagtactcctatccttggtagaaaatttggcttggaaactccaacaacttgatgtcaaaaacacattcctgaatggtgagttggaggaggaagtctatatggaactaccaccaggatttgatgaggctagaattcatgaaaaggtctacaagctcaaaaaatctctttatagtcttaaacaatccccatgggcttggtttagtagattcatgaagcttattcgtcaacaagggtaccaactcaatccaatctcactttattcgcataaaggggataagactacaattatcatagtctatgtcaatgatataattttgactagtgatgatattgtagagacggaaaggcttagaaatatttttgtagcagaatttgagattaaagatctaggcccattgagatattttcttagtatggaagtagcaagaaataaaagtggtatttcaatttcacaaaggaaatacgtcctagacctcttggaggagacatggatgctagaatgtaagcctatagatacacccataaatcctaatttgaaactaagagaacaatctgaaagtacactagttaataaaagttgataccaatgtctagtaggaaagcttatctatctttcccatactagacctaatattgcctttccaattagtgtcatgagctagtatacgtgttctcctaatgaagaacacatggaaatcgtttgtcagattttgagatatcttaaagggactccaagatgaggcttattcttcatgaaaagtgaagagaggagtgtccaggcttttacaaatgtagattgggtaggatcactgaaagacaagaggtcaacaactagatattacctttgtgtggggcaatttagtgatgtggaggagcaaaaaacaaacaatgatggctagaagcagtgctaaggtagaacttagagctttagcacatgggatttgcaagttactctagttgaagatattgttggatgaattgaaatttatgataattgaaatttatgagaatgaacttatgaaggtttattatgacaataaggctatcatcgccatttcttataaccctgttcgtcacaatagaacaaaacatgtagaggtgtaccgccactttatcaaggaaaagatcgaaagatgggtgcatttgtgttgtcaatatgccttcatcacaacaagttgtagatttgttcactaagggatcattcaagccaatatttgagaagttagttgacaagttaggtccattcaatgtgtttagtctagcttgagaaggagtatagagaatcccggataattcttattctttgaataaggataaaatccaatatttggtttgttttctaaatatgagagattgtgatacttattgctagttgtaatattacatctggtttgaatatgctaaaatacagttggtgtgaatctcctaaaataaagagttgtggtcacaaaagctagcctataaatctccttgtattgaagaaataaaataaataacaaaagcaatctccagtttgtgacctgcccttttttctgtagtgttttttcttttatttattgtttcctacccaattttagcatttaatgtatttccaagttctacttattactaaaggtcataaattatattataaatacattgttttcttcaacaaaataattttagtatatgtaaatacattgtttccttttattattttatggagtttttccaatatttctgagttttcatcaattttctttctacaaatattttttgtcaaaattttcattgatatttctcaatatttttgtaaaatccaattgtcgttatttctgtaaaaaccaatatttttatccttagctaattaatatctcattttctctctccttggtgattacgtttgtgaactatcccccatttcctatattctcaatagagatgttaatttttttaagaacaaaacagtaagatccatattgttaatttgctaatatcttattctttttttttttcctatttctccttgccctcttttatgaacttacttcattctcccatattctggaaaagttattgaagcttatataggtcaaaataatatattaaccatataaaggagtaactcgttttaggtctctctcttacatcaaattaaccaaaaattcatttagttccctattctaggtagcttggggttctctaacttagggagtaggatggtttccaatctaggcagcaccataacctcaagacctataaaaaaggcccacacttaagcacagtgtgaattctctaatgcttaagttattaagcaattggagaagcattagaggaaagaaataggaagaggagaggagaatcctctataccttgcattgcaatccattcctcgcaaggttagcaatgcaatgccctcaatctcctcttcttataacacctcaaagaccatcacaggttgaactaaaaaacttttcaaagacttcaccgaggtcatcttcttcatcataggtcttcaatcatgggttgtgaaaaaattttccttttgatgagaatcattgattttttttaaagatttcttagttttgattattatatcatactcttttgctatgatttggaagaaaagaactgaatttgagttgaactcaacaatttttcaacaactcagacgattcacccgagacaactcaaaatcttgatcaagtccatcgaatttaaccgattcaagatcaggtctttatttaagatggtatcagatattgtactcaacacataaagggccaagtcgtaccaagttcgattgatactttgaagggagaattgtgttttgggcccagctagacccaaaaattaacatttggtccatataacttccattattgatggaaatgatataaaatgttaaaagaccaacatatccttcaaatttctatatattaccttttaaggatataaaatagtgatggattaaaatacccaatgctctttcacataatctttttttgtctttattgcaccactattcatgcaaccataataattctattttaataatttagatttttcattgtttttaatttttttttataaataattgaaaatcagcattattttctattttaaattataaataaagaaaaattatgttcaaaaactattttaaaaaatactttctaaaaaaatggtaatatgatttatattttttatattttctttttgaaaaaacatttaattaaaaaatgaaaactatttttaaaaataaaaattgaaaaccttgtttagtactatttttttatatgaaaataataaaaagaattaaatttcattcattgattatccatttttatttttttccattagttattttaataatataaaaaatatatatagtatgtttacaattaaacaaagaaattgatcaattatgtgttttttgtggggctatcttttacatgaaaaataattaaataactaaattatatatatttattactctttttaattttattttctttatttattttttgtctaatagaaaattttaatatatccataattaacaaagtaataaatcaattgtgcacattttaatctattaaaataaattactttctaatttaaataaataaaatgaaataagtaaataaatttggggttatttctattttttaacatatcttatatcactattttttatggttaaataaattttttattttttatttctttaattccaaaaataaaatgaaataaataaataaatttggtattttccaactgatcttatattcatatttcttatggttaaataaattttttattcttttttctttatttccaaaaataaaagaaaataaataaataaacttggcttaaataatagtttttaagtaatttctttgtcttatttttaattacattttgcattgaaaataaaataaaataatgttttgtttgagtcactatacaaggtattttacactaagtgtacatgacaaatatactaactgttcaagggtgtacaaaactattatttgtaaaggattttaagtgattctgaaaaacttgtttgtttattttccctaattgaggataaatgacattccttacacacattagttaagcatacattcattttattcactttatttaacttgtatatggtcatttgaataggtacctcacttatgatgattgtaaaacaaaattatacaacaattttttcttcttttttaaaaccaaaccaatgcaaatatggttaaccgacctattgtcacatattcatgagaaaatgtatgaaatttgagttattgttcaagggtattacactaacggtacaagacaaatttactaattgtacaagggtgtataagactacttttgttaaggatttcaagtgattttgaaaaacttacccattttttttcactcaaagatttttttccccactcaaattctctaactcaagaattgtttcaaattttatttttaaatttcatcatcaaattttggtaattgtatattttgtttttgtagttttagcaatgttctttctttccactatttttttttttttttttgtgaaattttatccaaatgaatctatatttaaaattataataatatttatcaaattttttactaagattatctttaattcttttaatatatttatactcatttatttaaaaaatgaaaaactaatttttttgtaaacatgttctattacctttcaagtaaaaaattagacaagtttgaaagtcaataaaaaaaaaattaaataccactttcaataatttttagataaaattttatataatatattttatttgaaatttaatttctaaagtttcactaaaaaaaatgtattgacaattttcttgttgtgaattaaaatactttgtattagtctatctagataagaaaaattattaatataatattagaacttcatatcttaattatttttttcaataaatttatccttttaaaaattttaaaattaaacattaaaaatttaaaagctaaaatgatatatatataataaagtgaagtgatagtcaattttttaaaattttaaaatatggttaatgtagaaaatataaaaaataattaaaaataagagaaaaatataaatgaaagggtgatataaatttaaaataaaaaatgaaaaattaaactaaaagataaatacaaaaaaataaaaaatatttggatgaaaaatccaaaatttttatcattgcttataataagaacaaaaagattcaatatctttaaaaatgaaaaacaaaaaacattattgttttttatttgacataaaatagaaatataaattggaagaaaaagaaaaaaaattagaaatgagtaatacttaataaggaatagaaaagggggaaaaaatcattaaaaaaaattaaaattcacactcacttgtacctatataagggttaaaggtattatagagattaatgaaggataatatctttcatcttaattttcatactttgtttgggtcttgagtttaaatatgtatgatatatggatcaaatgttaatttttaggcccaggcccaaaacacaattctccccactttgaaccttgcatacaagtttctttgcgtcataatgtatggaatattaacttgtactttgctactcacctggttgtcctaggaaagcctcatggacatcttaatgttacatgattcacagtgggtgatggctacttaggaaatttggactagatgggggttgggttttcagagagcacacgtctctcctttcctttttctgttttttagttacattatgaaataattgtttcaattctttatattcatcatgcatcatctttccacatatacccaagtgaaacctcagtaccattattccaaacggatatcaaagatgatttcttattttgtggtatctgcagctggctggacttctagccatctcatcaaggtttct

SEQ ID NO: 11377 - DNA, 1800 bp, Vitis vinifera
  Intron number 5 from transcript GSVIVT01022267001 (locus G SVIVG01022267001) derived from phytozome v7.0 (chr-ID chr7 ; pos 18030023 to 18031822)
gcctatatccatagaaggtgagaaagtgctgaagcttactcatagaatcctataccttattttctatgttacctttggcttggttaatttctaaaacattttctcttttctgtaaaacattgagatttttatagttttcttcattatataggagggttaatgaattgtgcttatagaattttctttgattaagttactgatatgtatttcttttacattttttggttgttgtcatcttctctcataattttagacatgcgactctgggggtcgttgcattttgttaatatctagtgataggcatgatgaaaaatatagtgatgatacacttcggtttgattgtgggtttgtcattgagagagcaaaagaaatcaagtcacatatacaagtccatagtttttccaaataagcactggataattttatcaaataaaattcaatgagtgttgacatagatagacagctatacttaaaatattgaaaaaaccaatcatgtaaaacaattgtcaaattcttctggtgtatttcttctttctaattagaaaggtattatggggggcaaaaatgaaatcaaagaaaacaagcatcttatgattgaaagcattgtcttgcatgtaagtgcacatgatatttttacatcttaggcaatccatatattatatgctaatcaaacacataggaaaaaactgctgaaaaagactttaaatgcttgagattttaaaccactgtactcttggtttagcttgtaattgtgatccttgatcttactgtacttttgggctacattggcaaatttgggatttggaattgttgaatcaagacaataaagcagcattttggaagcagtatggtcaaggaattatcttgcatagctgacctgtactttacaaaaatgtcatagttcattttataagttggaagatcaacaaaatccttgcttcttaaaattctctcaagtcctaaccagctggacaatttattttccaagaaagcactatcaaatcaactatacaaatgcaattttccagaatacaaaacaagcaggtctttaataagattttatctatcgaagaattgaaaaaatgaactaaaataatttgttaattacttgtggtattggtttcttcattcttgttgacttctgtgtatgacaaagttagtactagtgtacaacatccaggtgtagttttgattgataacaccaataaaagctcttcctgcatctatttcctttggtataaaatgtataaagatttactcatgattctcaatgcagcaattatatttctcctcatagctgtcacatagtttttgattgcttcttttctagtttaagtcaattctcaaacaagggtctatcgcatctgagtcactctttataagtaagctaatttcctcttcttgcatcatgagcagaattgcatggcaatgaattaatttcatctactattttggaatcataagttttcatccaaggatacaactgggtttttttcaccattttattgctatatattgtctgtttagagattcgcagaaatcagatcacctgccaattgaagcagatgttatctattacaaatatgcaatgtcaatatgtagatgtggtgttttttgttcttactttttttctggtgtgtgcatgtgatgaaccttccaatttgtttctatcaggaactatttgtttctatcttttgcgggatatatccttgttaattgtgtattactgcaatgatttgatgcacatattttttcgttgtcttagggagcagggacattacaagaaccccacaaatagta

SEQ ID NO: 11378 - DNA, 18407 bp, Vitis vinifera
  Intron number 5 from transcript GSVIVT01033201001 (locus G SVIVG01033201001) derived from phytozome v7.0 (chr-ID chr4 ; pos 9513630 to 9532036 reverse strand)
attggattgaggtaaagtttatcccattttatttctgatgtattacttgtaactaaaatatttggttatagtaataaggttgttacttctaagaaatgtagatttttgagtggtattttgaggggaagttccatttgtgatgaatgaaggtttgaaaatagttattggtatcattgtttgtgactgtctataaaagaatttattatttccctttcacaggtctcattgttacaattttctctcttctttttgtttgtttgtctatttatttttatttttttataaatttagttgagtgggacctttatcttgttgaatactaaaaaggaatggaatgtatgcaggatttgatagcttgttgaaagatcacccactctacacccaagcttatatgccaatatgtctccacatcctcccatctttctcattggaaatgaagctcaccctttcagaatttgcttttaatcctaaaacgacttcaagcaatggaaggatgcacctaaagtacaacaaatgttctttattaggcacatagaacaaaagtattttccacaaacaacaaatgcaatatcttcatgttgattttttctatatatttacttcacagcttgtaaaatatatatgtatatatatataaagcattgatcaaaagcacattatctagtcttcccatattctttttgtctttattcaacattcctagaaaagttagattgaggctggagaaaattcaaagggatttcctttggggaggtggggggttgacaaaaaatatgcatcttgtgaagtggtcgacaatgtacatggagaagagtaaggagggtttgggcattagacacatttcttcattcaataaggcgcttttgtacaaatggaattgacattatgcaatcgaaaaaggagcattttggaataaggtaattagtggtaaatatggggaggacgagggtggctggtcctgcgaagtgagagataggtatggggtcgaactatggaaatctattaggaaagattgaaacactttctatagtagatcttcctttgtggtggctaatgggatgtgggtggaattttggaaggataaatggtgcagggatgatcctttgtgtgtttccttcccttctttatatgccttagccatttcaaaagaggtcttggtagcgaatttataggatcggacaagtgagagggtcattggaatccttatttttctagacttttaaatgattgaaaattggacgacttagaggaattattttcaagtttgcaaggagtggtggtagatagtgagggggaagacaaggtggggtagacgaactcaagaaacaataagttctcagctaagtctttatgtgttgctttggaattgggggaatcaatttcctttccaacaagtgtaatttggaatacatgggtgccttctaaggtgagtttgttcacttaggaggctagctggggtcaggtgttgaccctaaactagtttcagagaagaaggtgatctttggtcatttttttctttctaaagttgaggaagaatccataaattacatttttcttcattgttgcaaggcaagggttctctggtagttgctcttcgctctttttggtattcattgggtgcaagtttctatggttaaagagattctcttaggttgacatagatcatttgtgggtaaaagatgtaagaagctttggtgagcagttccattgtgcatcttttggactgtttggaatgaaaagaattaaagattgtttgataatgaggaacaatcgaatcaaagtttgaaaaacacttttcttagaaatttgtttttgtgggttacaaaaatataggttttatgtctttaaatgattttgttgattggttaagttcttgctaagagagggagttgctttttgttttctttctttttgcttgcttcttttggctttcattgtatacctcttatgtgctatgatgttccgtctctctgacacttgtttataaaatcgtattatttgcttatcaaaaatgatctagccacatcatattgtttcttggtatgccatgtgactaaatttcctcccactaacatgtagtaccctaaagttgatcttcgatttattattgatcctacccaatgaacatctatatattcctctacttccaaatagccatgtttagatatcaaaccattcctaagagcagattttaaatagttaagaagcttgtgtataaccaacatgtgtttttcaaggagcatgcataaattgacttaacacactctctgcaaaggctatttcatagcaagtatgagccatgaatgtttacttcccgactaatatttggcattgccttttgtctgctggtgtatcattgggcattcaccccacctgtgattttgttcaataggagtatcaacaagcttactagccaacattcttgtttagttgagtaaaaaatgtatttttttgagaaacaaagatcttttgcttcgacctaacaacttcaatatttagaaaatactatagaataccaaggtctttgatatcaaattctgttgccaaatatgtttttagtttgctcagctcctcactatttttacctgtcaccacaatatcatccacatacatgatcaagatgttaatcttcccattgggtgaatgtttgagagaaaaaaagtgatcagattgactatgatggtatccatacttcttcatggcctaaacaaatctaccaaagcaagctccaggtgattgcttgagttcatacatggacttccgtaatctacataccttgcccctttttgttaggttaggaaagctatgaggaaagtccatgcagtcttcttcttctagatctttgtgaagaaatgcattcttgatatcaaactgttgaagaggccaatctaggcttacagccaaggataagaggacctgaatgatagttatctttgcctctggtgtaaaaagtttcctgataatctgcctcatatgtctgtgtataatctttagctaccaatctttctttgaacctctccatagaaccatttgccttatgtttcactttgaatacctatttgcaaccaattgtcttctttccctttggcaactccactagttcccatgaatcattgtttgtaatgcttcaatgtcttctatcatggcagcttttcactttatgttagtaagagcttcatgtgatttattaagaatagatgcaaaggacaactggtttgcaaatattttataaggtggagataaaggatgtgaagacatataataaagagataagactttttatactacagtttgcaaaaccataatgagtctagttctcaaaagttaattgagttgactcttcaatagaaggatcaatagaaagtttaagggaagcaattacctctaaaatacttgttgaagcatctgattggtcattaggttaatcaaaaggtggttgagtcttctcccttcatgaatattccaatctatatggctcaataaatcctcttgaagtagatgcaaaagcttcaaatgatgatacaatggtgaaaggtagtggtagcatatcctaagacttctcttcctccttaagagatgcatttgaatctccccctaaatggtaaacttgatcttcaaccaaagtaacattcatggaaacaaacattttttctaaaggcaggtggtagcatttgtatcccttttttttttctttttcttttttgtggtagagtaccctaaaagatgcacttaagtaccctcaaatcaagcttactcttatgttgtttatgcatgtgaacataacaaacacaagcaaacaccacgggggagatatgaagacaagttagaataggatgtgttttggataaggactggagaggggtttgaaattgaaggacttttgaaggaattttgttaatgtgatatgttgcaataaggactacatgaccttggaaggattgaagaacattcatagcaaagattaaggatctaacgacttccaatagatgatgattcttacactcggctacaccattttattggggtcatcaacacatgaagttggatgaataatgccatgagactgaaaacaaacacttatgccctaattgaaatgcttcctttcaccatcaaatcgtaaaacttgtattttagtgttagattgggcaagaaccatttgatgaaagaacttataggtggaaaaaacattacattttttctttcaacaaatttatccatgaaacattaaacacaatcatcaagggaagaaacacaccacctagaattagaatgattagaaacacgagatgatccccacacatcactatgaatagttaagaaagacaccaaacttttattaaaacttgaaggaaaagaagttcgataatgtttggctaacacaaaactatgacaatgaaaattagaaacttgaacttttgaaaggattgcaacgacttgtggaaattgctaaatgatggatgtcctgatcttctatgccatatccaaatccgttcttctgatgttggcctgcccactacttgattttcttttctatccaaatcttatcaattcatataactctctctctaccaagattaatcttcgctcccataagaggatcttgaaagacataacgagtctcaaagaaagttacgtaacactttggaatcttagtaatctagctaatagacaataagttactagataaacatggaacatgataacactcaagtcctcccaaagagtcctctttagttaaagccatccttacacttcttaaatagatacatggtaaaaaaaggctctaactaaaataaaggctgcaactaaaatacctcaagatttctagaactcttttctctcacattactaaccttcactgactagtcttcgagcaaaagaggttacctctttagaaaagcaccaacctaacacttcttaccaccactttggaaatagcctccatcttggtttcttacaagcaaactaacttggctttttgaacccttaggaatgatttcttacctttcttttaccttcatcataaaggccttgagttccaagagatgcttccaagcttcatgagacaacaatagatgtcacctaacccttctcccaaccctcttcatggttgttttcttgattccctttgtttttcttagagaatatgtcggggaataattgcattatgttttttttttaccctaataaatgttaataatgttggcagatttgaacaaatcaaaggagatctgaaattgactaattaattgtaagatctcctaaagttttggaattatgtttgttccttttttagagtgtacaactattgactatcatgtatagaatcaggaaatcattatatgatttttttccttttctagaagtataagtcaatctaggtccttgtataaaaagatagcttgtaatcctttcaaactaagaagatacagattcaatttctttgaattggttgatatttttatatgatatcagagccgaattaaggttcttcttcagccatcgtcttgctccaatttctggagagtatttcttctcctaagcaaccttaattgctgtaatttgtttcatttatctagccagcctcttttcatcccctgtttattcctttcattcaagtaaaagttatgtcaatcacttgtgaaaatcaagcgtcttccaaactacaaagtacccagcaaccaacccagccaattaccatttttcaaaatgataaccccactcttcaaatcaccacaataaaacttgatggtactcattttctggaatggttccagtctgtcaaacaatttcttaaagagtagagtaaagatgggctataaatttggagctattgcagaacctgaagaaatagatccaaaagatgctatgtgggatgctgaaaattcaactgtgatgtcttggttgctgaacttgattttgcctgagattagtaggcgattgagacttcttcctacaaccaaggaaatatggcattcagtgaatcaaatctattcaaagattggtgttgctgctcaaatctatgaaccaaaagttcagattcattggaccgaacaaggtacaatgactataaatcaatattataatacaatgagaagtttgtggttggaacttgacttgtatcaaactgttgaaatggagtctgctgcagatagtgtgaaactgaagaattttctgggatttgagaggctgtttgagttcttggctggtcttaatccggagttggatcaagtaagggatcaagtgctaagtagagaacctttcccatcattaaaagaagctcatgcctatgtgaaaggggaagacagcagaaggataatgatgcttctgaattcaagtacagagaatctcattgtcactgcaccaaataattcagcattgttggcttctaactctatacttggggtaccaaaaacagaaggaagaaagccgcttgatagggatggcctatggtgtgactattgtcacaactctaggcacactagagataaatgttggaagcttcatggaaagccccaaaacattcaaaagatggaaagccaacaacttgaggtgcacaggctcatcatgtggcagccatagacaccccacaggacaggtttagttcagggactacacctgtgaatgtgttcaacaatgaggaaatggaaaaactcagaaatcttttgaagcaacttgaaccacaagttgttgcacaagacttgaacaagtcttcctattcctttgtccagttaggtaatatccaagcccttagtgcatctaataatccatacttgaacacttggatcatagatttaggtccctctgaccgcatgacaaattattccaactcattttctacataatttgcctattctagtagagaaaaagttagaactgctgatggctcattttcttctatatcttgtcaaggaactatccatatatcttctagcatagtgttaaactctgttttgcatgtgccaagaatatcctacaatttattgtccatccaaaaacttacaaaggatttgaattgtaatgtgtgtctcacaccttcctactttgtttttcaagactgcattaccaggaggatgattggacatgctggggaaaaaaatggactttactacctaaaatgacccatgaagtgtggtaacttggtttcccaagtgttaggaacttctagtactctaggtaatgaagaaaaaatttggatttggtgtaagagattgggacatcctctctttctcatcttgaaaagtttatttccctttttgtttggaaaaaaaaaatgttcacgagtctcattgtgggatgtgtgaacttgcaaagcatgcgtaccttttccgattagtaattcaaaacaaagtactcctttgagtttagtccattctgatatatggggttgttctcgtgtgtcaaatatttctggtgctcattggttagttacatttattgatgattgtacacgaacaatttaggtgtatctcttaaaagcaaaatctgaggttaattcgatatttctcacatttcataaaatggtagccactcaatttaacatattcataccctaagatcagataatggtcgagagtacttcaatgagaatctcattaagtacctccaatatgagggaatcatccatcatttctcttgtgttgataccgccaacagaatggggtggctgaaagaagaaataggcatttgttagaagtggctagatctctcctttttcaaataaatgtaccaaaaagttactggagtgaagctgttcttgctgccacttatattgtgagtagcatgcctactcgggtcttgaattctagatcccctattgatcatccttcttcaatatttcctcattttcaaggaattaggaatcttctcccaaaaatatttgggtttgtggcctttgttcacatccacaatcactcacggagtaaacttgatccaagagctattaaatgtttgtttcttggatattcttccactcaaaaagggtaagtgctatcaccctccatctagaaaattgttgacctaaatggatgtcacattttttgagcatcagagttatgatattaatacccatcttcaggggggagaattctgtggaatatgggagttcacaatgagatcggaatcccaccttatctatttctgattttaagtctccttcagccttgcctatggactcaacattgcctatgcttaatcagtcctctatgcttgatcagtcccctaataggttacactctcagtcttttaatgagcttgatcaggaaaatcaaggcgaaactgtctttcagcaatctaaaatttgcagataacctaggagcttgagatttgggcgaatgcaaggaagaaaaagtccattgttccttcacaaggccaaacatctgaacctgtggcaggtatggacaatacggttacaaccactaattttgataatcttcctggtttgtttgaaaaccttgatattcctattacttttaggaaagccaaaagaaagtgtacccatcatctcacttccaattttgtatcattccaccgtttgtctcctcttttttttttttttttttgtctaatctttccactattgagagtccaaaaaatgttcatggggctcttgggaataaaaattggagggatgccatgaatgaagaaatgcatgctttaataaagaacggaacttgggagatgataagagcttcctgaagggaaaaacatcgtgggttgtaagtgggtttataccttaaaatataatgctgatggtagcttagagagatacaaagcaagacttgtggctgaagggtatacacaaacttttggaattgattttcaagaaacctttgcacctatggccaaaatgaatactattcggatcttgttgtctttaaaaactaacttggattggcccttatagcaatttgacgtgaagaatgcatttcttcacgatgatcttgaggaagacgtgtacatggatagaccgcctgcttttgaaacaaaagcttttgaaaataaagtttgtaagttgaagaaagctctttacagattcaagcagtctcctagggcttggttcgggaggttcaccaagtccatgttaaaaaggggatatcaccaaagccaaggagaccatgctttgtttatcaaacattccacaaataggaaggtaactgctgttattgtttatgtggatgatattatctttattggtagtgatttgcaggaaatgaccaacttgaagtcttacttggctcaaagtttggaattacagacctagggaggttaaagtattttctaggcattgaagtagcttgagctatggataggattgttatttctcaatacaagtacattaaggatctcctaatggaaattggattgttaggatgcaaacccgcaaagacaccaattgagcaaaatcacaaacttgggggctctaaagaagaactaatggttgacggtggtgcctattaaagactagtagggaagttgatttacttatcacgcacaagacttgacattgcctatgcagtaagtgttgtgattagttcatgcacaatcctttcaactcccacttggaagtgtatactacatcattcattacttaaaaggaacatcattcattacttagttcatgagaattttgttttgaaaagcaaaggaaatctctttagaaattttgagctcatgtggtaggaaacttggttacatgaggagtaaaaagtaatcgattgtagcaagatcaagtatagaggtagaattttgagttatggcagtaggaatttgtgagctattatggatcaaaattgtcctgcttgacttaaagattaatgtcaagagtcttatgaaattatattgtgacaataaagcaaccataagtactgctcacaatcttgtccaacatgaccacaccaaacattttttttttttttgatagaaaacgacaaaggaatatattgataaaaagggaagtacaagagaaggatgagggatcctcccaccaaagaaaaacaaaactacaaggaaacaaatgcgagaaaatacaaagtagatacaaacaactgctccaagttaggccaccccattggagttacacgctgctaaccaatcaaggtgtatcacattaaggggaatccccttaaaaaccttagaacaaaaagcccaaagagaagcaaggaaatgaatcatctctcaaaggttctctgaattccttgttttatcctcaaaaatccttgcatttctttcccgccacaccacctataataaagcgatacacgcagcttgccataagacaatccctctcttagaagatccaaaaccattaaaattggtagatagcatgtcaaagatgctcctaggagggacccaatttgtctttgttaactgaaataatttgttccacaaccccatcgtcagagagcaattaagaaaaagatgatctactgtttctccatgcttcatgcacaacatgcaaatgtcgggactaagtgctttgtagggtcttctcaactgtagtatgtcgttagtatttaccttcttgtgagccactaaccaaacaaaggacttgattttgaaagggacttgagaatttcagactaacttggtagggaaaactgaaggcaaactagaaaattgggataaggcaagaaagaaagatttgactgtgaaaagtcctgaaggagataaagaccaagatctcttatctggaaccgaagatgataaatgtagatgatcaagagaccgcatgggactttctaaatcttctatctcgaaatcggaaaggttacggcggaagttaaagttccaagagaagaggcgagtggatccgagaattgaagaaataggaatgtttttgtccatgactactctaagtagtcttggataacggacccccagaggttgatcccctcaccacaagtcttcccagaatcgaattctttccccatctcctaccatgaaccgagtaaacttggaaaaatcttggaaaacttgtgcaatagccttctaaggacaacgatgtgaccatctaacaacagtgttggcatctcaaccattagagtgtgatccataaatgcttaaaatgacctgatgccacaacgctgaaccctccctaggatacctccacagccatttccctaagagagcggaattccgtaaggaaatccttccgagacccaatccccctttcgtcttcggattacacattacatcccagctaactagatgatctcttttgccttccccaaccccagaccataaaaaatctctttgcaacctcttaattcttgctgccacggaggcggaaatcttaaacaaggaaaggaagtaacaaggcatatgagtgagacaagattgaatgagagttatcctgcctccaaaagataaatacgcctttttccacccatctaatctgctcgagatcctctcaatcacaggatcccagaatctaccagacttggggttcccacccagaggaaggcccaggtagagtatgggccacccagaagccttgcaatcaagcaactcggccaacctatgaagatgattctgaccaaggttaatgccataaatattacttttgtcaaggttaaccttcagcccagaaatatgcccaaatactagcaaaacactcttgagagttagcaagtcctcttctcgagtactagagaagaaaatggtgtcatttgcaaattgtaaatgggacacccttgttctgttcttacccaccctgaaaccctctaaggcatttctttcctcagctctcaataacatcctgctcaatacatctgctactatggtgaacaaaaagggggataaagggtctccttgtcttaaacctctagatgccttaacccaccctttagcgtttccattcactaggactgcaaaagacaccgaggacagacaacctctcatccatttcctccatctaggattgaacccctttttctccatcacatggtccaaaaaatcccaattcacatggtcataagccttttcaaagtcaattttaaagacaactccttcctcccctgatcgttttttctcatccacaatctcattagctatgaggattgcgtccaaaatttgtctcccttgaacaaaagctctttgagtggaatgaatagtttcatgaagtaaccctcttagacaccctgttaacactttgactataatcttgtaaagacttgtgatcaagctaatgggtctatagtctgatatcttctttgccatgctttttttgggtaataaaactatgaaggatgcattagtgctttgattaataatcctgctcctgtgaaactcatcgaacactctcactaaatcctccttaatcacatcccaacaatcttgaaacactgcaatagtaaagccatcaggccccggtgctttatccctatccatctgaaaaatggccttagaaatctcttcttcagtaaaaggggattccaacctagacgcactctctctagatataggagaccaatctacacgttcaactctccaagactctccagaaggactagcatagagcttttcaaaataccttaagatctcctctttgatgctctctgaataatccaacaccaagcctctttcattctccaacaccttgataaatttcctatttctcctgccattagacactttatggaaaaattttgaattgcaatccccttccttaacccatttcaccctagctttttgtctccaatgaatttcttccctcaagatcaactcctctaactcccctttccttaaggctctatggattaaaagttcaggggagagacccccttcttgctccatggagtcaaagttagctatatctaacaaaatgctttttttcctttcaattaagtcaccagaagaattcttattccactctttcaatttagccttaaggaattgtagtttcctcatgaacttgtgaccttcccacccatctccttgagactccctccaccaacttccaaagctctccttaaaattaggatgttgcaaccacatattctcaaacctaaacggtgttgggccccacttgaacgggttggtttccaagactatcggccaatgattcgatgtccatctaggaagaacttcttgaagactttgagggaataattgttcccactcatttgagtagagaaaacagtctaatctcttgcatgtttgaccaagtgaatgatgcactccttaaaggaggatcaatcaatttgttttctcttataaagtcgtccaagtccttcatgcttggggtcaatctagcaccacccaatttttcagaacatctccttatgacattgaaatctccacccacacaccaacatggggaagagaatccaaaaatgtctgaaagctccacccaaaaatccttcctaagtgctgtgctatttgggccatagacggctgataaccaaaattgttcgcttctatccactgcgaacttgactgagatcgaaaaggaacctaataccacctcctcactgtgcaattttttagagtcccaaatgaccaaaatcctacccgaagccccgcacgccggaagggctgcccattccttatttctggctgtccacacactacccacaaaccttctgtcacactctgccttttttgtttcctgaatcatcactatatccggtttttccgatctcagaaagtctttcaccacccttctctttttccttgaacccaaccccctggtattccaactgattatcttcatggattaaacacacggaccctaatcctccaaaccagttccaactcatctcacaaacctttggaacatctgctcttcctcctggagtatacttttatatccagagtctttaagacatcacgcacttttgccattttcctaggagaaattccttctatttggaactcaccctatggggaacccgcaaaaacaccctaactaattgtagcctggttgggaggtggatttgttttaggcatcaatgggttaacactctcggtcaactggttaggataagcagtctggttcacctccaaaacgaggtaagggaagccaacactattttgacccacagtaccatcgtcatcttttttgaaaaaaaatcggagttctcacggttctccaaaggattcagagactgaatgtctgaactgggaagagtgggggcagcaagactcaagaagggagaagtgaaaccacaagaagggggaaaataagacgagggagactgaaaagttgaagacggggttacctccagattttccgcggccacaccaaacatgaggagattgatagacattttatcaaggaaaaactagattttgaggcaatttgcactccttatgttacttccttaaattagttggcaaatgtgctaattaaaggattggtgggctcttcatttcatcaaattctaggcaagcttggaatgcagaatatattagcaccggcttgagggggagtgttggcagatttgcagaaatcaaaggagatccgaaattgactaaataattctaagatctagtagagttttggaattatgtttgttccttttttttagagtgtactactattgactattatgtatagaatcaggaaatcattatatgatttttaacttttctagaagtataagtcaacctaagtccttgtataaaaagatagcttgtaatcctttcaaagtaagaaaatacagattcaatttctttgaattggtttatatttttacaaataagttgttattttcatgtgcccccttttattgggtgctttatatttcatctttgtttgcctatataacaaaaaattactatattttgcgtgattttgctctatgtagctagatatgcacatgcaaactcagaaaagctaaatatatacgtctaaattttgaatattatctatatccctatctccaacagatgaggatgagtccgtcaaggtgtatttaagaaaaagaaggaaaggaaaaggaaaagaaaaaggaagttttagaatttgggaagttttaaaagtctcctaaaaagaaggaaaaacagagttttttactctaaatttgctatttcaaattcttagaatttagaagtcttctttattataaacttaattataatacgtttctataaagtaagtcttcaatcctacaaggaaaaaatatttttgatctcttttaattattttttaaaagatttaatggttctagggagagaataagactcctaattggttattacataggttagctttacctttcatagttttattcaaattttagggttttcatagtttgatacaaaataagattaaggattgatgatcaataatatttacctatctttttttttcttttttttttttttaaattttttgtataccttacaattcttaatagtgagattccattgattttctcctaggtgagacccttagaagcttagtgagactctaaggttgctatttattcttctttatctttctttacctatattttattttacttttctctgctatcataatttttattccttgttcctctcattatcctaaaagattgaaagccctagtccacctattttcttattgacaaccatcctaaggttgccctacatcaccagctttctcatttcatttccccttcaatagatcggactatgaccaattgctttttcagttattttctaaggaagagacacatgttatgccatattcaactaaatagatgcatgcagtatgatccaagtctaagtcttgagaaaaataagatgacatgcaatcccattggatctcaaacatcatgttttcatatattaaagatcacatgttctagacaagggctatggaagtgtttccattcttgtgttgtataattaaaataaaaatccaaattagaactaaagaatcatataaccaccattttggagaattgaagagcaatataacaacacacaatttttttttttttaagttctgaatttataatgtaagtgaagattatatacaaattatagacataaagatcttgaaggttaacaaagttgatgatttattgaaacaaacaaaaaaacttcagctattttagttaaattgaccacctccactatatatatctagtaaaataaaaatgaatttgggttttgttagtgtgctagattagctagttaggttgacaaatttgctccaaataagcactggtacgatattaagtatttctaagggactgatcgacttcaaagctatgttatagttttttttttttttttgatcagacaaagctatgttatagtgattatttagaaaaaaaagataagtatgtggtttggagtttgaggtaggattatggcagtataaaaattgcatcaagacgtaaaatgggttaagaaaagtggttagagatcttgattgttcaaagtagtgcttgagccaactagtacatgcaaatagaagaatttttggatttgagcactcaagtgctcaaacaggccacttaagcactcaacttggttgttgagaaataattattttaaaatatgaaaaaaaaaaccctataattcacattatttattttcctattgtggtttgacctaaaaacctagggcttgcctataaatacctatgctaaaaattctctaatgatgtacctattaaaatatatggttgttactttgttctaatcttttagcttactgttaaggtgtcagcataggagcacttggagttgtatcaaagatgtgaaataaaaaggtaggtgttaggtagataaaccccttggaagaaggttgggtctggattatgtaaacttatttactagcttttcataattagtggattgactttacgattgattgagactcgcggttttaccctaagaggaaattcataggcgatttccacatatattgccaatttcctgatttcttgacaatggggtaggtggtggtttggtctgttgtatttttttttttctttgtattgtgttttcttgttgtgtgctttttgtactccctatgttcatgggtgcaccccctttttttattagacatttttcaacaatattctatttggctataaaaaaaaaaaaaagagtttcaaatatgtttggtagtagccataatacttttgttgaacaatgtaggatctaatccacttttatttctctttttgggtttcttgtgaacctgctttcaaagacattcctctcaatgttgtttagcttgactagtccttggtgtgtagaacaaaaggggctgaatagcaatgagaggagttttgtgtgggctagtggagaggcttttgtatttttttttggtccatatcagttggctaggtctccttgtattgtggtggagtttagccatttttttaaatctgtttttgtaactatggggaggacttctcatccttctcatgtacttttattcgtttttttttttaatacaattctgtttctgattaaaaaaaaattacttttcttgaacaattctgagtatgcttctaatttatttattttgaggataaatagaggaccttatagaccatatgggacctactttatttctattcatccttttgggcctttactattacagcttttgagggcactcctatcaaaaggattagaaaggaagctgctccctagttgggttctacctgcagtgggttcgtgcaaattaaattttgatgggtgtggttgaggacacccatgtcagctggggattggaagggtgaccaaagaccataatggtattgtagttagacttttttcaaaaccggcaggagaaggtttaaccatttaggcagagcttttagcctttagagggcttgctgcaagctagggcccttaaccctttctaacctacaggtggaagggaactttgccctattgtcatcttgggtggctaaattagaaagagttccttggaggtacaatgggttgctgcatcaaatattagatgttgcatgtatcctggactgcctttcctcttgggctcctcattcaactaatattgttgctgatctcatttgacaaagtgaggttctatgctttggcttcattttttaggagattttttaccctcttgagggtgctgtatataatcctgtactctctggagaactcttctccatctcttctttgatcagaatgtgtaaattttggaaggattcctcatccttcattgtacatatatataactgactatcaggaatcattttgatttgtttgatgtaattaaacactcaattggctctggagaccaattttagatgtatataactgcatgccagctcttcaacatttttgtgatacttggctacattattgaatttttttaaatagacaaatggtaaaggcactgataggtgtttttacgtatattcttattttgtaactaattgattcattatgatacccagtttgttgcagaaaagaatattcgaa

SEQ ID NO: 11379 - DNA, 7250 bp, Vitis vinifera
  Intron number 16 from transcript GSVIVT01025079001 (locus GSVIVG01025079001) derived from phytozome v7.0 (chr-ID chr 6; pos 4699103 to 4706352 reverse strand)
ttcctcatttccctagaaagtctaaaaccccagatgtaagtttatttccctttgacagctctctgttattgaatatttatttttaatctgcgaactaatccctatggttttttttatctagctttgttttaggggtcttgtggattttattgttttatatatggtgtataagtaaactgatgaaacaaactggagataaaggaggcattctgtaccacctaccaaactcgtgtatgagaagcccaacatcatgcatttgatatgtccagatctgttatgccctggcctttcccttataccatacccattgttgacattattggatttggataaggatattagatatgtcttagatgcaaattcatatccactcattagatggagtccttgtttgatttgttatgcacctattacccaagtctccaagcaatgatatttcttttcttttttttttttgataggtaaacagaaacattttataaaaagtaaggccaaaaaaggcattccaaagtacacaagatgtatacaaagaaacacctcaaggcaacacaaaaacaaagaggaacaccatcaacagcccccttagcccaaacccaaccactccacaaagtctacaaaggaaggaggactaggaactatatacaacttgcaccaagcccaaagattacaaatgaaggagaatttcaacccttgaatggaccacccctcattgtcaaatgtcttactatttctttccttccaaacagtccagaaaagtcataaaggagcagcctgccacgccttttttcttttcttacccacaaaaaaaccatgtcatcctaacaaagctactctaaccgaggagggaagcacccacaacacaccaaaaagagagaacggtagaaccaagcaatgagatttcttaaaatggttgaactagacttctgtgatagaagttacattgatatgagtgtaactttgatgctggcatgttccagcttattagtctggtttgggtcaggcactaccttcgttggctataaataatgagatgttcacatatttagaattgttcagatatcaaaatgtgtttttgtctgatttttgatatttagaatagatatgttggctaagttgtcattgtaataccccaagcatttgatgtgtacctgtgtttatcagtgtgatttcaattttttttttccttatttacagcatatatttttatattttttatatgtttataagtgtgatttcaaatttttgtttcttatttacagcttataattctctatattctttgaagattatggtctaatggtttaaagtatttcatagaaattcatatgaattaatttacttttgtgggatgccagaccaaattgagcttgtagtttcgaaaaatgggaatttgataattagttcaagaaaatccatcatcaatttgcaagaatggcttggattaattctacactgatatcaaaattactgcattttgattggtttcagggaattactgaatgtttggctcttaaaccccctgtttattggcccacagttactcatttagttccttgaatcattcaagtgaaaaaacagatagggaacttcaattcaactggtgaaattctgtagcttatgttgataaacctgtttaagtgactcaacttcatcatatttgtagctcctaaattgtaatgagattatcaaaatgatcagcaaatggccccaactttactaaatcccatcctttagtttaaaaggtaagggccaacaactgtttattctctgcatgattattccaggggtggggtgtactagactggtgtgcaagcgtgcaaaaaggtctcaacaatgtccaactcaagttattaaagtgcttagtgaagcatgaaatccaatgtccctactctcccaagtcttcccataaatccgccactcgagcctcctttaacgaagccaatgcatacagtgggaaaaagaattacacagggctcctccgcatgccatttgtgtccaaaatttaacccttctaccattatccacttcaaaggaagttatactaaagaaaaaaccacacccttacttatagctttccaaataccaaccccataaccatctccaacttcacaaaggttttaacgcactccttcgttcccatacttcccctctataatgtgcttccaaaaaacttccctattagaaacatgtctccagccaaggagggcctaattcaaaaaagagagaattctaatgctcaaacccccttttctcttatttatgcgttttctccaaagtcccacctccctaaaaaactcccttaaatattctttgacctcaatttgaccttctagggattataaacaaagacatgtaatagattgacttgctcgacaaagtacttctaatctatgtaagcctccctcattaggaaatatattgtcttttccgcatcgatagtcttcaataaatgtaaccctaaaacttgacacataacctccctccttggctctcttcaatagacaaccaaacgcctctatggctagaacaaataaaaaaaagagaaaggatccccttgtctcaacccacttgaaatatgaaagaaaccggaagatgttccgttgaccagcattaaaaactttgttgtggatatgcactagtgtatccaactagaattgttattgaggaatgctaataatgcatcttgatttcattaataggattggattggggttcagtttgtagtcattgtcttacctcttctttatttgctttctctctttccctttggtgttcctatatacatcttgtgtacttagattctatgtcttttatgctcttctaataatttttttgtttgcccatcaaaaatggaaaaattgttaccactaggtatagaaactacaggttgcagccatcccttaattttcataatacaagttataactaaaataatatttttgggaaaaaattcaatggataaacccaaagttatgttatatctagtgctgcttttatgcatgaatagttatggatttttatttttcaaaatttaacaggatccctattgtttaaaaatattcactttaagaaattgtcaatgttaacatagtctggggaaggtggctttttttgcttatagagccatttaggaggctttacaaagacctaactttggatgagaggttggatgctcgctggttctctctttgcagatcagagatggcctgcatttcttaatctgctgacttgtaggccaaggccttggagtgtttgatccttgttttgtatattgtgatatggatgctgccagaaattggtagtaagcagcctgttgtctggcagatttgccagaggatagcatctttctgtgtgtcgtggtgtatatagagaggggaataagaggatagttgagggtgctgaggtctcaatagtgaagtttaaggaggttcccttcctgtcactctatgtgtgagcattgaaggctgatagaggaagaattagttcctttcagaattttttagacagctcagggtctattgattggaggaagactctggttttcatagtcctttttctttgtcgtttagctttctatatgattttcttgtataccccccttttgtgggggtgggatgatagcaaggtgttacagtgtttggagatggaaatgggaactttctcagtttcttgtcatttctagaactgtgaagatggtttctgttggagcttcactggggtttatggacccacactaaagaaggatagggaaggtttttggggagaactgggggttattaaaggattatggagtgatccctggtgtgtggtaagtgattgtaacaggagtagataccctttggagtgtagtagaggtggtagtttgtcccctgccatgaggagattattagaggtaattgaggacttagaattgagggattttccctttcagggatgtcagtttacttgaagtggcagtttaagtaatcgatctaagtctagaattgatcggttcctaatctttgatgactaggaggttgcttttcctggagcagtccagtgtgtccttcctaaactggtgtccggccattgtccaattcttcttgatgggggaggggtgaggagaggtcctactccttttagatttgaaaatatgtggttgaaagaggagggttttaaagatgttctgagattgtggtgggaggggcttaattttagtgggtctgctagcttgattctagctgaaaaaatgaaagcttttaaacctattttgagaagttggaacaaggaagtgtttgggaagattgaagttcaggaggttttggccttaaactttgtgaattttcgggatgaagtgtagagttgtggttcactgtctttggaaaagaaggaatctaggagggaagcttgggagaattacaatttagaagagacgtcttggagacaaaaatcaagggaaatctagctgaaggaggaggatagaaacacaagttttttccattgaatggttaatgcacacaaaagaaggaaccagatggcttgagtcaaaattaatggaacgtggatcattgaggacaatgatattaaggaagaagtgggtaaagctttctagaagttgctcttagctagtggtgagtgtagacccaacttaagtggtccgccttttgaaaggttggaagctctgaaggcggaagggctggagaaaccttttatagaggaggatatttgtaacgcattattggattttagtagagacaaagcatcaagcctggatggtttctccatggctttctagcagttttcacgggagttcattaaggatgaggtgatgaatttttttagggaaatttatgaagatggttgttttgttccgagtttgaatgcaactttcttagtgctgatcccgaagaaaagggatgtggaggacttgagggatttcaggcctattatcctgtttggggggggagaggggggccgctgtataagtggttggctaaggtgttggctaatagattaaagctagtgttagctaaggtgatttccaacacccaaaatgtatttgtagaaggtaggcaaattgtggatacaatgcttattgccaatgaaaccattgattcgattttgaagagtaagggtggagcaattctttgcaagctagatattgagaaggcgtatgatcatgtgaagtgacttttcttgttcttggttctggagaaggtgggttttggggagaagtggataaagtggtgtgtgtccactgctagtttttcaattctggttaatgacacttctttgggattttttcaaagttctaggggtctaaggcaaggaggagaaaggggtgaagaggttaaaatctcccatttgttgtttgttgatgatactttggttttttgcaaggccaacaaggactaagtgacctttttgagttggttacttatgtggtttaaggctatatcagggctgaaagttaacttggataaaagtgagttgatcccaataggcaatgtggagaatgtggaggagtttgcttctgagcttgattgtaaggtggaaagtttactttccatttacttggggatgttgttggatgcacccttcaagtctgtggcaacttgggatggagtggagaagagattccgtaagagattggctatgtggaaatgtcaatatatttctaagggatggagaattactttgattagaagcacattgtccagcttgcctatttacttcatgtctattctacaattgccaaggggggtcaaattaaggctgaagtagattcagagaaatttcctgtggggaagtggggccacctaggccggagacctcacttagtaagatgggcaatagtgtgccttgataagagaaaagggggtttgggggtcaagagcatttctacgctcaacaaggccctcctttgcaaatggagttggctctttgcgaataagaaaggggctttatggaaccaagtaattagggggatatatggggaggaacaaggaaggtggtgttctcgggacgtaagagaggggtatggtgtaggattgtggaaagcaattaggaagcttggacacattgttagcaatagactctcctttgtggtagggaacggtcaaatggtgagtttttgaaaggatatttggtgtggggctacacctttgtgtgcttctttcccttccttatttgcccgagctgatcccataacaacttgggtgaaggatgtttggattaggaggaggagttggagtccttgcttcactaggtctttaatgattaggagatggatgagatggagggccttttgttacgcttgtgtggttagaaagtgatcttggaggatgaggatagggtgcggtggatggaaacaaaggatagaactttctcgacaaagtcattttacaaagtcttaaagccaggctcttcagttttgtttccaatgaagatcatttggaaatcgtgtgtgcaaccaaaagtaagcttctttacttgggaggcatcatggggcaaagttttaaccttggaccaagttaaaaagaggggatgggccttagcaaatagatgttatttttgtcaagcggatgaggaatccattaaccacctccttctccattgtgaaaatactagggcatcgtgggagatgtttttcactctttttagtgtcttaggtgtttccttcttcggttagggaaaacctcttgggttggaatggattctttgtgggaaaaaaatgcaagacaatttggagaatgggtcctctttacattttttggatagtttggaagacaaggaatagaatcgcctttgaagataatatgttgtccatccaaagactaaaaacttattttcgtagcccactttgatcggagactaaattgtttataaaagatggtacaacaaccttttttgagttcattgattgggtgagttcccatcaagggatggggttgttttttgtatatttttgtggatagttttttgtttcaaatgttagggggtgagtgtttccctttctattctgtatattttgagtcgctattttagcatctcttcataatacaatacttttccttatcgaaaaaagaaaatgctatttgtaccaatcaataaaagatgtgcatgtattattcattcagatctttgttatgtatccaaatgattaatgcactgactgcctattgatagctatgaactttcaaaagcatttaatggaatgttgtaatcttaatgcaggctaaaggttttgttgccagttcattctatactgg

SEQ ID NO: 11380 - DNA, 9254 bp, Vitis vinifera
  Intron number 1 from transcript GSVIVT01009797001 (locus G SVIVG01009797001) derived from phytozome v7.0 (chr-ID chr1 8; pos 11318991 to 11328244)
ctgtaagttctttattttttcggggtcaattattgttttttaatttatgtttcgtatgtgattgaattggatgatttcaggtgaattggatttggtcttttcgatcggttttggtatccgtttaattgcattgatttcaaatgttgacctttttcagaattaatgattgaaaccctaggcttttgtcttcttgtctcagtttgaatttttaattattttatttacttggtttgtgctcttctcactaatttgatgaagtagttgcggttttggatatcaatcagggctgaaagtttattgttttcccctttttatttaaatttttgggagggatgactctgtacatgattgtgttaaatatacaaaatttggatgtaaaccttaagaatagatggatggttttctggaggattgaaggtgatcaaaactagaccagttgcatgtgctcaatgggggtagttacagatagatagaggagatggaattctgatgatagagaatgaattatgaccgcatcggcattacctgattgagttgctttatggtcatcttgaaattgtttatggcatactaaaatgacactaagagggggaaagttagtaaacaaactcatgcctcgtctggatagcttcctgttttttgctttagaaggaagttaaagctaaagtcacaaattttaaagggtaatattgatattgtaaaagttatattgaatatgaaaaaagttctcatataagccaaaaaagaacttctacatgaaacaggattttgctgatttccatattaatttttttttgaagccataagctttttgaacagaattagctaaactgatataaaaatgcttattgaccttaaaaaaagagtttttggcttcttgatccaagtaaggccttaataatttaggtgaggtttggtaaaattgaaaaattagtacttaatgccttaagataatttaatctagatttggcttaacttattgactttacacttgttatttaattcttaatttagattttgcttaatttattgatcgtaaaattataacttagtgcttgcttggatatacttcttgttttctatttttttaaaaatagaaaatattaataccgtgtatagaaaatacaataattcttatataaaaggtatgaacttatcttatattcttaaaaattacttttaaaatttaaggtcataaaaaaatttaatttgtcattttttttaaatagtttttaaaagatattttctttttaaggtaacttttaaaaagtttttgcattgtatataggtgttacctatgttgcatggggttgggtacgagtatttgatttgtgtatgtgtttaagtgtttgatctatcactactcaaattttaggttataagtactatactaaaactgatccaaaaaactggtatgggcattgtgatgcaacatgataaaagaaaaatcaattgaaaataaattggaagtaatgatatactttttaaaagctccaatcttttctctctaatgctttttttccttcttagtcttaaatattcttaaaaaaattcacttttcaactaactattctttttccctgacttaattgttactaagaaagttgaaagaataaaaggatatcaataaaaaaatcaaacagacacacccaaagtaacatatgagtgtccaacaaggatcccatacccacacccatgtcatttcatgtcgatatgggtatgttggttgaaattgaaggattcgggtatcataagtagttactattgtttttagtgagcgcttgagcaatatgattcatgatacttcatttagcaagaactgaaaaacagatttattgcccattataatcctaggtttagtgagcactttagttatgtgattcatgatacctcatgcagcaaggactgaaaaacagatttattgccctccaaaatcattttcaaggccaaggtcttttgcaagattatgggttttggccttgctagtggctcataataaagtttattccaatgacatgcatcaaattagaagatcaagaaacctcttcccctgaatacttgtgtcatataaaaggagcaacaagataaccagctctctttggatgtccattaacaaaatattttatggggttccactttggtccataatgagataactgagagcagtgctttctagagatatacttccttactgcacatctgtaagaagtaccctttcgattgggtgaaatgaagttttgacaagaacacttcaagaaatttgggtcaagtcaggatacaaggatcatttaggcttactctaaaccagcagggataggatgcggtagtagagataaggttcttgcctctacattgtacttgaacttcaagtccatgtacccatgatacccggatatttatccaaaccaatgacctatagtcattaagcttgttcaataaaataacttaataacattagttaaagttaaaattgatttaaagtagtatgttaaaactctcatggccaaaaactcctaacttcctatcaagagttggccacaaatatcagttatttcctccatttttctctctcataggctcattatataatattaataaggataaatatatcagattaaatcatttcaaaaagtttttaagttagttttaccgaaaataaccttaatacttaaataagaattaaatcataaattttaagttaataaatttagcaagatcatattaagctatcttgagttgttaagtattaagtttttagttttaccgaatcccacctatgcatatgtttgtgaacacatgcatgggcttttctaagcactttagaattcacttgtttaagcttattcgaacaataagttatgcgttaattttggcggctgaacattctactaataacctttctcaagttgagtgtgtcttgtagtttatgatatgacacatgatttgtgctagttggtgctttcagagaattgggatcctctctcgttgagacaaaacatcctctgttgtgtttgtccgtcaataaaaaataaggaaaaaaaaagaattcttttttatttacacaatattttaagaaatacatcaatgccaatatcttgatagttggagagagtggatttatggtgggcatgtttaccttattttataggtcatatatttaggtggtgtttgttttttggctgaaatcaagaactgattcagataatgaagatgatattaatcaactagacagtagtggtgatgtttctagccaatcttttagtgaccaagcagattgtattaagggtaattgtaactgccgtcctaagactataaatgtcataagccaagatcaggaacttgtcttagatatcttaaagaaaattgaagatgaaaaaactaagcaagatctttatgaagtttttaagaaatcaattgttaagccagaagctaaaaagactgtaaatccttataacctcaatgaaatcttaaacagctgtcttctcagccgaaagtaagattcccggtgaaaatgtctaaagtactacagtagaaagtgacttttactattcactttttcactattcactagtcatacacgggattactattcacagcaattagtcaaaaagcaaacagttctttatcccctctttttggctatttaaggaggcttgatcctcatttgtaagcatcctttaatttttcatttttcttttccaagcttatgctctcccttctctcttctttctctctcaacatgtaagccttccaagccccaagctttcttcaaagctttcctcccttctcccattgtaagatattcatctccttatgtatctatgttttatgttatacctcctatgatggatggtttttaagctatgtaaattttcaagtttgttttatgtttccagtttacctcctatcatggatggttttaaatttatgtaattaaaagtttgtgattccttctctttttaaatttctttggttatttatcttgtttattttctaactcctcttctttgttttgaatcatggcataattcctgtttttattgcatatgaccttgtcctgggtgtctatggtatcagagccttgatgaaatccttattgactgtaaatccttataaccttaatgaaatcttaaacaggtttgaccagcagtctcccaaggaagtaaacattaaggaacttcatgatgaagttagacagtataggaaagagattaaggagttaagacaattcataggtttaggtctctttgatctctaaggacaaattaatagaattgtcaattagggaaacattgtggatataccagaatcttctcatgttaatgataatgagacaaatgtttttttgaatactgttagtagggttatcttccagaggtgggaggtctcccttactatagtagtcaaagataaatttgtctttgatattattgctttgattgattcaggtgcaactaagaattgccttcaagaaggtcttgtacctattcccttatgtgaagagactagtgagtctctatttggagccaatggcaaaaggcttgccattaagtataaattaacagatgttcatatccgtaaccatgacatctgtattaagcaaaccttcattcttgttaaggaccttaaggagaaagccctcctggagaaagccctcctaggaatccccttcttaagctctatttatcctatgtgggtagataaccaaggtgtaagaacaaagctctttgataaggaaattctttttgaatttgctaatcctgttgtaaacatcacttcttgtgatcaagaaattaatcttattggattagatgttccatctaagattttaggtatccaactcattcataatcttattataattgatattttaagcattcatttatgcatttcaaaatttcaaattgatattttgaatcaaggattttaaaaagtcgttttcacatctgagaaaacaatcaagtatatagcttttaagcatgattcaactgattggattattttaaatcctaattttcaaattaagtttattaaaggagaaaattccattcctaattactcaactcgtggaatttgcagggttcacgagaccatgacccctaaaaagaatacccaagctcctaaccagaaaacccaatctagtcaagctccttctccctataaaatgctatggagccaacaagttgaagaagaagaagcaaagcttcattcttctaaccctatgcctaataagatgatgaccttgtactatgatcattctgatccagctaatccagtcaaggccacccaatacccaaccatttcagggtctcagaccttcaagcaagttactaaggttaatccctctcaaaaggaattagcatcaaactcctttttttcaaacaagcaaattgtggtggttgccaagcccacacctctttcaacaaaatcaagatactgacaaaatgatttaaaccaacctcttttgattattgaaagagaatttttctctgaaaacctcagagagattgctgcaaaagcttttcaagaaaattttcattattcctctggtgatcttttaaaaacaagagagttttatgaagcagcccttgcagaaactagttctgttaaaattaagcataacgctgataagttcagcaatatgagcttgacattctccacctgccatatctataagattcttactatcaagcaatggggtggaaatcccaatctttcaagggaattctctgaaccatcaaaaccaagatttttcaattattgggattatcagagagcatggttcaatgcttttctgatccagaatagggacttccatcattcatggatgttctattttccatctaagaatcagttttcctctttcccattttggttccacagttggtggacttattttggttcgtctattaagattcttcctaagcccatcttggatggctttgagctattcaatagttcttttgttatccccagagaactttcagcttttccccttttgttattctttttcaataaatttggccttgcttggatagtctagtgggactacattatcattgcagatgaatcagcagcctttccaactcttggaaggacctttaaaactaaatggtgggacgccttgaaaaatgatgcatctattgatgcagttaaacaatatttcctcaaaaaccccacacaagcctctgccagtgatgatatgtcacaatttctcctcaagaaacaacagttacaagccatgcttgcaggcttgttgaatcatcagactctgcataagagttttcttgggaaaaacttgagcttccttcttcaaggattttctgaaaatcttgaggggtctttgctgctgcgagcatgacttgtaactgttgtttcttgaggagaaattgtgacatatcatcactggcagaggcttgtgtggggtttttgaggaaatattgcttaactgcatcaatagatgcatcatttttcaaggcatcccaccatttagttttaaaggtccttccaagagttggaaatgctgctgattcatctgcaatgataatgtagtcccactggactatccaagtaagaccaaatttactgaaaaagaataacaaaaggggaaaagctgaaagttctctggggataacaaaagaactattgaataactcaaagccatccaagatgggcttaggaagaatcttaatagacggaccaaaataagtccaccaactgtggaactaaaatgggaaaggggaaagctgattcttagatggaaaatagaacatccatgaatgatggaagtccctattctggatcagaaaagcattgaaccatgctctctaataatcccaataattgaaaaatcttggttttgatggctcagagaattcccttgaaagattgggatttccaccccagtgcttgatagtaagaatcttatagatatggcaggtggagaatgtcaagcccatattgctgaacttatcagcgttatgcttaattttaacagaatcagtttctgcaagggctgcttcataaaactctcttgtttttaaaagatcaccagagagataatgaaaattttcttgaaaagcttttgcagtaatctctctgaggttttcagagaaaaattctctttcaataaccaaaagaggttggtttaaatcattttgccagtatcttgattttgttgaaagaggtgtgggcttgacaaccatcacaatttgcttatttgaaaaaaaggagcttgatgctaattccttttgagagggattagccttagtaacttgcttgaaggtctgagaccctgaaatggttgggtattgggtggccttgactggattagctggatcagaatgatcatagtacaaggtcatcatcttattaggcatagggttagaagaatgaagccttgcttcttcttcttcaacttgttggcttcatagcattttatagggagaaggagcttgactggattgggttttctggttaggagcttgggtattctttttaggggccatggtctcgtgaaccctgcaaattccacgagttgagtaattaggaatgaaattttctcctttaataaacttaatttgaaaattagggtttaaaataatccaatgagttgaatcatacttaaaagctatatacttgattgttttctcagatgtgaaaacaacttttaaaaatctttgattcaaaatatcactttgaaattttgaaatgcataaaggaatgcttaaaatatcaattataataaaattatgaataagttggatacctaaaatcttagatggaacatctaatccaacaagattaatttcttgatcacaagaagtgatgtttacaacaggattagcaaattcaaaaagaatttccttatcaaagagctttgttcttataccttggttatctacccacataggataaatagagcttaagaaggggattcctaggagggctttctccttaaggtccttaacaagaatgaaggtttgcttaatacagatgtcatggttacggatatgaacatctgttaatttatacttaatggcaagccttttgccattggctccaaatagagactcactagtctcttcacataagggaataggtacaagaccttcttgaaggcaattctcagttgcacctgagtcaatcaaagcaataatatcaaagacaaatttatctttgactactatagtaagggagacctcccatctctggaagataaccctactaacagtattcaaaaaaacatttgtctcattatcattaacatgagaagattctggtatatccacaatgtttccctaattgacaattctattaatttgcccttagagatcaaagagacctaaacctatgaattgtcttaactccttaatctctttcctatactgtctaacttcatcatgaagttccttaatgcttacttccttgggagactgctggtcaaacctgtttaagatttcctagcgtgtgttgggttatgggtgctttgctcaacttgaaagaggaactagaaatcattcaaaagataatgataagagaaattcctcttgtgttgtgaatgtttacattacaccttgaatttcagttaaatggcacaatttctcctaatacagttgcctacaatcaagattcattgttgcaatcctctcagttggtatcagcataattccctaatgatgaatttgattcataactaagaaaattcaatggccttcatttggaagttttaagtcatggctgcaaaactcgctctgctatcaagttttgcaacactagaagactgatagtggtttggaatgatccttttggcccttttgggaataggcaggagatacttgtctcatttggaataactccacccattgctatccctgactaaaaaagtgtcatcagagatgaaagtccaatattatgcaaagatttctcttagataacataccaatattacaattataaagatgcatttcttgtttccttgattttgtttaagttgaaacatactgaccttaagagatgtatgggcacttttggcttctcattcctgtacttgaagtgtttcttttggttttctccccaccaggatttatgattctacgatcctacaatcctagaatatttcttttccttttttctacaataaagcaccacagttaagattttaattgatgtataattctttatgaagtttctctaccatgcttgattttgtttttattttttataattcttcatacatctttaacaggctatca

SEQ ID NO: 11381 - DNA, 9078 bp, Vitis vinifera
  Intron number 8 from transcript GSVIVT01017472001 (locus G SVIVG01017472001) derived from phytozome v7.0 (chr-ID chr9 ; pos 8933511 to 8942588)
cttagagtctctttcaggttacattcttaaaaaatgcttggcctttatactgattatagtaaagccttggtctgtcattttcataacagaactaaagtttgtaatcttgtaatcctatattagaattggatatcatgttaatgatcctggccaagttgacttcaggggtgtttgatagaactgaatattaagtaccgaaagactttagcactgaaaattaagagctacatattataacgactgaattaatcaaattgaaaagtgtttggtatcatcttagttttaagtattttaatttaatttacttatttgataacaaaaacaacggaagactgaaaatgattaatttacaaaattaaccttatattcattgtatgacaattttaaatattcattccaaattttatataactaatatattaatcaataaaatttgacttaaaataccatgtgcattgcaatttgcttgactactaaataattcacttgcaatttggtcatgtaaagtaagcatataaatttgatgagtgtttttcaaatcctctaaatttaatatatgttaaatctcattattattgctgataatttcagatatgaaatagtaatagtatgaaaaagtttttatattgtaccttgtaattttttttccttctcttgtcgtctttgaaactatgccaatgagaaattttggaaccctttaaagaaatctctttaatgtattcttataaagcaattaaatctagattaattagaattctaattttattataataaagaattaaaaataaataataataatagtagtagtagttgtagtgtaaaaataattatcacaatataggcattaggatagaatatacaaaaaataaataaataacataaaatagtaatagtagtagtagtataaaaataattatcacaatataggcattaggatagaaaataaataaaaaacataaaaaggttcttatattcaatcttttaggctatgtttggttctcagaaaatttgagggaaaatgcaagggaaaaaaaatacaaaggaaaaatagaaggaaagaaaaagtgaaggaaaataaaaaatggattaaaagttgataagttatttttattttttacttcaaactcattttatttattttaactcattaatataaagattaaataattttaaaatacataggtttttaattagttttaattatatttgattttcttttatatttttcataggacaaccaaacatgaaaaaatcattttcctttgcatttttttttctttctttagtattttccgggaaccaaacataaccttattattattattattatttttttgaaccttttaatgaaaaagtaattcttataaatcaattaaataaagtttatttagaattttaattttattatcttaaggaattaaaatgaataaaaataattattatgacatatacataatgatacaaaaattcaaaaaataaataacatgaaaaattaattctcataaatcaattaaattgagattatttaggattttatttttattttattaaagaattaaaaataaatgaaaggttgtatttcaaatgaaattaattagaagtgtatttcataaatcaattaaaatacatattttttagaatttgattttattatattaaggaattagtgataaaatattttaatttaaaagaagtgttttaatttaaaagaagaattttaatttaaaagaatgttttgattttaaagaagtaaaattttcaattaaaatgattaaaaaataaaaatcattaatctacaaaaaaaggataaggatgaaataaaatttataattcattgatcttgttttgctacaagtgattagctaggtctttattgctaaatggaataagtaatttttgatcttaagcggtttaaaatttgtttaaaagtgggacctgttatttttttttccccactttttcagaggttagttcttttatgacactttcccttcccatctcttgcttttgacttcagtacacatatttatactagggttttgtgatgagagggatgctgatggggaaagccttatgaaaactatattcaagaaaggaaattgttgagagagagagagaaaggagaaaaaccttattcacattcattgtaatctctacttacaattgagagatatatatatacaaggctaggagtcctaactaccatacatgtgacctatattaacaaggaaagatagtatactatacatacattatattcaacactccccctcaagctggagcatatacgtcatatgcaccaagcttgttacaaatatatttaatcctaggacctctgagagatttagtgaagatgtctgctagttgatcatttgaattgacaaaacttgtagcaacacatcctgatgcgatcttctctctaatgaaatgacagtcaacttcaatatgcttggtcctttcatgaaagactggattggatgcaatatgtaatgcggcctggttatcacagatgagtttcatctgttcatcctttccaaatctcaactcctgaagaagatgtctcaaccatatgagttcacatgttgccaaagccatagctcgatactcggcttcagcgctagatctggccactacatcttgtttcttactcttccaagatattagattacctccaataaaaacacagtaccctgaagtggaacgtctatctgtgggtgagccagcccaatctgcatctgtgtaaccaacaacttgagtatgacctctgttctcgtacaatacaccttggcctggtgtacttttgatatatcgaagaatacggattacggcatcccaatggctatcacatggtgactgtaggaattgactaacaacactcacaggaaaagaaatgtctggacgagtaatggtgagatagttcaatttacctacgagccgtcgatatctcccggggtctcctaaaggctccccctgtcctggtacaagtttgacattcggatccataggtgtgtctaccggtttacagtctaacataccggtttcttccaggatgtctaaagcatacttcctttgggaaaggaccacaccagaactggattgagctatctcaattcccaagaaatacttgagtttccccaagtctttggtctgaaagtgggtaaaaagatgttgctttagtttctgaataccatcctgatcactgcctgtaatgacgatgtcgtccacataaacaaccagataaatacactgccccaaggagttatgatgataaaaaactgaatggtctgctgtactgcgaagcatgccaaactcttgaacaacagaactaaaacggctaaaccatgctcgaggagattgtttcaagccatatagagagcggcgtaacctgcacactaaaccagactccccctgagcaacaaaaccaggaggttgctccatataaacttcctcagcaagatcaccatgaaggaaggcatttttaatatccaactgataaagaggccaagaacacatagcagccatggacagaagcaagcggacagaagcaatcttggcaacaggggagaatgtgtcaccataatcagaaccataaacttgagtatagcctttagcaactaagcgggccttaaggcgatcaacctgaccatcaggaccaaccttaactgcatagacccaacgacaaccaactgtagatttaccagagggtaaaacaacaagatcccaagtgccagtagagtgcagagcagccatttcatccaccattgcctgtcgccagcctggatgggaaagagcttcatgggtgctctttggaagagaaacagaggatatagcagaaacaaaagcagaatagggtgaagataatcgatgataactcaaaaaattgtaaataggatgaggattacgagtagagcgagtacctttccgaacagcaatgggtaagtcattaggagaaggcagagccggggcaggtgaagccgaagggataggaagtgagtcagcaggtgcctcaggaaaagggagaggagcaacgacacgagggcgacgatgataaacctgaagtggtcgagggggcatagcatcaggtggggagacaatgggaatgggtaagacttcagaaacaggaagagactcagaagtggtggaaaagaatggtgagtcctcaaagaaggtgacatcagcggagataaagtaccgatgagtctcaagggaataacaacgataacccttctgaagtctggaatatcccaagaagaggcacttcatggctttggcggaaagcttgtcctgtccaggagtgagaatatgaacaaagcaagtacaaccaaagacacgaggaggaaggaaataaagtggttggtcagggaaaagaagggagtgaggaatctgatcgtgtaagacagaggagggcatacgattaatcaaataacaagcggtaagaacagcgtccccccaaaaacgaaaaggaacatgattatggaggaggagagtacgagctgtctcaacaagatgtcgattcttgcgttcagctaccccattttgttgaggagtatgagcacaagaagactgatgaagaatcccatgatgagacataaacgaagtaaattgggctgaaaaatattccctggcattgtcactgcgtaacacacgaatagaaatattgaactgggtttggatttcagtataaaatttctggaaaatagagaataactcagctcgatttttcattaagaataaccaagtacatcgagaatagtcatcaatgaaagtgacaaaatactgaaatcctaaagtagacgcagtccgacaaggaccccaaacatcagtgtggacaagctcaaaaggagactttgcccgattattcaaacgctttgggaacgagacacgagtatgtttcccaagctgacatgactcacacggaagcgacgacaaagtggaaaaacgaggaaccatcttctggaacttggagagactagggtggcccagacgattgtgaatgaggagaggagcatcagtggaaatgcaaactgcaggagatgaatctgaggtgaggtgatagaggccttgagactcacgtcctatgccaatcgtcttccccgtactccggtcctgcaaggtcacaaatttatcagaaaaggtaatagagcaattaagagtacgagtgattttgctgatggaaataagattaaaaggacattcaggagtataaaggacagaagtgagaggtagagaaggcaaaggaagggccaaaccaatacctttagccacagtttgagaaccattagctaaggtaacagtaggtaaatcaaaggtagtagtaatagaggagaaaagatccttattaccagataggtgatcagatgctccagaatctagaatccagggtccaagagaagatgtgtgggtaaggcaggcagaggcattaccaggctgggcaacagaggcaatagaagcctgagatgtctgagatgcggaggagctcggaggctgaggcagcggagaatcagaggactgggccatatgggcagtgcgaggaggtcttccatgtaactgatagcaacgatcgcgagtgtggccaagtttattgcaataggtgcaatgaggacgttggcctctacctcgggtaccactgcgtcctcctcgagaggtagtttgagaaactaacacagaagaatctgaagcgctatcagatggcaaagtctgagtggacgagatacggaggaggcgagcaaacacatcatccaaggacggaactgatgaactaccaagaatctgatcacgaataggctcaagatccggacggaggccgataagagtaaggaccatgaagaacttgtcaagctgtgtttgttgagccccaacatcaggagtaagaggcatcacagtcaagaactgctccttaagagaggcaatctggccaatataagtagatagatccaagtcctgttggttgagatggacaatagcagaagccaccttataaagacgctggatatcattcgtgtataatcctttggcctgagtccaaaatttaaaacaagttttataggcctgaagatgaagaagaattcggggatcaaccgattgccataatacactacacaactgtgcatctatcttcctccactgtacgcggtcgacctcagggatatctgcctcctgtgtaatcaagtgatcctcatatccttgacccataaaccaaagttcaacagaggcagatcaggaaagataattttcactcccaactaatttctccgaagtaatcataggagatccagatatgacagaggaaaaaatggaagctttagtagccatatccacttatctggagaatgaagtatgtttggatcgaagagagccctaatacggcttcagattgcagcgtggcaccaccgaaaaagggagacggcctcagatcgcggtgtggtaccaccagaaagggagaagaacacttcccaaggcacgtgcagggattggagtggagaaaaagtggtcggagcttcgccggaaagactgtttggagggccgacggagacaaaaatccccaaaagaggtacgtgcagggctcggatgggagaaccagggaggtggaaaggctgatcggcgtcaggcgaagctggaggaggaggcgcgtcgccggaaaagctctcacgcgcccccacgcgccggcgcgtgagattcaaccgccggccggaaaattgcgcgtggccggcgcgtggctgctcttttggtgctggtgccttcacaaaagttggagatctcctccaggcgctccttctggtatggtcggtgtcggaaaaataggtcgccggaaaatttcgccggaaagttcgccggaaaatttcgccggaaaatttgccagcggtgagtggtttctaacgacgatccgactgaccggaaaggattgggagatggggaaggtgaccggaaagaaacacggtcaccggaaggtttcccggagttgatgacacggaaaacaggaaagaattaggttttcttccttggctctgataccatgttgagagagagagagaaaggagaaaaaccttattcacattcattgtaatctctacttacaattgagagatatatatatacaaggctaggagtcctaactaccatacatgtgacctatattaacaaggaaagatagtatactatacatacattatattcaacagaaatgaaagacacaaataaactttaagtaggattaatattaattggaattaaattaggattagtatttgttggagtcaaattaggattagctaattaggttataagacaattagaattggttgtagactttggattttttagaaaagtctataaataaggctaattaatgtaaatcaaagtaattgattgatggataataatattatgttttcttgcatactttgcaattctcaatggcgacactttaagggttctatcctcctcttcttatcttatttttctctattttattttattttactgcaattaactttatcccttggtcctctcctaaaacccttttttgattgtaggcaatcatcctagggttgtcctacatcatatgcctgtgaggagtgtagtagatcacctgatttgtagggacatggatccccatcttggtgatggagatgtggtagtataccctaaatccacacggcatctccttcaccaggagatgaaataagtaaaccccttaggcatcagccatgggctgacattcacattgttggaatctctggtttccaatatctagttaggagtgggcatacgtattctagtattgtaataccttaagaaaagaaaagtgtatggaaacaacaatgataaagtaaaatacatgtaatgctgaatcagtggagattctatttttccttcgcttttctttctttcttctttttttttttaaaggtaaaatatgatttgttaatatatcccaacaaaaaggggcgcatcccaagtgcatgggaagaaaatataaagtgtcataggtgagaaaaaagagaagaaaggaaagaatgaaacaaagggctataacctctccgcaactatcaatagatgccaatttttaatgatttaaaatgaaaaaatcatattattttttgtgtctgattataggaagagtttttttgtttttttaggtaatgattgggagagtttgactgtagaggaatagcatattggcatttttactattaggcattgtttgtaagagcattttaaaccctaaaattaactctttgaatgtcaaacacaacttttaaggatgttcaattaaatactcaactatgggcctcagaagtcccaacatgattttatctatatcttgagaaagcacggagatccctgctcctcaagtgtgagggaagttgttttttatttaattaaaattttgaaaatgcaaaaaacaatcttttttttaataaaaacctttttaagttatagttctgaaacattaaatcaattgcgcatagtgatggttttttttgcttctacttttattgctaaaagtagaagttaaaaactattgcaaacaggctgttaatgtcaggaaaaaatgaaggtagcataggaaattaaaaaggtttttaaatgttaagattgaaatctcctccaaagtccactttttggatcatctaccttctcattccttcctgttacaaattctatcagagtgaatccaggtacttgaatttggatttaaggtgtgcatgcaaaaatatggcactttaatctgcggcgatgctgagatgctggagagtgagtttaggatttgtgcctaaacttcctatactttagctatttctgtcaggttttctttggtttagtgaaaatatgcagctgagacattatcatcctaatagatcagtacacttgagccttgttcccacatgatgatcagtttgatcatgggcacatcgtttatttttaatgttcaactctttgcaaatataaaaaaaatgcatatttctgaattttgtcaattcaatatgttattcatgtttgagttttaacttgaaatctaacttggctcgcttccttgcagatcttccttccctgttgtctttaaatcttaacaga

SEQ ID NO: 11382 - DNA, 19185 bp, Vitis vinifera
  Intron number 12 from transcript GSVIVT01013938001 (locus GSVIVG01013938001) derived from phytozome v7.0 (chr-ID chr 16; pos 7086529 to 7105713 reverse strand)
aaatatataggtatttctcaagtagtggtatggtcattggtttcttttctatttctcactggaacatcatgtgaattctatctcacaagtatatttttcagcatattcattaatttgtgacttagaaaagtcagaagaataagttagcaaacttgactcaatttgattgagcacaaaagttgggattagaaaatttgaattgaatggggaaaagaaatttaaaaattgttccttgacaacttttcttttctttttttgctaaaatttgagagttttagactcatatggattaaggttggtggttcttctattgaaaatttgtgattttggaataatactttactttttagacaaaagttctattaggtatgcatgagtttgcatatgcttaatttcttttgaatatatatgccttaaccatatgtgtcaagaattatttatgatgcacatactagtggttgagaaataaacttagtcatgatcatggtagttaaagtgtatagatggtttagtgtacctagagggctgaggcaaagggatctcaggttctgtttacttttcctgttgatgggtaaaatcatctcaaagttgaagggcttggcctagtttgaggtttttgggtttgtaccaaatgttactaagtcaaacttgtggaatcattggaggggaaatttggaaaccctatcgttctcctttattttttattttaattttttaaaatgacatttcaggcattaagattgtaatggataagagtacccttttggggggagagagagtgtgcatgtgtcattttggggatcaactttttgaggcatagagggaactctcttggttagaattgaattgtttgatggaagagaaagaaaaaaaggggaagaaagtgaggttcatagatggatcaaatcagtttcctcatgttctaagccaaaaagaaaacaaaaatataaaatacagtggttttcttgcagccagatccataccctccatgtaacctgaatatggtttttcacatcctcatgaatagtgtggagatgattgatcgtatcctggctctcacactaactctcccttaggagatgctatagattcaaaacactataagaattttggctatataccacttcaaaaggactcatttgtgtagcactattctttgatctatgaaaagctaactcaatttgtggaatattttctccctaagagataactgggtgcataaatcttagtgcctgtgaataaagattgagattgcacaggaatattaagttcttccaaaagttgaccaatgcacttaggcgtgacaacctcattagtagtctcaagttggatgggaatggctttctgagcttactgatttgcggtatgtggcttttttgagcgactttactctaatcctaggaatttgagtcctggagtagggggaattcaaactcctaaagtcttttgataaggagattctagagggagtttttagggaggaagtgatgatgactacgttagagcttggtaatgacaaagcaccatgctgagatagcttttccacggctttctaggagaagtgttgatctatagtgagaagatgttttgtacttcttgttggactattacaaccttgagacatttgaaaaaggcttaaatgctactttcttggtgctagtcccaaaacaaggcaggatggaggatataagagttaaggactataaagcttggtgggtggattatataagcttttggctaaagttagctaataggctatagagaaggttgatctttgattctcataatgcttttgcaaggggaaacaaatgttcaatgctatgttgattactaatgaggctactactttgaggttgacatgtagaagggtgtgtgtgaaccatagattagacattgagaaagcttatgatcaggtggttgattgctctacattcccctccaacctagaaaagcaagtgcttcgatgggttccatttacaacgcctctgatggataagttagtaaatgtgcaaccaggggaatattgggtgataaaggaaccgaagatctctagactgtcacttggtatttcttaagtgacaagcgggcttcacaacctccttgatgagatggatattttattttccataaaggctacttgcaactatctttgaccattgttgggttaatttagttgacttaaatcattgtcaaattatcaacaaacttgcactattgattacttgccttacacgtggatagtggggattacctttaaaaattgttgcatatgtcctatgaaatctacaaggagtcataatgtaggtctggaagtatgttttgttggtactccccttaggctaacaacttcaaatgggatcaacatggttaccacctatcttcaatacacccgagttcacccatttgatcaaagttgaagtacatgggttccatttgtaaagaacatctccttttcaatcatcaaatcatctagtcaactttttctaattcgtcttaacatgatctaaagaatatggagctttatgcaacttgccatatggtggagatgtctttgcaaatgggcattgaccttggatagagtttgactcattatatgtagtcaagagcattaagttacaatgcaagcctaaatcacttttaagggatggtagaaactggtgctttgacttcccttgtgaggtttcaatagcatcacatatactattgtcctccaccccaaagtatgcaacaattttttaagtgtaattttaaccatccacatgtaggatgagtaactgattgtatgttggtaaatagcaattcaaccatagttggagtcaactcaattgacctaatcaagttaatcctattgacctaatcatgatcaaagacagttataagtaacctaaatggtgaataagagattcatcccatcaaggaggtgctggagcccacttgtcacctaagaaatactaagtgatgatctagagatctttgaatcatctatctttcaacattccctcaacgttctattgattccacatctattgacttattcatcagaggagttgttggtaggacccattggatggcttgctcttataggttggaggatggtaaacatgaaatcagttatcatttgataaggagcttccatgttagtgctagcttaattccacaacaacatttgatttctgaacaacaacaattagcgttgtttgtgaaaattgtacagagaagccattaacctatggcataaacttgatctggttttttccatgatagaagagagaatctatgcactacaagggaaaatagagatgtaaaaaccaaggactaatgttgatgcgatatctactccaacttattaaacaactctaataggagaatgagatcctaaagccttggttggataagcacttgacctttgtgaattccctttcagtcctatcggagggggtagaaccattgcttgcggctctaaatgctttagctagaccacaatcttcaacctttgcttagttccataaatgcttgcaaagtttgtatactccttttataacctctgcaaggtgttgacagtctagtattgttgctttgccaagccaagggcaaaggtcaacactctttaatttgacgatctagattagaaagactgtactatagtttgttcaaagattgtcaccaagtgatgtagcttgaaggaaataatgaaataatggccatcatgacctactgataggcattatagcctaggctttgattgagaaggcttttagctaagacaagcttaccttgtttaaaaaaactcatccacaaagccagcatgtatatgtctttggaagaggacctattcaccaacaccctgaagtaaatatcacatacaaatatgaatgcaacaacactccccaatagatttcaaatgcaagtcacaagcaaatgcaacaacattccccaaacagttcacaattgcaattttctcattgattcaagctcccaatattagcttattgttcttctaatcaactatatccacaaaacatcaaatgtaaagctaaactaaaaattaatcaagcattagaacaagagaaaaagagacaagacaccaggatttgcatggaaaacctctaaagagataaaaaaccatggacttacaaccaatcgaaatgtccactgtgaagaacaaaaattgaatacaaggttttatctagatcatgcctaccaatccttcccggaccacttgactagcacctttccacattcagtttcacaccttcttctgggtcacacttagagcccacaccaagctcgatctcggcctctttttgaatccacacaagaagaaaataggttttcacctaggcccaatcaactgagtaaatgaaagatgaatgaatagaagaatcaacccattttttttcttttgaagaaaatgtgttggaaaaccgctgaaaaaataggaagaaaatggaattttcttggcaaccaaacactccaaatttggaaagaaatgagggcaaaaggggaatggctgctaggtctctggttttctctctgttaaacgggaagcaagttttgggtttttaaatgaaggaagcccttgatccaatggatgagatttcatcaagaaatggaataggacattttgaacacttagtaaaaaaaatgctttcaagtggccacaactcattagggagggactcgaaaggaagagatagctactgctatcatgaatacctctaggataaagaccacgttgctgaatggtgtaagaacttgcgatattacatggagtctctagtgaaggttgatgacttcgacatcatatggcctaacactggagttaaaaaatgttggtgccacaaaagacatgacctttccaataataggttttttgtgataaggactaaaacaagcccaattcttctaatccatgtcattcatggggggccttgttaacaaacattatgactttgagggttaagtgaataagatgctaaaaaaaaaaaaaaaaaaagtgaaaccattattgtcacttagttgtggtgccatctacccttgttgctagtatccctctaaccaatatagagtcctatcatgtttaccaccatagttttaaaaggcgcacttcttaggcacaaggcagtgcgatgcggagctccagctcctcgccttactccaggcgttgcccgttgaagaaggcgttgtctaggcgcggaacgcacgcaccttcaaccaagtgcaaagctccaaaaaggtgcccttctctatttcttcttctttcttcttcttgttcttcttcttcttcttctcctcgatcatgatccacttccagctctaatctaggcattttttttttgttgttatttcaccagcaaaatgcaacgttttggattggtttatttttaaagaaaaaacagggtctaaaattgaagaatttctgaattcctttattgattttttaggtacacaccatacacatatatatacacaaatgactgaataagaaaatatcaatctagcttgattctctcctaaaattaggaaactgaatcatcctaaatgatctctccttttttattcctaaaatattttcctaaattaaaaccctaactttgaatgccagatttcaacactccccctcaagctggagaatatatatcatataaccccagcttgcaagttaagtcttcgaagttaggcctaggtaaagctttggtgaggatgtctgtggtttggtgcttggtaggaacataattcaatttaactgtctcactagtcatcttctctgtgatgaagtgtctgtcaatctcaacatgcttggtcctgtcatgatgcacggggttctttgctatgcttataactgcctgattatcacacatcattagaattggagatgaactcgtttgtcccagttcactaagaaccctttttatccaaatcccttcatagattccctgtgcaagagctctgtactcagcttctgcactacttctggttacaactgattgcttcttactccttcaggtaacaagatttccccagacaaaagaacaatatccagaagtggaccgcctgtcaatgatgtttcctgcctaatccgcatctgagtatacttcagtgtcacggttctctatctttctgaagaatagatctttccttggtgtcatttttaaatatctaagaatcctgtagactgcttccatgtgttcctcagtggggctgtgcatgaattgacttacagcactcactgcaaagccaatatctagccgagtgtgtgagagataaatcaagcgcccgacaagccgctgatatctccccctgtctaccggtgtactttctttctcgataccaagtttcttctgactatccataggagtatcaattggtttgcatccaagcataccggtctccttaagaagatcgagtatgtattttctttgagagactacaattcccttccttgatctagccacttccataccaaggaaatatttcaaatttccaaggtctttaacttcaaactcttctgataaatacttcttcaaattctgtaattcctccatatcattcccagatagaataatatcatcgacatagactatcaatatggccattttccctgcatgagacttcttgacaaatagagtatgatcagcctgaccttgtttgtaacccaacttcaggactatttttgtgaatctatcaaaccaggctcggggagattgtttaaggccgtacaaggatttttggagtttgcaaacctgattctttgccatactttcttcgaaactaggtggtatttccatgtagacttcctcttctaggtcaccatttagaaacgcattttttatgtccagttaagcaccaatcttgattgacagccaatgagagaagaatcctgatagtgttcagttttgcaacaggagcaaaagtctcctgatagtctatcccataggattgtgtaaaccctctagctaccaaacgagccttgaatctctcgactgatccatcttctttgtattttatggtgaaaatccacttgcaccccacgagcctcttcccaaccggcaaatctgtgatagtccacgtcccattcttctcaagtgcatcaatctcatcttgtactgccttcttccattctgaaattttgaatgcctcttgtattgtgttgggaacctgagtatcatcaagagaagtagcaaatgctctgtaagatggtgatagcccttcatacgtaacataattcccaattggatgatctgtacatctcctaacacccttcctcaatgcaatcggtagagtagaatcatcaatgctgggaattaacacctctccagccttatcctcacctatgttctctttaggaagacttgaattggagtcaatatattggccacatgttgactgtgatccgtgctctaattcctgtcttttcctcctcctgatgtaaacttgtaagttctcattagcaagttgtggggctataggttgaataggcatgggagactggatggtcacgggagaaggaacatttgtgtgctgggctggctagactgatgacggcatgggtgtggacaactcagtgggcacgaattgggaatgatttggtgactcttagtgaaaagaaggtacaccctcaagaagagactcccaaacttgatgttcattcatgctctccccctgaacatgagatttgggatagaagaagacatgttcaaagaaagagacgtccatggtggtgtaaaatcttttgttggttggagaatagcatttgtaccctttttgggttggagaataccctaggaaaatgcacttattggctcgaggagcaaatttgctacgattttgaggatacacatgaacgaatgccgtgcaaccaaatactttgagtggtaaatcagaagaggttgcacgggtgtgaggaaattgttttaagaaaagttgatgtggggattgaaaggtaagcactctggatggcatacggttaatcaaataggtagttgtgagaatagcttccccccagaaatagtttggaacattagaggaaaacataaggcaccgggcaacctccaagagatgtctattcttgcgttcagccaccccattttgttgtggggtgtcaacgcaagaacttatgtggataatgccgtgattttgaagataagtactgagactactagtaaagtattcctttgcattatctgacttgaggacttgaattttggaattgaattgattttgaaccataagattgaaggtttgaaaaatgtgcccgacctctgacttttctttcataaggaaaacccatgttacccgtgtatgatcatcaacgaatgtcacaaaccatcgagtgccaaaaatattttttatccgggagggaccccacacatcactatgtactagagagaaaacagtcgaaggtttgtatgggatttgaggatatactgttcgagtatgctttgcaaactgacaaatttcacagtgataagatgctggatttttattgataaataatttgggaaacaattttgcaaggtaaacaaagctaggatgaccaaggcaatagtgtaacattataatctcactatctttattgaccttagaatttgacacagaattgaaagactctaacatactctgagactgtacgcaacttgcttgagagacttggtttgagaattggccacatgagaggaggtagagcccggaacacagttcagcattgccaatcatcttccccgatttcaagtcctgataaacacacgagtttggatagaatttagtaacacattggagatcacgggccaatttgctaatggacaaaagattacaatccaagtttggaacatggaggacagagtcaagatataagtctttagtaagttttatagaacctgtcccgacaatttttgactttgaaccatcagcaatatggacggatgaatgaccattacttggcttgtaattttgaagaatggcgacatctcctgtcatgtgatcagaagcacctgtgtccactatccacggcttcattcctcctcgattagcagtgaaggctacaccggtagtactgccactgccaacttagcttaatagtttttgtagcatcttcatctgctctttgttgaatggactcggctcgggaatagatgtgctctcagagttggcagccacgtgtgctctgccatctctgtcaaaccgtggctttggtttccaatcagccggtttgccatgaagcttccagcaagtctccttataatggcctggtttcttacaataatcacaccaaggcctatcccgtttctgacgatctccaccactactattaaatgaccgagcagcaagggcagaggcatccaatgttggggcaggttgctctttggatcccatcatcactttctttctactttcttcacgcctaacctctgaaaacgcctccctaagacttggcaggggtttaatgcccatgattcggcctctaacatcatccaattccctgtttagtcctaagaaaaacttgaacagtctcttttgttccacaattttcctatatgttgttgcatcatcagaacatttccatgagtgagtctcgaataagtcaaggtgctgccaataccttgtgagtgtgttgtaatactgagtaactgtctgctctccttggtggaagtcatgtagggttgattcaacctgaaaaagttctgaagtattttcagaacttgagtaagtttctttggctgtatcccatatgtcctttgcagtcccaaacaacaagaaattttcacctatgtcattgttcatggaattgataagccgtgacatgatcatgctgttttcaatcttccacttcctgaaacccggttctgtagtttctggcatggctgcttctccagtgaggtactcatcctttcctttaccgcaaatgaacagcaacacagattgtgaccactgtaaatagttatggccatttaatttgtgtcctgtgatgagaataggagaggaatcattgccaccaaggtttggaatttcagatctgccccttgattctggtgacgtgacgctggatacttgtgatgatgtcattccgtattttgtcatggaccggaaaggtagaagaacacttcctaaggcacgtgcagggattggagttgagaaaaaatagccggaggatgccgggaaaactgatcggagggcccgcgaaggcaaaagaaccccaaaagaggcacgtgcagggctcggatggcagaaacaggtaagaagggtggctggtcggcgtgaagcgagcctggaggaggaagcgcgtcgccgaaaagtggcttacgcgccctcacgcgccggtgcgtgagatgcagtcgccggccggaaaaacgcgcgtggacggcgcgtggatggttttctggctccggtgctttgggaaaaattggacaaataaacagttattaaatttaattgtattatataagattatatatgtaaaataaggtgtgccttacttcactaaagcccgcacgcctagtgcctcaggctctaggagaactttgcttcttggtgcgccttgagctttttaaaactatgtttaccacaatagatgtgatcttgctatcgtactcacatggtgatgttgtagtcttaaccttattaataaatgagtttaaagtctataggatgatagcttggaagctctgttgacttggtccacctaatcgcttaccatcaaatagaacacatttgaaggtaggctatagagcttgaccttgtggatgagaagtggtaggcaacattaatatgcttaactagctgccaccaatgagctaaggcctagtataaccactgcgacacttccacaaggataacctcatgctctagagagtgtttaagaacacaagggaaatgaatgttggcaagttaggccccatctaagaaggctcatactgaatcactaaagaaggtgagaaagacttgtattttgctagagaatctcaatgggaaagtgatcccccgattgtggagtgctatcatttagaaagttttaccattagccttgtctccaattgttttttgtatttgaccttttatgatgctttttaaacaaccataatgggaagatgaaatgaaagagcatctatgttgaaaaaatgctaaatgtaaaagttaaggtgaaaggcaagagtccttggacaatactagcccatcgatttgaggtcaatagacctattgtgccatagtctcaaactaatagctacctagccatgcctataagtcttaagactcttgtccattatcaacaaatacaaacagaaagtatacacaataaaaataagtaacgaaatacacatgtaagtggcaataacattaccttaagggagggatggccatccacatctcacaaaaaggaaacaagaagtgtataaaagccacccaaaaagcaatagggcaccttacaaccaaaattgttaaaaacaatagtagtcatttaccttggctaaataagttgtcccaaaaactaaagcaaaagagaataagtatcaataaactagtttttggttgtgcacctgctctcgaccattgttgatgaattgaactttattgtcttcttgctactaaggaacactttcgtcttaggacaacttgctcgactcttaaagctagagagacaagatcttcaacaacaagtaaaagtaaggttggcaacaacaacattagaggttggggctaatggtgtagaatcattcgttgaagggcactatcagaggcaggtagtgttgcattaatgatctgttacttcatgatgttatgcttggacaaggttagtacttgtcatagtacttgtggttgatccctttttataggcgccttagacttgatcatggacccaagccttatacccctccttcatcttgaggattttactagtctttaaagtaaccatcatggcctcctccctcttgttcctcagatagttcctagtgcagctattaatggcttttaggccttactctcctcctcttgcacactttcgatctacattctagcttcgctaccttctacttttggtcggtacacttcttttgaaacctagagctttaggtttgttactccctgatgatgtcgagctttctcttaagttgcgctataaaaactccacctagaaggtagaaaagagaagaaaggaaaaatggtggagggtgagcattgcaaactaaaaaaaagacaaacgaagtgtaaaaacatagtaaacatataaatgagcttagctttatgctaaaaagaattctacctacaaggtagaaaagagaaggaaagaaaaagggcgaggtgagtatagcggacaaagaaaaaacaaaaaaagggtaaaaatgcaataaacacttatataagcttggatctttgcaccaccaatgcaataagtgtttaggcaagtaagacatgtgatggaatgtcgggtccctatggtgaggtagtagtggctcacataggacattgtgtgccttgttggataaactgatcaataggtgataggattgtatgtactttttggagtgggtgttagcaccacctctcgttgttcttagttaatccatgcaaaaaaagaatgcttggtctttatccttctcttcacccccctatctctaaggtgaccatctcctcgtctttattgtctttttcaaagatctaccatgaatccttagggtggcccatggttgacacaatttgcttcttggggtgacaacccttctttggtctaacactcttccctcttggacaacctttgttgggtggccttagtttctaaaattcatgcctccaagtaccttagaagatcaagcacgttaagctccaaccctagcccaagagagttgggcttccttttgtgaattgtgtgttgaacaaatggctccaggtgtttcatcagattagttaaattctctatgaaaaagagaatggtgtgatttatcttctaaaggcatacgaaagacatagataatgtggttgaaatctattatgttaatatgtggtccattctccctctttccttgacctaaggcttggctaggtggtgagggacaagtctatcttagaccggctcctcaagaccaatctcactgctcatagatgtagatgagatgttcccaatttttgttgttatctaagtagtttttcttgtttcttgaagaacttgtgtgttttcagcttaaatttgtacactaatgggtctttctaaatcctgagattgaatccatattagcatttgacaattatgtagcctatgaggacctagtataaatttgaatggtagagcattgggtgtaccttagcaaagtagaagaactgaggaagtatggatggcctagggagcaatctcaaaccttctctgccacaagaaactagacacccatacttcttggaatgaagtaggttcctgtagcgttttccattttggaagatttggtaggcacctccatctcaaggctccatagaacttgtttgacaatacttcctctcttgaacctattaattctcaaagggctcggccatcaaccacaaactctccaccctagaaagttggcaaaccacaagtctatcttggcatcatataggttaggatctaggcataagctaggatccatgatcctcaatcaaaccctacaacaatgaaaactaactagaatatgggggttttaaaacctaaggatgtagctaaggatcaaggatgtgcctgaagtaggcccaagaggcatgagtccaggttgagaactcaggatgacaaagagtagtgaattgaaaccctaacaaaagaaagtgagaagcagttgctccaagtacaaatcagaacagagctactgcacaaagaaaaattgtatgatagaaatgcaagaagtttatagaagaaaggatgaaaaggttgttacctggacaagaatggtgatctagatccatagcagaatgagaatgatgaggcacttgtagtagctgatatgctgctgatgtgacagttgatgctgctgatgtgacacttcaggtctgctccacaaaggcctccatatcataaggcctcctagaaatgctgcttttatatctcgtcacctctttcagagagatgacttctttaatatcttttctcctcttttcacaagggatggctcagtacttgttttccatgttggctgatgaatattgctttgtagttaaaaagcaacaaattgtagatgtagaagaatccagaataattcaattatccagatctgattacttaggaattatcttatttattttatttcttttattatttgaatcaggttgttgttatttggatcaggttgttagatctagttgtcttaggatttggaaaaattctccagattgttagggttgtttatttttcagtttcctagaataaaggtcatggttggataacctagtctatatatcaagatgttatctctttattttctgatatgataattaagtaagcagtgtttgtacgttctttttcacttctggttacatggtattagagttggattgctgttgaaatagaactatggtaggagcaagtaggggtgatggttctgaagtttcaacaaaaacttctcaatcgacccctaaaattgcttccactactttttctgagagctcctccttacaaataacagcccacaagatcaatggaaagaatattctctagtggtcttggtctgttcaaatggttatttgagtaagggaaagaattggttacatcaatggagctgcaaaaaaactgaaagagaatgatccaacttatcatacatgggatgctcaaaattttatggcgatggtttggcttgttaactcaatggtattgggcaatcttacctctattatgcaaaccacgatggagctgtgggatgccttaaaccggtcatactcggatgttgaaaattctgctataatgttcgagctaaggaacaaggctcgaaatctcaagcaaggagatcttgatgtaacggaatattttaatgccttaccaagattatgcaatgaactagatctgtccagtaatgaagaatggagttgtttggatgatgctacaaaatactgaaagatgattgataaagaaagaatttatgatttcttggctggacttcataagaagttaaatgaggtatgtagacatcttgcaatcagaacacttctgacagaagaagagaagaaagtcggaaacatgtcatgctcagaggagaatctccagacacagcggaaaatgcagcattagctgtaggaagttccaagaattcaaacagaggagaaccacacaataattggagaggaaatctttggtgtgatcactgttagagatcgaatcataacaaggaaaattgttggcgtttgcatggtaaacctccaaactggagagacaatagaggaaatagatgtgatcctaaaggattctaggcaatgacaggcactgcaacgtcttgatggcaaggagataacgacagcagccttaacctcacaaaagaacaaatcgaacagccatacaagctgttagctcctgcaaaatccactagcacttctgttggcccagaaaggtacattcttgacagcctttagtagtgtcggtgagaaacagttgcaaggaccggtaccataaaaattagcccaaatattgttttaaaaaatgttcttcatttccaaaaattgtcttgcaaccttctctctatcaataagataactagcgatctctcacaatcagcttgttttctaggacctgacattgaggagcattggcaatgctagggaacatgggggactatactacttcatgaatgacatctttgtgaataaataggttctaacagctagccgtgaatctacttcattgtctaggttaaaagaaataatgttatggcatctaaaactagaccaccctagtttttcttttctcaaaaatttgtttccttctttgttcagaaataagactgactttcaatgtgaaatctatcagatatcttcatcgaactttttttctgtcacatgcacataaagccttaaagccttttgcattaatttatagtgacattggggtgccatcctgtgtaaaaagtctctgagggttaattacctttattgatgaccatacacgggtttgttgggtttatcttttgaaagaaaaagctgaagcagcacaaatctttgaaaatttcttttccatggttaaaaatcaattttatacatctacataagttcttcatacagaaaacagaagagaatattttaattctatacttgccaattttctttcaaaaggggggattatacatcaaagtttatgcactaatacaccctaacaaaacagtattgccaaaccaaaaaatcgtcatctcctagaagttgttcgtgcccttatgttcaccataatgttccgacatttttttagggagatgccattcccacagaatgttatctaataaattgtgtacctaccagagtcctccagtaccaaactcctctaaacacacttctcaaatcctacccagaaattcatttcttcaccacctgaccactactagtttttggatgtatctcgtttgttcacaaccatgattgaaaccatagcaagcttgaccttagagcccataactacatcttcttaggatattctacaacttgaaaagggtacagatgttattccctgaaaaaaaaaaaaaaaaattctcttgatgtcacattttttgagaaccaatcattgtacccaaaaacttcacttcagggggagaatttgaatgaaggaaatttttggaaactttctttgccatctccagtaatattcttagatactcctatactagaaaataacattccaattggatctttagacaatgaaagtggacaaacacaacagcaaccggaagtatatgtttattcatgaagaaacattccaaagaggggagaaaaccccgtgaaccttcagcaaagacaagaatccaaaccaaactcaggtactttacctcaagagtcgaatctcacccctgaaattaatgatttggatatccctatagctttacgaaaaggagttagatcttgtacacaatatcccatttctaactttgtgagatatgaccatttatcatcctttgtttgagctcttgtcactaatcttttaggcatggagatgccaaagtctatttatgaagccctaaaaattccgaagtggaaaaaggtggttatggaagaaatgtaggctcttgaaaagaacagaacatgggagctagtacaaaaaccagaaggaaagaatctagtagggtgtaaatgagttttcacagtaaaggacaaagctgatggatctattaagtgttataaggcgacactagtggtaaaaggattcacctaaacatatgggattgactactaggagacttttgctttagttgctaagttaaacatgatgagagttttactatccttcactactagtttggattagcaactccaataattagacggaaaaaacacattcttcaatggagatctagaggaagaagtctacatggacctaccacttggtttcaatgaagctagaagaaattggacagtgtgcaaactaaggaaatctctctatggattaaaacagtcctatagcatggtttgacaagtttgctaaagctattcgacaataggggtataaactagctcaatccgattacactttattttatagacataaggatgataagatcactattcttattgtctctgttaatgacataatattgactggagatgatcaagcagaaatgaagaaattaaaaaaaaaccctagcaaaagagtttgagataaaagatttgggattcttaagatacttcctaggtatggaggtagccagaggtaagaaggctacataaatttcacaaaggaagtatactctagatctcttaaaggaaacatgaatgatgggatgtagaccagttgaaactccaatggattcaaacctaaaactaagagaacaattggatggcaacctagtagataagggaagttatcaatgtttagtaggaaagctcacttatctatcccatattggacctgatattgctttcgcagtaagtgtagtaagttattttatgcacaatccgcaagagcacatggatgttgtatatagaatcttgaaatacctaaaaggaactccagggaaaggattatttttcaaaagaaatgaagtcaagggcatagaagcattcacagatgcaaattgggcaagatctatcaatgatagaaaatcaacttctagatattcgtacttttgtttatagaaacttagtgacatgaagaagcaaaaagcaattggttgttgccaggggtagtgcggaagcagaatttagaacagtggtacaagggatttgtgagctactatggttgaagctactattagaagagctaaatatagcaaaggatcaactaatgaagatttattgtgacaataaaacagccataagcatttcccataatcctgttcatcatgattgtaccaaacatattaaagtagattgacactttatcaaagaaaaaatagagaacgaattatttgcatgacatatgttcctacaaccgagcaacttgctgatttctaacctagggtcttgcaaaagctacctttcgaaaaattaggagacaagccattgatattttcagaccagcttgagggtgggtagaagaatccggaataagtcaaattatccagatctgattagttaggaaatatcttatttattttatttcttttattatttgaatcaggttgttttagaatttggaaaaatcgtccagattgttagggttatttatttttcaatttcctagaataaaggacatggttggataacctagtctatatattaagatgtaatctctttattttctgatatgacgattaagcaagcagtgtttgtactctctttttcacttccagttacagtaaatatgggtcctcattacctgtgtatctgtttttatggttaatgaacattttgcttaaggttttctttgtattaactactctgtacactaaataattgcataaaggttttgttcaacattagctaagtattttttattaggtttttattgttgatattgctaactgtttattcttttaataggattttatctaaaaaaatttcaaagattatatttttatttattatcttgtctctacagatccaacatac

SEQ ID NO: 11383 - DNA, 1589 bp, Vitis vinifera
  Intron number 12 from transcript GSVIVT01037101001 (locus GSVIVG01037101001) derived from phytozome v7.0 (chr-ID chr 18; pos 29123345 to 29124933 reverse strand)
gagcgaggaagcatcctcggggtgataatattcaggtatgtcagttctgaatatgtcttcttgtgctcctttggatttattatcttatttacaagtttttagtgtgatttataatcattttattgatattaatgtttagaaccatttcattgacaaaattttacatttttatggcagtaattttgttgtcattgaatcctaaatttgcatttataacattctgtatgaattggattctgtgttatgaaagtaattgtatttgtttttgagttctgaatatgcccttttttaacctatagtttttttttttattaatttaagtggaagtttctggttgtattacataattattgttagcagtagatttcttggttatgtggttttagatatgggcttttgtttaaagccttatttatgctagggtctagatgttggggatttcagctttcagccttggtcattgattaatatgtttatttttatttttatgaaagtgttaaatcactggaaatttactatgtaatttttttttttttgcatatgtgaatgcactaactagatcaaacaaatcaatattgtttagatcattacttggtgacaaagtacaagatttagaaacatgtctgtacgatcaatattgttctatcctgtagaaagaatgcacagatatataaatcgagttttggaatttaggtcattaccaaccaaggaaaagaattgagaatcttttttgtgttttctaatgacacaagaatgaattggagaaattccattgcctggactgcaatgtacttgtgacaatattgatatttggtcaatatgcatacttgttaagtgctgaatgaggaaaaagatgctaggtatgtcctttatactagaaagaaatttagatatgtacattggaggtcctgaccagtgaaaaaaagaactattagtctgtcaaacttcaactgatgataaaaacttaaaacctttttttttttttttttttttgtggatttagggaaaattttccatttaataaaagctctttctgatctggatattgcttggatatgcacagcattcaagtgatttcacttggttgcattcgaatgatgttattttacatgaaagatgaattattagcaagtgaactgaaaatgatagtcttttaagtacagtctcaaattcaggtgcaaattttccattcacaagtgtcatggagaatgtgtagctttgaattcttgagatatttgtggaatgatgtgtctctaatttgtagatccttctgcaggcacatgcttgctgatgtttgttggcataccagtacaactttttggcagttgatggcagttcaaatgttcttttcagttttcttgttttagtttcattttcaccatgttcctccagtgtttgattcagctaatgtgtcaattaacattatatttggtttgagtagtttactgagaacaaatgtatgaattttccttcatctgattactatcaattctacatcattatttcatgatagctgttgctttgctaatttcgttctaataattacattttaatgaattgcagatagatacaaaagatatcctttttat

SEQ ID NO: 11384 - DNA, 12383 bp, Vitis vinifera
  Intron number 2 from transcript GSVIVT01038512001 (locus G SVIVG01038512001) derived from phytozome v7.0 (chr-ID chr3 ; pos 10812363 to 10824745)
gtgttaccagacaggtatagaattgataatttctattcaaatatcaaagtaagttcaaaggaaaaaatactgtctgataatgtctggagactactgcattcttggtttaaaatttttgttaaccaagaatattaaaataccagtcaacataacttagttggctggtgattcctaatttatagaaaatttgagagttgaaattacataaaaaaaacttcctgcataatagataactttactatccatcagataaatttattgacaggatcattaagataaaaatgataaacaccaaaggatataacaaagatagataaaaatgtcatctatatcttaatacaggcaaagcactctgcaaggtagttttttttatttgatagacaaagagaaaaataaaataaaactccccaaaatagggggcgctccctacgtacacagacagtatacaaagaaagccaaaaacaaagcaacaaaagaaagaaaaaacctagagaggaaaaagctaaccaacaagccaatcaccaaaaaaattcaaaaaagagagatagtccaagtccagaaactgttgagaccactcaagaagagaccgaaaaaagaggttcctcaagcaagtatccgacatctcttcctcttggaacgttatttggtttcgttctccccaaatgcaccaaaaaagacaaataggtgccaatctccaaactgctctacttttcttccctagacccttaattttccattctagaagcagatttttcactgaagctgggaacacccacaccaccccaaaaaaagaaagcaacaaagtccaaagccccttgtcttaccacaatgaattaagatgtggtccgccgattcctcattctctttacaaagactgcacctattaaccatagaccaaccccttctcatttaacatatctacaatagaaattttaccccaaactgcttcctaagcaaaaaaacaagttctaaaaggggcatacgaaccccaaacctctttggctggaaataaggggctattctaatcttttaaagacctataataagatttaacattaaactttcccctcctctcaatcttccaaactaaagaatcctccccttcttgaacctttattgcaaaaatatgatccaaaaaacgagtcacctcctccaattcccaatcttggaaggatcttctaaagtgcacctcccaacccctaccaccacctccttgtctctcctaaagatcaaccactacagcagaattatgggttgcaattctgaacagcaaagggaaaagatccttcagcttagaatctccaacccaaatgtttcaccaaaatcttgtgcgtctaccatttccaatacgattactagttctaagaaagaactcctcccaaccctttctaatgtctttccaaaggcccgtcccataagactccctcacctctctaatggtccaacccccttcctcctctccaaatttaccagcaatgactttcctctaaaaactctccctctttagaggaaatctccaaagccattttccaagcaaagcatgattgaaaaccttcaaatgctttaaccccaacccttcatgcctcttatctttgcaaataaccgctcatcttaccaaatggatcttcctttcctcctccaaatctccccacaaaaactccttttgaattttctccaatctaagtctcactttccttaggattacaaaaagtgacaaaaaatagatgggcagatttgagagagtgctcttaatgagggtaagacgacctcccttagaaagatattgttttttccacaaccaattttctcttgaatctttcctctacaacatcccaaactctacacgaattatgaggggctccaagaggtaaacctagataagtagtagggagattccctactttacacccaagaaccgtagctactctgtccacacctccacgcccccaactagaataatttcacttttttgcatgtttatttttaggcctaataccatttcaaaacaaataacaacccacttccaaaaatccaactggtccctgttatcctcacaaaaaagaagagtgtcatctgcaaacaacagatgggaaactgaaaccccttctccacgtctccccattaccttgaagcccctaatgaagcctttctcctctgctcttgatattaaactgctaaaagcttccataattagcacaaacagataagatgagagtgggtctccctgccttaggcctttaaacgttgagaagaattctgtgggagtgccattcactaaaactgccattctcacagttaaaatgcagaataaaatccagtttcgccacttgggtccaaaacccatttttccaaaattgaaagaaggaacctccagttcacgtgatcgtaagccttttcaatattcaatttacacactaaacctgcaccgacgcgtcgtttccttgagtcaatcgcctcattagctaccaatattgcatccaaaatctgcttccctcccacaaacacattctgactgtttgaggccacttttcccatcactcttttcagcctatttgctaggactttggcactaattttatagagactccccacaagactgataggcctaaaattctgcgcgtcactagccccctctttcttcgggataagcactaagaagattgcattaaggcttcggaaaacagcgttttgcgaatggagctcctcaaacacctacatcacttcccccccccccctataggccaacaaaacttccagaacgctagcgtaaaaccattcggccctagcgccttatctccccccaaatttgagagagctttggaaacctccttctccgaaaattgcccctccaaagtctcattatccaaggaatcaagagttttaaaaagacctgactctacatcaggtcttctcactagagattcttcatgttgaaaataatgtattttataatgtacaagtttctttcctttcttaatataggtcacatatggtagttagttaaacctagccttgtatatatatttctctattgtaagaagttaagaatatgaatgagaattaaggttttttctctctctttcaacatggtatcagagccaagggagaaaactttattctttctggtttacccgtgtaattaattctgagaatctgtccaatgaccgtgtttcattccggtcacctttttcatctcccaaagctttccggttagtcatgtcgtggtcagaaaaccctcatcaccgtcaacatttttctggcgatattttctgacactgatcacatcatcaggagcgcaaagaggagatctgcaactttcctcaaagcaccgaagccaaaaaaccacccacgcgcctcacacgccactcttctccgacggcttgaatctcacgcgctggcgcgtgagggcgtgtggcccactttccggtgtcgagcttcttctagcaggctcgtccggctctgtcttgcatttctaagcctctgccagtcctcttcgaaccctgcttctccatttttttggcatttcagcctccacgagtcttctttcagcttcctccggcctccgacggcaactcccttccttggccaagacctgtgtgtgccttgggaaggcctcttcttcatccccaatcacttttctcctttgtttgggtcccgacataccaggttcttcttccacagctgtgatccgacctccttttagggctctcttcgatccaaacatgattcaatctcaggtgaagtggatatggcgactaaaaatcccatttttacatccgtcatctctggatctcctcctatcacatcggaaaaattgattggtagtgagaattatctctcctggtcagcgtccttggaactctggtttataggacaaggttatgaggatcatcttgttacacctgaggatgctatacctgatgttgacaaagtgcaatggaagaagatcaatacacaattatgcaatgtattatggcaatctgttgatcccaaaattttccatcatcttcgtgcctacaaaacctgctttaaattttggactcaaactaaaggattatacacgaatgatattcaacgattttataaggtggtttatgatattgttcatgtgagacagcaggacatggatctatctacttatattggccggattgcgtctcttaaggaggagttcttaactttgatgcccttcactaatggtgctgaagctcaacaaatatagactgacaagttctttatggtgttaaccctcattggcctccgtccagatcttgagtctgtccgagatcagattcttgctagtccatcagtaccatctttggatgatgtgttcgctcgactcttacgcctctcctctactcagaccttgtcgactgatggtccttcaaatttatctatgttagcctctcagactaactctcgaggaggacgtagtggcaatcggggtcgaggacaacgtcctcagtgctcctattgtaataagcttggtcacactcgagatcgttgctatcggttacatggacggcctcctcgcactgcccacattgctcagtcatctgatcctctgctatttcaacctaactccgctgcaagctccacatctcagagtatcacccttactagtagtgattatgatgtctatctccaatatcaggcaaccacatcagcttctgttgcttctgttgcccagaccggtaatgtctcagtttgctttactcagtctccttctcttggcccgtggattctagattctggagcatctgatcatatctctggtaataaacaccttttctcctctattactactacctctgccttacctactgttactttagttaatggttcccaaactatggctaaaggtattgacttggctcatcctttcccttccctacctctccattctgtcctttatgcccctgagtgtccttttaatcttatttccatcagcaaaataactcgcactcttaactgttctatcactttttctgataaatttgtgatcttgcaggaccggagtatggggaagacgattggcagagggcgtgagtctcaaggcctctatcacctcacatcaccttcatctcctgcagcttgcatttccactgatgctcctcttctcattcacagtcgtctaggtcatcctagtctctccaagttccagaagatggtccctcgtttttccactttgtcgtcgcttgcgtgtgagtcgtgtcagcttgggaaacatactcgtgtctcgttcccaaagcgtttgaataatcgggcaaagtctccttttgaacatgtccacactgatgtttggggtccatgtcggaccacgtctactttaagatttcagtattttgtcactttcattgataactattcaagatgtacttggttatttttaatgaaaaatcgagctaagttattctctatttttcagaaattttatgttgaaatccaaacacaattcaatgtttctatttgagtgttacgcaatgacaatgctcgggaatatttttctacaccctttacttcttttatgtcccaacgtgggatcctccatcagtcatcttgtgctcatactcctcaacaaaatggggttgttgaatgtaaaaatcgacatctagttgagacagttcgtaccctccttctccatagtcatgttcctttttgtttttggggggatgttgttcttacagcctattacttgattaatcgtatgccctcatctatattacatgaacaaatccctcattccctcttttttcctacccaacctctttaattcattccttctagtgtctttggctatacttgttttgttcatactctcacacctagacaggacaagctctccgccaaggctacaaaatgcatcttcttgggatactctcgacttcaaaagggctatcgttgttattcccctgacactcatcgttattttctctccgctaatgtcaccttctttgaggactctccattcttcttatcctttgaatctcttcccatttctaaagtattgtcacttccctatatatcccccttttccgatgcgttctctcgtcctcttcaggtttatcatcgtcgacatcgtgctgttgctcctcctctctcttccgctgaggcacctgatgacttatctcctgtcccaccgatttctcctaccccgaccctgccatctactgaccatttgcctattgctctttggaaaggtaatcgatctactcgtaaccctcatcctatttataattttttgagctaccatcgattatcttcatcctattctgcctttgtctctactttatcttctgtttctcttcctaagagcatgagtgaggcactttctcatcctaggtggcgacaggcaatggttgatgaaatgactgctctgcactccaatggcacatgggatcttgtttctttacctcctggtaaatctacagttggatgccgttgggtgtacactgttaaagttggtcctgatggtcaggttgatcgccttaaggcccgcttggttgctaaaggttatacttagatttatggttgtgactatggtgacaccttctctcctgttgccaagattgcttctgttcgcttatttctctccatggcagctatgtgtcattggcctttttatcagttggatattaagaatgttttccttcatggtgaacttctcgaggaaatgtgtatggagcaaccacttggttttgttgctcaaggggagtctggtttagtgtgcaagttacgccgctctctatatggcttgaaacagtctcatcgggcatggtttgggtgttttagtttagttgttcaagagtttggaatgcttcggagtgaagcagatcattcagttttctaccatcataactcttcgagccagtgcatctatttggtagtttatgtggatgacattgtcattacaggcagtgatcaggagggtatccaaagactaaagcaatacttttcaaccactttcaaaccaaagacttgggcaaactcaagtactttctgggacttgaaatagctcaatcagtttaggtgtggttatgtcacaaaggaagtatgccttagacatcttggaagaaacaggtatgttagaatgtaaacctattgacactcctatggatccaaatgtcaaacttgtactaggacagggggagcctttaagagatcctgggagatatcaacgacttgtaggcaaattgaactacctcaccatcactcggctagacatctcttttcctatgagtgtggttagtcaatttctacaatcaccatgtgacaaccattgggatgttgtgatccgcattcttcgatatattaaaggaacaccaggccaaggtatgttgtatgaagacgagttatacccaaattgttggttacatagatgcagactgggctggttcaccctcagataggcgttccacctcagggtattgtgtttttcttggaggcaacttaatatcctggaagagtaaaaaataagatgtagtggtcagatcaagcgccgaagctgagtatcgagctatgactttggcaacatgagaactcatatggttgaggcaactccttcagaaattgagatttgcgaaagatgaacaaataaagctagtctgtgacaatcaagccgcattacatattgcatccaatccagtctttaatgaaatgaccaagcatattgaagttgactgtcacttcattagagagaagatcgcattagggtgtgttgctacaagttttgttaattcaaatgatcaactagcagacatcttcactaaatctcttagaggtcctaggattaaatacatttgtaacaagcttggtgcatatgacatatatgctccagcttgagggggagtgttgaacataatgtattttatagtgtacaagtttctttcctttcttaatataggtcacatatggtagttagttaaacctagccttgtatatatatttctctattgtaagaagttaagaatatgaatgagaattaaggttttctctctctttctctctttcaacacttcaaacaaggatttaaagtaggatccaatcccttctttaagctcctcctcattatttagccgaacacccctaactgtcatgctactgataaaatttccccttctccttgcattagccatacggtgaaagaacttggtattgctatctccctccttcagccaaagagcccttgacttctacatccaagagatttcttcaaggatggcacaatgactaaattcatctctagctatccgctgactactcctatcttcctcagatagagaaccaaacatttctaaactatcccaataatttaacttctccaaggcagcgtccttcctagctgacacattgccaagggtctctttattccacctcttcaagtagtatttcaaagcctgtagcttcttcgcaagcacaaaactgggtttccccctaaaattgtaagactgccaccaatctttaatcttatccataaaaccttccacccttagccacatgttttcaaatctaaacgcgtttttacctattctcatcccaccgcaatctaacaaaatctggcaatggtcagaaacaggtcttggaagaagaatttgcatggcccccgacacaagttcctcctagtctcttgaaaacagaaagcggtctaaccaagccttcagggaacctccttcccctccactccaagtgaatgctccacctccactttgcaaggtagttttagaaagagcttttgtaaagacatcaaccaactgatctaaagagcgaacataagaagcagaaacatcttgggtcaggacttgtgatgaggcgaaacaaaatggtaagaaacaaaggagaaaataggattatatagaccaaagtttcatcttagctgcaaagttgaaagctatgaagtcaaacttgaaaagatgtgcttggcaatgtaccagtcaagaaggagatgaccttccactagatagggtttatggtgaggggagacaagggggtggaagtgtcccatttgtgctttgctgatgatattatcattctttgtgagggttcttaggatcaaatgattcatataagttggttactcatgtggtctaaagtcttattgaagttgaaaataaacttagaaaagagtgagttgattcttataggaagggtggttcatgtggaggaaattacctgtgagattggttgcaaggtgggagagttgctatctatttatttggatctgccattgagttcccattttaaattagtggtggctggagatggggtggaagagtgttttcataaagggttggcgatgtggtaaagaaaatatatttccaaaagagggaggctcactttgataaagagtacattatccagcttgcctacatactttatgtccttgtttagcattccgaagaaagtttggttgaggctagagaatattaaaagagatttcctatgggaggggggctttagagaaatatattcatcttatttgtcacaagccatacaaaggccttcatttatatattttattttatgggactttagatgtcctaatgaaatttacaagaataaaaggaattgaataagtcaaagtaaagatatcattaaaggagttcattgagaatgatcctaaggatgtcaaggaccaaactctcacatcaagaaaagctgaagacaaataggcataactaaagcaaacattagattagctagttcctcaatttcttgctctaagaggttatggtaaaaattgaagttccaagatatagacaaggaggaggaaactatcactaaggaaataatagagtttctcatgctcactacatagatgtttgcaaactactcactaagagacttatcacctaccaaagattatctcaaaaacagattttagtaccgatgacccatggaataatgagtgaaatgaaagaagtttgaggttctttgtgtgataaccttccgagggcatatatgtgaccacctaacaatacaattggcatcccatccattagatttttgatagatactcaagacaaccttctatcgtaaagcatcattcttcctagggaacctctacaaccattttcgaaggcaggttctatttcttaagaatgttctcctaatgcctatcttttcctactaacatagtttagaatctttgggtaccaataaaggtaggtttctttgcatgggaagcaacatagggaaggattttgacactaaatcaattccaaaggagaggatgagctttgccaaatgaatgttacatgtgcaaggtgatgaaggatcaatagatcatttactcttttattgttccaaagcaagaatgttgtggcagacaatttgttctctatttggtgtggtatgggtgacacactatagttagaggaaacctcttgagttggcatgacttatttatggggaagaagcaaaagaaaacttggagggttacttccttatgcttgttttgaaccttatggaagacaagaaataggaggttgtttaatgacattaaataattagaccgagaatcaaatctaattttatgtctattttttttaatgggttagaatgtacatagagggtcatcctgtgtctatgataggttttgtagattggctaagcttcaagaaaggagagaggtttgttttttgttcgcttctttccttggttagccttttggggcgcattgtgtacatcatgcgtacctttgtatgtctcatcttaggcatttttagtatattttctttcattgaaaaaattgctacttaacctggtgaagatgaatttcttgtttgtgataaagaagatataaacaaggtgaagatctcattttcttgagataatattcttttattaatttattttctgtaaataaaatgttatgttacataatattatgttgttttatttattttaagacattttttttattcttagtactttgatcattttttttatatcatggtcatagtttttctacctatatcacaattttcataatttagtacctttgtcacattcttaattatattttttgtaccctagttacttttttcataccccttttgtatcctaatcacatttttcatactctgatcatactctacatatttttcttatcttatcatctcaatcacatttgttgtaccttgataacattcttcataccttagtcacattttccatatgttgattacactttttataccctagcaatatttttcatatcttagtcacattcttcataataaatcacaaaattttgaaccttagtacctttgtgatatttttttatacttttctcacattttttatagcttgatcatattcgtagtaccttagattttgtttgtttgtttttttttttttctgttacttttatttttcatttttatactttttgtattattacttttttagaaggaagaaattctgtattaaatttgcatttggtggatcaatgaattataattgtattattacaaataattcaacctattaatgtaatactttatttgctaattaggtgattatgtattaatagatagaatcttaaaggtggatcaatttatcatattgcaaaatagtttctatctaaattttattcaaaattgcaaaacttcaaaagtagacatgttatttcataaagtacaaaggcaaaggtactaggtaccaagaatatgattagggtacaaaaatgtaattaatgttaagatacaaattatgtgattaaagataggcagaatgtgactaatttatgaaatatgtgattaagatattaagatacgaaaattataacccaagtacaacgaatatgaccaaggcatgaaaaatattactaaaatacccagaacgtgactaaaaaatgtgaacaaggtacgaaaaatgggactaaatataaaggtaaagacgaagaatatagtacaaagaatgtgaacatggttcaaaaaatgtgactagtgtacaaagaatgtggcaaaaacatgaaaaatatgttatttaagattttattttaatttttatgagatgcttttgtactatctaagttttttattagaaatttgggtgtttcttcattattagtttataattttaatttcattgcaattatttttttcaagatgaaaatggagtgagaggaagagaatgaaaaaggtggagactgagacagactcttcccttcactggtctcctctatttttatcaattgatggcttatattggatattaaaatccaatggttggcattggaaattgatatagtaccaagaggtgctctagaattttctacgtcattatgcatgctcaataaaagttaaaaaccattattcaaagggcagagtagtaggaattttttagggtaccaagagctctcatcaggccttaaaaatctt

SEQ ID NO: 11385 - DNA, 290 bp, Vitis vinifera
  Intron number 2 from transcript GSVIVT01014366001 (locus G SVIVG01014366001) derived from phytozome v7.0 (chr-ID chr1 9; pos 3061338 to 3061627)
cccttgttaccctgtcatatttcccagtgttagtaactgaatttgattgtgttctgagtattgttagtttcaaatcatgttcaatgttctaactgtttgaaaatgcataaatgtacttttgcacgttcatacacataatattctgaaaggtagaaactatttcagttaattaatatatttgtttttcaacattaatgggtaatatttcttgggtagatttaagtattctgtttcttaatcctttctgttttccagttttctggagctgccaatttattgctcgtgcatca

SEQ ID NO: 11386 - DNA, 1263 bp, Vitis vinifera
  Intron number 3 from transcript GSVIVT01002505001 (locus G SVIVG01002505001) derived from phytozome v7.0 (chr-ID chrU n; pos 35098191 to 35099453)
ataaggtgagtctcactttgtcagatgtgtgagttacattcaccaacctgcatgtctaatctcaagattgatcatgaggtgttgtcgggaatcccatgacattatggcaacatagatatctggtttgtctttattactttattaacaggggttttgttctggtagcttatttgcagtgtgtttgcatatatgttttatatccgtacatgatgtacattatggtgagctttgatcccaaattgattggttagattaagttatggatcttctacattaggttttctgtgttagtgaaaggaatccctaatggatttgtgatgagcttaaggggtttgaggttgagtgaccctctctccctgtttgtttattttagtaatagaagcctcaaggggtttcatttttaacactgtaggtgagtttattagtggttgcaagagagggggagagagtggaggttggtctcacttctttttttttttttttggctgatgatcccctcctattttatgagatatattgtgatttcttgttgtacttggggtgggttcttcactgtttcgagttagtgtctggtccttacagttaatttggagaaaagtgagcccatttcaataggggtagtgacagatgtggattcttttgcttcaattcttgccagtaggtggggagtttgtcctccacctagttgggtttattgttgggaactccatttgtttgagttaattttttctttgtcccttggtgctttttgcatacttcctctatgcttgagttgcaccccctttttgccaggtgcctattaactatataactactactactactttgcttatctttatttagcactcaattttttctcttctcgcaatttaaaatgtgcacatgcatggtgttttccatttagtccaggagaaacttttcacaagatcccaagtacattttacaaatacttgcatcaaagggaattgaacttgctaacgcaaacatgctttttcacacttccataccttgtatattttctcattttgtcttaatgaagtaaatatgtttaatcatgagttttaattggaacatggtgtacctgtacatcagattgcatcattgatggtcaaagttgaccatctagaaaatcatatatctttattatgtgctggcagcaattgttctgctgcttctgcaagatcttctgaacttttaaggcttatgctattgttatttttctggatttttctttacaggctaattatttggcatcattgaatc

SEQ ID NO: 11387 - DNA, 3106 bp, Vitis vinifera
  Intron number 1 from transcript GSVIVT01013253001 (locus G SVIVG01013253001) derived from phytozome v7.0 (chr-ID chr2 ; pos 6199974 to 6203079)
acctatttaataaccgtgttgattaatcaaattataatcataaccaatttagcttatatttgattgatttaaaatttgattttgaataaataggtcaatcggctaataaacatgttaggttgagatgttaatcatattggctgaaacaaagatctagttcgacttgattattaaatgagacttaactattaaatgagttatataatatattacctgtttagtaattagcatgtttggtttatattttaatttgattattatttgatttgtgcttaagttgacctatttagtccaatgcatgagttttgacatatcacaaacacaattcaccaacatgaattgtcacccctaaaacaataagagatttatgtaaattgatacatttctagtagggatggcaacgggacggtttcatgataggtcatcatcccaatcctgccttgtttattcaaaatatttttcatccatgtctcattaaaagaattaaatggagctgggaggggcggcgtgagtatgcaaatttctcatactcattccgtaccgcttcatttaaccttttaaatatatatatatatatatttcaaaatatttaactatattaaaatattatagttttttataacttatttgattgaaaggtattttttattattattattattaaaaataagaaaataaaaattaatttaatttaattttaaaaatcatttttatatataatcagggtgaggtaagacaagacaatatccgaacttgccttgaatccatcatagatttaaaaaaaaaaaaatcaaatccacctttaacccttttatttaaatttcaaacttgccccataaagacaaggcgaggtaggtaccgcctcaatgtcatcattaatctctaaccaagagttttaaattacacatattcattctcttgctaggtatcctacaaagtattaaaaatctctttttaacgagtattggcataagaaataaagaaatttttttgtcaaaaactctttataccatcaagacacatcaagagggtattggaaaaaaaaaattgtcttaatgactacattaactttaccttgatcaaaccaagtgtcttaaccataagattcatgaattcatacatgcatgtttgtggttcacattaatgtatttttatgatattaattggattgatcctaaaataaataactcaaaggtcaagttccaaaatttattattaagaataagatatgaagaattgtctattattgcactgataaaaaatttgatgtttcatagtagaaataaacatataagtatcaaattcattatattaaggaactcgtaaaaaattatgagattgaatttgggctttgtagatcaaaagatcaagttgcaaatatttttataaaactattaaaaattgatgtgttcaagaagttgaaaatgatgtttagtgtgattgaccttacaacttagtttaaaggagaatgttgaaattataatctaacttaaagtcaaattataagaattttaggaatttgagaaacattataaattgtttatttaggtttcttacattaattaggatttctatactaatatgaattggaatcgtacacaagtatgattaatatattataaataagtttgttattatgtaaaatatatatatatatatatataataagatattattttagcaaaaatattatcaatacccaatcacgtggctttaagcaaggaattgggtcattgagctcaccactcctatctacactacaaaacaagaagattagcaaagagagaacttgtacccacaggtacatgggactctgattaatcatagctttgatatataagaatcaaaatggtttagttctagaaatggctttatttgaatgcacgttttttttttttttttttttaatgttttgaaaaaattagaaggttttatatagaaagtaaaaaaatttattcaatagatatagattcaccttatatcctcaaaaaaattttaaaaattgaagtaaaaaactttccatatctcaaattttttaagtagtttttaaaaattattacattttcaatagaagcccataaaggtttaaattacttatattttctatttttaataatttaagaagaagaattattttattaaaatagatgaaataatcttgaatcaacaaaattagcctcttccatatttaaacttaaaaaataatatatttcaacataaatacccttcattattaggattattttcatataaattttagaagaaaattttacttttattggaaaacatgaagagtatgtctttaaaaaattgatcaattttttagactttatatttacaaatttgaaattattttatcttttttttatcaaataacccaagaaaaaaatatatatatatgcaaaggaacacctaaattattattcttcaacaacaattagaaaaagttaaagatattcaaacaaaaggtgatatacatgtttcgtgaatctaaaatgacgaactgagatgatgtttattttttttacttgcttttaaatgaaaataaaaattaaatagtacttaatagtgttaagtattaaattatttgttttcataatattttatttttattaagtattaaaaagtaaaaaaaaaaatcaacattttattttttttatttttaaaaaaaagttaaatattttaatttttttgttaaaccaaaaatttaaaataaattatgaaaaaaaaaaacaaacaaacaacttaaaatttgaaaacaaattactgtcaacaaaaaactaaaaaaataaatacttttaattcctattgtaaaactttatttgtgagtaacccttatattaaatcattaccatatgtaaatttcattctaaggcacaagatttagagttgacaaaattagtgtctaaaatagtaaaatgtcaacgagtgacacgtcagctttaggcgacacatcatttaaaaaaaaataggaaaaaaaggaacgaacaaacgaaaaggaaacaatgcaagaagctagcgaagaggtagtcacatcaagagtagacgaagatggtgggtgaagtgatgagcagagagctgggagctaggttcacttccagtggaa

SEQ ID NO: 11388 - DNA, 5123 bp, Vitis vinifera
  Intron number 2 from transcript GSVIVT01013597001 (locus G SVIVG01013597001) derived from phytozome v7.0 (chr-ID chr5 ; pos 21344564 to 21349686 reverse strand)
ccagaaaagaaaatatttttaacttcgggtttgtcaaatattccctggttaagggtgagaggactcacttatgagaagaatggaaaaggaaagacacccctccatctatttcacaacagtatcataccttgggaaccgttgttcaagttgacatgggacaccttattaggattaagggtaaggccgtcggaatttgcaatttcctatgtactgttagtttttgacatccaatttattttaccactttttttttgtatcatatatggtgagaaaaaagaaaaaaggacggatttttgtcttaaaaaaattgcatcatagattattatttcaccccttttaattgaattccatgctttctgtaaaaaatttacaatttcagagacgaaagcgaagttccagaatcgttagtatgagacccttaggttcgctagagatcaaggaagacagtggaacaaagaaagtaaagaaatatctgaaattaagaaaacaatgaaaagccatatgatagtggcggcactcatagcaaccgtaaccttcgctgcaggtttcacactacctggtggttacattcagaacgagagcaataaccagggcttggcagtcttgtccctccctaccaatggcaccaatggcaaggaccaagtcatggcatttgcattaagggaaaatttcagaatttttgtcatggcagatggcatagtcatgttgctttctatgtgcgctattggtatttatttctatgcgtcattccctataaaaaaataagaatatcgcccagggatacttattccacggctatgcgctcaccatgtctgcgatgattgcaatggtgtttgcatttgttgagggcctgcgagctgtgctgtatccttcttcattgcttgaaggtgccaccacttgcatccctctggtcttcgatctttcttttgtttttggttccaatatttcttatactcgcacccagcccaaggtggattttgtatggcaaaaaagtcaagtcttttacattaatgtaagtgattttagacatgtttcaagtcttacatattgtttatgcttttactataaagtttcctgttacatttgtaaattaccgaaaaaaaatgctttttttttaacaatgaatgaatgcattctccacctttcatctttaccagccatgtactttattttaaaaatattgaaacccctggtacatgcccgtaagcttagcaggaactcttttatcaaaaagcattattttcacttcacttatcttactaagtgtaccctttcatgttttttcctcttttttacttgttaaatttgttaaaaaaccatcatataataaatataaggctaagcctgtaaaaagatatcattctaaagacttttaactgttttcatcatcaaaccatgagaataaattcagcacttaaatttacgatagtactaaacacactttttacttatattaatttaacacttaaatttcagcacttataattgacttcaatttttcttcaggtttaattcttatatctatatttgaagtcgggtttttattaaagattggactatttcttggttaaaaaaaaaaattaattgtcttcaaaccaaatgataaaagaaaaaaaaaaagttgaaggctatgtttggttctccaaaaacttgagggaaaatataaaagaaagaaaatagagaggaaaaatggaaagaaggaaaaatgaaaaaaaaaaaaaaaagtaaaaaaaaaaattatatttaataaatcattttttaacatttcatcaaactcattttacttatttatctctattataataagattaagtaattttaaaatatataattttcaaattaattttaattatatttgattttcttttatgttttctataatgaaactaaatatgataaaaccatttttcttaatattttccaataacccaacatagtttaaagaaattgtggattacaaatttcgaggttcatatcaatggaaactatagatgtacaatatttgcccaaaaataggcccaaaccataccaaccaatccaattacccaagtttcattcctcataaaagtaaatgtccaagaaaaaaaaaattgttttttccttttattatctaactatcattgaaaacaagatatgtttttctttttttttctttcatctttcattaaaaattcctccaattgtcaattttttaaaataaatatttaaactatatatatagatatttgtttatttatcaaaaaagaataataacattttaaactttttaacaatgaattgttacattgtaaaattttgcatacatttttaatttactttaaatggattgtaaattataaaaaaaataatacattcatatgaatggacaatcttacaagtatcatagcctctcgataggagaatggaaccattagtggaaaaatctattgtttgatagagcccaaaatagcctgcaatggactatcaaaaagggtgaactgtctttaaaacaaaatagtccactgctcagttatgcacttcactcgttctagaaaatcaaaccaaaaagtaggttaaagcaacgaagatagagttttgaagaagaggactctaacttgtgccaatggaagcaaactcaagggatgaacatgcccgattgttgacatgttagttggatttgatgttataatggactaaggtcccaactctctttttatttcaatcttagcccccttgttccttgaaagattataaagtagtactcgatggaaatgaaacttagttatttcatcaacaatgtctcctttcataatatggattccaaatattaataatgtagaaggatgtgaatgagtcaaatcatatattagtggactaactctttaagaattgtgaaagatgttcccttagaaatattctttttattgtttcagcttatattctccaaaaagtgatagaaatcataaaatatgatcttaataaaaccataagttatacctcttttaaaaaaaataaagaatattttaaaaataaaaataattgataatattttctttaaaacaaattgtaaaaaaaaaatctaatcatattgagtcaattagtaccaaattttttgaattaaagctaatccaaaatgactatattaatttcctctctataataattatactgttacaaatcttttcattgggtaagcaaactttaaagtggaagttaatgcattgaattctttatcgaacctagcaatttttagaaataatttgtaatttaaaaattatatcaattattatgagcatttagatcaaacaggtccataaatactggccaataattaggatctaaatatatactttaaataaaaagtgtagtcaatatagggtttaggttttgattcttaagaccttgtgcattgaatgaacattttgtggtggaataaccattatcgaaatttatattactttttaaggtttaaatatttaaatttattttatatttgtgtatagctaagtttaatttctactattttcaattgattaaatataatttaaattgctacaaactgtggaatattaatttagatggaattatttttattaatttttaaatattccataaaaattataaataactatttaatttgtttgtttattaattgaaatcatcttcttcaacaaatagtttatcgatgatagggacacacattgtccattggtaaatcaatgaaaattgattattaaatctacttattttttatttatagcaaaaaaacttcttatgttggtaagagtgattttttttttttttttttttgcattttagaactgatttgatccataggcaataacgacaataaaattccattagataatccgttgctcaaaacttctattttgtttatattttccaactaacgtaatctattggcaatagcgacggtaaaactcaattggataatctattgccaaaaactttttattggcaactaaaaaatcatataccaaacttttggcaacacatatttccatgtgttgggaatacctattggaacaattttttttcccaatagtatatattaattgggaaatgtcaaatttcttgtggcatatcgagcattcatgacttcaccatgttgctatattgtataatctctcaaccttgatagaatattaagtttatgtcaaagtttttcaatagaagcaccataatatctcatggagattgaaatagtatgtctctttggatgattctaaggaagtgtatttaggaaaaagtatggtagtagtaattccttagcaggaacttgacacatgttctttgtgagttaagcctaagttaatcatacaatagaaggaattgagtctcaaaaattgtaaatgtaattttgaaaggttgataacattcaccttattagattatagatatcaattcatggggagcctacataaagtagataatagatcatggatccaaggacttttgtcttgtcgtaattacatacgatactagagtacaactgattctctttagtgagatgttgaatcaaatttcagaattggattctaaggggaccaatatttgcttatgggtacctattgtccttgcttaagctcgtattccttgatagtatggtttatgagggttgtttaagttttttgttcactactgtatatgaaggcatttttataaatacgtaagatttcacaagagcttgtgaacagtctttttgaattgagctagttaatcagaactcaattggactaattaatcaattagaacccatgtgagctaaatctttaaaagagatcctaatatttttcttgcaactttagactctagtattttttttccccaaagttaaggtaacctaattcaggtctactttgtcaattgagtaaacaaacttgcatcataaatttgattcaaattccatgtccataacaggcaccacatattaaaaggttcacatccgagtattgctagttgatgagagttgcttaaaaaaagggtaaagtagaatcacttaggttattctttcaattacaatcaaatgcaattggatctagtatgagttggtgatgagtgacttataatggggtctccaaaaacaagtaatatttggtgggcctttatccatttttaggtcc

SEQ ID NO: 11389 - DNA, 9664 bp, Vitis vinifera
  Intron number 10 from transcript GSVIVT01022867001 (locus GSVIVG01022867001) derived from phytozome v7.0 (chr-ID chr 12; pos 18599402 to 18609065)
agctatcattagctgatcaattttcaaaattgaaggtaaaaaaaccgtgaaccttaggctaatattgtttcattgtttatgtgtttgaattattgtatatttgcttttgttgcctacaaaaaaaaattgcatttgtgcctgtgcttgaagaaaagaagaggcaatttaaaggaaccatggattcttgaatgtgtagtagttcatatttgtagaaactgagaataatacaattgtatattcaatcgtgtgtattttacataattgagtccctatttaacatatacacagagagcaaaatatgaaaatataaaaatcaaaccaaacatttagcctaaatatcagatctaattggggtctcaatcttctaccacaatatcctataaatcacccctcaaatcatacgggacttccacattccccctcaagttggatcatagatattaatcatgtccaacttgcaaataaaatctttaaagctagatttttgtaaccccttggtgaatatatctgccaattgttcccttgtagggatataagtcatgcaaatcgtctccttctcaattttctcctttataaagtgtctatccacttctatatgtttggtcttatcgtgttgaacaggattatgagaaatattaatggcggctttgttgtcgcgatagagtttgattgggatctctactgtaatgtgtagttcttccaacagtttttgcaaccatagtccttcacacataccttgtacaactgctctgaattcagccttagcactgcttttggctactacactctgcttcttacttctctatgttactagatttccccagacataggtacagtagccggtagtagaccttttgtcttctattgatgctgtctaatctgcatctgtatagatctctaccttcttactgtcacccttcttaaagaatagtcctcttcctgagaaccctttagatatctgaggatgttatacactgcttccaggtgactttcctttggtgaatgcatgtaccggctaaccacgcttatggcgaaagcaatgtctggtctagtgtgagaaaggtagatcagtctacctactagtcgttgatatccctctttatccacgggttttccgttgctttctgtcatttttcttgccttgataagggtatcgcttggcttgcaaccaagcatgccagtctcaatcagcaagtcaagtacatactttctctaggagatactaattcccttccttgatttgacgacctctattcctaggaaataccgcatttgacccagatcttttaactcaaactctgtggctaagaccttcttcaacctctccacttctcatgtgttatctctagtgagaatgatgtcatcgacatacacgattagaatggtcatccttccattgttggactgtttgaagaacatagtatgatctaattgtccctgttggtatccttggttcttaatcacctttgcaaatctatcgaaccttgctcttggagattgtttgagactatacagagatttcttcaatttgcataccctgattttttcttcttccttacaaaaccctggtggtagcgtcataaacacttcttcttccagctcaccattcagaaaggcattattgatatcaaactgatggagtggccagtctaggtttgttgccaaggataagagatctcgtatagtgttcagctttgccattggtgcaaatgtctcggtgtagttgatgccgtaggtttgagtgaacccctttgcaaccaggtgggctttgtatcgttctactgtgccatccgctttatatttcattgtgaatacccatttacaacccactggtttcttccctctcggcaaagtcatcatcacttcccaagtcccatttttttccaatgcccttatttcttccaccattgcctctctccaatctggaatctccaaggcttcttgaatgtttttaggaatctggattctatcaaggttagtcgtaaaagcatgacactttgcaaaaagagtattatacgacacaaatttcgagataggatggagagtacatgaacgaggttgcttcctaagagcaatgggtaagtcatctgttatctgatctggattggagtcagactctcgaggggttggagctatcaccggttatgactcttttagtgtttcggaggtgagtgtctcattagacttcgattttgccctcttgagtagacgagtgtttccctatttgtctgtatttccgtatctccccttgagttcaagtgtccttctatattaggcgaaggggtagatataaggcacgaagtggattcgaacatagcaacgtagaggtagtctaaggttaagggtggtctagtttcactcacggactccccctgaagcgagtagtagggagtatgcttaaagaatgtgacatctaggttaacatatagcttctgtgaaattgggtcataggatttgtagcccttttgtgtggaagagtagccaagaaagacacatttaagcgctctgggatccaatttgttctgcttaggtgtgtgagcatggacaaacacagtggacccaaagacacgaagtggaagatgtgcactgagtctagaatggggaaaaaactcttggaatttctggagaggtgtggcaaaacatatgatccgacttggcattcggttaattaggtatgtggttgtcaaaatggagtcaccccaaaattgtgagggcatgtgagaggtaaacagcaaggcacgagcaacttcaagaatatgtctctatttctgttctgcaaccccattttgctgaggggtgtcaacgcaagaactttgatggataataccattttcttgtagataagtgctcaaggagtgattgaaatactcaataccattatcagtacgaagaatttgaattttgttgtgaaactaagtttgtatcatagagtgaaagttcatgaagactgatcggatctcagttttatctgtcaacaaatatacccaacacgggcgagcgtgatcatcaataaaagtaataaaccattttttatgggtcctattaggggtatgtgagggtccccatagatcattatgaattagagtaaatggtatgggtgatttatacttagatttaggaaaagatgcacgatggtgtttggcaagttcacacacttcacactgaaaatcccatgaagctttatttgaacatagtgaaggaaataagtgttgcaagtactgaaaactaggatgacccatccttttgtgccataacaaaagttcactttccccaggactagatgtagaattacaaatagtaggacactgtccacacacattagcttcgttgaagtaatatagcccctcacgttccttagcattgccaattgtcttcccagatgataggttttgaaaaacacaatgagagggtaggaatttagctgagcaattagactgtttggttaattggctaatagacaacaaattgcaagataaattaggaataggtaggatagggttgagagtaatagattcaaaaatacaaatactccctttgccaacaactagggataaagtaccttctacaatttttacttttaaattaccggcacaaggagagtatgtagaaaataaatgatgagcatcaatcatatgatcagatgcaccaaagtcaataatccagggagtaatatgagacgtggtgctaagtgctgtcagaaaggtacctttgtgggttaaagaactagaggacagagtagtagaagattgaccagaggcttggaaattagaaaaaagctcatataatttcgcaaactggttggaattaaaccccacactagaagctgactgatgattttctatgggtgttttatctgcctaggttttggtggaggcttgatgactatgggctttattgggttgtctggacttccaatccgcaggcttgccatgtaaagtctagcaagtgtctttagtgtggcccgttttcttacaatgctcacaataagtcctctaagactgtcttgggccagatccagcatgaggcccacgggttacaagtgttgaagcctcggggccagaagtgagatgttctcgcaacatcactttccttctgctctcctcacgtcgcacctcaaagaagacctctcagatggagggcagcggccgacgactaagaactctgctcctaacgttgtcaagcttgtggttcagcctcgctagaaactcgaagactctctcgttctccatcttcttcttgaatcgcacattgtcacccgtgcgctcccattcctctttgcggctgaaatcgagttcttgccacaaacccaacatctcggtgtagtattccgtgacttcccgatctccttgcttcatctgccagagtcgcatcttgagttcgaagatttggggagcattcttggcatcagagtatgtttcccgtatcgcaccccacacatcctttgccgccgggaggaacatatacgttttgccaatggttggcttcatggagttgatcaagcatgaggtgatgaaggagttttcagaccgccatttctgggatgctgctgcatcagtcggaggtggtcgccgagtctcgccggtaagaaaccctagctttccctttccgtcaataacaagcttgattacttgtgcccactctttttaattcttaccgttcaatttttcaacggtaaaatggagtgggtagttgtcaaatgcaccgaccgagcccatggaggagtttatctccgactctctttcatgggttgccgattgactggactcatggctgtctcctttttgggcagccatggattgattagggttttagagcaatccgtgctttgataccatgtagaaactgggaataatacaattgtatattcaatcatgtgtattttacataatcgggtttctatttaacatttacatagagagcaaaatatggaaatataaaaatcaaaccaaacatttagcctaaatatcagatctaattggggcctcaatcttctaccataatatcctacaaatcaccccccaaatcatacgagatttccacaatattctagcatgtttcttaatcatttttcagatttctgtgaagttcctaggtcctccaagtagacttccttttgtgctggttgggagatgagaaggatcatttactcagatggggtatctgaatgtagatctaacagttaaaaattagagaatttgaggggtacttgtgttggaaactaatggttaatttgagacttttagtaaccaaagctcttgatacattgttaaattaccaggtgcctatagctagtgttgttctaaccattagatgggtgcagatggatttgcttttttaaactagtattacttctttggcttttttatcagactttgtatagaggcttttgtacttattgggaggaagtcttatccttcttaatatttaccatatcactgaatgaaattgttgtttttgattaaaaaaaaaaaaacagttgacttaatgggtttagttgttacatgctaaagcttggactcaaggtggaaaccttgctgatctaattttaaatcaggtttctataattccatttaagaaagcttgaaaccaacaagctatgaggctaatataaaaatccttgaagagaagaaaagaaggaaatttcttgtcattatatgtaaatatatatataaccccagagagatagccacaagagcttttcatgaaattttcattatctctctggtgatttttgaaaaacaagggaattttatgaacaaatccttgtggatgctggttcagttaagattaagcataatctggataagtttagcatatatatatatatacaaaaaaacaagttatgactccttactttgagttaggccaatcaaaaaagcatatcatagattaagaattctcatctgtgtacactttgacccattccaaaaaaagtattcataaaagatgatttaattttttgttctgactattctaaatcttcaaaagaccttctgttttttttccttcaatagtgttcaaaacaaacacaaaggggtagccctccaattatttatttatttaattattttttcttttccatgaaaaattcgtgccaactcaacagatttcctcttactatggagtgcataaaccaaaccacaccaaaaaaaaaaaaaaaaaaaaaaaagctaccataggatgctttagggcagtgaagaagtaattgatcaattgattcttcctcaactttgcacaaatagcatcaattcgacattgttcatcccttacttttaagttgatcaattgctaaaatccaactctatgttgcttcccatgtaaagaatcccatcttcacaggtatgcttaaggagtggtagaagaatttgacttggaacttaccactgttggattcctttcaccccattacgtcatcctcctctctcctaatcgggttctttgaaaaattcttcaaaaatgctatcactcctttgatcttccaatcatgaaagtggttagagaagtggggactccattgacctctctctcctatttgctcccacacctttgctacccatgattctttatcattggctataaaaaataaagtcgaaagagactcttctaatgacgagttaccacaccatctatctttctaaaatttgacccttgttccattgcccaccgagaaatgagatttgcttataaaggactccctcccatttctaatagcatttcgcatgctcaccctataaccactcctcaaaacctttaagcactatcccactttttaatatctttcttttgataggctttgagtgcaatcccacttccccttcccaaacttttgtgctataacacttttccatagggattccctcgtggtggcgtatctcgaactcaacttgctaaggtgtgccttgtttagagtagagactagagaggtttataatgccaaggcctaatccttagtactttggaggtttgttattcccatatgggttgtggtacttcatagttgtataggtttacttaacactttggaggttcataccttttgtttagtgtttttttattttttggaggattcctcattcctcatccttcttttgtacctcttgatacctaacttaatttattacattgttttttctcataaaaaaaaaaaggataatgccaaggtccccaaattttttgttcgagtaggccatggaccaattaaccaaatgaggttttttcattgttgcacatccaccctaaaggaaattcctttgaatctgatctaatcttggaatcgcctttttaagtagattggtaggctaaacgaagtcccttttattagggcgagtctccttgctttggaaaaaaattgcctcttccacatggtgagccttttttggaatcgtcttccattccatcccaagcccttactgctttgaaaggagctcccaaaggcaagcctagatgtatggtgggtagatgctccaccctacatcccaacgtagtggcaagacccttcacattttcagctcctcttaaccaaaattagctcacttttctttagattaattttcaatttggatattacctcaaaccacataaaagaccgacttagatactctaaatattcttgactagtgtcacaaaaaatcagggcaacataagcaaacaggagatgggtcgtttctaacccctcacctcctctactacccaccttgaagccctagattaagcccccttcctagctctcctaagaattcgactaagcaccagggttcccctgctcaacaccctggggctctaaaaaaatctaggttgagtcccattaactattaaatagaactaaaaattttgttgtggagatgcaccatttgatctatctaatccaatgaccattttctccgtgattgtcattaggaaatcccatttcacttggtggtgtcccaactttctttataaaaagctaaggtaaaaccatcaagacctagagctttttctttgtccaatctgaaaaattgctcctcagatttcctcttctgtaaaggatgctgtagccaactaagagattgaagaccaatccaaccttctaacctccaagtatcctcaattgatttgttgcataggctggcaaagaaattcaaaatctcttttgttatactttgttgatcctccaacaacgccccatctacaaacacaagagacttgatatatttctttttcctcttaccattttccactttactgaaatacttggagttgtaaaccccttcctttgacccactttaccctagctctcttaatgacaattgctcaagttcaatctttctagcatgtctcaatgctgctaattcacttgtcaaagcaccttccccttcacaagaatctaccatgggaatgtcttttaagatagtgtctttcttctcttttatatccctaaaggtttccttcctccaattttttaattttgctttcatgaatggcaatgaccttctcatctcatctgtcaacaggtggatctctttaccaagatctaacatcagtcttaaaatcaacatgagataaccacatattctcaaaatctaaaaggacctaggccctatttaaaaggattggagtctttttcttcagttcttctagacaccttggatcatttctggttttagtagtcattttgcaccttgttcaagtttcttctttcctatgttttttcctcttttctttgtaaatggtaagcattcatcttcaatagccttcctaactcctaccatatttgggtttgactccataacgccagttttggatttcaggaatgagtcttgcctaatgatgagtagttgtgtgctggttaatcttttttgtctgctcttgtacctgaagacagcttgaatggaaatatatctcttcttggaatcctgctctgacccagagtttgaattcagatttggggtttatggcttctgttgctagttttgggcccaggatctctctgggtgcacacaaagagacagatgcaagaggactacatgccaatgttttaagcagttatttgacaccacctagagggccgtatggcagaagctttaaactttaagatatgattgtagaccacctgactcaatcaaagctatattgaagtactaatagagtttttagccttccaaaataggagaggtttttcaagatttcaaatttgagataatgtgtaaaatttgtttaaagattggataaagttgataagacgcattggaccttatttgaaagaagttttgaatttgatataattccaaaacatcaagtagatttgaatcttcaatgaaatttgggaattaattggaaagttaattgtagaagttgcttattttatctatgaaaattgtgaataattctaggtaagatcagtagagttccgagtttggtgcaggaaaggtaaggtagacaagctaggccttttaactgcctgatgcctaattgtacagacctaaagtctgtacttccagaatgaactgttcatctagatgatgcttgtgatgctaaaaattcaccttttgaaaggccaattgaatttcccctctattctagttatttttttgcattccttccttttctagatgagtcccattatgaactaattacaattgttaaaaatttagattcctcaaagcactgttcagaagctcctagcaac

SEQ ID NO: 11390 - DNA, 9232 bp, Vitis vinifera
  Intron number 4 from transcript GSVIVT01023397001 (locus G SVIVG01023397001) derived from phytozome v7.0 (chr-ID chr1 4; pos 12583823 to 12593054 reverse strand)
ctttggaagagctgacttgggtaagtgggcttaacttgtatcaaaaactatatttgaaaacattgtttccaaaatgattgaccatgttttttatcttgattggtattaaaaaaataattatcttcatgtaattattacctttgaattagaaactgcaattacataatttatagtttgcaatttcacaaaagaacccaagtttaccttgaaacatttaatgtgtttcaaactccaactacatttgtgcatttaatgtaaacatttttactttttgcaagatagttatccataaatcatttcaaaaatgttagttatatgtgtattctaagttgaaacttttgaacaagctggtaagtctttgttgtaaaataaattataggtggttttgttagtcgaaacattttgtcaactagtttctagtttgtagagcaaggacaatcttgttggaaagtgtcttaaattcctaattagtatagattcctttttgtaaagaatattgtatagaatatttcctatgttgatattagacttccttatagaataaggaaagttattagcaatatctctataaatattataggtcataagaggaaaaagtaaagatgggcttgtaaagactatacatgagatgtgaggtagaatggtagacactcagtggaataagtggactcatggctcaagatgtaaataaaaggaatgggggtgggaggggaggagaacataggatgttttgggaacccaatagttatatctgattccattctctgtaatattatctatggtataatagaatgattctctcatgtgtggatatagaaatgtttagttaaaccgtgttaaaaccttacgtacttttgtgtggattatttatctttgtgtttttgaactaaccattaaaacttccattgacaaaacaaataagtatcaaagcataggttgaagatttctgagagagttaaagagaacagaacacacaagaggataacgaaaggaattttggttgaagatgaagttgattattctcttattgagatgtgatacaaaaaatgtgtatcatggagagagaagattgacttaatagaatttgatccaaagtggaaattatcagaaagacttgataaattgctgaatgaatattttcatatatcttaatggtatttatacaagctatacaagactactttaggataatcaactatacaaagtgttaagagagagggaaaagaaaaccttgattctcattcattgtgtatctacttacaattgagaaaatatatatatacaaggctaggagtcctaactaccatacatgtgacctatattaaaaaaggaaagattgtacactataaattcattatattcaacactccccctcaagctggagcatatacgtcatatgcaccaagcttgttacaaatgtatttaatcctaggacctctgagagatttagtgaagatgtctgctagttgatcatttgaattaacaaaacttgtagcaacacatcctgatgtgatcttctctctaatgaagtgacagtcaacttcaatatgtttggtcctttcataaaagactggattggatgcaatatgtaatgcggcctggttatcacagatgagtttcatctgttcatcctttccaaatctcaactcttgaaaaagatgtctcaaccatatgagttcacatgttgccaaagccatagctcgatactcagcttcagcactagatctggctactacatcttgtttcttactcttccaagatattagattacctccaataaaaacacaataccctgaagtggaacgtctatctgtgggtgaaccagcccaatctgcatctgtgtaaccaacaacccgagtatgacctctgttctcgtacaacacaccttggcctggtgtacttttgatatatcgaagaatgcggattacgacatcccaatggctatcacatggtgactgtaggaattgactaacaacactcacaggaaaagaaatgtctggacgagtaatggtgagatagttcaatttacctacgagccgtcaatatctcccagggtctcctaaaggcttcccctgtcttggtacaagtttgacattcggatccataggtgtgtctatcggttttcagtctaacataccagtttcttccaggatgtctaaagcatacttcctttgggaaaggaccacaccggaactggattgagctatctcaattcccaagaaatacttgagtttccccaagtctttggtctgaaagtgggtaaaaagatgttgctttagtttctgaataccatcctgatcactgcctgtaatgacgatgtcgtccacataaacaaccagataaatacaccgccccaaggagttatgatgatagaaaactgaatggtttgctatactgcggagcatgccaaactcttgaacaacagaactaaaacggccaaaccatgctcgaggagattgtttcaagccatatagagaacggcgtaacctgcacactaaaccagactccccctgagcaacaaaaccaggaggttgctccatataaacttcctcggcaagatcaccatgaaggaaggcatttttaatatccaactgataaagaggccaagaacacatagcagccatggagagaagcaagcggacagaagcaatcttggtaacaggggagaatgtgtcaccataatcagaaccataaacctgagtatagcctttagcaactaagcgggccttaaggcgatcaacttgaccatcaggaccaaccttaactgcatagacccaacgacagccaactgtagatttaccagagggtaaaacaacaagatcccaagtgccattagagtgcagagcatccatttcatccaccattgcctgtcgtcagcctggatgggaaagagcttcatgggtgctctttggaaaagaaacaaaggatatagcagaaacaaaagcagaatagggtgaagataatcgatgataactaaaaaaattgtaaataggatgaggattacgagtagagcgagtacctttctgaatagcaatgggtaaatcatcaggagaaggcagagcgggggcaagagaagccgaagggataggaagtgagtcagcaggtgcctcagcaaaagggagaggagtagcgacacgagggcgacgatgataaacctgaagtggtcgaggaggctcaacatcagagggggagacaatgggaaggggcaagacttcagaaacaggaagaggctcagaagtggtggaaaagaatgatgagtcctcaaagaaagtgacatcagcggagataaagtatcgatgagtctcaagggaataacaacgataacccttctgaagtctggaatatcccaagaagaggcacttcatggctttggcggaaagcttgtcctgtccaggagtgagaatatgaacaaagcaagtacaaccaaagacacgaggaggaaggaaataaagtggttggtcagggaagagaaggaaatgaggaatctgatcatgtaaaacagaggagggcatacgattaatcaaataacaagcggtaagaacagcgtccccccaaaaacgaaaaggaacattactatggaggaggatagtacgagctgtctcaacaagatgtcgattcttgcgttcagctaccccattttgttgaggagtatgagcacaagaagactgatgaagaatcccattatgagacataaatgaagtaaatggggctgaaaaatattctctggcattatcactgcgtaacacacaaatagaaatattgaacggggtctggatttcagcataaaatttttggaaaatagagaataactcagctcgatttttcattaaaaataaccaagtacatcgagaatagtcatcaatgaaagtgacaaaatactgaaatcctaaagtagacgtagtccgacaaggaccccacacatcagtgtggacaagctcaaaatgagactttgcccgattattcaaacgctttggaaacgagacacgagtatgtttcccaagctgacatgactcacacgaaagcgacgataaagtggaaaaacgagggaccatcttttggaacttggagagactagggtggcccaaacgactgtgaatgaggagaggagcatcagtggaaatgcaaactataggagatgaatccgaggtgaggtgatagaggccttgagactcacgtcctatgccaatcgtcttccccatactccggtcctgcaaggtcacaaatttatcagaaaaggtaatagagcaattaagagtatgagtgattttgctgatggaaataagattaaaatgacattcaggagtataaaggacagaagtgagaggtagagaaggcagaggaagggccaaaccaatacctttagttacagtttgagaaccattagctaaggtaacggtaggtaaagcagaggtagtagtaatagaggagaaaagatccttattaccagataggtgatcaaaagctccagaatctagaatccagggtccaagagaagatgtgtgggtaaggcaggcagaagcattaccaggctgggcaacagaggcaatagaagcctgagatgcctgagatgcggaggagctcggaggctgaggcagctgagaatcagaggactgggccacatgggcagtgcgaggaggccgtccatgtaactgatagcaacgatcgcgagtgtggccaagtttattgcaataggtgcaatgaggacattggcctctacctcggttaccactgcgtcctcctcgagaggtagtgtgagaaactaacacagaagaatctgaaatgctatcagatggcaaagtctgagtggacgagatacgaaggaggcgagaaaacacatcatccaaggacggaactgatgaactaccaagaatttgattgcggataggctcaagatccggacggaggccaataagagtaaggaccatgaagaacttatcaagctgtgtttgttaagccccaacatcaggagtaagaggcatcacagtcaagaactcctccttaagagaggcaatctggccaatataagtagatagatccaagtcctgttggctgatatggacaatagcaaaagccaccttataaagatgctggatatcattcgtgtataatcctttggcctgagtccaaaatttaaaacaagttttgtaggcccgaagatgaagaaggatcttgggatcaactgattgccataatacactacataactgggcatctatctttctccactgtacgcgctcaacctcagggatatctgcctcctgtgtaaccaagtgatccccatatccttgtcccataaaccaaagttcaacagaggcagaccaagaaagataattttcactgccaaccaatttctccgaagtaatcataggagatccagatatgacagaggaaaaaatggaagttttagtagccatatccacttatctggagaatgaagtatatttggatcgaaaagagccctaatacggcttcagatgcggctgaagaaggaaaaaccgaagaatcgcctgtgtgagagaccaaatagaaaagaaaaacaaccgtggcaccaccggaaaggtagaagaacacttcccaaggcacgtgcagggattggggttgagaaaaaatagccggaggacgtcggaaaaactgttcagagggccggcggaggcaaaagaaccccaaaagaggcacgtgcagggctcggatggcagaaacaggtatgaagggtggctagtcagtgtcaggcgaggctggaggaggaagcgcgtcgccggaaagtggctcacgcatcctcacgcgccggcgcgtgagatgcagtagccggccggaaaaacgcgcgtggccggcgtgtgggtggttttctggctccggtgctttgggaaaaattggagatctcctccaggcgctccttgcagtgtcggaaaaagacatcgccgggaaagttcgcaggaaaaatcgccggcggtgaatgttttctgacgacgattcgaccgaccggaaagctttggggtctggggaaggtgaccagaatgaaacacggtcataggaatgtttcccggaattgatatcacgaggaaactggaaagaattaggttttctcccttggctctgataccatgttaagagagagaaaaaaaaaaccttgattctcattcattgtgtatctacttacaattgagaaaatatatatatacaaggctaggagtcctaactaccatacatgtgacctatattaaaaaaggaaagattgtacactataaattcattatattcaacacaaagtaatagacaaccatacagaataatatgcaattgtataaatcacaactatacaattaattatggttgtatacacagttgtacaaagctgtaattcatagttgtatagagctataaatcatagctaatcacagttgtatatgctaactatccacctcaagttggtgcatagatatcacatatgcccaacttggataatgatgcataaaatggatcactagtaacaacatgagtcatcatatctgccaattgatttgcactcttaatgtagggaacctttatcataagccaaaatctaggttatccttgatgtaattaccatgaagttcaatatgcttagttggatcgtgttgtatcggattatttgcaatctcaatagctgttgtgttttcacaaaagagcaccatagatatcttagaaccaaacccaagctcacttaagagaattcttagttaagtaagtttcggagttgcatgatggagtgcatagtattcaacttctgcactagacaacaagaccacattttgtttctcactcctttgagtcaccaaatttcctcctacgaatgacacattccctgaagtagactttttctccaatctagatccggcaaagtcggtctatgtaaccctcaatatatagatgtctgtgtctggagaacataaaacctttgcttggagaggactttgggttggccaagatacgatttactacatttatgtgtcgatcacttggattatgcatgaattgacttacaacactaactacatatgataagtctagtgtgggttagatagattaatttccccacaatctctaatatctttctttgttggttggaatcttatcaggatagatgtacaagcaatgatttagcttaatgggagtatctataggttcataagcagagttactaatttcaaccaagagatctaatgtatacttccgttgtgagaggaaagagtacttgtttgaattaagacacctcaatgcccaagaagtattttagagcacccaagtccttcttgtagctactataagaatcacttttgctttcttttcctctaactattaagatgtttcagtttgcttgtagctactacgagaatcactttttctttcttttcctctaatagtcttttgaagcgctaagggcataagagtttgagtacttacctaagtgggctaatgaacatgaggcactacgttttgctaggggttaagaagctttgaagtctttttctttcttctttgtttagtcctccattagaccctttggaatttgaggcctctttgttgggactatcttcttattaggccataagagtctatcctccccattgtccatcttatgtgtttcagctattattacccttcataaaggattgtggcttcccatgaagtctctaatagtttctcctttgcatctcttggcttcttgcaataagcacaacgttttctatctttattattttgtggtctaagggtctcattcttcccatttgtctctctagtagctacctcgggatcgacttgactatagctagagctaatccttcatttgttggggcttctaacatgactattctcctactagcttctaaccttacaattgaaaacacttcgttgaggaatggatgtgtttcttttctaagattctgcactctaatttgatcatattcaacctttaatccaagaagaagttaaaaaattctctccctttcaacaaacttctatagcacagttgcatcttcattacatttcatcttgaaattttgataataatccaagtaaagctactaactttttaagtacttaattacgtataaagtacctttttgatggatgagatctttgttttaattttgtaaatcgaagcagcatcttttaccttagagtatgatttcttagcaacctccaaaatctcttcacattttgagaaacgtacaagtcccactaatctcccattatattgagttccaaagccaagatgttatcattaaatcctcttcatcctatgtaacaaacttcagttcttctaggcttcgcactagtccaaataaatgtgttagcttcccctttcctttaaggaatgtcttacaagttgactctaaaccaaataattctagccattaaatggcacctagagattttggtattcaccggtggaagagtgggttgcggtttgattggaattttgggtggatagatatggacattactagatatttcagacatattgagaaagtgaataaaagcagagagactgtggaagaaccagcaatgaaggctgtatttctctatgtgaagagaacatgggaggaccagctatgaaggttgtatttctctacgtcgatttcagcaatgaagaccaaaaattgttcaaagttgcagaaaagaagactgcacttggttatggtaattaaggttgaacaacaaagaagaaatttcaacagaaatcttgctctgataccatgtgaacattcatgaaattttatttcttgtattgatggaggaattttcaatggatatatatggagtttacgggaaaaaaataaagaaattttatcctagaatatgttgaatatagacaccattagtcaactatacaatcaagaacggaacccctatatttgtagccctaattttgtcattgattgacagcctaaaatcaatcgcaatgagtcaagctatcaatcaatcacaatcaagctgtgaatttgcacagtcaaccaacactgcataatataggttctgctttgaaaacctgcctggtgctctgagaattttatgaacaaccacactacttagacctgtgttgcacactctttaattgcatgctaaattgtttgtatcacctatggctaatttgaaattggtactgacttagattgaattttgatgaaagtacatggatttctcattgtttggttactattataacatgctttaagtcatatgcaggatt

SEQ ID NO: 11391 - DNA, 4454 bp, Vitis vinifera
  Intron number 1 from transcript GSVIVT01009066001 (locus G SVIVG01009066001) derived from phytozome v7.0 (chr-ID chr1 8; pos 4653697 to 4658150)
aggtgatttgttgcagtgttgaggatattcccagtgaaatgggttctactcattgagaattactttaattactcttatgtccttccttctcagtggttgtacctgtgccagcgcttaaagccgtgtgcagtatgtataaaggcgtggcatatggaattttatctcttaacagggtattggatcacaagcacccccaacacaatcacgggattgaggcgaaatagacataatagcatcctcccacgtagaaattgttgactttgatcctcaaacaagaaattgttaatacctaaatataagattctaacaattttaaacggatttacataattaagaaaaatttatacataattaaaaaacgtttagtcacgtctaaaatttcccgttggatagaattattattttatcaagagctttcatacaataccaatgccatttaatgtgccgataataataacattatcttagcaatgtataataacatttggcactttcatctttacgtttgccttaatgagtaaattaccaattaaaaatattgctaagaagctctaaacggcattttgcattggagatgctctaaaacatgtgttaatcacacatttctaagtctcttaactctggatctacttcattaaatcaggaattgtgaggttaccattaatagtgaaaaatgagacacacacttcccaattatcttactattataacctcggattctccgccggcttggctgaatctaagtactgggtgtgagggtttataagtggatatactcaaggcaactaagccttttttttttttttttttatgaagtgagatcttatactttgaaaagcattggaagatcaactaaatctatttttctacggaagaagtgagatcttatatatatatatatatatatatatatattcttgttttgtataagtggataatttattttcctaagataatttattcctaagaaaatcttacttcaagtattttatggaatctaaaaatttaaaatttttatttttatttataatctaaatgttaaataaaattttaatattaattttataattttatacaaatttatgatttctcattttagtaagggaaattttttttaaaattatataaatatgaatttttcttcattatttagaagccgttaatgttcttttgactcacacgcatataatatctatccgattaaaattgcaccattaatatgtttgtaatatctcatgttaatgttcttttgactcaaacgcatataatatctatccgattgaaatagcaccatgaatatgtttgtaatatctcatattgatcggggaaaatagaagatatttttttatgcaaacctccacaacccgcttaaagaacgaagaatcgaaaccatttaatgtacgcgtccggacagatagtaatggagcagagccatttccatttctctttcttcaggtatgcactaaccaggaagcacccaactttctcccttcccattttccttgttggagtcagctgtcttcagtgtccgtatctagtttttgttccgctatcacactcctttttgttccgctatcacactccatctagttatgtgccataattccctttgtcatattctgacggaaaaaccaattaaatccttaatcatcaagctaaaacatttgttctttgaaactacaaatttaggctctatgtggaccccgcatttcggcttaatgcgtttcccactcgatgacgaaactcgatttttatttgaaaaaaattgatttttattgattaagaaaaatgacttggagtcgtcacttatttttgttttatttttaaagggtaaacaaaataagaaagaaaaaccctaagtgtaactccttattttggaaaaggtggtctgtgaaaaaccggatcgggttcgggggttaggttacttatcgggaaggtacggtaaagaccatagcacccctctaagtccctaaaaacgggtctctactaataaaatgaagctaacatggcaaccaatgagaaagtcaatgaatactcaaatcgatcatgcacgtatgagtatcagaatatgcaatagaggataaccgaagtgaaagtggatgcgtacctgatcagcaaacggcaacgcgctgaaagaacccttttccagtaaggctctgtttagctgtcaatgccttcaatcctcctccaatgtcgacaaagccaaccagcttacccttctgaacagcaccccctcctcctgcagctccaatgaacccctccgaagctcccttctcctctccagctcaagagatcactctctcagccaaaagatttctcctctgccccaaaaactgcaaaacccccacaaccttccaaaagcaacctcactttctcagaatccttcctcccttcctgcctcaaaatgactaaacaaaagctctcccctcaaaagatctctgcagcctccaacttctctctcccctcgtttttcccctcaaccctccgtgtcaagatatcttcacctcttttactaaaagcccatctctgaaaagcatctccctctctgaaaaaaaatccccaacggcagcccagaccccttctcctgcagctggcctgctgctcctcaacagaaacgtacctcctctctaacggccagaatatctccatgccacgtgtcaaactctcactcgctcctcaattccaccatctgtttctatgaccaccaaccacgaggcgacacgtggctccttgagagccctccacctgcaaagaattataacctgtagagatgcaaaggaatgagccccaaatgggggtctacactctaatattaaaatttatttttaaaataaaaaaatagatactatatctattaatgtttattacttatttttaagagttttgggtcaaaatggtcattttaaaaaaaaaaaattgtaacatctaaccactctttgaaacttatgttcaaattaggctctttggtaccacgtagacgccgtcttcattaaaaaatatttttttcatcattttagttaaagtcgcagttgataatcgcgatttcatttttgaactaaagtcgcagttggcaattgtggcttcatttttaaactaaagtcgcagttgacaattgcagttttatttttgaaaaaactgtagttgtcaactgagactttagttaatttttttttaaaatttaaaatttaattaaaaattattaaattacaaatttatgattgaaaaattaaaatatacttaaataataaattatttatatttaaatttaaaaatctagtattacttcagcaaacataaattgataaatagaatatattataaatgaatattttatttattaataaattaataatcttaaaataataaacttgtataacatataaataatatataaaattgtataatttattaatttaagatatttaatttgttgttttttaaaatattaatttatttgtattatgataaatttatctttatcgaaataattgtatacttttaagctgcaattgataactaagatttcaattataattttttttactttcaaatttaattaaaaactattaaattacaatttatgattgaaatttaaaaaatatacttaaataataaattatttatatttaaacttaaattatttataagaacatgttcatatttaaatataaataatttattatttaagtatattttttaaatttcaattaatttttaattaaatttgaaagtaaaaaaaaaaaattataattgaaatctcaattatcaattgcgggttaaaagtatattattattttgataaagataaatttatcataatacaaataaattaatatcttaaaaaacaaaaaattaaatatcttaaattaataaattatataattttatatattatttatatgttatataagtttattattttaagattattaatttattaataaataaaaatatttatttgtaatatattttatttatcaatttatatttattaaagtaatactagatttttaaatttaaatataaataatttattatttaagtatatttttaaattttaatcataaattataatttaataatttttaattaaattttaaatttttttaaaaaattaactaacagttaacaattacgacttcaattaaaatgacgaaatttttttttaataatataatatttaggtgttaccaaaaaaaatcaatttgaacatcataagtctcaaagtggcggatgttaccattttttttttttaaggttcattttgacccaaaactctatttttaaaatctggttttcaaaacaatcatggaggatgatgagttgttctccaaagacgttcaaataaatgtatttataatttagaaaatggtaaaaaaaaataacaaaatggaagaaaaataataaagaaaagaaaagtttgacgatgataaaaagtcacccctaggctctta

SEQ ID NO: 11392 - DNA, 4100 bp, Vitis vinifera
  Intron number 3 from transcript GSVIVT01013336001 (locus G SVIVG01013336001) derived from phytozome v7.0 (chr-ID chr1 2; pos 12293724 to 12297823 reverse strand)
tttctgaagacgacttattgctcgtaatgttttgtcatataacatttttttaatttgcaagagaacaaatattttgcttgcaaattgagaactttgcttttgcacaaataattaatgcattaattttttacaatgcatatgttttgggatcatgattgtttttgtagttgtatcaatattttatagtaaatttattaatatatagcataaactttgtcatttccatattcaagtttctataatcaaagtaaaaaagccaagtaaaaatatgcttggaccatcaatcaatggagttaaagtaacattaaaaagtttaatatatattatagtatttgtctccacaattaatataaaaatcaattagcacaatgcacttattaaatattcatacttttacgaatatgtcaaaaatttaatcatgagtaccaaggttcttcaattccacttacttcttcattatgcattttttttttaagaaaggatatcttttgtcaatgtttttgttttgatcatggaacatcatattttttgccaatgtagatgctaatttatggtccatttggatctcaattggtttttcttatagcatgttaagctttttttttttttttttttaaaaattttgtcaaattacctaacaaacacattgattgatgttaaatattgttgggacagtaaagtagaaatcaaattttgtgtgatatttgcatcaattgtattgtccaatcagtcaaatttgtgctaccttgcatatgctctaactttcttacattttttctctattttttaatgtcttgaaactattttgagtgaataagtgcatataagggagcttagtcaaagtattgaaatggagtgagaagagtacaaggacatgaaataggaaagggaaggaaggagggagggaggagggaggggggaggggggaaggggaaaggggaaagggaggaggagagaatgcataatgccattttccattttgggatgatgacccatggtgcccaaatttgcaacctcccctttgcttattgccactttgggtgcaatgctttcctaagggtgacaccagctctattaaaataattgtttatgcttggacacatttttttttggaatttttctcctatcctttagatctttgggattaaaatttctcaacatctctccacgttaaggcaaccttggaatggtataaatatcccattttgcagttggaaaggggtttgtcttaaggcctctttgatatatttttagggttttgatttcttcatgttttagtttagattagtgtagatcccttttgatgtaatcttgatttggatgttttcctctatctcgcacttccgtgcttagataatttttggtaaaaatcaagtatttcatatttttattttctatatgtagagcacatggtcacaagatatttagtaagaatactatattgaaaatatctatcaaaatactattccatgatcttgacccattactacttgaagttatataaagcttttgtacaattcaaaactttatttttgtttccttttactttataacccatgatttgtttcatatataatttttctttatgacattcatttaaaaaattgattttgatcacacttttagtaaaatttccatgtattttaagctatgaaagaaattataatcttttggtttctaaaatatcataaattatgaaaatatcaatagtgaagttttatagaaatattaggaaatataaaaaaattgaacaaaaatttggaaaaaaatctttttaagacaaaaagttatgaaaattacataaatatgaaaaaaaaatggtaaaatagataataataatacatattgaagttggtttaatacatacatacatacatatgtgtgtgtgtgtgtgtgtctttttaaaacaaaaaattatgaaaattacataaatatgaaaaaaaaaatggtaaaatagataataataataatacacactgaagtttgtttaattaatacatacatacatacatacatatacattgaagttggtttaatacattctcttgattttaatttagaatttcacatggtatcaaagctttctctggtttctttgtatgcttgatgaaaactttgagtgctacctatccttatttgaagttttttgtggtgttttgatttcttgagtttcattgttgatttatttattattcgttttgtctccattcatcactactattatgtttgaaatattgaaccatactcctgctaccagagttctattaaggcgacattcaaagcgctgctaagctaaaccatgagggaattgtagaacttccaagctacttagcaccttattgagaagaattatcttcaatattcttagttagtgtgaacctccctaaagggtaaaggaaaattgaaccatttaattggcatatgactaaaacttggaaatctaaaattttagagttgggatgaaaaggattctatgatcatgtcttggttatggaattcaatgtcccctaaaattagtggaacatgtatgttttttacaacaactagggaggtttacaaagccattcaacaaacctattcaaagatatgagattctactcaaattttcaaatcaaggtgaagatttcaactataaaataaggaactagatttgtaattaaacttgccaatattatgaagaatttgtgataggaaattgactactaccataacattcaaattaaatgccgtgaagatgcaatagtgccaaaaaaaattatagaaaaagaatgaatttttgaatttcttgctaggcccaatttatagtttaaccaagtatgggtctaagtgctaggaaaagaggagcctctagccatgaatgaaatcatctccatcatttgtgctaaagaaaatcaaagaggtgtgatgcttgaaccgtattttattcatggtttttccatggttgctataatgccaaacaaattcaacttaaatcttgttagagaaactgggcgtcttgataagttgaaaattctcaatcgtgaaggactttagtgtacttactactagaagccctaaaacaccaaagagaagtataggaaacttaatggaaaaccttaaaacttggattagaatagggaaaataaagcatggaaaaatcgtaatcaagaaattatggcaaattttgaaggaggcccttaagaaaaacatagtttcaatagtgaagaattgggagaactaaacaaagaagagatagaaaggctaagatattttttggtactctgaataaataattatgtgttctttggcacaaacaagtaagtcttctatttctcataatttaaggcaatctttgatttctcatactttaagggcctcatatttatccttcattggctcttgggtcattgactcaggagacatagactacatgatctaatcttttcctaatgccacaatgcttgaattaaaccagtttttaaaaaaatgaattggatccttctgctaacattagtctagaaactattgttataaaaccattgtaagtttactcaacaagaagaacaattaccattgaacccatgtatactcaagagtctgaactaaggctaggtaatagctctatctctcctagtacaaatagtttatcgagcattattttgagcaaacacccataaaggtggaacatatatttcaatgggtgaagacactttcccctactttttgctatctaccattgtgcttcaaaatatatctacatatcatacatgtgtactcctatttttatagtagtcacattagtataaatagttgattgggcatcattttcagttgacttatgagggtttaaacttgctccacctcttttaattaaataattttagatattacaaattatgtatatgggagatattaaaaaaaaatgtataatatgcattttctttactagctacatggtagcattttcttttattggtaagactttttaacttaattaatgaataattcattatttgaattaatgcttgaagtggataagactttttaacttactaatttgtacttcttatgatgatatcttaccaggaaggtgacaaagatctttgtgggagattttggaa

SEQ ID NO: 11393 - DNA, 15738 bp, Vitis vinifera
  Intron number 10 from transcript GSVIVT01032933001 (locus GSVIVG01032933001) derived from phytozome v7.0 (chr-ID chr 14; pos 24263595 to 24279332 reverse strand)
aaccaaaagctcctaaacagaagtacttaatagaggttggtttattacgtctgatatcctaaagtttgtgcttcttgagagtcttgaaatctggtcccacagtaatatacggttgaaattataaggcaggttacaatgtctttttcttgattatgatctagtctaacccctttccctggactttagaacactttaaatatcccttgaaacttcaacagagtacttttgtcttaacatgatagaatttagaatatgacggcttcaccatttcacatctttattctttttaatcattcaaaaagttttttttatattttaaatctcacataataattacactgctctgtatatgtgtgtgtgaaactgtcatttagccaaatatatcacttcatagattattggtaacattttaacggatatgctctgcacatactggtgtttcatagggtttgatgtttgaaactaaatgttatgtattccaaaattgctttggaaataaatgaatagcttttaactccattaatgcatgacccctgtgttggtgtgagggacttcctctttgaagaaaatacatttacatactacttctgatatatgaattatgaagcagggagtagacagagctctgttttcatgagtgatgggtgtcataataggcttgggtagtggagttttgggatccttcgggagaggaaggggtttggagtcctagattctctaagccctctaagtccttcaacgattgggaggtggagggaaggaggcttattcctcttttggaagatagaatgctgtggaaagagacttcgaatgggattttctcagttaaatccctttataatgatctagcttcaagaagagttgatcaattcctaatggtatgatttggagtccttgtgtgcctaccaaagtgagctttttcgcttgggaggcatcttggggtaaggtgcttactttggatcagcttaaaaaaaggggccagattcttgctaatagatgcttcctttgctgtgaggaaaaagagtcaattgatcatattcttattcattgcactagggcaagagttttatgggagttattgtttgctctttttggagttacttgggtccttcctttttcggttagagatacccttattggatggtgtggctttaacttgggcaagaagcttagaaaggtgtggaaggcagcccctttgtgtcttttttgggcgatttggaaggaaagaaataggattgcttttgataatgaggaattttcgattcattggttgaaaaatcattttgtttgtaatctttggtcgtggactaagtcggttgtaaatgaaggtcctcttcctttacttagtttttttgattggctaggcgctagttgagggatggttttgtatcttctcttcttttttttgtgccttaaggtgcctcttgtataccccctgtatgcttttgggttagcctcaaggtgcccttttctaatatatttctgtgtttgcctatcaaaaaaaaaaatgataggcatagacaagtagtggcttatgacttatgatgatgttagtaggatatggatatgggtttagtcctaacaacaatgaggatttcgtttggatatcatttatgaagttgtactgaagatcatacttggtgttgatacagaagggtctagtgacaatggcagatttaaaatccactgcttgattattttttgttgccttatatagacttgttgaagaggtgtgaattgtgatgtgggccaaaggggaaccaaaagctaaagagatttatcagaaaggcagtgttctccttcttgcatgtttggcatttgagatagggttgttatttgtaagaatccttttatttgaatgagtggttgtcaattagaaaagcaaatgcagagacattaggtgttctcaccagcaaaaggcgatctcttaattgagagtttgcaggttatctgagtgagtgctttgaagaataaagatttgattttttttttttttttttcagaagtaggttctgaaagcaaattcagttctatatggttctttctgctatggctgaattgagccgagaggcttcccatttcacttggccagagaaattcttctgggaattggctggaacaagggaaatgttggtgagattgattattgtttgttgaagctcatctatttgtccaaagcaagactaagaggggaaatccctatgaagtaaacaacctgtaagtgaggtagggatgggtatttgaaatttacaatgataatgcagttgctgggggtcaaggtcttgtttctccttgtttgagtggactaggttgatgaatccaactcacccatatgttgcactgctcatgttaacttgatagatggggcaaggggatgctggctagaaacagtattgtggcatgcctgaacaaaatttataatataggtggaaggcatctttttcaagttcagatttttggggagctgggtctaagtttgaggtattggacctcccatgtggaaggggaaaaaggaatagtagacatgtattagcatttatgaagacttcagagacttgcctcactggacctaggccctgagtgttactaatctctaggccaagtttatgaaatgaacaagtgtccagttactggcaggttggtgaaaggggcacagaaaggatcttttgcttaaaatcccattgagtgtggcccaaggcccccttctgcctgttgtcatatctcacaacaaagaattggcagagagttgaggttctcctttttagatcctgtgagtggcactttgagtgatggaaaaggtaaagttggaagcaataggtttgttttatgtcaataaagccttaccttcttctaaggtgctgctaggatgaaggcaaattaaggttaggatacccttgtaggcagaactgctgttggaacttggaacgacatggtcagtctaaattttgggttgaatttatctggagtaggacaagggtcaagtgctctaaggttgcaagctgttccgtctttttgatgtccaatcaagtatttttctcgaaggttgtcaccacgattgtggtgatggttggttttggatggaaccttggactttgattactatttggccgttaatggaaagttgctctcctctttgctaatctctctgctaggcacttaaacaaatcctttacctaatttgtctccctttcttggtatttgacccttatctaatcacaatggtgctgattctattgctgtatgaaaagtggtaccttttgctattagcaactcttgcctaaatgaaggcccttttcacaggaccatctcatttttgctaggaaagcttttccctcctgtgggaatttggtggtgactgcctctcctacaccataagcaaatccacccccacactacccccaaccacaacccttctttcctctgctttgtcttaacccctatctaaggtcttagtcctattgaatattcaatgtctggtccttgatgttgcaatgtatcttagttttatctactcctcaaagagggcctacctaaaaattaccccctccaataaagtgtatagatgtgctaattcaaattaaagattaaagtctacttgaggagatgactttgattctctaagattcataaacttgggtttggcgtttagttggttttgtctttgggttttgctgttgtgaatcttgtgatgatgattgggttgggtggggaaagaggtgcaatgttcttattatgaattaaaaagagccgccaaaagagcgacccaaggtatacaagaaacaaacttccttctactaccaaggctcaaacaggagaaaaacccaaaagaaatagagcctcaacaagtgcccaaccaatgaaagaaactcactaaagtcaaaggacaatcgtctaaaaacaaaggaggtacaatattatcgatccctttgaatgttatctttttaaaggagctaaattagaactcattgataagttgcttctgaaaaatgtttgggaagttaagaacgattgttttaagagaatgggcttgtcagctccctctctcctggagacactctctttacctgatcacacatgtgggaaagctcatttttttaattattatttattgaaaaattcccaaaatgtattgggaattttgcaaggtgctctattattgttgttgttgttgttgaaaagcaccttgcaaaattcctaaaacatattgggaatctagattccctcatatccttcaagaagcctttccaagtccaactgctaatcactctcctgtagtagtgaactctatccaatcaattggaggcaaactctttttcgatttgagagcatgtggctttatcacccggctttaggggttcagtctgggaatcgaagaaaggcacagtgtgatgagtaggaagagcataagtttatgcaatagcttaggtttgtcaaaattaagttcaaagaatggaatatagatacttttgcagatttaagtgagaagaaagctgcaattttaaggatgttgggttcttggatatctttggaaagttggtgctagatgatcaagatagtattttttggatgtttttgtatttttacaaaccagcttcatgaaagaggaataatcctaattgaaggattgaacgtttagattggtctccatatccaaaaagaacttgatgtggttggagtgctattctctgaggaggagattaaagattaacactcacttataaaaaaaaagattaacacatgtttacaatctattatagaaacacttttcatttctcttcattatttatggttcgattacccttgtttcagtgctgtttagggttcttttggaccatcagatgttagtcctgttttggcatgggaaacaatattggaagatgctcatgtttgatgctactcatgcaaaaataaaaataaagagtgaaatataataaaataatttaaaaccttggcaaattcttcttcacttttgaggtagtgagacatatttgtgctttagttttttctttgtccaagatttctttggttttgccttgctccaaaagtgaagaactattaaaggtctgctttatttgttttgaagctaaaaggtatattcatgaagtcttgattttatggtatggatgtatttggtgagagagaacctaacaaaatattttaaaggttttaaaatagtagcgtttttagtaaaagtaacagtgctatctttattgcttcttgtttccaagcgagtctgctaatagtattatagatttcagtgtggttgggagacaaagatcttcaccaaggtcctctccaaatgtttatggagatcaatccaaaagaggcttcccttcacatggagcttttttgttagggttagacagattttgaatgctgtgttgattgctaataaattggtcgaatgaaatgtttcactcagaggaagagggggtagtttaagattgatttgcgaaaagcttaccaccaccttgttagctttttaggccatgcttttttcaggaaagggtttagttctagataaggtatatgagtttgaggttgcttctcttttagcctcactattctcattaatggtagagcaaggagatggctagaggcctcaagtggtggagtgcttagggatcattatggttcaatgataaaagccttttccaaacttgcatgcgaaggtttttcttatgagaccaagactccagctcttctagagggcttgttgtaggccaaaattttgggtctctccaaccttgtagtgaagggagactacattattgtcaattcatcaacggctaagaaggaaagagggccatggaaatttgatgggtaacacacacaatttttttttataatatttttatagagatcggatattctttttcttaggttccttgcttagccaatcaagtggcataccttttagccaaacaaggagcaaagctgaaggtggcttttttaggagatcttttgtctccttgagccatacctaatagttatttgagctgttttattgtaacctttctcaagtttgtagattgttttgtttctcttttagggagtttctgtgtgtgtgtgtgtgtttctttctttcttttccttttgggtttagattgtacattgtgaaagaataatgcatcctccttgtctacttcttactaattgaaatgacatgtttgttttttgattaaaaaaaatggttaaaggcctcaaggatcttagatgggagatcctctctttccttttatttttattgtttgtctaatatacattgttagatcacttcctaattggtagcttaacatggtataagagctttgatagctagaggtttctttctttctatttatttgttacttatgatttatattttgcttcgccctaagatcattttgggctaaagtgtgctagctgtattactgtgtatcgggatcatcttggtagatttccacaaagatcaccatcttcgtggaatgtgggtcgaatggttggctcatttctcatctaggttttctattagatgggaatccttttttcttttttatcttttttttttaaatagaaacaatcttcttcatttatcttaaaaaggaaagtacaagaaggacaaacaagcctttaaggatgcacaaaaaggttaaaaagtaaccaagtgtcaagcctcgctagggagaaaaaatatgaaggagagaaatatagcacactcaagagggaagaaggtctctaacaaagaaggccaaatgcattgctccttttttagctaactagtttgtgacttgctttgctaaactaggaacccaagagagggagcaacctagctcattgacaacatccaatattttgcatatccaattgtcaaacttccatgcacttgaggcctagctcaagtggtatagggatggggaggttctaggttcaagtcctaatggtaacaaaaatttgcgtatcagaaaaaaaataaaaaataaaaaataatgacctaagatataatagtagtagaatctccctctatagttagggtggagaggcctaaagcttttgcctgcaacaaaccctccgacaatgccaaaatctctgccagagtgatctctaatcacacctccaatacctatttgaccaaggttacccaaggaagatccatcaaagtttaactttactaaacctactagaggggaggaccaaccaatcacaattttcttccttgacctgtttgagaagcaaacatttttccaatccaacatgaaaagaatcaaaggaatatctgcaaaaggtgttgaatataatgtatgtatagtatactatctttccttattaatataggtcatatgtatggtagttaggactcctagccttgtatatatatatatctctctctttcaacgtggtatcagagccaaggaagaaaacctaattctttcctgtttttccgtgtcatcaactccgggaaaccttccggtgaccgtgtttctttccggtcaccgtgtttctttccggtcacctttcccatctcccaatactttccggtcagtcggatcgtcgctagaaaccactcaccgccggcgaaattttccggtgaaattttccggcgaactttccggcgaactttccggcgacctatttttccgacaccgaccataccagaaggagcgcctggaggagatctccaccttttgtgaagacaccagcaccaaaagaggagccacgcgccgtccacgcgcgattttcggtcggcggctgcatctcacgcgccagcgcgtgggggcgcgtgaggcatattccggccacttccgacacctctccaggctcgtccggcgccgtcttggccttctagccccccggcagtcctccccgagccctgcatctccatttttttccctgtttttggctttcttgccattccggccacctccgacagggctccccctccatctccgaggcttgggtgctgcttctcttcctctccaggcacgtcacgaaccttttctccattgattgcacctctcacagccgtggtttcactttttttctctctccgccgaaatctgaacccatcttagggctctcttcgatccaaatacgtgaatatgaccaccaaaaatcagatctttacctctgttatctctggatctcctatgattacctcagagaaattggttggcagtgagaattatctctcctggtttgcttctgttgaactttggtttatgggtcaaggatatgaggatcacttggttacccaggaggcagatatccctgaggttgaccgcgtacagtggcggaagatagatgcacagttatgtagtgtattatggcaatcggttgatccccggattcttcttcatcttcaggcctataaaacttgttttaagttttggactcaggccaaaggattatacacgaatgatatccagcgtctttataaggtggcttctgctattgtccatctcagccaacaggacttggacctatctacttatattggtcagattgcctctcttaaggagcagttcctgactgtgatgcctcttactcctgatgttggggctcaacaaacacaacttgacaagttcttcatggttcttactcttattggcctccgtccggatcttgagcctattcgtgatcagattcttggcagttcatcagttccgtccttggatgatgtgtttgctcgcctcctgcgtatctcgtccactcagactttgacatctgatagcgcttcagattcttctgtgttagtttctcaaactacctctcgaggaggacgcagtggtacccgaggtagaggccaacgtcctcaatgcacctattgcaataaacttggccacactcgcgatcgttgctatcagttacatggaagacctcctcgcactgcccatatggcccagtcctctgattctctgttgcctcagcctccgagctcctccgcatctcagacatctcaggcttctattgcctctgttgcccagcctggtaatgcctctgcctgccttacccacacatcttctcttggaccctggattctagattctggagcatctgatcacctatctggtaataaggatcttttctcctctattactactacctctgatttacctactgttaccttagctaatggttctcaaactgtggctaaaggtattggtttggcccttcctctgccttctctacctctcacttctgtcctttatactcctgaatgtccttttaatcttatttccatcagcaaaatcactcgtactcttaattgctctattacattttctgataaatttgtgaccttgcaggaccggagtacggggaagacgattggcataggacgtgagtctcaaggcctctatcacctcacctcagattcatctcctgcagtttgcatttccactgatgctcctctcctcattcacaatcgtctgggccaccctagtctctccaagttccagaagatggttcctcgtttttccactttgtcgtcgcttccgtgtgagtcatgtcagcttgggaaacatactcgtgtctcgttcccaaagcgtttgaataatcgggcaaagtctccttttgagcttgttcacactgatgtttggggtccttgtcggactgcgtctactttaggatttcagtattttgtcactttcattgatgactattctcgatgtacttggttatttttaatgaaaaatcgagctgagttattctcaattttccagaaattttatactgaaatccaaacccagttcaatatttctattcgtgtgttacgcagtgacaatgccagggaatatttttcagcccaatttacttcgtttatgtctcatcatgggattcttcatcagtcttcttgtgctcatactcctcaacaaaatggggtagctgaacgcaagaatcgacatcttgttgagacagctcgtactctcctcctccatagtcacgttccttttcgcttttggggggacgctgttcttaccgcttgttatttgattaatcgtatgccctcctctgtcttacatgatcagattcctcactcccttcttttccctgaccaaccactttatttccttcctcctcgtgtctttggttgtacttgctttgttcatattctcactcctggacaggacaagctttccgccaaagccatgaagtgcctcttcttgggatattccagacttcagaagggttatcgttgttattcccttgagactcatcggtactttatctccgctgatgtcaccttttttgaggactcacccttcttttccaccacttctgagtctcttcctgtttctgaagtcttgcccattcccattgtctccccacctgaagctatgccccctcgaccacttcaggtttatcatcgtcgtcctcgtgtcgttgctcctctcccttttcctgaggcacctgctgactcacttcctatcccttcggcttcacctgccccggctctgccttctcctaatgacttacccattgctgttcggaaaggtactcgctctactcgtaatcctcatcctatttacaattttttgagttatcatcgattatcttcaccctattctgcttttgtttctgctatatcctctgtttctcttcccaagagcacccatgaagctctttcccatccaggctggcgacaggcaatggtggatgaaatggctgctctgcactctaatggcacttgggatcttgttgttttaccccctggtaaatctacagttggttgtcgttgggtctatgcagttaaggttggtcctgatggtcaggttgatcgccttaaggcccgcttagttgctaaaggctatactcaagtttatggttctgattatggtgacacattctcccctgttgccaagattgcttctgtccgcttgcttctctccatggctgctatgtgttcttggcctctttatcagttggatattaaaaatgccttccttcatggtgatcttgccgaggaagtttatatggagcaacctcctggttttgttgctcagggggagtctggtttagtgtgcaggttacgccgttctctatatggcttgaaacaatctcctcgagcatggtttagccgttttagttctgttgttcaagagtttggcatgcttcgcagtacagcagaccattcagttttttatcatcataactccttggggcagtgtatttatctggttgtttatgtggacgacatcgtcattacaggcagtgatcaggatggtatacagaaactaaagcaacatctttttacccactttcagaccaaagacttggggaaactcaagtatttcttgggaattgagatagctcaatctagttctggtgtggtcctttcccaaaggaagtatgctttagacatcctggaagaaaccggtatgttagactgtaaaccggtagacacacctatggatccgaatgtcaaacttgtaccaggacagggggagcctttaggagaccccgggagatatcgacgactcgtaggtaaattgaactatctcaccattactcgtccagacatttcttttcctgtgagtgttgttagtcaattcctacagtcaccatgtgatagccattgggatgccgtaatccgtattcttcgatatatcaaaagtacaccaggccaaggtgtattgtacgagaacagaggtcatactcaagttgttggttacacagatgcagattgggctggctcacccacagatagacgttccacttcagggtactgtgtttttattggaggtaatctaatatcttggaagagtaagaaacaagatgtagtggccagatctagcgctgaagccgagtatcgagctatggctttggcaacatgtgaactcatatggttgagacatcttcttcaggagttgcgatttggaaaggatgaacagatgaaactcatctgtgataaccaggccgcattacatattgcatccaatccagtctttcatgaaaggaccaagcatattgaagttgactgtcatttcattagagagaagatcgcatcaggatgtgttgctacaagttttgtcaattcaaatgatcaactagcagacatcttcactaaatctctcagaggtcctaggattaaatatatttgtaacaagcttggtgcatatgacgtatatgctccagcttgagggggagtgttgaatataatgtatgtatagtatactatctttccttattaatataggtcatatgtatggtagttaggactcctagccttgtatatatatatatctctctctttcaacaaaaggcttggtgtttgaggtccaaagggaagagaaaaagtaaataaagtcccaaatggcatctaacaatatccgtttgtcctaaaaaatacttgcattcccctccaaccatatagaccatatcaaagatattatgaaaacctacaacaggatcttccttgttggaaggttccaaagcctttaaaggagatgcccatcatttctgctatgcctctaggaggaactaaatcaagattagcttggcaaaaaatctatgccaaggtgcttgtgcaatggggcaatgaagaaagagaggatcaattgattcactattcagacacaacacaataaggcctcctcaagtaaagcatgtcattggtattaaccttcttattagccacaagccaagcaaaagtttgagcatgttggtaaccttctcattaggtgggaactctagcagcccagttttggaactctttatcagaaataactttgagcatgttgagggttggaaataggccttcttctctttaggtgggagcgttctagtttagttacaccttgcccatatccccatgtatcatatttctatttattttcgaaattcttatcaagggttgattttggaattgagagaatctgatgtactttcttggatctggttcagggaaggaaagggagatcctttaataagatggacagaggttggtatttaaggagtgaaaaggggttaggtttcaggaggaatctcagcacagttgattgaggttagtacttctaggaatgaaaagggattatgtctcaggaggaatatcaagaaaatggttatggaggtttatatggacagcaacttgttgcggcattacattattgaaagcatttattgactgcactaatgatgttcaggctgccaatcttgtggtaagatggtctcatcacaatcactcaaaagctatctcattggggcttctccatctcctttcatcagttcactattttgttagcaatgattccaaaattatattatgggaggatttgtggtggcagagggacatctttgccttcaataccccaatagctcttttattatagatcagtctccaatgtatcttgtccttttatttcccttacaagaggatctggatcttggttccctcagggttgttttccttgaagtccttgcctgtcctgtataaaaatgatatgccagttatattccctcaagctaaaattcatttggaagtttaaggtagaaagtgagagccttgcttcagatctagaggcttcttgaagccctcagaatagggtggttaaataatgtgtcatgtttttcctttgccttgttgctttgtagtcatgtctgagattgatcaagctggtgtttcctgggttacttctagaattgtgaccaatatgacaattatgacaattatttactttaagggccttggaaaaagtcccaggctcagaatgttacaaaatggaactatgcttgctatcttatgggtactttggttggaaagaaatggcaggatatttgaaaacaagcatacatgataatcttcaaagccattatggggtgcagtccactttgtcacttctttttgggtgtctgtctcaaagtagttttggggcactctgttgagcttgaatattgttagattggagacaggttcacattttctagatagaagctggggttatggcagaatggtatccccttccacaggtcggcatgatttcagcttttacacacatagttggaaaacttagatcagttggggattggtggtatttttgtagatcacataggcaaagatggttagagctatcttcaggctaactgctggttagtcatggagcaagagatcttttgcttgctcaaatgttatgttgaggcaaaacacctcaggcctttactattttggagtggaatgagactcttatcttactttcaggggaagaggaattcttgggggttaggtctggctctgtaaagtaataatagtgcttgctcttcggagctgctcccagctcacggttggaggtccaaagtggaaaaaggtcctgaggggtttcctgtttgctacagctggctactgttttgttggctgctctctccatgctttctacagcagcttcactgattatagagtggtattttctcctcttttctgcgctgtattggttggatacttcgagggtgttggggtggtggattcgagtggattcgagcgagtcaaaccatattactcttattcatgatatgtcactgttggaagttgcagaggatattagatatgctcctctttgtctttggcagttgttgatgcagtttacttctttcttagtatcctgttgcagttgtcttgttattctcaatagatttgtttgtttcttctcttggatgcctagatcatcaaacaagaagcaaactggctggataagcttgtcacctcttcaatgaaggattttgttagggattacatgcaatatctgagggattctatgttgggcttttttggatatatttgctatctagtttttcagggaaatcttctcaaacttttctcctgggaattttggaggatagctctcaccctttcctttttatatagatatatacttctcttttcttggaatcaaacccagaacctgactcctttgcccagcctgcctgagccaggcctaaaaatcatagttcatccttgtttttggttgattgatttgttaatgaattgttgcatttcctgtcctggggaaaaatgaaactaacctccgtctccatagccataaagaaagagtctcagctaagggggaactggggacatgtatgggtggggaatctgacccaacaagaaaaagctcttttttgttaggaatttgtgaattctttgtctgaaaatatggtcgattggcttcacctatgagaattgtgaattcttgattgttattcatcgaagctcatctgcaaagttggctttattatgtgctcactgccaatctgcttaaccaattgtgactagaggcccattaaaacacgccaatatttgtatccatttacttcaaaacaatcagttgagtgtttcctctggcacagtgtacgttaatggccactcaaaattgtaagacatgattatactcatgtaggagtagagctctcttattttgggaaagtgcatggacttctgcccttgtgcttgagcccaaaaaggaatacaagtagaaaaagggggaagatcattctctttatggaggctcaccaatgccactttatggaggaattgatatctcgacacaagccaagagtatctaaaggatttgctctctgcactgcctcctactctaataataataattctcatgtctctctctgttgaattgtgatatatctatccattttatctctttgcaggtacctcatggatcaacatacattttagtcttgatgctcgctgttctgttgtgattgattaacttctgatctgtgctatccaggagccagtgcctgattctgatccat

SEQ ID NO: 11394 - DNA, 23091 bp, Vitis vinifera
  Intron number 7 from transcript GSVIVT01021897001 (locus G SVIVG01021897001) derived from phytozome v7.0 (chr-ID chr1 4; pos 5883626 to 5906716 reverse strand)
ctgttaaagctgaagtacttttgcttgctaggtttttgttctctctcgctttcatgtggatctttgttatattcaccatccatgaatattttatatcgaatctctttttgaatttttgtttagtgtgttctttttttcctttattttctttttttacatttggttttgattttgtggtagccattcaactctatgatccccttagtggttgtgttctgcctctaattattaatctctgcttacaaattttatatttttaattctagagttcaccaaatcaagttattattgattttagagtaggcatatggtttttaccttgagagggagaaaggaatatagaacgcatttgtaacatgggcttgtagcaagaatgattatgattggatgggagactgattgagtttccaagtcttagttgtcttacatcaaaaggttgacaccaggtaacactgctcttatatttgtcacagatgcagaaaccgtcagataaattaggtggttatgttgtgattcttttctgatgatttattttctctgtccactctgtctttctctgtccttgtgagttgtacaaatctttccatttttcagtttgatcgatctattcatttgtggagctatttactggattgcagacatttctagagcacctttaacagagggacaaattgacaattttgaaagaaattattctcaacctcttttagatatgaatctgtctaattcagaagagacaaacttccattagtatcccaatttcaattcaaatatgggtttgattcacacttaatattcagagaaatatttgccatttgaagagagggaaagtattgagaaagggtagatgtatataacctttcaacgagatagagccttttcgactctcttaaaacatgtctcacggttccatctctttctactctcactttttttttttaatgcccatgtgtttctatttatgtgcatgggtttcttaagattaaatgaaaattatgggttaaactctgtagatatttgacagtcttcaattgggaaatactagtgaaggtcacaaggttttgaatattgagaagaggagatttgttttgatcctatccaattgcaatgttcttattcctcatggaagtttagatgttcaagacctcattcgattgagaggttttgttttgatttttcacttatggttctatatagatgtataggtcttattaacatactggagtaggtcaatatatatatatatatatatatatatatatatatatatatatatttctgtttagcttttgtaaatatggggaagattccttattcttctcatgtatttgctttacctatttcttatacattctattttctgattaaaaaaaaagaagaaagaaatatatgaattttgggtgtagagtacattaaggagcgagagattagagaaaatgatgcttatacttcattgcacttgtgtaaaaaaagagtaagatcaacaaaattttagatttcagacctatcaacctagtcactatcttgtataagatcatagctaaagtctttttaggttgtatccgaggagtccttcatgaaaccattcatatttcccaaggagcttttgttgaggggaggcagattttggacatagttctaaggtccaatgaaatggtggatgagaacaaatgttcaagagagaaaggggtagtcttcaagattgattttgaaaaggtctctaatcatgtgaacttgggtttttgtgatcatgcactaaagaagaaagaggcttagtgcaagatgggtgtcgtggatgaagggttgcttgtttgtgacaaattttgtggtcttagtgaatggaagcaccaaaggattggttaaagcaatcaaaggtttaagataaagggatcctttttccctattgctttcaccattgcaatgtcaaaatactaaaaaaaactccacagaatccgagaactctgatcagtttttttatatttcattgcatccatctatatacaaatatatatcctatacacggagtctaactgattcctaaattgtatatggtaacattaacaaatacatggtaagccaatctgtcaatcttttcctatatgtacaaccaatatgattgctaaattgtatatggtaacattaacattcctatatgtacaaccaatatgattcctaaattgtatatggtaacattaacatcccccctcaaattgatgcttgtaagtcaaccaacaacaatttgccaataagaaattgatgccgttgtcgagtcaaagctttggtgaagatatcagccacttggagatcagaagagatgtgaagaagagatatcacccgactttccaaggtgtctcgaatagaatgacaatcaacctcaatgtgcttggtacgttcatgaaaaacgggattggtggcaatccgaatagcactagtgttatcagcatgaagaggtttagaagtagtctgaggaaatctaagctccttaagaaaaccgcgtagccatacaatttcagaacaagcagtagacatggcatgatactcggcctcagtagaggatttagaaacacgatcttgtttcttacatctccaagaaattaaggcatcacctaaaaacatacaccaactcgtagtagatcgatgtgtatctggacacccaacccaatcagcatcattataggcaacaagttgaagagaggagccggtaggaaagaataacccacgagtaggtgaacctcgaagatagcggatgatgcgtcgaactacagcaagatggagatgtcgaggagaagtcataaattgacggacctgatgaacaacataggatatatcatgtcgagtagtggtcaagtagataagactcccaaccaggcgccgatagagagtaggatcatccagaaggtccccttcatctttcctgcatttgacatttacctccataggagtatcaacagaagaagtgtcctccaaaccagcaaaagtgataagatcttgaatatacttatgttggttcacaaaaataccactagctcgatgatgaacttccaatcctaagaagtatgtgcgctgtccaagatctttcatatggaaagttgtatgtaacatccgttgaagcttagtaatcaaaccacagtcagtgccagtaatgatgatatcatccacataaatcaagagaaggactatacctaacacaaacgtgtggaagaagagggaagaatcatactgactttgggtaaaactgaaggaaagaattgtactgcgaaacttctcaaacgaagcccggggtgcttgcttgagcccatacaaagaatgttttaggttacagacatcatgaggagaagaattagttataccagagggaagcttcatgtaaatctcttcttggagatcaccatgaagaaaaacattctttacatccatctgatgtagttgccatgactgtgaagcggcaatagctaagatggttcgaaccatggtcattttggcaataggagcaaatgtctcctcataatcaaccccatattcctacttgttacccagagctacgaggtgagctttgtaccagtccaaagagccatcagagcgaagttttacagagaaaacccatttactcccaataggtttgactgtaggaggacaaggaacaatatcccaagtatgattctcctcaagtgcttgaagttctgtttgcattgcattttgccaacacttatgttccatggcctgtttgtagcaagagggaatagaaatagtggataaagtagcaacaggagagacaggagagaagaatccataccaatcagggggtcgagaaagacgagtagactgacgaagagtggtggaagtaagagcaggattaggcgcctagtcaagatcgaaagggggcacagaggaagtggaaccggactcatgtcgactacgtttttcatacacaaaaccaggtttgaacctttccacaattgttggggattcagaaaaactaggcagaagagatacaaatgtagatggcagctcaacatgagatggaaagaaatattgattttcaaagaaaatcacattctgggaaacttgtatacgacgagcatggggatcataacaaacataacccttgtgaaggatagcataaccaagaaaagcacacttaacagactgagcaataagtttatgtcattcatgagtaggtagatgcacaaaacaaacacaaccaaatgtacgaagatcataatataaaggagaatgaccaaacaacttagagaaaggagaaacatgatttaacataggagagggtaagcgattgatcaaatgaactgcagtagaaagtgcttcacaccaaaaacgaggaggaaacgatgagtcaagtaaaagagttcttaccacatcaagaagatgacgatttttcctctcagtaacaccgttttgttgcgttgtcgaaggacaagaacgctgagagatgatccctttgctttgaagaaagtcttgaaactcattagatatgtattctccgctagaatcggagcgcaagaccttgatgctggcagataattgagtctcaataagtgcaagaaagcgcttaaagactgaaaaaacttcagccttagctcggaggaagtaaatccaagtaaagcgactaaagtcatcaatgaaagtaacaaagtacttgtaatgtgcatgagaaataataggtgcaatcccccaaacatcactatgtataatattaaaacattgtgaggcacgagatgtggaatgaggaaaaggtagaactttacttttgccaagtttgcatgacgtacgatcgaaagaaagatcaagggaagaacatgctttatttcctaataatccaaaattaaacaaagtacgaagtatatcagagtttgggtggtcaagacatctaagccacatcttatgtctagaaccaacaacattacatgcaaaggaaagtaaaggaaaattaggaataatagtggaaggagaaacatgaagaggaaagagtcgtcccactttaggtcccttcacgatcatcttcccggacacttgatcctgcacaacacaaccagaatgggagaaattgacattacaattattatcaaccaattgaccaacagaaataagatttgtggagaggttaggagacacaaaaacatcagttaaggaagaggaaagatcaccaacaacactgataggcagagaactgccatcagcagtgttaattttcagatttccatcataatttttgacattggagagagaaagaacaatatttgtcatatggttagaagctctagagtcaaaataccatggcttagaagaaaccgtatgattacctgagagcctaaaaacagaaaaaacagaaatgatcatttattgtaccatttcaggagtgagtgtgtttgggtttgctaagactgtaggagcaggaataggaacaactgacgaggcagcagacaatgcaacaaaactagaggcaccggtggaggtatgataagcagtaccttgctttctttcaggctgaatgggacaaatagagatgatatgaccttgtttcttgcagtagttacagaacttcttaggacaatcccaagcaatgtgaccaaaatctttacaactaaagcactggacaacatgcatgtctcaatccttattccgcccttatgttgcataagccacagaaacaggtgcactaacattagctcgatgttccatggtagctagttacgatatgttgctcctcacgcagaagttcactcaagcaggcatctagagatggtacgggatgacgattcatcagattagatcgtgcaattttgaagtcgggtcgtagcttcattaagaattgatctcgcttgctggttgcatgcactgcttggacaatagagctgcaacgggaacattaacataaacaatgtcggaataatcaatccaaagagtttgaaaaccagaaaaatattcctcaattgagagacttccttgtgtgaaattagccatctcatactccaattgaaaacgcctagcagagttgtcttgattgtaaaccgtgtggagataattccacatagtagccacagttttataaggtttcagattgagaacaaggtgaggttcaaccaagctaaggatccaggtcataacctgagcatccttaatttcccacttagacaaagcctcggcatcacgaggtgcaggattactcccatcaatatgaccccataattcctttcctttgacaaataatttaaattgaaactcccaagcacaataatttttgccaataaatctaataggaaatgattccaacttatctgatgacatgatgcaaccgagagacaaaggaaatagcccaccagaaaattggaacagaaaaggccaagaaccaggtcgtgatgaacccgatcaacactgttttcgatgccaagcgtttgattcgtagaagatcacgaactccactcaaaaggtgtcgaaaccttgctttgataccatgtcaaaatactcgaaaaaactccacagaaaccgaggactttgataagtttttttatatttcactgcatccatctatatacagatatatatcttatacacggagtctaattgattcctcaattgtatatggtaacattagcaaatacatagtaagtcaatctgtcaatcttttcctatatgtacaaccaatatgattcctaaattgtatatggtaacattaacattcctatatgtacaaccaatatgattcctaaattgtatatggtaacattaacaattgatattttaagtaggatattgttgtgagctaaaaagtggtttttttgaaggcttcttagcaggttggagtaggactagagaatgcaagtgacaccatgtttttttagagcttgtttggaagataatcaaaatttgaaacttatattattggttttttgacacatatcaggacttaagatcactttaaataagaaaactctatctggtattaacatgagctaggattagattactagaccgactaccatgcttgaatgcaaagtctcttattagcccttattctacccgggcctctcattagggggaacccaaaggttgacgccttttaagatctagtgattgaaaaaatttcacggagatttgatggatggaaaaaaaaacgcttttgtcattaggtcgaagaataactcaaataaagtcttgcttgtctcacattccttttttttctagattccatcattagtggcttctaagattgggaaatttaaaaggaattttctatggttggggaaggtaagagagatcatcttattagtcggggcatagtatgcaagcctaaggcaaaaaaggtctaaggtttgcgaagatttctttgaggaatcaagtgctcttagggaagtgactttggaggtttccaagggaaagttttgttttttggcattagtcatattgagtatctatgagacacaccccaattggtgagatgccaacattctagtcaagtgatcgcattgttactctcagaaggcaattgcacaagtttttcaagattttttcagacgtactcgctttgtggtgagtgataggataagtattcgtttttgtgaagacatgtagtggggggatcaaccatcatgttcttaatttttaggtcttttcacgtttgtcataattagaaaactacttatctcatctgttcttggcatctcttcccatttttcttgaaacctaaactttctgttaacccttattgacttggagtagagaaccttgaaatactcatgtcttcttttactcgtgtgtacttttcaccatttgttccagatgtaagagtttggtcattatcttttccaggctcatttatgatggagtttttcattttaaacttgttcaatttattagatccagtttctttctctctagctaaatttatttggaaacctaaagtcccatttaagatcaaagcctttgcttggttagtggctaataagaaggttagcactaacaacatgctatagtaataactcagagcatttggaatatctaagctaggttttcatgtggtttgaagcggtattttgtttaaggataaaaatagaaaaaagtgagctaattctaattggagaagccataagtatggaaggtctagccttagtgttgggttgtagggttaggagcctgcctactacatacttgggtcttttgttaggtgcaccccataaatcattaagggtatgggatttagtggaggagagatttcagagataactattcttgtggaaaagatagtatttatccaaatgagggagactcactttgatcaaaagcacactgtctagtttgctaatttatttcatgtttctttttgccattctaagaaggttgagtttaagacttgagttgatataaagggatttcctttggggcgaaggggtgcttgagaaaaaccttatttggttaattggtctaccatttgtttaggggaaaaaaacatagagggcttagcattagaaatctccatactctgcataaggttctccttagtaaatgaagttagagattcgctttcaagagagatcccttatggaaacaagtcatatcatggaagcgcgggacagatgagggggaatggtggtcaagggtggtgaggaatgactatgaggtgtggttgtggaaggctattagagatagttggaagtttttagaagtaaaactcaccctctttgtagataatgacagaaagataaaattttggaaagacaaatgggatgatgaatcttctttggaaaagtctttcctggcgttattttctatagctgttgataaagactcttggatagtagaaatgtgggaatgggttggggagggggccggtagagttcttgttttcacaaacaattccatgattaggaattggaaagagtggagattttttttttgaagactattgaagggcgaaaaggacaaattgagttagaagagaggtagagactatggctctctctctttttggagttagaagatggctctttagaaaaaactatggaaaccctaacccctaagaggggatttatagcgttcctcataggtttgagtgatttgagcttattaagagcttgggttacttaatctaacccaaaatgggtccaagtcgattagttaacctaatagggcctactaattaatcaattagctcaatctagagaccttgttcacttatccttgtgcaagcttgagtaattaccaaaacgcccttatacacaaaagtgaacctagagctaatccgatcataacccgtgccaacaagacatatgagctcagagtggggacattaggacccataggagtattgactctcttaaaattaattttgaagttgattctgtcaaaggacagctttgctggtcaaaggacaactatcaaaggacagctttgctgtcacacttccttccttattttagcccacacttgctgtccacacttccttccttaatttagcccacccttctttctttattttagcctacaattgtttccttatttcttcatttattattttgtacagttagcatatattatttgacagattatagtttacatgtatagggctagaatcatgctggaatttatttgcttttatttgctttccatgtaaagcatccttgtaaagtctatatataatatacaaaactcaaggccaaggtattcggtcattcacacaatattttgacatggtatcagagcaaggttgctaatttttcttccctcaaattcttttctgtcttttcggtttcggaggtgcctctcgtgtctttcggtcaagtctgtgttgatccgtgctgcacccaaccacaaccatttttctcagtatttctgtggctgtcgtgggtcagttttcttctgggatttttttttggtccatccttttgtctcgggttctatttattttctatggattccgcaccgctgtgtgttaagtttacaggcacaaattattctacctgggcatttcagtttgaactttttcttaagggaaaagacctttggggtcatattgatggcacggatgttgaaaaaccatccacttttgacaaatctcaggatgttgggacttctcattcatgggctgtgcttgatgcacgcatcatgtcttggcttcttggttcagtggagcctcatattgtcacccacttgcggccccatcgctccgctcaatctatgtgggcttatttgaagaaagtttatcatcaggataacgatgctcgtcgctttcaattagaacatgcgatttccatgtttcaacatggtagtctttccatccaggactactactcggcatttctgactctttggcatgaatatgctgatttggttacagtggatgttcctattgccgctctctcaactattcagactattcacgcgactacccggcgtgatcagtttcttatgaaactacgttcggaatatgaatctgttcgctcctctttactgaatagatctcctgttccctctcttgatatttgttttggtgagttacttcgcgaagagcaacgccttagtactcaagctattttggagcaatctcatggcagttccgggacgacaactgtagcttattgtcacggacttagtcgttcactaagctcgtgcggcacttagacaagccaagacgcttgatcttgctaagtcagccttgctccccaatgcttagcttgctcggctaagacactcgcgacttaaaagcttaagaagcttggtaggcaactcttgaaagaatggaagctttcactaacttaaggaaacctttacaagtgcttggatgctcacttgcttggtgccttggccaaatgaggccctcacctatttataggcaccaatggaactctctagaaccttggagggttccttacaattcatgaatattctagaatgtcctacactattctagaatattcaagagacttctagaatgtcctacactattctagaatattcaagagacttctagaatgtcctacactattctagaatattcaagagacttctagatttctctagaaagctttggacccttctcatgccttctaccagagtgtagagttgtgtggacttctctaggcatttctagaaccttccacactcttcccactaatgactaagtgtggatgtctccaagggtctctagaagcttctcacctcctatataagccatggggagggtcatttgaagcatcttgtgacactctcccccacctaagccgcagacgtcctcgtcgtgtcttctgcccggaaccgctcaatctgttcctggaactgccatagtgcatttgctggctcccaactagcctcgctttctggtagtcccttccatttcactaagtactccgtagcaggaggcacaccacgccttctgatgattcggtctgcaatgatgtgttccacctccttgtcataggaggtcacaaccgctgtaggtgccctcttagaaagcccttggcttggatcatccttgtcttcgtgatatggtttcaagtaactcacgtggaagacagggtgaatctttaaccttggcggtaactccactttgtaggacaccttgccgacctttccaagtatagggaagggtccttcatacctcctcacaaggcccttatgcactggccttagggatttgaattgttgaggaaggagcttgacaagcaccatgtctccgaccttgtactccgtgtgacgtcgcttcttgtcagcccacttcttcattttcttagcggccttgtccaagtacgagcgtgctatgtcagcttgctcatgccaccccttcgcgaacttgaaagccgctggacttctccttgtgtagcctatcgttagcgtgtgaggagttaagggttgctgccctgtggctagctcgaatgagctcttgttggtcgcctcactcctttgcaagttgtatgagaactgggctatatctagcaacttagcccaatccctctggttggcactcacaaagtgcctcaagtatagctccagcaaggcgttcaccctctcagtctgcccatctgtctgtgggtgaaagctggtggagaagtgaagctccgaacccataagcttgaagagctccgtccaaaacttcccagtgaagcgcgggtcgcgatcactgatgatgaacttaggcaacccccaatacttgactacgttctttaggaatagcctcgccgtctcttccgcagtgcagtcagtcggggctgctatgaaggttgcatacttagagaacctatccaccaccactatgatagagccgttgtcctctgacttaggtagcccgatgatgaagtccatggtgacgctgtcccatgggcgttctgctacaggtagtggctctaacaggcctctaggttgtcgttgttccaccttgttttgttggcacacaagacaagtcctcacataggcctcaacctcgtcccgtatctgaggccaatagtaagccgactcgagtagtgccctagtgcgtcgttgcccagggtgccctgcccacttggtgtcatggcactccttaatcaggttccgccttatgttcccccacttaggcacgtagagtcgtctccctttggtgtagagtaagccgtcctccacccaaaaccgcttggtcttcccttcatgagccagggcgatgaggctcttagccactggatcatgttgcagtccctcccttagaagatccattatgtctccttggggctgactcgttatggacgctagctcggctttgcaacttagggcgtcggccacatgattagcacttcctggcttatactccatcgtatagttgaactcggccaggaagtcttgccacctagcttgtttaggactcagcttcttctgtgtctggaagtagctagtggccacattgtcggtcttcactatgaagtgagaccctagcaaatagtgcctccaggtgcgcaagcagtgaacgatagcggtcatctccttttcttgcaccgtgtaacgcctctccgcgtcgtttagcttgcgactctcaaatgcaattgggtgtctttcttgcataaggactcccccaatagcgaagtctgaggcatctgtgtgtacctcaaagaccttggtgtggtcgggtagtgccaacactggctcctcagtcacagccttcttcaggtcctcaaaggcttgttggcacctttcatcccattcccatgccttattcttcttcagaagatcagtgagtggagcggcccttgccgaataaccctttatgaaccgccgatagtaattaactaaaccaaggaaagatctgagttgaggtaccttggttggtggatcccattcttggatggctttcaccttgctatcatccatcatcagcttgccatctctgatgcgatgcccaaggaggctcacttcctccttagcaaacgaacacttctccttcttcacgtatagctcgttctgcctcaagatcttaaagaccttcctcaagtgctctacgtgctcctttagagtgttactatagatgactatgtcatccaagtacaccaccatgaacttgtccaagtatgggtggaagatcttgttcatgagggtgcaaaacgttgctggggcattggtgagtccgaaaggcattactaagaactcatatgagccatacctggtcacacatgtagtcttcggctcatctccctccgcaatcctgacttggtagtagcctgaccttaagtccagcttcgtgaagtaccttgcccttccaagttgatcgaacaagtcagcaatgagcgggatgggatacttgttcttcaccatcaccttgttgagtgcccggtaatctatgcacattcgtagggacccatcatgctttttctgaaatagaaccggcgcgccataaggagccttggatggttggatgaaccccgcatctagcaactctttgagttgtctccttagctcctccaactcgggtggtgccatcctatatggccccatagcagggggcttggctcccggctccagctcaatcttgtgatcttcctctctcctaggaggaagtctcttgggcaactcgggcggcataacgtccttgaactcatcaaggaccccctcgatttctctaggcatgggttctcccgacccatcatccttttcttcctttagggtggcgaggtaggtcacctcttccctctttaaccccttctttacttgcatagcggataacataggggtcttgagcgtaccttcattgaccgtagggaccatgcacggcttctcctcctctaggatagccattgagcgtaggaaaggtagtggcacggccttgaccttctgtaggaagtccattcctagcaccatcttgaagtcatccatgggtgccactgtgaagtcgacccttccttcccacgagccgatgtgcatagtcacctcgcgagctactccatgtgatggcttggcggctgaattgactgccttgagccatcctccttccttggatgcttggagctccaaccttcttgcctcattctccgagacaaagttgtgagtggcacctgtgtccaccagggccttggtggccttcccattcacaagggcctccacatacatcaaccctttgctttgaggcgtcttaggcatcggcttggccttaagggcatttaagaactgcaacgatcccatcttagcatcgccttcttgctccttttcctcgatcatagcatttaaggccttcctcttagggcagtctcgtgcccagtgcggaccatcgcacaggaagcaattggtcctgggcgtgaactcctttcgcttgtccttgcctttgccatccttgccactagggcctttgcttgatctttccttagaggtatggccttgcgacctcttgtctcccccacctttggcctggttacccttggatggtggcttgggcttggaggagtctccccttctataatctactaaggactcggctactgccatggccgtggctaggtcttggacaccacgtctcctcaactcttgctcggcccagctttgcaagttgaacagtagctcctccttagccatgttaggtatctcaagcataagagtagagaattctttgacatactcacggatcgagcccgtgttcttgagacgcttcaaactcttccttgctaggtaagccacgtcttcgggatagaattgcctcttgatttctctcttaaaggtatcccatgtgtctatggtgcacgtccctctctctatgtcggcaaatcgtcgacgccaccatagagtagcattatcagtgaggtaaagggtcgcggtgcgtaccttagtggcttcatccgttaatgcaattgcctcaaagtaacgctccatgtgccacaagaagttatctagctccttggtatccctcttgccactgaacgtgtgtggcttgggcacctccacccttggtgcctcatgagtggccatgactcgtgctgatacagcggtcttatagatggccaactcttgtcgaatctcttggtctcgggcctccactcgtgcagtcaaggcctccatccttgactccacactagcgaacatgctcatgaccttgtcttggaaagacatgaactcctcgtgtgacaccgactgaacttgcgagaccagcaccccctcgcgaaggtcttggatctactcccttagatcctctaagcccttctccatgccttgctcgatcaagtccaccccttcccgggtgtctgccatggctagctccaccttggctaaccttgcctccatgttggcaacaacatcacgagatgtatccttcttacctctgcccctgccccgtgcagtaggctcggcctcccttccacgggtttgttcgctatactcctccatgttagagcccgacatgcttcccttatgcccgcttcgtagccacgctctgataccacttgtcatggacttagtcgttcactaagctcgtgcggcacttagacaagccaagacgcttgattttgctaagtcagccttgctccccaatgcttagcttgctcggctaagacactcgcgacttaaaagcttaagaagcttggtaggcaactcttgaaaaaatggaagctttcactaactcaaggaaacctttacaagtgcttggatgctcacttgcttggtgccttggccaaatgaggccctcacctatttataggcaccaatggaactctctagaaccttggagggttccttacaattcatgaatattctagaatgtcctacactattctagaatattcaagagacttctagaatgtcctacactattctagaatattcaagagacttctagatttctctagaaagctttggacccttctcatgccttctaccatagtgtagagttgtgtggacttctctaggcatttctagaactttccacactcttcccactagtggctaagtgtggatgtctccaagggtctctagaagcttctcacctcctatataagccatggggagggtcatttgaagcatcttgtgacattatgctgcccaaggacgcggaccacctatgcattctaaaaacttgcagtgtttttgttgcaaggaatatggacatattgctgccacttgccctaagaagttttgttcttattgcaagaagaaaggtcacattatcaaagaatgtcgtattcgcccccagaatcgtcaggcccaagcatttcagacttcggttattgtccctcctgtagcaacacacgactctccttcagctgcgtgctctgttcctgcacctcctgcaccagattactgcaccccagaaatggtgcaacgaatattaatttcagcattatcagcaatggggtttcaaggtaacaattctactaaactctggtacgtggactcgggggcctctaatcacatgactaataatcccaccgctttgtgtcatgttcggccctacgctggtcaatcttccattcagactgccaatggcagctctttgcccatagctgctatcggcgatgcctcttctaagttcactgatgtgtttcttgcccctcagctttccacaaatcttatttctgttggccaattagttgataacaattgtgctgttaatttttctggtaatggttgtgttgtgcaggaccaggtaacggggaagccgatcgcgaagggacctaaagtggggcgcttgtttccactatttttacctgttccagatttttctccacgttcttctattaagtcttttgcttgtaataatgtttcagatcttagtatggtgtggcatcgtcgtttaggccatcccaatactcagatcttatctcatgtattgaactctgatttacctggtaataaggatcgttattctttatctcttgagtgtgattcttgcaaacttggtaaaagtaaaactcttcccttccctttgcatgcaagtagagcatctcactgctttgatcttatccatagtgatgtttggggaccttccccggttagttcacatgagaaatttaaatattatgtgactttcattgatgatcatagcagatttacttgggtctactttcttcgctctaaatctgaggtatttcgtactttcactgagtttttagcgtatgttgacaatcaattttctacttctattaagacattacgcacagattttggtggtgagtatttgtctactgagtttcaagcattcttggcttctaagggtattattcatcaacgttcatgtccctctactcctcaacaaaatggagttgccgaacgcaaaaatcgttatcttttagatgtggtacgtactctcttgttagaatcttctgttccatccatgttttgggtagaggctctaaaaactgctactcacttgattaatcgtttaccttctcaagtcctacatatggagtctccctatttccgcttatttgctaagcaacctagttatgatcaccttcgtatttttggttgtgtatgctttgttcatttacctcctcatgagcgacataaattatctgctcaatctgttcgatgtgctttcttgggatataatatgtgtcaaaagggatttgtttgctatgatcctacattacatcgtacacgtatttctaggaatgttattttctttgaaaatcaacatttctttcctgtctcctcttctactgtgtcatcctcttctactgtggtccttccctcctttgagcaacagttctcagatcttcatccagtcagttctcgttttcaaccaggtattgtgtatacgagacgctcccgcccacagtctctttcggtggctcacccgatatctgatcctaccacgctccagatgcagtcagttgcagcaccttcagtacgtcgctcttctcgagtgtctgtaccttcgaataggtatgaatttccctcttccagttctggcaattctattttagcccttactgctgcattgtccaaatttgatattcccacatgctactcacatgctgctaagcatgattgttggcgacaagctatgcaggaagaaattgtcgctctagaggccaatcacacttgggacattgagccctgtcctcccactattgttcctctgggttgcaaatgggtttactcagtcaaggtccgatctgatggaagtttggatcgttacaaagctcggcttgttgcacttgggaataatcaggaatatggtgtcaattatgaagagacctttgctcctgtggctaaaatgactactgttcgtacgattctagctcttgctgcttccagtgattggccattacatcagatgaatgtaaaaaatgcttttcttcatggggatcttaaagagtgtatttatatgaagtcacccccgggattgtttccctctccgacttcacaggtgtgtaagcttcgtcgctctctttatggtctcaaataggctccgagggcctggtttgagaaattccgcaccactttattacaattttcattcaggcagagcaagtatgacacttccttgtttcttcggaaatcagacatgggtattgttgttcttttggtttatgttgatgatattgtgatcactggttccgattctgctttacttggtcagctcaaaactcatctctccgagtcctttcatatgaaagatcttggacctctcacatattttcttggtcttgaggtgcatcatagtccctctggtattttcctcaatcaacataagtatgcgagtgacttggtggctacaactggtctacaaggggctacttctgttgatactcccatggaattaaatgtcaagcttcgcaaagaggaggacgacttacttgctgatcccagtttatacaggaagttggtgggtagccttgtttatctcaccattactagaccggacatttcttttgctgtacagcaagtcagccagttccttcagattcctcgtcatcttcatttggctgctgttcgtaggatcatacgctatgttcaaggcacttctactcgtggcttgttcttccctgcaggcaattctactcgccttgctgcttagagtgatgctgattgggcaggttgtgcggatacccgtcgctccatcactggttggtgtgtgttcttaggagatgcattgatatcttggaaaagtaagaagcaagacagagtctctaagtcatctacggaatctgagtaccgggcgatgtctcttgcttgttctgaaatcatttggcttcgaggtttgcttgcggagttagatttttctgagaccgatcctacacctctccatgccgataatacaagcgctattcagatcacggccaatcctgtctatcatgagcgcacaaagcatattgaagtggactgtcactctatccgtgaagcctttgaagctcgtgttatcactcttacacatatttccaccgacttacaaattgctgatatcttcaccaaggctctccctcgtcatcgacattgcttgctaagtagcaaattgatgcttgttgatcaacctgcatcaatttgaggggggctgtaagaagtcaaaggatagctttgctgtccacactaggacaactttgctggtcaaaggacagctatcaaaggacagctttgctgtcacacttccttccttattttagcccacacttgctgtccacacttccttccttaatttagcccacccttctttccttattttagcccacaattgtttccttatttcttcatttattattttgtacagttagcatatattatttgacagattatagtttacatgtatagggctagaatcatgctggaatttatttgcttttatttgctttccatgtaaagcatccttgtaaagtctatatataatatacaaaactcaaggccaaggtattcggtcattcacacaatattttgacagattcaacatcttaagatagagaatcaactgaactccaatatcctatgtaattaacaatgagacactatgtgctagggtctgtgacctgctatccattgtgttcggtctctttatgaactgatgtctgtagtctaacaagttgaaaactattagcctttcaagactatttttactgtcctattgtgtgttcaattgacatgttttagctcttaaagagttaatatcaagttccacttaaggaactattatgaacatagttttcatgaacatagttttcatgaacacacctccttaggatcacctaaggggatcttttgtgtcaattccatgagatatcgtggtgcctccacggagaatacttattactatcggtttccatcaatagtgaaccaattcatagagaatatataatcaacttatgatgtcactcgtatgtcaaaactaccactaaccttagcacaaactcaatattctctcaaggttgagagacaatacaatgaagtagcttggtgaagtcatgactgcttgataactttaaatcataactcaccataggtcttgtccaatgtgtaaccatacacactaatgtactcgtcatgggaaattcatcttgatgaccaagatcgaccatccctcgaattaggaggtggtacactacaagctctaatgcgttgcctagacccacaaaccaattgtgaacaagtcatgtatttgcaaggaacccgtaacttagatattccgtgcaactcttaatgtacccaagtcaacgtacaatgcaaaagatgcaagctagagtgcttacaaggtataatgtatggaaataggataaataaaaatgaattggaattttattaaataaataataaaatttaagagtttattatgtcatgtcatgcttttaatggctttatcctaacactttctatgtcaatgatagactttgtaaattggttgatttcgaggtaaggagagggagattgtttttttttgtattctttcttccttttatttgcttgttttgggcattaattgtatatattatgtgtaccttgtttttgttttttttttaggtactttctttataaatatatcttttgttttcctatccacaaaaaaggacatgttacagacgaaaagaccttacaaacccttagttctaactttctgatcaatttcaatcattgtgatgacatcctttgtgtctttcatttttcatggatttcgatcattacgatagcattgtcgagcttttttttcatttccccttgattgcaaacacatccttggagtttttcatttcccattgattcaggtcataaccattgcatccatggtattttttcatttcccattggtttcggtcatctctatatattctatcgtctgttattttaggagctatgacataggctattcaaactagctagcttggattgggttcttccctaaagtatatgtgatataatggccatctcctttagtggtttgaggagcctcactagagctaaagtcctatggtaaatcacctatctcatgatggtttggattgtggtgagaaacaaatgcaaaattttttaggacaagtggaggaagactatgggatctaatttgtttctattcctctttcaaggcctcttgtaccacaatctttaagggtactcctctcaatgttgttcatctcaattggtatgcagtgtgtaaatcataagggtttggataacaaggagagaaacattgattcgattttgaaggttgttttagccctcatggagtgatgagttgttttatattatatatccttttgtggtactgtactgatgtatgggtctcctttgtatattggaagaggttcaatcatctattctttgatcagtttttgtaaggattccttatccttcatatgtgcctttatccatatcaaagcatatttctgataatatatatatatatatattgttaaccctcatggagtgatgagttgttttatatatccttttgtggtactgtactgatgtttgggtctcctttgtatattggaagaggttcaatcatctattctttgatcagtttttgtaaatttggggaggattccttatccttcacatgtgtctttatccatatcaaagcatatttctgataatatatatatatatatatatatatatatattgataaccctcatggagtgatgagttgttttatatatccttttgtggtactgtactgatgtttgggtctccattgtatattggaagaggttcaatcatctattctttgatcagtttttgtaaatttggggaggattccttatccttcacatgtgtctttatccatatcaaagcatatttctgataatatatatatatatatatatatatatatatatagggagagagagagagagagagagacagagagagattgataaaactggattaattttcaggagtatacttgagcttgtctgttcctaggtatgaattttgtttttaagttggtatagttcaagattaatgctaatatgaatagaataactttagtatctttatctatttggtggctaaacaaattatcaagcactatttattattaatcatctggattaaaattttgatattatatagttttgggaagtaatttgttgattttctttttctgtttctccattcttatatgagatatcaatgtaagttacttttaaattggtatatcttgatggaattttaggtttgatggtgtatttgcattttagtggcaaggacaac

SEQ ID NO: 11395 - DNA, 2787 bp, Vitis vinifera
  Intron number 3 from transcript GSVIVT01017026001 (locus G SVIVG01017026001) derived from phytozome v7.0 (chr-ID chr9 ; pos 3561852 to 3564638 reverse strand)
ttctcattgcaggaatccagggatcaattatcagagtgtaccagtatactaactagtcttaatcttcataccactacctgtagttccccctagtgccaggagttgaaaggtaagaagtatatttttatccctttcctttataccgaatgctaattccttctaagcagtcttaagtgcctttttaggggtctaagggcgtgggtgtaagcgagtatgaagtcaaagccttgaaccggaagtactctccttcttaatgagtatccgataaggtaaaaaaaaggtggtttgattgggataagattctttttaaaggagaataatcactctgatatttcacttatatatagaatactactatactaaaaggttgctttctccagcattatatacatcttcattcttatttttagtctatcaatattcttaagcaatgaaagacgagattcttttatatgcttatggcactaaataattcctcttgtgataatgggacctcactatggaatttcgtcccctctttctcatgctgtgacctcaaactgtgaaggtaagttcttacgtttcaatttttttatggattttgtaggtttcatggattttagtgcggtgggttttaggatgtttgccatatgttgatttcaaaggttatcgtattttgcaattaatagatatcacgtttaaaataactggaaatttgtgtgattgatattggaacataatctgcaactgtggtttgacagctcaatttaagacatcttggacgtttgctaataatcgaagaagatcatgtggttgtcctaaatggaagactagcttttcatgtggcttctttggatggtgtgatccgaaactatgcttccatggaagacgagtagtgttacaaaattacaaatacataagaagttgtccagcttagagattgaggttgctaaagaaagacttaaatacgttcttctatacacttgttgtatcatggatattaattgagttttgtattttctctgtaatttctccttatgctcgtcctgttttttatgatgaaaggtgcaacctgtttgcctccctaaaaatgtaaagatttggtatcgatttatgacaaatgttgaaaataatgttatgttatggagtaggacactgacttgtgcaggttgagtgagttagaaggttaacccgtgctagtgaaagaactgttcaaagaagacagtaataacatttgtcttaattcgtaaacaaagatgatgaaacacacatgcataataacatccatctaggaagagcatttccgaagagagtaactgggcgtcagggaccatgatcactccgtgatatatatatgactctaggtgccgcttctccgccatcttccttcttcaatcaccatgccgttaggccagatcaaacgtcaaatacaatagacagagtgaaagtttggtttaaggattcatcctcccaccgcaatccctcccaccagcttgattcccctgtaatttgctttaaggtactggttgagctgttggaatccaatggcagcttcctcagatttgggcagcctgtcacatgaacctctttcggggaaggaaatgccaaggcccacccttagattctctttagatttggtagattcctcaaacataaagctgtgagtctagagaatatgcttttcttatctgaaacttcatggtcatcatgcataactcgctccattgatgagcactcttgcacataaagctcctgtaggcttggggcataaataagccatgtcaagtccaacaactctgggaaaattcaatggttacctgagaaggttgtggaacttcgagtatctgatattatctggtacgggcccctccctcccttcatttcccagatctacttttatcttttccaaagtactacaaaacaccgtacttaaattctccattctttgtagtgaagatgacagtttgagtgtggtcaaaccttcacagcatccgattaatagccatctttgttaaggatacttagcctttccattacaatttaccatatgtatcatatttgatccttgattacatgctattcctttgtaattagtttgatattatttcctactttccatttcttttgtaatcagtttgatattatttgatttgtaatattctgtaaataattataaataaaaaactctcaccaccttctcaagtgtggtggtttgacaaatattcttatggtatcagagccaatctggtttagcaaccccaatccatttttctccatggcttctgaatcctctcatcttcttcctttcaacactctaatccacatgatcaccatcaagctttcttcctccaattatcttctctggaaaagccaacttcttcctctccttgagagtcaagacctgttggcctacgttgatggaactcttgttccaccaccccgttttgaaccagaaacttctaccacactcagcaccaaatatctggcatggaaagcagctgatcaacggctgctctgtctcttgctctcctctctcaccgaggaagccattgctgtcgttgttggtctctccattgcccgtgaagtttggctcgcattggagaatacattcagccatcattcgaaagcccgttaactacaactcaaggatgacttgcagctgatgaaacgcggcaccaaacccgttgctgagtatgcccgtaccttcaaaacactttgtgaccagcttcatgccattggaagacccgtcgaggacactgacaaagtgcactagttccttcgtggactcggccccgatttttccaattt

SEQ ID NO: 11396 - DNA, 4595 bp, Vitis vinifera
  Intron number 1 from transcript GSVIVT01025865001 (locus G SVIVG01025865001) derived from phytozome v7.0 (chr-ID chr8 ; pos 11033474 to 11038068 reverse strand)
actcgcgcgtttctactcaacgtggcctttgctgggtactgctttccctctctttcttttggtttgtgtttgttagggttttttggattgaggttgagtttggtatgttttatgcgtatccgatgcgttttttttttctcgcggagacgattgagggtgtgattttttgtttgcaagaaattttttatatcaagcttgttttacaaaacattggtgctgatattggttgagaacatgcttccctgaaagagtaattctgcttattttttaatggattgtccaacaagactctggtgtatgtcattgcgtctgctgttcattctatttggagagttcattgaattagagtatcgcttttcctataaaagcagtactctttaccccgttaataggagcctgtttttgttttagtgcacttgtgaaaatgccttgcctgaaacttaaggtaaggggcgcactagcttgttgaactgtacatccccacttttttgcacaaggaaggtatatgcttgtttcacaagcattgaactcactaaaaaccctaaaatgacagtgcctcattgcaggttcatgactgttcggataacagataggtgtttttactgggcccaagtgaccttcttggaaatctgtaactttcggaaacaaattggaaaatagtgtgagtcataaatgtttaaaggttaggttcaaaagttttatgttggctagcgatgtaacataaccctcctacttcctccagcttggtattgcccctgtaaaggggtgagttagcgattgaagttatggagcaacaaaatattcattccataaggattttccagtttggaaatagaaaaatcggggagaacaccaccttacaagtgctgctgaacctagattgggcctgttggcaatttgtatcgagttccatcttgaggagtccttttgtggaattacattttaagaatagcattacatttggcaatcttaggggggtgagaagcaagaattttgaaacacagaaaatttggttgctctcgaaggcagaatctcatttgggaagtaataaggtcatagagatctaacttgaaagaagactgtgggctgaggagaatatttttaaagaagttaaaaataatgggtggaggcaggcaattaataaagagtggcatgcaaggaacaaagacgaaattcatcaaaaattttgatttggagttttagcattgttatgaaggatataggtatgatgtttgtggagattttcaaataccttttgaatctttactttgggagtagtggtaattagagactggaagtctggaaggtgtgcattagccttaattattaataatgttgctgggtggtaacaagctttttgagggaagaagttagggaggcagttctctccatggtttagggttaagttgctaggccagatggctttactatgaccttaatgtcggtactgaaatctttattaggatttttagatggctaaggccatagacatgctggaattccctgtggggcctagctacagaactaaagttttttatgcaagtgatgaggttaaaaatttctagcttggaaacttgtttaggtatgtttgctgctatgaaaattttgactaaagggtttcttggtaggtattcttgtccacctagggacttcagttaacccaaaaatttagtttgttagacttttgtttagcccattgcataactatgcctccaattaaggggcaaggcctacaaaggagtggagttgtcccacctttttttgcaaatgatacattggtcttttctaaggattctcaaatggtttatttatgttggctgctcatgtgatttgaagcaattttggggctgaaaataaacttggaaaaatgagaattgatcctaatagtgggggtagctcttgtggagaagttgacgatcgagtttggtatgcctttggatgcttcttttggcttagtttcagtatgagatgaggtgggagagaggtttcacaaaagattctcaacatggaagaggcaatatgtctccaaaggagagagactcacgttgatttgaaacatattatttggtatgtctatttacaacatgcccttattttctattcctagaaagctaaggttaaaactagagaagattcaaagagattttttatgtggaggtgggactttagagaaaaagttgcttcttataggatggtcaattgtttgcatggataggagtaaggagggatagggcattgaaagtctttcatctcttaattgggctcttcttggaaagtggagttggagatttgcttatgaaaaggaaggtttttggaaacaggtcatagataggaagtatgagaaggaggaaagggattagcaattgtgtaaagtgagagatgggtatgggattggagtttggaaagatatcaggaagggttaggacctctttaatagtagagttgcatttgaagtgggtaacaaaatggtggtgaagttttggaaggacacatgtagtgtgaaggagtccttgtgtgtgtcctttctttctttgtatgctttagattcgttcaaagatgtttaggtgacaaatttgtgagatgagacaagtgtagtgagtttttttgggatttgtgtttctttaggcacttaaatgattgagagttgagtagtattgagacttttatctcaagattacaagataagtagatgggaagagaagatatcgataatatgatttcgaatgagttgaagaatggagttcattgcaatgaaatccccttactgtgctgtggaaccaaggaggtcaatccccttcccataagacatcatttggaattcataggttctaactaaagcgagtttttttgcttgagtcaattgcagaaagtattgacattagattagattcaaagatgagggtggttgttgacaaacaaatgttatctatgtcaaaccgaaggggaatcaattgatcatattcttcttcgatgcactaaatcaagggctctatgatagttgttgttctccttgtttggtgtattttgagtgctatattccatagttagagacactcttttaagttgacatgactcttttgtagggagaaaaaggaagaaggtttagcaagcggctcctctatgcattttttgaacattgtggaaggagagaaattgaagagcgtttggaaatgagtagtctgagcgtaagtgaaatggtagttcttaagtaatttgttagcttgggttggtatgtatataaaagaatacttaatgcctttgattgattttgtagattgattgggatttgagagaaagagagagagagagttattttttgtctctcttttttggctttgccactttgtgcccattgtatatggtctatgtactttggtatacatctttccctttttgtatgtatacaacttttattgcctatcaaaaaaaaaattgtgcctcaaattaggtggcaatttgagagcagatgagttttagttcccattcaagaggtcaccaaacatcctgatgcatgaaaaggtgtctttctttagggtctgattacgcttatccagttttattggcacctaggccacttatttcttgttgttcaaggttttccatgcatggctctaatatgtcatccaaagatggagggtggtttctttcttatttatttatttattttttaggcaattagaaaatatatcaacagtgcctagtaaacaagcacatgtaagtacacataatgtatacaattggcttgccaaaaggcaagcaaaaagaagattgatggtggtttaggcaacatgaattaatgaacaacggacagaattctgagttggtgtgaggagattggtaaattgatacctttttcttcttacataacgatttataatttgaaattactccagctaaaaatggacagaaatatgagttggcctcagggatgggtgagtgctgcacctaggccttggttcatgtggtaaaggggtgcggggtctagaatttgaatttgatgtttatttttatgaattagaaaggacaagaatgaaggaaaagaaaaaggaaaaggaaatcaattgcctatcaacgaatgtcctagactcagataagatctgttcaatttttgggtacttgacctgattttctctagtcgaaaaaaaccagtgggttttttttgaaatatttgtgtcaaagggacaagataatccccacatttggaaaaatgatctccacctattgaaaattgtaaatataatctcagtttacacttttacccatacactttttttaaaaacacgcctggatgtgagatggggataaaaaaaattgatgaagggtatttttgtctaaaaaagattatatttcatgtttctaaaagatgaagattattcttttgaatgtgtgattggtttatctcttttaatcaaataacatttattttctttacattcttgaatggtttagaattatgtcaagtggcatgacatcctgctattacttgatcttgtttaaagtatctgccgcaatagatacagtaagcttgttggatagttcttggttggaaatgaatttgctgataccgaactttctgcagtgctttattaggtggt

SEQ ID NO: 11397 - DNA, 3253 bp, Vitis vinifera
  Intron number 5 from transcript GSVIVT01029113001 (locus G SVIVG01029113001) derived from phytozome v7.0 (chr-ID chr1 1; pos 19512279 to 19515531)
ttgtttgttggtacaggtgggcaaacaagtatcaggtaatctttttctattgaacctttttttgcttattttatgatagaaaattctatttgccttctcttgttagatacatttatgttgcatgtgtggctctttgatgtgcagtaaaattttgttcttgaatggttatgatggtaagatgataaatatcagtttttttttttcagttagtttttggaattgtgattttacttcttttgtcattattgcataaatttatggccttggtaaacttcataacaagggtctccaacgggcaagccgggcctggccgggccgtaaataggaggcccgcggcccagctcgggccgggcctatgggcccgttgactggtcaacgggccgggccgggccgggccatgctaaaatgttagggcccgcggcccggcctatgagcccgcgggctgggcgggccgggccgggccgcgggctttttaaaataagccaaaatggctttcaaagaaaggaagggagagggggggattcgaacccctcccctcatgcttaaatttcaaggctctaaccaactaaactacatttcttttatgcttattaattgaattaattatatatatatataaaaataaagtatattattttttaaaggggcgggcctacgggccgggccggccctccgagcttaaatttaggcccgcggcccggcccgcccataaacgggctcgggccggcccgggcctaaagcgggccgcgggatttttggagacccttactgcataatataagggtctatttggatattgttcttaaaagcaaaaaacagttttaacagacttttgatataaaacagtttttcagaatttgttttgaaaataagttgttttttagaacaagtttcaagtgtttttagtgttttttattttttattttttttaaattttttttattttttatttttgtagcatgttttgaacaaaaattgaagagttgaaaaatactttgaaaacttttgcattaaacctaagtgtgaaaaaaacttcatgaaaaataagtcaagaaaattgttttccacatttaacttcaaaaatagaagtttgttcttgaaaacaattaagaactatttttaaaagatcactaaacaagccttttttttttttctctttcaagattactagtgaagtcaattaggagggaagaaaaccacaaagtaatctagaaggattctaagaagggtgtgttttcaatcaaatctttctaatcgatcttcgaatgcgagaggtcaatccacttttcagtagatgttatatggaatccatgggtcctattccaaagtgagtttttttgcttgggaagctagttgaggaaaagttttgacatcatattagctccagaaaagagggtgatttttaatgaataaacattttcttcttaaacttgagggggcatgttctacttcactataccaaagcaaggatcatgtggcaatggttgttctccttatttggtgtagttagggttatccctcttcaatgaaagaaactttgttaagttggtatgactcctttatagggaggaaaaggaagaaggtgtggagagccattcctctttgcatttttggacaagtttgtgggaacgaaatcgcaaagtatttgaaagcaaggaacaaactaatcaaaagttaagaaattcatttctttgtaatctttcaacttgggttggcatgtacatgattgattttgtggatcaagtggggtcttattgagagtgagggtggttttttttggcttctcctttgaggcctttccttttggtgtgtatgtcatgtgtactttggtgtactgatttttgtttttaagttatgcatagggaacttaattccttggtatcttcaattagatttgtcaacattggattttgaaaaatcttatgatcatataaatttggatttcctatttgttttgaatctttcaattgagaagatggggtttgggttagggtggattgcatggattagatttcatatttctgtagttagatttttattcttagtgaatggcacttcttcatgtttcttttagagtcctagatgtctgagacaagggtatcctctatccccttgtccatttttgctggtgatgaaagttgtaagttgttccatctccaagacttgacttcatttttctgtagttatatttttattcttagaaaatgacacttcttcatgtttcttctagagttctagacgttgtaggcaaggctatcccctttccccttctcccctttttgttggtgatgaaagttctaagttgttccatctccaagaccgtgggtggtggtcttgggagaagggaggatcagggatgaagacatcccttctttttttgtacgctaatgacactttttttgctgtcttggtatcataatttaaatagaaacaaaattatatgagtaaggaatgtggagaattcagaggtcctagcaaccatgcttggtggcaaggtagggaagctcccttctatatgggacaatgtggtgtcatacctcgttcacatagggccctagcatttgtccacatgccatggtgaagaagtgataacaaccccttgtagactattcctttttttgtttacagataaaatggtagttgacatggatctgtgtcgaactatgccatcctcttggacttctcttcgtagaaacagaaaaagaaaaaaaaaaaaaggaggcttcaaaatattccaatgtatataatttttgttggaatgccatgtttgactgaggtaccaatcataaagagttcatttttgtggtatagaaatcttgggtttatggaatgtgtaattttcttaaaattttttcgaagtggctgttggataccaataagatgatgtagcatcattgatcactctaaagttgctttttgaatcttagtattgggattctggattggataaaaaatggatgttctgggtaggatcaaatctagaaaattttcaatttcaaaaactggaaataagtctcacttaaataaggttcttttcttgttggttttatcattgaatggaaatagatattacatgcatatggttgttttcttctctgttttatgaaggctaagacatcctttgaccaactttggtctctgcaatgtttcaatttacctttcttttgggcataatttgtaagtttgcatcaagggcacaggatcatcagctgcttgtttggtttatgttttttgggcacaggccatattggag

SEQ ID NO: 11398 - DNA, 8397 bp, Vitis vinifera
  Intron number 1 from transcript GSVIVT01013060001 (locus G SVIVG01013060001) derived from phytozome v7.0 (chr-ID chr2 ; pos 8943384 to 8951780)
cgcggactgaggaaggtagatgttatgtgaatgtatgtccatttggtttcttagaaatgtaaataaaattatagtgttcactattttgtattttcgtgtcttaaaagtgatggggaacttgcctcggttagactagatctctgtgttgtttctgtttctgattgtacgagtatgaaaagttttttagaatcttgatatttagtttaaaaaattgaatagaaatgtaggaggaggataagtgattcaagtgttagagcttttctcttgatgcttgtgctgagaaggcaaggcaatatgtcaatctgtctccctttggttgctgagaaataaagaaaaatggaattaaaattttcctgaacggtgtgatcttcgcacgtcaaaacaatatggaactcttactcttgctaaatcaaagagtcgtgccatgaaaaggaaatgaaaattctgaaaacttcaatatatttttttttttgaagttgttgttgtcgttgttttgggtactaaaattatgtgaaacttgactttgaaaagtgaaatagttgtgttatgatcaaaattttcaggttcagggttattactattcacaattctgaatcttgagttataatttaaggtctggatgttgaatatattgaatgaaaacggggctgaagagtaagggatttgagtgttattcttggtactcgtactgatatagtcattactttgtgactctgtgtctgtttggttgctgagaaatgaaaaagaaagtgaatttagatttattatatattttattttatttatttattttgtgtgtgttgaaaggttaaggaacttgaataaactaagccaaatagttgattatgatgtgagataaagaaaattttaaaatttagatcttcattgaagatttcagatctcagcttctaaatattttgaaaatgaatatatttttatgtcggatagaaatttggctgctgagaaattgtgaatcaagtgatattgaaacttgtcaaatcttatttttcttcatatgctgagatactgcatccaatctccaaaaaaatcccaattgtttctatttttggaatggaatatttacggaatccccttggggttatcctgcacttggaagaagaagtagaaaaaggaataaatctatagtaagtgctttccagagcatttacagtttggttcatgaattttcatcttatatcagaattttatttttgttttaggtttggttgcagaggaatgaaaggaaagtgagattgaaattttttttaatcttttgttttcctttgtgttgaaatgatgagggaattgacactgtgaagtcagatagttgggttagatcagtttttaagtttcaaaatcatgaaaactttaagatttagaacctttatctattatatatatatcttctaatttctaagcttatgttgcggtctctgactgaaaatggatacattttgatgtcaatttggtattcattgctgctgcattcacccatgaatctatttatacaattttatttttgagtttctagagttttatgaagttcttgatgttctctgtcttgttttattttgtcttaacgttaggcttatgttgagagaaaatggagatattttgatatcaattaggtgttcattgatcctgcatttacccatgaatttccttactataaagtgattgtgttgtttttttcttttattcttttataaatttctagatttttatgatgttcatgctttgttacttattcattttttttaaattgttatttcctatgtatcaaaaaatagaatacaaaaaaagtatatgtatatatggagttgaggaaatgaacttctaggtaagtgggacctcttatgagctagtgttactgtttcattttaaaattgatttttataagtgaggtgatttatcctatggttattccctcaatggcatggttcacttaaccatcattactggcatttactacaccaacctttcttaattttgtactttgctatattagatatgctcaatgttggttgaattaagccattaggttaataggagaaattattttaaggtacttactcataattagattaaaaggcgtgggttagcaatgaaaggagcattgagtaggtcttgcttggaaggaaagttattctaaatattggagcaatgaattgttttttgtatattcccatgtggtactttactattgtataggtttacttagtattttgtaggcttcaaacatactatttgatcaacttgctgtattttatagagaattcctcatccttttttttttttcttatttctttatctatactttaacacattttttgtttctaacaaatttttttttataaaaaaaatagttaggtagattatacttcgtttgtcaaacattttttttttttgataggtaatacttcgtttgtcaaacataaaggcattaggataagttttaatgtaatgacttgcacctcacaactttaaaacaaatctataaggttaagaatagttcatacatatatagcatcagaaaccttctctcctatctaatatgtgacatcacaaacaacccccccccccccccccaatatgcaaacacaacgtccttattgtgtcccacgggattgtggggctaaacagacaaacatcccatacggggctaaacaaactcttataccgaggtcaaggatcgactttgataccatttgaaacatcccgctcccaactatgtagatatcatccgtcttgggccctcatagctttaaatgatgtctacaaggttgagagaaactcatacatatataacatcgagaactttctaccatatccaatgtaggatatcacaaacacccctcatacagacacaacgtcctcgttgtgtcccataggattgtaggatcaaacagacaaatacacctcatagggccaaacaaacctccacatcagggtcgagaatcaactttgataccctttgtaatgacccacacctaatcatgtagatgttgttaattctgggcacaaagggactttcatgacttcaaaacgtgtctacaaagtcaagaggagctcatacatttatagcgttaggaactttatcccctattcaatgtgaggcatcacaagcacctcctatacaagtacaacgtcctcgttgtatcccacgaaattgcgggactaagcagacaaacatcccttataaggctaaacaaaacctcaacactggggtcgagaatcagctttgataccatttgtatacatttattcattatttaaccttataccaaaattaggtaaattaatatttctttaggaaatatccaatttccattacttaggttgacttaacttgtttttctaaacaattgctaacattctttcttagggaattttagcctaatgtttttctagcatccaatcatgcaaataatttatttaatcttttattaagattaattcttctagacctcaaaaccacactaaaaacacttctgcaacctacaaggcttaagaaaaaatacctattatttccaaacaacatcttattatttttcaaccccaaatacacttaacaataatcttcataatcacattgtactattctcaaagtttctcccacaacaacaaaatatcaatgagtgtgggatttgatcttatcacttatcactaacactttttttttttttttatactctctaaaaataaaaagtacaaatccacaagatatttctacaaaattcaaacttttattcgagggttaattcttcttctcaaatcctcatcaaaataactctaggttcaagatgtattaattctatatccatctaaatgctgatttatttatctacatacttttttatttattattattattatttttaaattttttttatactctctaaaaataaaaagtacaaatccacaagatatttccacaaaattcaaacttttattcaagggttaatttcttcttctcaaatcctcatcaaaattactctaggtttaagatttattaattctatatccgtctaaatgataatttatttatcgacatattttttttttttattattatagatttattattatatgtctagattttaaaaaaaaaaaactaaacaatttaaaaaaatatttactttaaataatctaaatgaaatcaatctaaactattattagatcaaggttaaaagtgtttacctcaaggtatacaaattgatctgaagaaacaccttggaactctacaatctaacttctatatagaatgttaaggaatagcccaatatgtatatatatatttgtacaactcaagcctaaagcccaacagtttttttttttgataaataagcaaggaatataataacaaaaggcaaacaaccacaaagcatacaggtaactaaaacctcaaaaacaagaaggaaaaaaaaaaaaaaaaccaaaaacctcaccaacccttaagtggatgctaaccactccaagaagcctataagagaaagcgactcctctccaatatacaatctagcccaactccataaattacagacaaaagaatttttgagtttctgaattgctaaagaacccccccccctaaaggctagcctattcctctccttccaaaccgtccaaaaaatgtacaatgggatggatttccaaatctttttttttttcccacaaaagggctcctccagctaaataagacttcctttatagtttctagaaagacccactgaacaccaaacaaaactaggacatttcccaaaaaactctaaccactatatagtgtataagaatatgatttacaatttcttcttcacaaccacacaaaaagcaacgattagggagttgccaccctcttttttagagcttatctaacataagcaccttcccccacgtagccttctaagcaaagaaaacgattttggttgaaactctatccacccatatgcaattcttcaggaaggcggtgtcattggggttaaccagtaaactatacacttcctcaactccaaactgcccgtttcttccacccttccaagagactgagtcatcctccaaagttagcctgtagcccctcaggacatggagcaaatttcctaccaaatccaattcccaatcattaaaagctctaaagaatcttagattccaatccccctgaccgaaattctggtcccaaacttcctccactgtggcgttcctatgtgtagccatggctaataattgtgggaaactttgggacaacgctgtacgaccgcaccaatggtcagtctagaatctgattttgttgccgtttccaactatgaacactatattttcccagcaccaatctgtttccttcaaaatctccttccaaacccctattccaaacgccccattagccttatttgtcctccaaccaaggcccttgttcatatttcaccgaaatcacctgcttccaaagattttccttgtcacaagcaaatctccatatccatttgccaagcaaggccttattcaagagagctagctttcttaagcctagcccacccttctccttatccgctcaagccacctcccaattaactaagtgggctttcctctccaagtttccccctccccaaagaaggtctctttgtaatttttctaaccttcttgctactaccttgggcattcgaaagagagacatttgataaataggcatactagccatcgtactctttatgagagtgattctcccgcctttggaaatatattgacgttttcaaagcgcaagtctcctcctcactctctcttccaccccatcccacacagagagagccttgttaggagcccttaaaggcagtcccaaataagaagaaggcaaagaacccaccctgcaccctaactccactgtcatcacatcaacctcttccacctcaccaaccgggaatatttcacttttggccaaattgatccttaaacctgacatggcttcaaaccaaaataaggtccaactcaagtgagttaggtgctctttctttgcctcacagaaaacaattgtatcatcagcaaaaaaaaggtgggagataattcaaattcgaccttcttcttccccacattctgcaccctgaaaggaagcccccttcaacaaccctcctaatgagagcactcagcactcccattcccataacaaagaggtaaggagatagggggtctccttgacgaagccccttggtactcggaaagaagcctgctggcaccccattaaccaaaactgaaaatttagctgtagagatccatctccacatccatcctaaccactttgacccaaaccccatcttttgcataaccttcataaaaaattgtcagttaatgctatcatatgctttttcgatatccaatttacatataagccctttctcttttcttttctgccaagaatcaatcacctcgtttgctattagggaggcatccaaaatctgtctatccatcacaaaagcattctgattaggggagaccacttttccaatcactttcttgagcctattagctagcaccttagccatcaatttatacagcccccccaacaggcttataggtctaaaatccccaaggtcctcagcccctcctttctttggtattagtaccagaaatgtggtattgaggctctttaaaaaagagcttggttcatggaactccttaaacatttccatgactaactcttttacaaattcccaacagttttgccaagcccaaagcccaacattaaagccctatcatttttaactagcccaaaattttattttcttaattaataaaattatgactttaccctaacttaaagatggggtgttacaggttgtcatctggtttatgtatttctttaaggccttccttttcacttagaggcctttagtttctcctctctctctctctctctctctctctctctctctctccctcatatatatatatatatatatatttgctccggatactttccatgtactcagttctcttccttcatgtcaatggtttatatttacttgatttactcattagaaaatgtatttttttcttgatagaggaactatgttgtagatttacagaaaataagtgggatacttgaacatggacaaatatataccccaattaaggtgaattacaggctgggtgatgaagacataatttccccaacatcagtggctatgtattacagacttgtgggaagattaatctattcatttctcattagtcaatttatgtattaacccaattcttcactatttggtagttccaggtggggtgttgaagcactaaaggatgtttgcatcttgtaaagaatagcttgtccctctctgctgcattcttttacaattcagtgaaaggaattgtttgtttctgaaatgaaaaaaggagaaaacaaaaaaaagaaaatgaaaagtagtacgtacttcaagacatggcttggactcttggcaagagatagtacaggacaatcacatgagagttaaggtcaatatggatgctgattgtcctagatccattataaatagaaaagtaaccttcaattatcatgctgttgttggtgagaaccttttaacttggagaagtaaacaaacagtccttggtagttgagtttactgtaatccatggtatctatgcggttatttgattggagattctttttaaaagactgagtttagaggttaagctaccatgagttcatattgtaataataagcctgcaattatcaagcacataatccaattcaccggtgataagactggacatattgaggtggattaataagttataagaaggggaaaaaatcaactctgggaagatttgttctctatttttgaaagccaagatcaacttgtggtgttctttgccaatggagcgacagttcatgtgtttgagtgctcaacaagtttgacatgaatgatatacacaaatcaacttaaggggcagtgctgagggtgtaataagtctataagttgaggatatagttgcaataacaatgtatttgaacaaactttagggttagcctgaatgttatagcagccatgccttattttcttttctttcttttttattctcttcttttcatttcctcttgaccaagcaactgttatactaataaattataacctagctatccagcacccattatatttctatcttctcctgctcagttgtgttgtttgtagttattctttcatgatataatagctcagcaaataatgaactaattattacaatcctatatttaagaatgaagatttgcttttaacatttcaaataattttataaagtttttatatatttaatcatttctgtttgcagcatgcctttattttgaaatttaatctggaagactcactttcttttgttttcattgcagcattacttgctggaatcagggaggaaacagaagct

SEQ ID NO: 11399 - DNA, 980 bp, Vitis vinifera
  Intron number 1 from transcript GSVIVT01021820001 (locus G SVIVG01021820001) derived from phytozome v7.0 (chr-ID chr1 4; pos 6978764 to 6979743 reverse strand)
ttccaagagtgaaactgggaaatcagggattagaggtaaaccccatttctttccttcattatccatttcgtttgcttcaacaaaatctaaaattttgtttttcaatttagtattcttcatattccaaccgtgggtaaaactgggaagtcacctgcttgagatgcaacccatttcaatttctcgattatcctctgctagtagtaactaaaaggagccacgtgtttctgatggcattcaccaggaaagagtgctaagattagagaagccattgatctgaatgcatcttacatgatggatactgcatgattagcaatgtgggtttatccataaatgtgggtatgaaagcagaaatgagttgatttgggaagtgtcatgtatgtgggtgtgaaaacagaaatgggttgatcaggatagggtgaatgcttatgtgtgagtatatgatttgggtatattaggttttgccttaaataggtgatgatgatcaatacaatgctcatagcatcaccaatatatggtggcttttaacttcaatattatgtactattttctcaaaaacatggttttggaccatgtattttatcatgcttgtgtgctaccaatatgagtcttaaattgatgtccaatcttcatggccatatttgagaagctaagtactggttaattttcttttctgtattgatgcttatggtcatacatttgaagaaattttgggcaagctacaatcttgtatactccaataactgtagactgagagaactcacaagaatctgctcctgttctagtaatgttaagcaaactaatagacctcaaattgtcatcaacatgtaatcaattccctatagataatcattgagatcatggaagaatagatgtttatataaatcttcccaaatggagaggtttttatttctcattcatttaaatgaaacatccgttttcttataggtctcaaagctggggttgggttgtaggggactgtc

SEQ ID NO: 11400 - DNA, 3013 bp, Vitis vinifera
  Intron number 1 from transcript GSVIVT01017888001 (locus G SVIVG01017888001) derived from phytozome v7.0 (chr-ID chr5 ; pos 4368380 to 4371392)
tcgccgtcgcttgtttcactctccctgttgaaaaggttcggttttctcctctgggtctatttccttttcattttttcatcatttaatgcgtccttttttttttctttccctttttagggttttgatgtactttttaaaagtgggtttgttgtctgggtttcgattcggtggtttgtttaatttgttgtgccattttggttggcattttgagtcactggtgcttgcttcttgctgattgaattcattggtaggtgattcttcaaatgttaggttggcttgtgaggcgggttgttgaatttgtgagagatattacgcttatgtgtgtaaaatcgcattggcatttggtcatttggtatgagatcataaaaaacaaactataaagtgaattgaaacagacgtaagacttcaaatgtgggagtctcgtgttagtctaaaaggacgttaaatggaagtgctggctagagttgatgtgaatgtgaggtaagagggccactgggtaggagatgcaattataatactaaattcttccagttgatggctaattggagaaggacaagaatttccggggatgaatttgacaatgtagacataatttcagaagattgttttatgttgcaactctttttcaagttttagagttgtaagaggcaaagagaaaaatgcaaaaattgattcaagtaggggaagtgctccagggttggatgccattagcatcctctccccacacgcttctctcatcagagttgaacttctgaaagtgttttgttgaaattcattataacagtattgcaaactccacttctactatgtggaacctaagaacgatgagatcctcgttcttttggatttcttcttcttttttttaggtaaaacaaaagtgtaaataaaaaaggaagtgcttatagagtgcccaagatacccaggaagcatataacggtcacctaaagtctcatccataagaataagggggctactaaaaggaatgcccgttctcaataagaacccaaccaatcaacaaagctaattgaagacaaaggaccatcatctataagcatattggtccaagatcaaagattacaaacaaaagagtgttttagcctttgggaggaatgctcctcgttttcaaatgcttttctattcctttctcttggatttttaggcctagcagattggcaaacagtttacgtagttatgtgcagattcttctttcccccaaaattttgagggtgtagttttcactcttgaaagggcttaaggtagtgtttcccctagtttcacctagccactgatagaggtagattaaggccattttaacttatgcatagatggttacatgggagcatatttaaatgctcttcatgtatgagattatgggcttggtgaactctgggaaggtgttgggtctccaggattcacaggtgtgttaactttttcattaatggaggagcttcaatctggtaactttagagtgtacttttatcctgcttgggtagcctgtggtatctggttgctttcttagaatgggtttgtaggggtggattgatgttgacttgttttatgttcaatctctcttctctctctttacccctctccctctccctttccccctcaagacagctaaccttctctctctttttttttcttcttagtattataattttacattttaaaaaaactttggtgcagtgggacatttctttcttcttttctcgatctcaatgatatctcacctaggtttgacaatgtaatattttgcaaattattctttccttctgatgggggatgccatataaccacaaactaaggacgatcctaccaatcctgcttcttgttgttttaatgaggtctgccttttaaccttcattaatagaatgttgatagagttttgattttaattgtaatgcctctttttcttgcaattactgttcaaaatctatttgttccttcaaactttgaatccgtttctatacatatgggcctgttctagcacctaccaaatttaaaatttcacttggatgactgctcgacataagataagaataggagatgtgttaaaaaaaataaatatatctaaatctccttcacctaatatatgctttatgtgtaagagggcaaagggaattgcttgagcatctctttctgtactggagattcttattcagagggaatgattcttcctcaaattgttggacgttcgttaggcacctttgagaggacttgcttttcctgtgctacgttttctccagtattgaaggttcattgagttagttggattgtgaagagcactgtggtggctatcatatggattatttggagatagggaataagcaaactttttaagtgagtgcatatgctagtttcataattcttttggggtttcatcattcccattttataaattgattggagggcaagctgtgttttgcttaccaagctccttcaagcaagtgtggtaagtttaactttgatgtttgcttgggtggtggggaacatagtcaactagcatcgttagctttttagggggtttgtgttctgccattttactcactttgcaaaagccttttaagtaaacttccagcatttattaggataaaaaaagggtagcaaacaagcccttgaaatcacatggaagaaatgatatttgtgggcatatttgtatctcaatcaagattctgttgaagtcccaattttaatttttcttttttcgaatacagcctagtgtaactcaatgtcttttgcatcagactatcaccatttacattgatacttaagaatgtattgggaagtttcttctgttatgattctttttctttttctttgttttttttttccatgaatatttttttccaatcatgtagataaattgaatattttgggattaatcatagtatcattgctgacaatgatgtttatgttttttttttctgaatttcaattttgaaaattttataccttcattgtgatacattgctgaaaagaattgcttgttacagattctgaaggacttcttatt

SEQ ID NO: 11401 - DNA, 2011 bp, Vitis vinifera
  Intron number 2 from transcript GSVIVT01025535001 (locus G SVIVG01025535001) derived from phytozome v7.0 (chr-ID chr8 ; pos 14245643 to 14247653 reverse strand)
gatattggtggaggtaaagcaaatgaattctttgatacagtgatttcaattcacaactatttatagaataaaatccaaatctattcctggttgtcatcatattcatcctaacatgcatttctaaaataacacaaccgacatttcttatatgtttaggaatactgataataaaatgcttgttgtgcagtgtaaaaaaaatttgcactgaaagaggaacaaaaagaacaatttctgttgctagcatccttatgtttggcctgtttgcatgatctcacctttgtaatttcaggttctgtttgtgatattggttcttttgccataaatacatgcggttttatgaatttattaaatgcttttacattttattttaatattatatattacactttcttgtaatgtcagattgattgtcagagctttattgtgtgtgtcagtgtatgtgtggggagggatttggtttggtgtttattcatcaatatggaggcagctttagttgtgtggcccaatatcgcctttgaaccaaaaaagaaaagatcttatattgagacatgaataagtccaaatcattgttgaacaacttgtttgccttgccaatgacttgaggagtaaccgagtaacacattttagttaatacaataataaaataagaaaaagtggaccttgtgagagattgataataaagtctcacagtctcacagttgttagttgtagtttctcattcagcttcataaaattaaaggaatagttaattttgttgcagttatgagggaaccaccatgtggtttggaatatgttttgaagggatacatattcatctacaataaacaaaaaatatactatataaatcttgaaacttttcaacctaacacaattgagatttctttcttctcctttggttctccacgaaatgattatagatcaacagacaagcattctaccacgaccattccactatgacaggaagattcaaattaaaatgagaaatttagggttaggtgcagcttttgtgaagataaccagtccataaagcattatatgaaaactatatattgtgtaaggatacttgcctctttgaagcaaagatggttgatcaccttcttcttcactgtgcaaggacttgggttctttggaatcttcttttctccctctttggtgtgtcttggattctttcttgttcagtgaaggaaactcttcttgggtggcatgggtcatttgtgggtaaagcttgtaaaaaggcttggcaagcggcccccttatgcatattttggacgaaggaaaggaatttgttagcgtttgacaatgaggagtttttgctccaaagattgaaaaattcttttgtatgtaacctgtggtcttggtctagggtgtttgtagatttgagccattttctcttttaagcttcattaatcggttaggctctaagtaagggcaggtgatgttttttgtttctatgcctccacctttggtttgagccttttgtcttcttttgtatacttcttgtatactttgagggtactgtttttggtgtcccctcttttctttatacacaacttttctttacttatcaaaaaacaaaatattgtgtaaggatactacggaatttgagatagcatgttagagggttcctgtaatatgatatccactttaactctgtttatcttatcacaattagatcattttcgttccttatgtctagggagctgaatttaaaccttgttccacttttctatagcttgaaattttattctagtagagaacatggcttatctcacaagtcaatgcaaagtatatggcgaccttaaaaatgtattttagcagataaattagttgtttagtaattttaccacgaagtataggatgttaccaacaatacttccatcattattaataacagaaaatatatttatgttgtaattgtggaactatttccctcaactcatgccagctgcagcttcaagcaatttcaaatattgcaggaaaatcaaaaaacaagaaccaaggattgttctat

SEQ ID NO: 11402 - DNA, 6075 bp, Vitis vinifera
  Intron number 5 from transcript GSVIVT01021791001 (locus G SVIVG01021791001) derived from phytozome v7.0 (chr-ID chr1 4; pos 7375889 to 7381963 reverse strand)
gtagagatccaaacttgaggaagttgcgcagactggtatcattttgcttatatttctatagttcctgcaataaactattacatttcattgcatactacaaagtcagtaaattgcctatgtccatataggttcctgttacgcatttttactctggttgttatattgatgataaacctgtaatgattctaatgtatactacgtactcccccccaccccacaatgtgtcagtgagagaacttcatggaaagtaggacttatctacccgtttcctttttaatcagtttcctctttttattttaatattttgtgtaatctgcatgaaaaaggtgtttcaaaatgcaacacttaaaaaaactctgatctgaaggaaattaagaaatggaatgaggagtgtggtgggggttctaactcaggtgcaagtgtttagagtgagaaaaggatggtttatgaggttagcagaaatggatttaaccagttgagacaagaatttactgttatttggttaagagtgtggggtgaaaatacaaagttatttatcatggttaatattcacagaaggtaaccacattagtaagcttgcactgatagggagttgaagactaggaatgatgaagataaatcaggggttagcactagagactattctcttagttttcagagattgaatgtgttagattttgcaaacattaaacactctggttagagggaaggtgtaagggggtggtggggcattgaagattcattgtggataagtctctagggcctggtacgatgactattaatttcttggagcagttttgggagtgatggtggaagaggtaatggaggatttttaatcagaatagggagtttggatgctgctgtcatcatattagttctgaaagtgtggatttttttttttttttgggaggaaggaaaagagagagagggtaaggggggtttggggaaggaagagtgtttctaaagttatggttcaaagctacgaagtgatttgggtgagacactcaaaatgccctaacacttataaatcctaaatgttgttttgttggccagtgactgttttgattccaggaatagtgtataagccagatgagaagagacatgatcacatgtagtgctattctctttcctatatgttagcaacatgggtcctgggtagtggtggaggaggtgtgcagggcctatattcccaattgaagtttctttgctagttagagtatgctttgctaaggaaatcgatttcctccattcttttttgtcttagtgatggaagttttgggtagggtggttgctagggtagtggaggggttctgaatcagatttgaggcattcaggaagggggtggatggataggttgaaagttaatatctaattttctgcatgcagaagatacaagtatatttcgtgaagtggagttggatcaattgggatatctgagatgcatccttctgtgccttgagatggttgtggttctgaacataaatttgaaccagactgaaatttattttgtgggacaggaataggcagcaggagagttaatcacaggctagggtgtagagctgggtgctgctgtcttgttctcttgaattatcataggtgcatccctcaaagtagagggtgcatatgtagtcatttagatatttgaaagaagatttttagggttaaactatgaaagaaacaatatctttctagagaggagaattgattctcatcaaagttataccttccagcttattgacctaccttatgcctttttttccatttcaatggagactggaaatatttgggagaagtattctaggaagggtgccagtggggagaggaaacacgtctagttggcaggaagagtgttctctgttgcattttgtatgcttgaattcagtgcattccacaaagctctttcaggccgatgactgtggagatttagggttgcagaataaaggttctggggggctaatgatagttggtaaatatggggaaaggaggggatggcagtcgagtgctgacataagctgtgagtattctgtggtgggccttttgggtcaaaagaggatgggaggctttctttagacaaactactttgtaatagggcatggttgatagtgcaattttagtatgatgtggtgcaggatgatttgataaacaagatctgggattattctgttagtaaaaagccatgtttaaggggattaatgctggataagagaggagagataatggaatcctggattttatagggcccttatggactgggaggtggggttagtagacaccttctttgagatcatttataggaagaagatccagagggggtagtgggtgttgttacttcaaagggaggggtgttttaggtgaagtcattgtactgttattagataggtcttaagttgtgtttggttttttgcctgaaatctgatgagatttgatttgacttaaatttgaataaaggtaactgtgatgtaatgatgaggttgtttgtttttattagtgtttgaatgttgtttaagtgttaagttatttgttttaattaatgtctgaatattaagtgttaaatctctttatttattttttatgttaaaaacatctataaaattaattatttttatctttgtatttttatttgaaaactaataattaaaaacaaaatagtaatttaacatatttctaaatattccaaaatattaaactttattatcataataaacattttatcatgattagttgtgtaattaataggaaattggtaatcggataatatataggatttctaattatgcttggttcttaagaagatattagaaatctttcaagttaaaatgatagaaatcttttgtgttaacacttgtttttatgtggtatatcttcggattcatagatttgtgactgaaatatgttttattattgagatttttggattttttaatttgggagagtgtatcaaatattgactttttatttttcaaaactaattagaattgttgatgatattggatatttaggtaagtgtgaattatgtttttgggttttgattaaaaaaattatcaacggaattgatgattgatagtatatttggttttgttgtatggtaagaggttgaattttgacaatttgtagtaaatttatttctagtctaaaattatgacttttttttttactgttgtttattttcatttttgaatgataaatctacaacaattttggaattcaatttcattgagaattgaatgaattttgaagcaaaaatagtggctgtggtagaattttggctttggttttgaaattttgtggatttattttagattaatttttaatccaaactaagtgagttttatgttgttggtttcatttttgagtcaaaattcatgagaaaattgtatatataaattttattgacaaacaagagaaaaaatggataaaaataaaacctatttaagtcatattcggttttttcttgagaataacttttctaatttataatatattcatttctcattcataatgcacaaaattgagatagcttaaatttttcaaaacaagtgttatccaatttttttaaaaataaatttggttttattttgtgtgaaaaattggatttgagtattatagaatagtcaaaggttgaaaagagaaaggcattaagatagaagtaaaaaacaattcaccttaacgaaggactctcaaaatgtttgaagtcttaaaggaagttgatttaagatttaagtcaaaaaacaaacaacccccaagtaattgtttttccctcaagatggaagtaggatgcaatgtgcttcctgaaaaaggttctttctctatgactgtttagattcccattatttgccaactaatttgaagaatcatgttatttgtaattgctgttgctggtgtcagagcccaggattgttggtgaattatctattcttacattgagatgtagcttgggattcattggtctaaaaaatctgctctttttggtgtggtgagggggacagcttgtgtaaataggggtataatatgtcctttatggacttcttagatggggtgattcataggtaatttcctttcctctatttttgtttgtgctgcctccttttggtcctctataggctacatatacctgggttgtggtttgttctctttagtagattgttcttattaaaaaggaaaagaaactttgtggccctgggatttgaagacggaagtctgtttttggaatggtgcagttctgataatgattatgggttatttggaaggagtgaaaaggcagaattttggaagacaagactgagaatccccacacattgtggaataggactctgttaatggctttgcagtgggtgtcagtcatgaagaatttcaaaagtataaaaggaagtgcttagtctatgattggaaggttgttacattctctagaaagagaccaaaccctaatccatttatttggaggctctctccatagatattgtgaaacatagttttgatagttacctgttaggaaccctactcagattgaagttggaagtactcctagagacatgaaaaaaaagtggttcttccttttcaggaccaggggttgggagatgctaaaaaggcagaattattgagcgagctggaagtgctaaagaaaatgcatgctgttggcttggggaatattgtagtggggaaggaaatgtctggtaaccacaagctgggcagggacaaagaattgaggtgctttgagatctgaatatattgttagactggtcattgatatagaggaggctcttgatgatagattggagtgaacaccaacatcagacagatggaaggttggttcctatgctaaggaagtttctgtgttggatgagttcttcagagaggactatcacattgttgtaaggtagtttgagtgaggaactgtacacatctctctctctctctctctctctctctctctctctttttgttttgctgtttttcttcttggaggtgggacgcctcattccagcctttattttgtctttcctcagtttatatgtatatattactatccacctattaaaagaaaaaaaacactagcctcatgactttcaagcttgttgccacttctttgttgacctagagttcattgaattttagaatattcattggtttccaggttgcaggtatattatcaatcttggtctacaagggatctttggaacttgttgtttacttcgtttggggtggtgtgggtgctcccggattccgtgagaaatttgcttcttgagtggaaaatgaaaggcatggggaagaaaaggagtgtagtttggaaaatggcgcctatttgtctgttttggtgtatttggggagagcgaaatcgatgaaccttcctaaaggaagagatgacaaatacgagcttgaggaaactttttcttcggtccctgcttgaatggtctcaacaatttgtggacttggacttggactatctctcttttcggaatttgttgggtgatagggttgttgtttagctaatccttattagactttatttttctcttgttgccttgttttgggccttctttgtatacagcctgtgtacttagggagcgccccctgttttctggcgttttttaatctaatggttctctttgtctatcaaaaaaaaaaaaaaaaatcaatcttggtctagatgttgtttgtattcataggttttatgtgcaatgtttctttctgcagtttttttgttttggtgtttttgaaattggtaactaaactgatcctttgctggtactatgttaggaagctattagcacttcaaacttcttaatttttttttttttggatttttgcctcctatagggtgagactaacatttgccatttcagatccctgttttactttagcttcactagaacaaaaagggaaaggagacttttgagagttaatgttcattgatgaatcaatttttgctttagcctttaataaaatcttggaagatcatttgcatcacatggtacctctcttatatggaattgttgggttggagctgactgggtgcagttatcatttctatgttattttgcagaaggcttattttaaatatagagtaacgagaacaaa

SEQ ID NO: 11403 - DNA, 15530 bp, Vitis vinifera
  Intron number 6 from transcript GSVIVT01034651001 (locus G SVIVG01034651001) derived from phytozome v7.0 (chr-ID chr1 3; pos 13318212 to 13333741)
tctaattgtgtttgacagacttaaggtaaaagcttaattgatggagtttttattgtgtgagcttgcctacaaattctacttttcttttttcataaatttgagagaagttgagtagacaatccttttggccaccatggactttcaatatattttcattagtagtatttgttgagagagagagagagaaaggagaaaaaccttattttcattcatctaatctctacttacaattgagagatatatatatacaaggctaggagtcctaactaccatacatgtgacctatattaacaaggaaagatagtatactatacatacattatattcaacactccccctcaagctggagcatatacgtcatatgcaccaagcttgttacaaatatatttaatcctaggacctctgagagatttagtgaagatgtctgctagttgatcatttgaattgacaaaacttgtagcaacacatcctgatgcgatcttctctctaatgaaatgacagtcaacttcaatatgcttggtcctttcatggaagactggattggatgcaatatgtaatgcggcctggttatcacagatgagtttcatctgttcatcctttccaaatcgcaactcctgaagaagatgtctcaaccatatgagttcacatgttgccaaagccatagctcgatactcggcttcagcgctagatctggccactacatcttgtttcttactcttccaagatattagattacctccaataaaaacacagtaccctgaagtggaacgtctatctgtgggtgacccagcccaatctgcatctgtgtaaccaacaacttgagtatgacctctgttctcgtacaatacaccttggcctggtgtacttttgatatatcgaagaatacggattacggcatcccaatggctatcacatggtgactgtaggaattgactaacaacactcacaggaaaagaaatgtctggacgagtaatggtgagatagttcaatttacctacgagccgtcgatatctcccagggtctcctaaaggctccccctgtcctggtacaagtttgacattcggatccataggtgtgtctaccggtttacagtctaacataccggtttcttccaggatgtctaaagcatacttcctttgagaaaggactacaccagaactggattgagctatctcaattcccaagaaatacttgagttttcccaagtctttggtctgaaagtgggtaaaaagatgttgctttagtttctgtataccatcctgatcactgcctgtaatgacgatgtcgtccacataaacaaccagataaatacactgccccaaggagttatgatgataaaaaactgaatggtctgctgtactgcgaagcatgccaaactcttgaacaacagaactaaaacggctaaaccatgctcgaggagattgtttcaagccatatagagaacggcgtaacctgcacactaaaccagactccccctgagcaacaaaaccaggaggttgctccatataaacttcctcgacaagatcaccatgaaggaagacatttttaatatccagctgataaagaggccaagagcacatagcagccatggagagaagcaagcggacagaagcaatcttggcaacaggggagaatgtgtcaccataatcagaaccataaacttgagtatagcctttagcaactaagcgggccttaaggcgatcaacctgaccatcaggaccaaccttaactgcatagacccaacgacaaccaactgtagatttaccagggggtaaaacaacaagatcccaagtgccattagagtgcagagcagccatttcatccaccattgcctgtcgccagcctgaatgggaaagagcttcatgggtgctcttgggaagagaaacagaggatatagcagaaacaaaagcagaatagggtgaagataatcgatgataactcaaaaaattgtaaataggatgagggttacgagtagagcgagtacctttccgaacagcaatgggtaagtcatgaggagaaggcagagccggggcaggtgaagccgaagggataggaagtgagccagcaggtgcctcaggaaaagggagaggagcaacgacacgcgggcgacgatgataaacctgaagtggtcgagggggcatagcttcaggtggggagacaatgggaatgggcaagacttcagaaacgggaagagactcagaagtggtggaaaagaatggtgagtcctcaaagaaggtgacatcagcagagataaagtaccgatgagtctcaagggaataacaacgataacccttctgaagtctggaatatcctaagaagaggcacttcatggctttggcggaaagcttgtcctgtccaggagtgagaatatgaacaaagcaagtacaaccaaagacacgaggaggaaggaaataaagtggttggtcagggaaaagaagggagtgaggaatctgatcgtgtaagacagaggagggcatacgattaatcagataacaagcggtaagaatagcgtccccccaaaaacgaaaaggaacgtgactatggaggaggagagtacgaactgtctcaacaagatgtcgattcttgcgttcagctaccccattttgttgaggagtatgagcacaagaagactgatgaagaattccatgatgagacataaacgaagtaaattgggctgaaaaatattccctggcattgtcactgcgtaacacacgaatagaaatattgaactgggtttggatttcagtataaaatttctggaaaatagagaataactcagctcgatttttcattaaaaataaccaagtacatcgagaatagtcatcaatgaaagtgacaaaatactgaaatcctaaagtagacgcagtccgacaaggaccccaaacatcagtgtggacaagctcaaaaggagactttgcccgattattcaaacgctttgggaacgagacacgagtatgtttcccaagctgacatgactcacacggaagcgacgacaaagtggaaaaacgaggaaccatcttctggaacttggagagactagggtggcccagacgattgtgaatgaggagaggagcatcagtggaaatgcaaactgcaggagatgaatctgaggtgaggtgatagaggccttgagactcacgtcctatgccaatcgtcttccccgtactccggtcctgcaaggtcacaaatttatcagaaaaggtaatagagcaattaagagtacgagtgattttgctgatggaaataagattaaaaggacattcaggagtataaaggacagaagtaagaggtagagaaggcagaggaagggccaaaccaatacctttagccacagtttgagaaccattagctaaggtaacagtaggtaaatcagaggtagtagtaatagaggagaaaagatccttattaccagataggtgattagatgctccagaatctagaatccagggtccaagagacgatgtgtgggtaaggcaagcagaggcattaccaggctgggcaacagagcaatagaagcctgagatgtctgagatgcagaggagcttggagctgagcagcggagaatcagaggactgggccatataggcagtgcgaggaggtcttccatgtaactgatagcaacgatcacgagtgtggccaagtttattgcaataggtgcaatgaggacgttggcctctacctcgggtaccactgcgtcctcctcgagaggtagtgtgagaaactaacacagaagaatctgaagcgctagcagatggcaaagtctgtgtggacgagagacggaggaggcgagcaaacacgtcatccaaggacggaactgatgaactaccaagaatctgatcacgaataggctcaagatccggacggaggccaataagagtaaggaccatgaagaacttgtcaagctgcgtttgttgagccccaacatcaggagtaagaggcatcacagtcaagaactgctccttaagagaggcaatctgaccaatataagtagatagatccaagtcctgttggctgagatggacaatagcagaagccaccttatagagacgctggatatcattcgtgtataatcctttggcctgagtccaaaatttaaaacaagttttataggcctgaagatgaagaagaatccggggatcaaccgattgccataatacactacataactgggcatctatcttcctccactgtacgcggtcaacctcagggatatctgcctcctgggtaaccaagtgatcttcatatccttgacccataaaccaaagttcaacagaggcagaccaggagagataattctcactgccaatcaatttctctgaggtaatcagaggagatccagagagaacagaggtaaagatctgatttttggtggtcatattcacgtatttggatcgaagagagccctaagatgggtgcagatttcagcggagagagacaaacagtgagaccacggctgtgagaggtgcaatcaacggagaaaaaggtcgtgacgtgcctggagaggaagagaagcagtacccaagcctcggagatggagaggaagccctgtcagatgtggtcggaatggcaagaaagccaaaaacagaacaaaaggtggagatgcagggctcggggggggggggctgccggagggctagaaggccaagacgccgccggacgagcctggagatgtgtcggacgtggccggaaagtgagccacgcgccggcgcgtgggtgacagtccgacgggaaagatcggcgcgtgggggcgcgtgagactccggttgccggtggggtttccactggcgtgtagatcagcctccggcggttcggaatatgtggtcggtgcccggaaaagagatcgccggaaaaattcgccggaaagggttgccggtcgccggaaaaattcgccggaaagggttgccggcgtggtggagatccgacggcgatgaggttgtccggggtggttcgggaagagagggttcgccggaattgagtacacggctaaaccgaaaaattaggttttctcctttggctctgataccatgttgagagagagagagagaaaggagaaaaaccttattttcattcatctaatctctacttacaattgagagatatatatatacaaggctaggagtcctaactaccatacatgtgacctatattaacaaggaaagatagtatactatacatacattatattcaacagtattttctatttgcagcaaggaagttgttttatctcaacacacatgcaactttgcaacttttgtcattatcactttttctttgctagttgcttactatttgacaattacagttggcttttggcaaattattttatcacctagttagatgaaggatacctaaatgttttaacgaaattgaaaacttctggcgaggaagggttttaatccaaggtggagattgtggattcaaggttgtttatcatctgttagttttattgttttagtgaatgggtgtgcaatggttgggtaaaagcttctagaggcttaggacaatgtaaccctcttttccttttccttgtcaccgttgtccctaatgtgttgagtagattggtgttgagagctgaggattgtcgtttgttgaagggcttttttttgggtagagataggactagggtgactcattttcaatgtgtcaatgatattttttctctagaaccaacctagagttattcttattataacttctctcttagaatgcagagtctttgattgacccttaacttatttgattctcccattgttgggtgaaccttagagctgtttcattcttggacccagtgctagatagaatttcttgttgtttggatagttgaaagaaagtttattttttccttcaagtgtataataactctaatgaattcctgcttatctgttgtcctcacttattttctttttgcctttcagatgcttgtaaacatggctactagcattgagagattgcagtgggattttctttgtttaggatttggggaattgagaggctacctcattaaatggtagtatgtgtgtgaaccaaagataaatggaggtttggggtttggtaggatctctttgagggatagagcccttttgagaaagtggttgcagaggtttcttagggagagaaatgatttatgacataaggacttcttaagtgatataggtcacactttaatgtttggatgtcaacattgtagttcggtgattgtaacaatgttcttagaaggctattgctcaagtttttttagatttctcctcttgtttctttgtgggaagtggtacaaaaattcatttttaggagaacatatggttgtgtgactaacctctcaaacgtcaatttccaaattgtttcacgtttttgaggaataaagctttcttgttttttttgttcttgttcctttctctacctcttgatctaggaatttttccatcagaacatttccgatttagaaattaaggagctaacaatcttcctttcctccttattatgtgtacttttcaccttctttcctatatttgagggtttggtcattgacaccttcgagacttctcttagtaaatccattcttttagagctctaacaatttctcctatcttgacttattttgctcttgtccaattaatttggaatccaaaagctccacttaagattaaggcttttgtatggtttgtgtctaataagaagattagtaccaagaatatgcttcaggtgaggaggccttacaaatctcttagcctagaacagtatgttatgtgctcggtagtagtgaatcaattgatcatctcttgcttcattaccctattgcatagggacttcgataaagattattgggtcttgcaaagattgattaggtgccctcctagatgtatagtaggtatgctaaatactctttttgggggctttggcagtcaactttaaggtagttctttggtgagtggccatgatgcgaacctcaatcgacacgctttgagacctaacaaacagtattggaataattgcccaagaaagctaaaatacagatttttgatagaaccctgactcaacgtttataagtgaaacgcgaaccaaaagtataagtaacagaccttgacccaatgattacaatggaatcatgaaccgaaggttgaacgccacaaggaagaatccctgataagttcacagttcttgaagaaccaaaagaagagcaaagcctcaccttttctgattttttattcaatcaaattatcccctattacaatgagtgcgtgctatttatatgtcatgaaaaaaacttactaaatattaaaaccctaaactaaaaaaggtactaaatattaaaatcctaaataaaggttgatttggtctgaaatgagcagatccaaaatagtaaaatagctaaaaaacgttctaaataatataagcctaaaattaaggtagatttgacctggatttagaagctctaaaatagaaaataactgatatgaagttggaaagtcaatcagtcattaatccatgccataaatcacgcccaatcaagccagattagccctcaatagcttggattaaatttattacaccttcatcttcctttgggccaaacttggaatgtcttgcgttagaatcagcccaaatctcttgaattagcccattaagtgcttctttgatcttcttagatcttgctttagtaataggcccaactggaacatgcaatggatccttgaatgcttgttgattctcatcattccccctctcttcaaaaggattcgtcctcgaatcgtcacctacatcaaaaggagaaagatcagaaacattaaatgtagcattaatgttatactcacctggaagatccaagttgtatgcattatcattgattctctcaaggacttgaaatggaccgtcccctctaggatgtagcttggaccgcctatgggttggaaatctttcttttctcatatgcacccaaacccaatcacccggttcaaagaggacttgtcgacgacccttgttggctttggtcgcatattgctcatttttcttttctatatgttttcttacactttcatggagtttcttcaccatctcagccttatccaaactagtcatttcattaactggtaaaggtagcaaatccaaaggagttagtggattaaaaccataaacaatctcaaatggtgaaaaattagtggtagaatgaatacttcgattatatgcaaactcaatgaatggcaaacaatcctcccaatttttcaagttcttctgaattatagtacgcaacaaagtagataaagtcctatttactacctcagtttgtccatccgtttgggagtgacaagtagtcgaaaacaatagtttagttcccaactttcgccacaagactttccaaaaatagctaaggagcttaacatcacgatcagacacaatactcttaggaacaccatggagccgtactatctctctaaagaacaaattagcaatgtgggttgcatcatcagttttatgacaagatatgaaatgtgccatcttagaaaacctatcaacaaccacaaaaattgaatccctaccattccttgacctaggcaagcctaaaacaaaatccatagaaatatcgacccaaggtgcactaggtacaggtaaaggagtgtataatccatgtggtaagactctagatttggcctgcctacaggtaatgcatctagcacaagctctttccacatcacgtttcatctttggccaaaaaaaatgttcatgtaatacgtctaaagtcttccttacaccaaagtgacccattaaaccacctccatgtgcttcacgcacaagcaactcacgcatagaaccattaggcacacaaagtctattctctctaaacaagtacccatctagtctatagaatttaccaaatgctgtcttctcacatgctctatacacactagcaaaatcatcgtcattagcatacgattccttaacatattcaaatcctaataactttgcatttaaagtagagacaagagcataccttcttgataatgcatcagccacaatattttccttaccttgtttgtatttgattacattagggaaggtctcaatgaattccacccacttggtatgccttctattcaacttaccttgtccttttaagtgcttcaaggattcatggtcggtatgtataacaaattctttcggccaaaggtaatgttgccaagtctccaatgctctcaccagtggtgcataaagctccttgtcatatgttgggtagttcaaagttggcccatttagcttttcactaaaataggctattggtcgcttcttctgcatcaaaacagctccaatacctattcctgaggcatcacactcaatctcaaaagttttaaaaaaatcaggtaatgctaataaaggagcaccacataacctttctttaatttcaataaatgcacgatcttgctccctgccccatttaaaacccacagattttttaacaatttcagtgagtggtgcggttagtgtactaaaatctttgacaaatcggcgataaaaactagccaaaccatgaaaagttcttacctcagtgattgacttaggtgtgggccattccttgatagccttcaccttttcctcatccacctcaattcctttcgcactaacaacataaccaagaaacacaactttgtccatgcaaaaggaacatttctttaaattggcatataatttttcttttctcaaaacagcaaacacacaatgcacatgattgatatgctcatctaagttcttactatacaccaaaatatcatcaaaatagaccacaacaaatctgcctataaacgcacacaatgcatggttcattaacctcatgaatgtacttggtgcattagttagaccaaaaagcattaccaaccgctcatacaatccatatttagttttaaaggcaattttccattcatcaccctctttcatcctaatttgatgatacccacttttcaaatcaatttttgtgaaaacaaatgatccatgcaattcatccaacatgtcatctagcctaggaatgggatgcctatactttaccataatgttgttgatagccttgcaatcaacacacatcctccaagttccatccttcttaggcacaagcagcaccagcaccgtgcatggactcaagctctctctcacatgtcctttggttagcagctcctcaacttgcctttgaagttcctttgtctcctccggattactcctataggctggtcggttaggaattgtcgcacctggcacaaaatcaatttgatgctctattcctctaataggtggcaatccactaggcacatcgttaggaaacacatcctcatattcctgcaacaaagaaacaacaacactaggcaaagatttgtcaagtttgttagtgttaaaacatacctctttgtacaagagtacaaatataggctggtttgtataaaaaacattcttgacatcactcgccttagcataaaaacttccttgtttttttgtttttctctcatttttttcactctctattttcttttcactctcttttttttgttcactttcttttttcgtttcactctctttctcatcatctttttttgaactcttagtgtcacaatttttttgcaagtcattctctcttttcaatttcatttgatcttcatacacttgtcgtggagtcaacggtacaagagtaatggttttattgtcttttataaaagaatacctattcttgaacccgtcatgattgacctttctgtcaaactgccaaggcctacccaataaaatgtgacccacatgcattggaacaatatcacaaagtacttcatccttgtacctcccaattgaaaaagaaaccagcacttgcttatttaccttaacctctccacaatcattcaaccactgcaacttatatggtctagggtgtttcaaggtaggtaaattcaaattttcaactaaagtagtgctagctacattagtacaactccccccatcaatgatcatactacataccttattgttgatgtggcatctagtatgaaaaatattctccctttgttgttccatgtcatcctctttaacttgggcacttaaagcacgcctagccacaagtgactcaccctccactggatactccacattattgtcacaagcatcctccagtgatggcatctggtcatcatcttcctcactttcagtttccacctctccatcaacacgtgcgatcatggtcctcttatttggacattgtgaagctatatgacctactcccaaacaacgaaaacatttaatatcacgattacgagtttgggattcatttttacctttgttgacattgggagcttcatctctcctttttggtggttcggttttggacttgaaaacaaccccttcatctttcctcccatttggcctccatgaagtagaggagccgggattttgaaatgactgagtttctttccttttaagctgtcgttccacctttattgccatgtgcaccatgtcctccaactccacatagtgttgtaactccaccacgttggcaatgtcccgattcagcccattcagaaaccttgccatagtagcttctctattctcctctacattagcccgaatcatggcaatctccatctccttgtgatagtcatccacgctcctatagccttgagtaagactctgtaatttctgatacaagtccctatagtagtgactagggacaaattgcctcctcatggtggctttcatttcctcccatgtctcaataggcctctcatagtttcttcttttgttcatcacaagttgatcccaccatataatagcatagttagtaaactcaatcacagctagttttacctttttctcctcggagtagttatggcactcaaagatgaactccaccttcttctcccactccaaatacacttctggatcatttttcccttggaacgatggtatcttcattttgatgtttcctaggtttctatcagtcccatcttgccatcttggagctcttcggaaacctctaccacgcctttcaccccttggtgtaaacctgctctcatggttcaatgaagtttgatcctcttcatcttcaaactcatcctcatggtagtcatcggaatcatcaatgtgcgcacgccttccttgccttctagcattaggggctctttgggtacgctcatctcgcaaagaagcgataacaacgtcttgcctatccatccgatcccgaatatcattaaacaccacgctcatgcgttcaaactgttgttgcatagcctgcaacatgagggatgactcctcccctccttctatttgatgtttcgcccctggaagacatatttttgaaactacaacaaaaaatgttagaaataattcctcacaacactccctcacgtgtttgcactcacactcatgtttcactcttaaattggctttttcccgatattagtctcacactctcttgcctttttccactcgtagctttccctttttagttctgcttaaactaataaatttgattaagaaattcaacttgtagtatctaaactaataccaatggtaagaaaatatgacagaaacactaaatcaaaggaagaggacaaaagaaaataatattttgatttgagagaattgaaactacactcaatattttttttttgttgttgttttctatttcttttctaaagttttttttttctcttttttttttcttttctctcttttttggagcttggtgcatgattttaacttagtgcacgtcaaaaaaataagaacgaggaataaagaacacaaaaggaacaagataggatgataacaagaaacaaaagataaagggatagaaaactgattttagaacttgtgctctgataccaaatgatgcgaacctcaatcgacacgctttgagacccaacaaacagtattggaataattgcccaagaaagctaaaatacagatttttgatagaaccctgactcaacgtttataagtgaaacgcgaaccaaaagtataagtaacagaccttgacccaatgattacaatggaatcatgaaccgaaggtattaagtttgaacgccacaaggaagaatccctaataagttcacagttcttgaagaaccaaaagaagagcaaagcctcaccttttctgattttttattcaatcaaattatcccctattacaatgagtgggtactatttatatgtcatgaaaaaaacttactaaatattaaaaccctaaactaaaaaaggtactaaatattaaaatcctaaataaaggttgatttggtctgaaattagcatatccaaaataggaaaatagctaaaaaacgttttaaataataaaagcctaaaattaaggtagatttgacctgaatttagaagctctagaataggaaataactgatatgaagctagaaagtcaatcagtcattaatccatgccataaatcacgcctaatcaaaccagattagccctcaatagcttggattaaatttattacaccttcatcttcctttgggccaaacttggaatgtcctgcgttagaatcagcccaaatctcttgaattagcccattaagtgcttctttgatcttcttagatcttgctttagtaataggcccaactggaacatgcaatggatccttgaatgcttgttgattctcatcaggccatcttatccttgatatggttttcatgtctagagagaaatgttaggatccttgtgaagggatggcgctccatgaaggctatttggatttggtttacttctcctccttttgggcttctatcactcatccttttcgaggtactcctttgaattctctattgctcgattgggaaaaatatttaatacttttaagagattgatcatagaggaagataatgcttgattaaacctctgccgataggttcagtaaagttaaattttgatgggtgctctttggataatcttgtgtaattagatataggaggtgtgattagagatcatttgggtatagtattgagagcttactctaatcttgttggaatgaggtcatctatcgaggtaaggatattggtattactggaatgtttgttgcaaattaaaaactttgtctattcaacttaaatgtagagggagatttttttgttgttctctcttaggtttctattagtgagagaggctcatggaagtttgatagctggctttgcaaaattagagatatgctagtgaagtggaattatcctattggatttctctctcggccaatcaagctgctgagcattcagccaagcaaggagcaaaaaacttagtttgttttgttggagacttctgtcctccctaagtcgatatagttttgttagtgtgtgtacattgctttattatttttatttatttattttgcttatattctgtatatggagttttagctttcatggattagtatatgtttcaactttcttttgatcaatcgtacacatggaaagggttgctcattgattgttcttcctatttaacattcaatgagatgaacatgcttgtttctgatacatgtagagggagggagctgacagctagaaaatggaagtttacaacaagaaaaaagatgatatggataacatttgtaatacactaccatgatatggtaaagaaattctgatggaagcctatagtacttttatgatttgttgcaaaatactgctataggttacaacagtacatagctcaagcacactgacaagggccaggcataatataaatgtataaacctgttattttttttgataagtgtacaaagatatattacataactttattgacattcattgcccactgtaatataattgtagctagctgcttaagggttgcctacatcagtctcattttatgacttataagttcgactcatgctagttttttcaagttttgatttctccttatctttatatataggtactaagtgcttttcctttacttactggacttctcctagtattcctgttaaattagtctttgaacaatacctgatttaccttcctagtgactgctgaaaactgtatggctatttttgactgactttcaaatgtaattattattttttttgcttttcaattttttttttttttaaatcaaaagattgtatggtttagtaaaatcaaatatgacatgtcaccctaattcttctcttattattcatgattcccatctactctctcatttccatcactacctttccccgatacaatgtttaaacccctcttaactgaaattctttctcctttggtagttcacattcaatgaagtttaatgttcgtaatggcttcctagtgcaatgcatttacattcagctctcaggattttagcatcaacgatttctgtcatgccttcttctttaagcttgccttgacatcctttatagacattttcttttgatgggcaacatcttgtatagacataagccttccaaaccatgaaaacgatataaataatagtgaagtcttctagttaggatttgaagaatgttgtattgttaatgctattttatggtttcctgtaaactaacatctgatataattatggctgtagga

SEQ ID NO: 11404 - DNA, 12291 bp, Vitis vinifera
  Intron number 7 from transcript GSVIVT01009549001 (locus G SVIVG01009549001) derived from phytozome v7.0 (chr-ID chr1 8; pos 9291518 to 9303808 reverse strand)
gagacacgattaccaaatcccaagaaagacttgaagtagtgtgactttttattgttctggtatcagttcgcgttggctctatgtatccaatggccaaagcatgggttgctggtagtacttcaaaatattgtaatttgaataattcttttatattttctcccaaaagattgttctaagattcatgtatacctcaaatttgtcatttattaattgtttctgtaagaaactgatgtttattgatattttaaattttcatttaatttgttaatcaagttatgatatcacacttggtttaagatgacaaccatatgcatcatatagggaaaaaaaagggaagaaaggaatgggattgggataattccttctttgatgattgtatataactggaaaaaattatcatatttattgaagggacggttctgagacctgaaagatgcataaaagcagtacttgcatatgttagtatggatttaactagattgtcaaaataaattgttgtaggcaattgagattctcttactctccgtgattgtcagtgagatccatatactactattatcttccaaaaacgcataactgtacaaacaatactactgaagaaaagtaaggctgaaaatactatctaggttccattgagatcgaattttagtctaaatataggctggctgctttgcatacaaactcaaagtaggcatcctttgctggctaaaggatcagctttggaagccatggaaagtagaagaaagcaaggttcgatctttgttacactccttccgataataaatgccaatttgttcaatgattcaataattcatcagaagtttttgtaagatatactagcaaagagtatattattgtccgagctattagcactttgaaatattgccattgtcttcgtattatgaattaaatcataggcatatatagatatttatggaggttcattaggtgaagaaagcgctgtataccatcttttgcaaccatatattgtgatctccaatgaaatttcaacatcatcattattattttcatatatccacccacctgtagaagaacgtgaaattttttaccaactatgtaaggcaattatctggcatgtgttcaatgtagcacttctacactcgttactaaatctcacattggttgtagtgtgattgaggccaaccaagtgttgttaactgaatggtactggagttttcatccaaactagtttgtcaagttaagagtattgaagcgaaatataatgatagtggcttttccgagtgctttgtaaactgctacactttaatgtgttatcaacatgaccctaattgtcagaatttgactatgcattgtcttgtaagtacaggctcggtcactattatggtgatattcttaattgtcgacgtttgccttatcatgcaatccatgggagaacatggatacaccaaacgaatgcaattcctttttcatcagaagatgctatttcctactctttagggggttatggatatattaggtgatcaagttggtgtgaggaaaccttattgcacaactttacaagaagcctttaaaaagatagatattgacacttaggagttatgacaattatagtatgtggtgagaaggaaaggagattttttttttcaccgtagaagacatggaaaaggtaaacttagcagagtatccatttagaaggaaagtgtgccttaggaaaagcctaatgacgaaagggaggaattgaccactcttttgaaaagttgtttgtgtgtgatattccttgggatgttaaagaggctaaggctatggcattcatcatctcaatgtagagaacaagtccatcatgttggaaattttttatatgagctaacattaattgaataatttgtatttgcaaaacaaacgggttaatggatagtctattatataatgagcccaattaactagtgatcatatttggactgagttttgcatgttttgagtagaagctcagttgagtggcaagtgtaggctatgggtctcattgaagcccattatgggagggcccaatgagaacccaatattgagttttgctaagtcccctctctaatctagataaagggcctttctgttttcccttagagccaccatagttgttatcaggatcatagagagaaaggcttggttgtaacaatcaatcacttgtttttttgtgatggctcaaacatgaatgttctttatagtgattttctattgttagtatcctttaatcatgtatgattaatttatgggattatgtaaatattctatatgtggtatcagagctagatttacatgatttaggatctacaattagaaatcgaaaataaaatttttagtttcttattttattttattttcaaagtcgaatttgtgatccatgattgtgtatgggttttcagtttcttttgattgtgaaactttaggccttttgttcctcttgtcacaagcttcaaattaatatattatatgtgcaatttcgttatttaaattgggagtaattaagtttttaaattttcagaattttcttgtttaaagattgaagaaattttttttttgttcaaattattatgttttactcaaattaaactcttggattttgttgttacatatattatagttgatatgtagcatcaatttccgttttttggctcaatttgatgaaaattgaaaattcgaaaatatgggtatgaaccctagaaaattcgttttacatttttttaaaattgagcaagattgagaagtttttttttttttaaaaaaattaattgttgtagagagatttcttatatttttaaggtaaaaatacatgtaaaatgaggtcagaataggtgttaaaatagaattttcgatcttggctatggaggtataaaaaccgaattttgttaatcaattatggagatctttaagttgtatttttgatgattaaatgacttaaaattgttagaaacaacctaaagtttaaaactcctcaagatcccaattgaaaaacattcttttttcaattgtttgtaagccgggtagcaaccgggtcatttaacaggaattgcaggttttttgacccgctgctggaggttgaagatactctccaacacatgccacacgtgccacatgtgctgcacattctccactcgcgggtcaagtgtgtgaggcgtgtgtaacctcatccggtgtccgttttgagcctcgttttttcttgtgcgctcgttattttgtcatctattttttcggatacattattttattttttggggatcaaaaatatttattaaataattattacttatttgtatgatttaattagcttaaaattattctttggtataattttatgttgagaatttatcagaaattatgttaatatatatagaataggaatgtagtactcactctctctagattgaaactttttcaagcatactctcctacttggtctaaatcacataaactagttaaataattagtttacagtgtaataaaaaaaataaaaaaattgttgttgttcaaattcttgcaactataattgatcattaatcattaaaagtacattttgtgacgtacttcatcttgtttgatcatatgcatatatatcgctaatatgcactattgttgttgggcaatattgttttttaatttacccaattttggaacgttgcatgtgaattgttgaggttatttcaccaaagtgatttaaccataaaaatttgcaagtttatgagttcctattttgttgatggggaaaattttagattaatttgtacaatcgcttgcccaaagggggttattgtgcaaattaatttaataacatgaagatattgaatgagattaataatttgacaaatttgtttgcccaaaagaaataaattttgaattatttgttgatcttcatgcttagagaataattgtttattgtggattatgcccaaaggggagtttatgataatacaattgattcttgtattgtattgcttatgcttatttaagcattttacctattgcccataattgatctagttgcaaatttttgtcaatcagtttcctttgttgtgaacaacaataatgctacaattgaaattctaagtgggtcaaactataagagatggagatcaaacatagagtttgttttaggaatgatgcacttgaacatggctctacgtgaggatgaacctcctaagcctactaatgaaagcactaaagctatgagagctcattatgcgaaataggaaagatcgaatcgtttgagtctcatttcaatcaagaggtccattgctcagcatctccttagaggaatacttgagagcaacaatgctaaggaatttctcattgttgtgggaaatagataccaaatatctgacaatgccgaagctgggtattttatggatgaattgatgaatatgaggtataatgatatgaaagggtttcgtgagtatatcctaaaaatggtgcatcttcagactagattgaaagcactagacattcccattcccgataagtttattgttcatcaagccctcaatactctaccatttttttttcagccaaatcaagactgcatacaacaccctgaatcagtcttggggtgtgaatgacctgatcactaagtgtgtggttgagaaagaaaatctgaaaagagaaaataatgaatttgctcatcttattgctcttggaaaacagaataatcagaagagagttgaaaatgctagaaaacccaacttccacagtcataagaaaagcaagaatttcaagaagagtgggagtgaaaagcagaagaatggaaatgaaaatgccaagaacacagaccttaagtgctatcactacaacaaaaagggtcacaagagggttgattgctttaagtttaagaatttgctagagaagaaaaagaaggaatatggtatgttatctgcttttgtttgttttgaatataatttagttaatattcctttagattcatggtggcttgacagtagtgctactgttcatgttgcaacttctttacaagggataagaaatctgaggaagccaagtgaaaaagagtcaaagcttaaagttagcagtgacatcgggattgatgttgagcatattgggattgctgttttagaattagattatggttttcagcttgttttggacaatgtttttagtgtaccttcgtttagaaggaatataatttccctttcagtacttgacaaaactggacatagtttcacttttgcaaataaaagagttgaggtgatttatgactctaaagtgattggaaattgtgttttgtctgacgggctttatagattgtcgttgttatctgcttattcttacaatgttgaaaatagtgttgctaaaagacctttgactaaggaaagatcttcattgttatgacataagcatttggggcacatttctaaacaatgagtagaacgcttaattagttatgagattcttcctcgccttgattttgatgacttagaaatttgtgttgattgtgtgaaaggaaaattgacaaagactaagaaaaagggtgcaactcgtagtcaaaatttgttggagattgttcatacagacattagtgggccttacttcactaccttgtgtggcaaaaagtacttcattacattcattgatgatttctcccgatatggctatgtatatttgatcaaagaaaaggcagatgctcttgaaatgttcaaagtcttccgaattgaagttgagaaacaactggggaaagtcatcaagattgtaagatttgattgaggtggtgagtattatgggaagcatggtgatgctggacaataaaaggggctttttgcaaggtacttacaagataatggtatttgttgctcaatatactatgcctggtagtcctaaacagaatggtatggcagaaaggcgcaactgcactcttatggaaatgaagaggagcatgatgagtagatcaaatttgctagaatacttatggggtgaagccattaaaacaacaacctacattctgaatcgtgttcctattaagtttgtgcctaaaacaccgtttgaactatggacaggtagaaaacccagtttgaatcattttaaagtatggggatgtccaatcgaggtgaaaatctatgatccttctttaaagaagacagattcgagaactactaggtgctactttattaggtatcttagtcactcaaaaggatacaagttttattgttcgactcgtggcactagagttgttgagtctcaagtggcaaagtttttagagttggatgttgctgtagtataccctctcaatccaatgaaagagtggaacccatggatgttatttctttacctttttcagtcttagacatcaaccttgatgttggagcttttgattctaggattcagcaaggagttgctattgtcaatttccccactgtcgaaataacccctattgtagatgagattcctcctgtggaaatgaggagatcacaaaaaactagaaggcctgccttttctaatgattattatgtttacctcggagaggaagagtatgacattggagaagaagtggaccctaatacttatcataaagctctcaatagtgatggtaaatgaatggctgattgccatgagaaatgagatgcagtctatgtcagacaatgatgtttgggaatttgttgatcttcccaaaggatataaacctattggatgcaaatgggtattcaagaccaaaagagacaacaaagaaaatgttgaaagatacaaggcttggttggttgctaaagggtatacatagcgagaaatcattgatttcacagagactttctcaccagtctctaccaaagattcctttatgttaattatggcgttggtagctcattttgacttagagcttcattagatggatgtcaagacaacttttctcaatggtgatttgagtgaggaggtctacatgtcacaacctgaaggatttgaggcaaatgggaaagataacatggtatgcagattgaaaaggtcaatttatggtctcaagcaagcttttcgttagtggtacttgaaatttgacaaaattgtgagatcttttggttttatagagaacaaatttgatcagtgcatttacatgaaagtcaatgggagtaagtacattttcatggttctctatatcaatgacattctacttgctagtagcgatgtgaatctcttaaatgatactaagcgtattttgtttgctaattttaacatggaggatctcagagaagcatattttgtgttgggtatggagatttattgtgatagatctcgaaacctccttgggctatctgagagagcctatatcaatcatgtacttaaaagattcaatatgcagacatgcaaatatggtgatgtacttgttgtgaagggagataaacttggtaatgaacattgtccaaagaatgatttggaaaaggatgccatgaaggctattccttatgctagtgccgttggtagcttgatgtatgcacaagcatgtataagacctgatatcgcctttattgttaatgttcttggtagatatttatcgaaccttggacatgatcattgggttgctgcaaagaaagtcatgagatatctacaaagaacgaatgattttatgcttgtatataggagggtggataatctcgaggtagttggatactcagattctgattttaacggttgttctgacgattgcaaatctacttcaggatacatttttatgttagctggtggagccatttcatggaaaagtgtcaaacagagcctaatcgcattctcgaccatgtatgctgagtttgtagcttgttatggtgcatcatctcaagttgtttggctaagaaatctgattttagagttgcaagttgttgattccatctttcgacccattgtgatttattgtgacaataatgcaactgtgttctactccaagaacaataagattagtacgagttctaagcatatggaaatcaagtaccttacagtcaaggacttagtgaagaaagaagatattgtgattaagcacataagaactgagtccatgctagctgatcctctaaccaaaggtttaaagcccataatgttcaaggaacatgttgtgaatatgagtgttattaagtcttttgattctttggtttagtgggagcttttgtgatttcctttatttcaattattgttttgtgtaaacattgatcattattgttatgcgacttgtaaaattaaaatctttttattatgatcatcattattaagtattatattatagcatgtcgtaattgaattacatacaacatggtatcttaagatattgaaccttaagaattacagttgtatactattggatgtcccaaataccactattttgagatcttgtggtgcactttggtgacatatgacttgttaaagtcaagcaaattcacattgtttagaaattgcagcaatttcattttgttgagaaattgaaattacaatttcattttgttggtaaattgtaatgaggactgataagaaacaatgcatatagatgatgatcacatgttagcattgatttcttactacactattgggtttacaatccatgtcgatatggttataaatattagtgactataaggggcattatgtttgttgagattaatatatagaccatcatagtctaatattaagaccatgttggattggataagtttatcaagatgctacttatagactattatttctttttaaaaaaaagtgtggccacacaaaataaacttttatgtacttaactcgagagtcttattttcaaaatgaacttaatgaatcctcaaaaaacaattaatgtagcccaagtgggagaatgttggaaaatttttatatgggctaacattaattgaataatttgtattttcaaaaaaaaaaaaaaagggggggggggggggggggggttaatggataatctattatataatgagcccaattaactagtgttcatatttggattgagtgttgcatcttttgaatagaagctcagttgagtggcaagtgtaggctatgggtctcattgaagcccattatgggagggcccaatgagaacccaatattgagttatgctaagtcccctctctaatctagataaatggtctttctgttttcccatagagccaacatagttgttatcaagatcatagagaggaagacttggttgcaacaatcaatcacttgtttttttgtgaaagtgattttttgtgatggctcaaagaggtatgttctttatagtgattttctattgttagtatcctttaatcatgtatgattaatttatgtgattatgtaaatattctacacatcatagcttaacaaaagataagaaattcaggtgtttgacaaagggagattgttaagtaagaagttaagttgttcaaagtgggattcataagggaagtacaatcttcaaattggttgtccaatacaatggtggtttccactatatcccaattgggtttcaaactccatttcatgaaggtaggtcaagaattggatgccagtatggtctccgaatttggaaccatgcaatctgcttggctttgctagattgtgtagaaaaaatggagcatcgagatgacttagcccgaatataggaatgacaccaccagtagttaacaagttgttattcttcacttttcgtcttagataacatgttaggtagctttgacactatctaaattgaagtggaatgggtgagttgaaggcaaaacctaataaccgcgtatgatctaatcatgcataagcgtttagactgggaacagcaagaggcaaaactcttcactgtgcacatagggcctgaaccatagctgattacccctatctaggaaaagcaaagtaaaataaagtaaaatacagaaagtgaaggtagtcgccccaggagccaccatcactataatcgctaataatgttgacaacatcatcaatgatggcttgaaaggcagtagcccaaggcagtgccaatggtagccaccactgatggtggccactgtcatgggaatgccaccatgtagtagttcaccagactgaaggaaatcaaaacaaaacaaatgggagaaagagaaaggaaggagaaaagaagacacctaaatataagtcaccagaaaagtatttagaatgttcgttggaggcactgatagcatagagtgatggtaaacagaagaaatgataaagactttgaaagtagaagatagtgaaaataaagaggaagagtatgtatttatattagggctcaaatgaggaagcatgtggctgccgacattggcacttagcattgtatttatcattacacgattgctttgacagtgttaggccccttgctgccacattgtagccactttgaacttttgaaatttgagtttcttccaattaaagtccaactcaagtgggatggagcttcctctcagtggatgttgcctaaccatccttggtatcttcgctcgtgagacggggtattgactagatctgaccctgttgaatgaacttggagctcgaaaaacatggcccaagatccatggcctagtatggccgaacaaaatgtgataggcctcctaaacaattcgagttcgagatcggccttggcaataactagaaccccaataccgagcctaaaaaatagagctttgattagaacccattgattggacatacgttgggcaattattgagaaagatccaagactatgaggttgtctgaccatgttgaactaaatggactcactccaaaagctagcatgactagggttgaaaaaatctcaaaatatcattgattttcaatgaaatattgcttgttggaaggaatcgatatgatatgtggggcaaatctcattgttttgatttttttgagatttgtcattgttccgttgatttattgatgatactccaatatttcattgaaatttatgatatttcttaaatatgttgtgcgacatcaacatatcaccaatttttgggtgaaatgttgcctacctaactaaacacttgcactttgaattctccaactcaatcatcagttgcttcctctttttagcattaggggatgacatgatgttatacttcacttaaatgaatgactcctttttcagaatttccttcttccctttttcatatagttatattaattaaccaatattgcaacttgacttccttcattacctgacctcttaattaagagttgtgactagattttgatttgcttgttaaatattttatagcataatacttcacgctcctctgtagagagcatatcgttgttacaaaaaagaagtgaagataacatattgtttaacttgatgacacttacaagtaagcgacctagcaggtcaaaattccttgggacaccctataacttctttttgcctttggtaacttcaatacacccattttcctaaacccttgttgcagtcgagaagattcaatatatacaatggagtgagatctcttcaaagaagtaaggaactatgtgtcctctcttctcctgttttcttaaatgtgtagacaaacgaaatgtcacctaacagaatatttaggttttgttgatggttgattacaagaaattagtgaataacttaatgacattggggtggatttgacataattgaagtttgaaacacgcacaaatcaacaaattagtggatggaaagagagtctcattgaaagactttggaatagaactagagaattcaaacttcttgaataatttctttcctcaacacacatcaatttttttgccttctttgcttttttatcgagctatttaactaattgtaacaatgtttaacaaatcatctaactcccgacagctttcctagcttcttaaagtgcttaactaatatcagttaggatgcttgaatctcgagttagcttcttgcatctatagttatcttctttctttctatcactcacccctgccttaaaagtgagactaacaaatgagtgatttttctagctattgtaaattttgaagttaggatattctttgtgaggtaaaataggagtacccactctcgtatccacaccatacagaaagtgatttttgctcatcaaagataattttttttttttttttttttgatctgaccctctgccaatgctttcctccatcgtccatattggaggtgagacattagtatcatgacggccagggtttctgctgcagacaaataatttagcaaaataataacagtaaatcaaaaagaaaaatgccaataatataatttgttatattcttatttttatcattttgttagataatagataatacttgattattttttctattttattaggtaacagatacctgg

SEQ ID NO: 11405 - DNA, 3795 bp, Vitis vinifera
  Intron number 2 from transcript GSVIVT01011867001 (locus G SVIVG01011867001) derived from phytozome v7.0 (chr-ID chr1 ; pos 3436601 to 3440395 reverse strand)
acagtgcagggtttgaggtgctttgcttatttctcttttttctctagatgttgttttaaagagtttcatgttagtgtaattacctcaatttggattcattttcagtattatataatttcctgaaaacgtttgctttggtgggaacgaagaatgaggttccatggagtattattgtcacaaaaaaggcaggggcgggtgttgcatacttggtattgatacctaagttcatgctaactttatttatagttcagacttggtgttgatacatgtaggattagtgacacattgagttatccttagaggttgagtcagggccttctatttcttacagttttggttatcaaattcttttttgccgttatagccttctagttcatatagtgtaaaaagggggggtcactttcttatcttatatatgtgggctttactagcttattttcttgccccatgaagagggcacctttaattagctgtttttatacctttccaagaggagggttgtctaagtataatctcatcacactgaaacatacacttcctttcaaaatgcctaattgcatgagaactaaatgtttcatgtctctgacaaggaacttgggcaccttttaatccttatggtcctcctttgataaagaaagtactacaaacacagttgatttggaagaaaattgaggtaattgtctagattctctagaatagtggttagaattaccagatatggtacggataacttgtgcctttgatgtcacttttgaactcaagatgccaaaagaaatcacattgaggggttagtagatagagatcaaaacttgtcactatgaggactctgaactttgttggttgacattcagcaaactaaagtattgttgccaattcttgtaggaatgatcttgggttgatgaccatgtccttcattggaattacactttttctagcaaaacactagttcccaagcttttgagtgttaatttaaattctgctggcttccaaacctaaacatagagacaaaaacatttaggttgcatttggctttgtaaaactggatctgatttggaattcatattctgttgaactgaaaaaactagattccattgtatcctacttgtctattgtaggattccaattatattaacataatgcagcctcattgaaaataataagggattctaactatgatattagctagtgaccctgataaacttacatccattcaaagaggaaatatgacagcaccaatgagaaggactgatctagtactagttaagagcttgaaaggatgcactgggcggggcacgagaaattgagaatctcatacttcaattcttacaaggtttccaacaaactggcatgatagagcagggtttgcaagacacatgaagtgctacttattatggttgtactttttctaaaaaaaagacacaaaataaagatataaaatcaatggggctgtccgaactggaaaataatttgctggactgctgtccttgcatttctatcaacctatatttatgttatttggtttagggatcaaaggtcatttgctgatgttttggttattccaattttattattggtttgtttgctacagttaactattggttgtgtctgtcatttgggatggtttttcatccttaaattctaaattggtgctctaaaatctgacttttcaatttattaaaaaatgattttatattttgtgagttgccatgcataagtgttgttttagctcttcatgtaactgttaaatgggagctttcattgagatgtaattgaaatgccactggtaattagcaagtatttatgaggagtgaaggattgaattgcatgatagaaggattggattggtctctaatttctgagaagtgtgccagttgattagaatattcttttacagaaggagaattgatgagctattcttcagatcaacaatgaaaaagcttcatgtcctgatggttttaccttagccttgaatgttaggtcaccattaaggaagatatgttgaaggttttctcagaatcctacaacaacgaagtcataaataagagcaccaatactacttttatagctttagtccccaagagaaatcatatatcaatagttgctggttttagaccataagtttgacgactagcatgtctaagttcatagcaaaagtgctttcttactgcattttaaaggtcttgcctgggaccattcattggtcttagtggcaaatgaactggtagatgagagatgttctaaaaaatcaggagctgtcttcaagatagattttcaaaaaggcttgtgaccatgtgaattgggatttcttggatcatgctttagagaggaaaggttttagcctaaagtgggagctgtagatttgtgggtgtttatctttagctagttttgccattctagtgaatggatcaaaggatgttttaagggctctagaggtctaggacaagggtgccctctatccccttttctcttcaccattgccacaaatgttttgattaagatggttgttagagttgaagagcatggtgttttggaaggttttttgttagggaaggataggactagtgtgtctcttcctaagtttgtagatgatacaattgttttcttaaaagccaattgtgaggagttgcaaagccttaagctcatcttatgagtatttggacgcattaatatagaaataagctctttggtgggcattaatttgagtgaggaatattggaatttagagtctctaatcctatttaagcatctctttaaggggaaatcctagaggaactttttgggatccagtattagataggatttcttgttgtttagatagttggaagaaagctttctatccttgggaggtagaataacccttgtgcaatcttgtttcacttatcccacttttttcctttcaatttttaaggttccattaaaatggtttataggaatgagaaattgcaaagagactttctttggtcaagttttgggggaaggaaaaaagatcacctagtcgggtgggatcttgagtgcaaatcaaaagggaaggaggattcgggttagggaagatcttcttgacgaataaggcccttctaggtaagtggttgtggaggattcctagagagcaacacttttttgcatagaggtcattctaagtatctatggattacactccaatggctaggatgccaaacttataattaggtggtcacaccttttcaaagttccaaggactagaattacatttgtttcctttgttgtagatcagtccatttatctggaatttcaatttttgtcgaaaccttttttattcaaagatcgaggaactaactagccttcttttatccctgcttcgtgtgtatatatcaccttcctttcagatcaaagagtttggccattgactccctcaagacatttctctatgagctccttctataaagatctcttagtctttcctcatcttggttggagaggaatgcatggactttcgaggatagatggagattagtgaatgccatttgggactcaattttctttttctcttccctatgggtgtcagttaccaagcctttagcaaatgttccattgtattttaatgctagtttggaagagtgcttgagtttgaaaaagaaggcaatgattgactggttgccccctttagtagattcagtaaagttaaactttggcagatgttcgatgggtaaccctggacagattggtgttttattctttatttatgaaataaaagtctttttttctttcttctgattgtgacatttgatgataaaatttcaggctctggattctgatagc

SEQ ID NO: 11406 - DNA, 9910 bp, Vitis vinifera
  Intron number 4 from transcript GSVIVT01021851001 (locus G SVIVG01021851001) derived from phytozome v7.0 (chr-ID chr1 4; pos 6510217 to 6520126)
ctgtcaaaagattaagaattgcgaggaataagaaggttaggcttctatatttttatatatatattttgggtaacataacaatgtatatcatggtactttgggggggcgcagaaaaaggaatttgatctgatgtctgacttgtattctgagccgttttccttttttaaattatcaactatgtagcatggacactctccatgaggagctggtctgtgatggccaccatgtcaaactcaacatactttcacactcttgaacatgcatgtaatacttcttgggcatgacacacttttgacatttttgaacatgtttgtaatactcgtgcatgttcagaatttttttccttttcatgtctttttctagatttaccatgtttgtatgttcctttccctttatcaactatcaataaggaatccccggtccggtgaagcagctagtgggtttccacatttaaaaaaaaacaactatcaatgatgaaaaggaattatgttttgactttttatcttgtatacaacctgtgcaccttgctgtatagctcctttcattaatataaacatatctttttttattagaaacaaaatatatattaatgatgaaaaaagtacaagagaaagatgagaggtcctccccacaaaatccaaaatactaatcaaagtaagactaaacacctccactatacaaggaaaaccgtacacaagggtataggctgcttaaggatacacaaaggtagcatctcctcaaaactggactcaactcctttcattgttatctactccatttgaattactagccaaaagtcaattgagttgaataacattgagtggaatgtgtttaaaggtgacaacaatataaaaggtccacaaggagaaattaggcccataacatctcttctattctccacgtttcttcaaaaatcctaatatttctctcttgtcacacaatctaaagcatagtgaggcaaacagctttccaaagggtcttgcctttgatggaactcctcaaacctttaaatgatatgatcatgtcacatatactcctgggcagaacccaatccatcttggctagactaaaaagcttgtaccaaagcccccaatgttgatgagcaatgtagaaagagatggttgattgattttccatatctcatacataagacgcaccaatgagaactaaggaacttgtaagtttttctcaaaggtagcatgcataagatccactaatgggcaatatatcttattatagcttacttatccaaaaaatgttttgactcttggtgacgtaatgcagaatcttgagttgtagaatgagatgaaaggattaaggaaagaagaaaaagaaatccttgacaaccacactaggagtcttaggcaatgacaatgacacttaagcaataatacatagaaagaaggcaatcacacttgtaaaggaagcatggtagatgttgaaacttttattagaatttggttttccactttgaaagcctatatataggaaatgaataatagctagaaactaaaagaaataaaaaaattgtaaaatgacaagaagactaaaagaaatataaacttcacaaaaggtaaatgaccacctaaaatataaacttaacaaaagattcattagtgtctgaaattaaatttggaatattggaactggatttccccttgttttgaatgttctcaaaggatgtttctaggaatgttacctgtcaccaagcacggtgtgtatatggacacttatgatttctcttccttaataggacatttcctaattttgtatcattccttactaaaaaagaaatagatttagggaagaaatattatttgataactaaaagaaataaaaactatcttaaaataactagaaaactaagtgctcatttggatacacttctagttttttatttttaaaactagaaaatagttttaacttctatataagatatagtaactcatataaaagtatgaacttaaaaattatttttaaaatttaaggtagtaaaaatcttttaatacttcaattttttaaaatagttttaaaaaaaaatctttttaaggtgcgtctcaaagagttcttacattttatataaaaattattaccattttctgtttttaaaaacattaaactagaagtgtatcctaaggacacctaaaagaatagaaacttgacaaaaaagaaaccactacataaaatagaaacttaacctaacctaattacgctaagtcttgagaggaacttaaaatcatcattgatgttccaaattaactctcgaacattggaattggcctttccctttctcttgtaagtctttaaagggtattttcagcaaatcaaggtgtaaatattggaaagacttcattgtgaaagaacaagggaggtgtggacgttactactctcttttttttggagtttcttgggtttttccgcattcagtaaaggaaactctcataggctggagaggctcttttgtgggcaagaagaggaaagtgacatggcaaatgggactgttatgcttgttttgggttatttggaaggctaggaattctattgcttttgaggacggtgtgctatccattcaaaagctgaaaatttcttttgtgtatttactttggttggaaaccaaattgtggataaaagatggtccttcgaccttaatagattttatagaatgggtgtgtatgcgttaagggagagggttttttgtgcttttctagtgttttgggtccttttgtatgggggtgagttgatctatactgtatctctgtgagtcacttctttagtgcctatttgctatacgtatattgcttattgataaaaaaaaaaaaaatattggaaagactttctttataattggaaaaacagataatacaacctaacacacactatgttgctcattatttgtttgtgtcatttttgctggaaattttggaagcaaggttgcttttactgaaacattaggggaaagcttttctcatccgtcctttgggtgtcaattactatagattttgagtgccaagctatgcccaatggattgattggcaaagacaactcaatggaagtgtcaagaattcaaaagcaattttttcatgtcacaatcatgacttacatgggtcaaatgccattttaacccattaggatatgattatctggttttatggctgttggggtttggttcaagtggcaaggggttcggatgggatgtgagaggttgtaggttcaaatgttcaatttccaggggaaagaagcatacctatcaaagggggaaaaaggagaaagaacatacatgactattagggcctgtttagcaacgatttttttagaacaattttctattatctagaacaaaaaagcaagaaaatacgtttgacaatcagaaactattttctgctttctattcttaagaatagaaaatagagtgtttttaaagaatatcttttagttgttttcatttgttttctatggattgttttagaaaataattataatgattaaaaataaaacactagatataaaaattatttttaaaacatatttaaaaatattaaaaacaagttaaaagacatttcaagttcccaatcagacttttgttctataaaatatcagagaatagttttcaaaaatcgttctcaaaaactttttttcataattgttttcaaaaatagttaccaaacaaagtcttagtcttttcttgaaatattatattgctaatatcttgggattatggtgtctaaatattttgtatttattttcttcctaaaatagaactgtatggttgtgtatttgactaagaattattctatatccctaggattttgcggtaattaggagatgctataaataggagtgtttcattttttttttatcctagaaggtcaacctagattgtaatgtattacatacatttcttagaggaatagaagtgaacagttcatctcacctttcactttttaatagggtaaggatagacttttaaagacaaatatatgacaagaagagactattactagcactatatatctatgtcatatgagttgaactttccaagtaaccaattggtagcatataaactttgataaactatttaagattgcaaattcacatatacaaaacaggtatatatatatatgtatatttttttgataggtaaacaaagcacttggaaaagatgcacaaagtgcatatggagcatacaagtagtagccgaatacaagcaaaaaggaaaagaaagaacaaatcataactcaaaattttttttttccccctaaagacctagaagaacaaagagactataagcctatctaaccttaggtcaacacaaactaaaactacctgctactgccacttccactcttcttacactacctgaaaccaccaccttcagactccagctcctctcctcttctaaataacacctatatctgaggaaagacgagcacttagcttgagcctaccaacattaacctgaaaatcacaaccagcaaggtcacttacaaaccatctccctcccactattttggctcctctctttcttatttgatttgcagtaattgactgaacattccaatttatgaagccccctaacaatgttggatgtagagggaggcctcctctttgcagttgaaactctgctctcctttttggtttccaactttctcagtagggtagcaatttctttctcatgctcttcctccactggcattcccagaaaatatctgaaggagacaatttttcaaaaagaaatattggagaggctttgatctcccattaggcccctaccagggctcccaaaacctgaagccccctcctcactgcacacttctaggtttgcagtcttggcatctttagggtgattatccgaggagctcccaatccaaccctcgccgccacaaatcaaacacagcagcccataaccatcgcccttgcacaccactaaaggttccgcaccctgcaccccccatgggaccaagcttttggtcctcccgaaggtatatataaatatataatatatcatgtctgtcgtttttcagctcttgctgtgtctgcactactcaaataatcaattaggaaaagaggttttctaatggtagttatgcttttgtacttggtgcaaattttggaaggacctttttattgattggaagagtatgcagtataatcttgcaaattgtatattgcatgttatagttttgagccattcgtgcttgaagttttgaaagcaagatagcttctagtgatgtatctataagaggatttttttattttttttccttaatctctccgtttgggtgctaattattggacaatttgcaggagttctcttcagaattattatgtctgctctgtgttctgtttgttctctcattagcacaggtttgtattagctgtgatgggtgcttgttggggattttgggttagttttgaaggctataccatgtcagctttctgtggatcagcagttgatgacttgctgtataggctgaattcctggctcatcagataggttcttcttggtttgaggaattgaaggattgaaagggattcctttgtctaattagtttgaagtgaggtaggtgagtatttgatattgtgctcagatgatgggaaaaatccttgattggtttagggagatagagattacttatcagatgattatctgaccatcaaactagaagatgaattttttggctaagggcagctttgatgttattgcttttaggggccatgtcccattgcttaggagtttggaagcctttgttccttacttgctttttcttggcctttcttcttcataacctaagtatagctaggtggtgttgtttctatcaaaggattccttatcattttctctatatcttttttttttgatacgtaagtcaaatatgtattaagataaaagaaaggccaatagccacatagcatacaggagatatacgaggcagctataacccctcaacaaaaaaacaaaggagaccaagaagacctcacccccctaggtggatgctagccactctaaaaaacctagaagggagagagagtcatctccaatatccaatctagaccaaccccacaaattacatacaaatcattttctctatatctttgccattgcaattgatagcatttatttggtttactgtaaaacaaagttgaaatagatagaaaagtggtgtattgaaagtcgaagaaatttggatgcttttgtgaggtgattgttaatgaagctattcatttgtttgctggtttggagtttatattcttgtctaagttctatgtgctgtttgttttttttctttttctttttttgtggtggaattttggattattaagtagtttaatatttaagttagacaagttttaaggtactctttgtgatgtgaaagaatattagacaaagatcgacttaaagcttgtagtggatcctagttctttacttgagatttccttattttggaaactattaaaatactaggtttactccaatatggattattacaatttggttcaaatttggccatattaacttttgaagctcgtcttagaggagtcaaatttcaaaacacataaatacatgtgtgtgtgtgacaactataacggtacatgccattgcttatgtgggtgaaagtggactctcaattgccacttcttgtttcttgatgcactagtaggtcacttggctttatgcaatctgctggaccctaaggttggggttgttggggacccacagatgggcaatactgtcttcttccgctcttttctatattttctagtcattaggttagcattatgaatggggcatgatacacttttaatagcagtgacatgtgagggagcttctttggtgctcaaattgcaagaaggttatcttgccaatggtttgttattttaacccacaaaataggatgtctctcatttccctataaccaatacaagttgaaagttaagagttaccgaacccttattgttctttcttctaagttacatcaaaattttgttaagattttatagaagcctatgaaatatgctacttgacattgccccaaccttccctccctctaagagtgtgatagatatgttgtttatctctttaaaagggtttgaggatacttttagaggggggatactcctagagagcaaggataaaaatatcgatttccacggatatattagtagttagattttacaagtatattaagaaatatcaataaaaattttgacaaaaaatatcggtagatgaaaattgatcaaacctcatggaatgttggggaaaactccaaaaagtgctagaaaaagcaacaatacgtatattgaagttgttttaaagaaaaaattgatatatgtatgataaatttgtaatattaggcaataatatatcgaatttgaaaacatattaatactaaaatgataatgtatgtagtttggatatattgaatgatataaaagaaatgtttatatatataagtatttttttttatttaaaatgttaataattttatttataaatttatatttgtcttgtatttaattactgtgcaaaagatctaataagatacttaaagttaacttatttaccataagtttattttaattaatttctaatttatattatgtaaaagatatttgtaacacacacacacacacacacacacacacacacaaacacacgcacatgtatgcatttgtaacataagaacacatttagcctagtggtaggggccttacatttcatagagaccaaggttcaaaacttggtgttgtatgtttaggtgtgtgttttttaatagctttaagagaaagaatctcacttcggaaaagaaaaacaaaacaaagactatttaataaggtatggccccatatgcctaatgagaattagattgggcttcaccctagcatgttatgcatgtgttgtctttagttcatctcacttaggcccactatcaaaattaaaaattttgaccttaaatgggaacaagaaaagtggtggtggcgttgatgtggcattgaaaaattgctgataatgtcgaaatattggtaaaatattggaatgtctttgataaatcagtgaaaaatggaaaaaaaaagaaaagaaatatcacgtgatcaagatttccgcctcatttttcaacaaaatattgttaatatatcgtgatattttcgcccttgctaaagaaagggtatttttggcatgtgggttgtcttgcattgttagggatagtttggagggagaagaacacaattttttttttacataaatggaccttagaatctattggagatctaatacatttttattcatacttttgagtttcttcctcttcaaccattgatggcactccatttttctataaaagccctttgttctcttatagagttagatggtgccatcccttttcgataagggataacttaggactcctagattccatctaaggtgagctttttcggttgggaggcatgttggagtggagtgttaactctgggctagtttcaaataagatgctagttgttagttaataggtgtgctttgtgcaaggaggtggaacctagtgatcacattcttcttcgttgtgataaggctaagattttatgatagctattgttccctttattcaatattcattaggttatttttacctcggttattggggctctccttggctcacatgactcttttgtaggtagaggacaaaagaaggcttggagagttgcttccttgtgcattttttggactgtttggaagggagaaactgaaaatcatttgaaaatgagatgtcagatcaaaggctgaaagcactttccttgacaatctatctgtatggcttaaggtgtacatagatgtgggtgttatgcttctagttgatttagttgattggttgggttcctattgaggcagagagtagttttttgtttcccttattttttgtgttgcctcttagctaattgtatacgtcttgtgtactctcgtgcactagttcttttggcacttttaatgcgctcccttatttatcaaaaaagaaaaaaataaaaaaacttttgaggacactccattgaatattctacaacttgattggaatatggtttgcatatcaatgagtgtaggttgtaagatgctcttaatatagactccacctccattgggttcaattaagtgaaaccttgatgggtgttctctaggtaacccaagccagctaggaattggaggtgtgattaggaattgccatgggatggtgttaacagttttctctaaatcagtgggagtgggtttggctagtgaggccaatatcttaactcttttggaggggcttattgcaagctaaagctttggatctttctagttttttggtggagagagatttaactataatgatctcatgagtgtctatgttggggagagatcctctgaaatacaatatgtggctccatcaaatcctagatctgactagcaacttggattattccttctcttgatccccttgttcagataaatgtgaaaccaagcagatggtttcttttgtaggagattttttacccccttgagttgtacattgttgcatatttttgtaatgcaacaatgatttgtacattgatttttttgtatatattcttgtctcatacttgtttgatatagttattttgcagctcttgttaagttttcacttttgatcatccttttttttttggaaagatttctcattctttgcttgtatctgaaattggtatcaatgaatagttagtttctgatcaaaatcaaaaccttgtaaagattttatcaaatagaatagaatgctgatgttccatattttttttatttctattgctatcttattttgtttatattttttacattttcagtttcttacctattggttgatcctatgtttcagacaggaaaatcaaagcattttggcttcattgaatt

SEQ ID NO: 11407 - DNA, 9529 bp, Vitis vinifera
  Intron number 2 from transcript GSVIVT01029861001 (locus G SVIVG01029861001) derived from phytozome v7.0 (chr-ID chr8 ; pos 673397 to 682925 reverse strand)
gctgttggtggttttcatccggcaacatttgcaaggtattattccttatttatttcaatgtagcagtagtttttagcatctataaatttgtgctatgcgaaagcaacaactagttatggttctttgattttgacaattgttcgttttgcgtggatttcttgggattgagtatatgattttttttcatatgcattagttagaagtatgcacccctccaacctccttttagaaaatgctaaaacttatgtggaattatttgggaatctaattaatattgaaatgtaattcagtgtgtttccatgcatacttttgagatagagttatcgtcattctgattatttccagctatttgcttttggttttaaagctcattaaaggctcatgttaaagggatgatgtatatgcgtcttactgtaggcagttgtagtaaatattagtttgcaaaggcaattaagctggcttgaaggaagctttttcagagcaaagattgatgaaaattattaaattcttaagagtgtgatttcaatgtgaatgaaccttatggagctaatggtgttgcatagctgctgttttgtggatgtgtctgaggatcttctatatcgagtatttgttttatctcattgcgttttcattattttcatttattctcttcttttaagtttctaggggaaatcaaatgccctctaaggtaattttttccccttctttctcagttggcatgtcactgtcagtgagttgattaatcagccagaataatcttttactgctattagtatgtacaacttcataataaaattatggttgcaaagaatgggtgatgaaactgttgagttgatttttttttttgttattttttcttatgtcaagagttattttattcattggttttcgggggtattattgtagtcgtggttaataccacaaatatatgagatgtatagggaagtctatttagacaaaactaaatcatttccatactatttttttttccttctccttcctgatctcacaagttctacttctaactaggtatcaagggattgattgatcatagagataattttagattggcaagatcaaaccaatatataaataaataaaatacaataaactctcacaaaacctttttcttcctttacttttcgggaaatttctgttagttcttagttcttaccaagttttactggtttaatgaagcttgtatatggctccttagaccatgtcttggtccatttgacgctgaatcattgagttggcttttcatcctaatgattaatatgttgtgcgccattgaatttttgttctcctctcttatatgcatgtgtgcgtgcatgcgtgtgtatgaggattctattacttcttacagaatgttggaaaaaacagaaatgataaaacaaataatattacacatgttgaagtgataatacataaaaaaacaatatatatggggtaaaatttgtaaagttgggtgcccttgaggcttggttcaagtggtgaagggacggggagggtttgtgggaggttccaggttcaagtcttatggggacaaaaatttacctataaaaaaaaaggaaaattgggtaataatgtgatggggatttgattaaaggagggagtattttttttatttttttatttgttttttgcaatgttttaaacttggatcggactggtaggttggactggttcaaccgccgattggaccactttttggtttgagtcattaattggcttggttttgtattgaaccagtattgaattgaccaacttgacgattaaacccaggatgtgctagatgacttttaggaaatcaattgagctaaaatttagttcaaaaggaggggttttagtgaggcccaaaccattggctaccttcttagtggtcgagtgccttgtatgataagaggaatgtcttgagatttagacctccacattgtccttggttttcaatgtgagatgagatagttagagaaatgccaaaaatatcctattgcaatggttaggctccagcttgggtctccaaggtgaacaagtaaagtgataaccattaggccactaaagtgataaccattaggccacttacactttctgttaaaaattgttgcaaaatcatatataaagttatctattttttttttcaaactttcgattactttagtgatacctttaaataaacataaatatttaactcatcatttattttcattgtaataaatatgtaaacaatgtaagttaaataatataataatttttaaaattataaaataataggatatataattttttacaagtaaaattaaataataaaatttctcttcaatgttaaatatatatttattcttaaatattacacaagtttaatttgataaaattaaaaatattaatacatttatatttatccttatcatgatttagtttgataatataaaaaataaacaatgaaatattattaagatttttaattatttatttatattttaaatttcttataattattttttaaatttaataagatataaattatatatttatgaagttatactgatgtcataattcaatgaccattgaacaagaaaagttaattcattagtcatatgaaccatgatattagtatgattttataaatatataatttatatcttattaaatttaaaaaataattataagaaatttaaaatataaataaaaagttaaaaatcttaataatattttattatttattttttataatatcaaactaaatcatggtaaggataaatattaatgtattattatttttaattttattaaataaaacatatataatatttgagtgtgaagatatatgcaagatggaaggaaaattctattgtttaattttatttacatgccaaaagatatatatatatatatatatatccaaaacaaagaagaggaattagaaaatacaaaagatatccaacaggaaatttaaagagaaggaaccaaaaaacttgttagttcatgataagcttaaaaccggccatgataggcggtacaagaataaaaaacataaaattaaaaacaaagcttaattaaaaccatccatgtaggaggtacaagaacataaaatgaaatgaaaacaaaacttaattaaaaaccatccatataggaggtagttaaaacatatttattttatacataaggagaaatatcttacaatggacgagggtaggaaagcttgaagaaagcttgaaggcttgagagcttacatgatgagagagaaagaagagagaaggaggaacatatggaatggaaaaattacattctactcacaaatgaggaccgagcccccttaaataggcaaaatggaatcttaaatagtaaaaatgaacagtagacccgtgcttgaatagtaaaagtgaacagtaaaagggaactgtagcacttttgatttttgacccggaatcttgctttcggctgaaatgacgtctgagaggctaaaaaccttgaactgtaaattcgaatgctggaaaacactgcagtagaggataatctggcaggtggagaatcattatttgtattttcttattggtgggagaataccttcacagtcatcaccattgtcaggaaggtaacttgttgaatcatcagattctgcatatgagttgtcttatgaaaagcttgagcttccttcatccaggattttttggaattcttgaggggtttttgctgcagctagcatggcttggagctgttgcttcttaagcaaaaattgtgacatttcatcattagttgaggcttgtgtggggtgcttgagaaagtactgcttaactgcattaagagatgcatcattttttaatgcgtcccaccattttgtcttaaaagtccttctgagggttggaaagactgctgattcatctgctatgattaaataatcccactggacaatccaagctagaccaaaattgctgaagaagaataataaaggtggaaaggctgaaagttcttttgggataataaaagagctgctaaatagttcaaacccctccaaaacaggcttagggagaatcttaatagagggatcaaagtatgtccaccaattgtgaaaccaaaatgggaaagaggaaagctgatttttagaggggaagtagaacatccatgaatgatggaagtccctgttctggattaaaaaagtattaaaccaggctttctgataatcctaatagttaaaaaaccttggctttgatggttcagaaaattctcttgaaaaattaggatttccaccccactgcttgatagtgagaatcttatagatatggcaggtggaaaatgccaaatctaaattgctgaatttatttgcattatgcttgatcttaacagatccagtctcaatgagaactgcttcataaaattcccttgtttttgaaagatcactagagggataatgaaaattttcatgaaaagcttttgctgcaatctctctaagattttcagaaaaaaattctctttcaatagccaaaagaggttgatttaaatccttttgccaatatctagattttattgaaagaggtgtggggttggctgccaccacaatttgtttgcttgtagaagaaattgttgctaattccttttgagagggattagccatagtaacctgcttaaaggtctgagaccctgagatagctggatgttgggttgccttgactggtttagaatgatccgaatgatcatagtacaaagtcaacatcttgttaggcatataaatagattcatgcataggtttagaagaatgaagctttgccaaaaagaaaatacaaataatgattctccacctaccagattatcctctactgcagtgttttccagcattcgaatttacagttcaaggtttttagcctcttagacgtcatttcagccgaaagcaagattccgggtcaaaagtcaaaagtgctatagttcccttttactgttcacttttactattcaagcacgggtctactgttcatttttactatttaagattccattttgcctatttaagggggctcggtcctcatttgtgattagaatgtaatttttccattccatatgttcctccttctctcttctttctctctcatcatgtaagctctcaagccttcaagctttcttcaagctttcctaccctcgtccattgtaagatatttctccttatgtataaaataaatatgttttaattacctcctatatggatggtttttaattaagttttgttttcatttcattttatgttcttgtacctcctacatggatggttttaattaaactttgtttttaattttatgttttttattcttgtaccgcctatcatggtcggttttaagcttatcatgaactatcaagttttttggttccttctctttaaatttcttgttggatatcttttgtattttctaattcctcttctttgttttgaattttaagataattcatgtctccattgcatatgaccttgtcctgggtgttgttggtatcagagccatgggaagggaagtcgggtttgttttggtaagttttgacctaccctaggagaagtagcagtgtgcctaggagcgcgagccctgccgggttgagccgttgttagccgtggataggcgtttgttaggctgtaaagtggttggggtgatgtctcatcaggtctgttaatttgctattaggctctagttcaaaaccctaaaatgaattctattttcagaaccatgtctaggagatccagtgattctcaagatactgttgtaaacagtgaagagatcaattatcctaagatccaaaatgatctagatgattggaagctacctaaggtatctacccaagaaatttacaagaaaggaacctttaagtttttcacagactacaccattagaacctctgaaatgtcagtaagcttagaacaagataatcaaattataagactcttagatggtaattccattgataagcataagaaagatgggtataatttcatacacttgggtatgatccaagtagcagtttagcctttgagaagattaggtttaaacacctctattgtcatgtgtttataagagataataggcatctcgattattgagattctattattggagcagtccaagctggattaaatgatgacccagtttatttccagtgtttccataacttcactgttagattaagagacgcagacatcttagatactgttgtcctgcacgttaagactcatggttttaagtttaaggaaggaaacagtcctgtttccatcattaccaggtttgcctataagagtatgactacaagcgttggatctggggctttatgcaccagtcctaagggagaaactactctctttcattcagacgacataaataagtccaacatcatcatccccatgaaaataagatgggatgaagttgaattcccagaaagctggcatttctctaatgccgttccaaccatagagcagagatctgaaaggattgaacaaattgttcaatatcctgatgggggtggagatcttattttctccaattcttttcgccattctagtaaccctagagtttcaggttatgaaccagctaaatcttcaagctcatctatcccagtaaagatcactagggaagatgaaggtaccagttcaaatcctaagaacatcaagctaacaggtgttagaagtcacaccaatttggccagacccttttacattgaggaaaaagattctactcatgaatctcaacaggatgagtctcctcaaatgtctcctacatattctcagatgatcaacaccataagttatggtgatgataactttaagatcaacaaggaactcttaaggaaggacttctattctgaagtcaataaggaaaagaaagattggtttttttagaactattcctaaagtttttagaaccattctccaagaggaattttattcctacttaagacaagaaaagaaaaatattaagttctggatttggtttgaactcttcaaacaagaggaatatccagattatccctttaagagtataaaggttaccaacactaataaagagaataagatatatgaattctctaaggaattccagaaaaaaccccaagtcaaccaaacctttatgaatagaattaaccagatggttaaggataatattactgtctcaatctagcctcataagcaaattaatatggttaaaggtgatattagttcaaaagaagaagctgatgaactaattaaaatgtttaaagaacctcataatcaaactgttttaagcaatattaacaacttagaaacttttaagactaggaattattatcctagacctacctttcctgacatgcagtttgaggaaagaaaccaatatactcaagcttcgtataccagtggcactatttatgaatggaacatagatggtatgatcgagtataacattctcactaagctccaagaaatgaccatggtaagtacagcctataagttaaacaataggttacctgaccatgctgtagcccaaacaattgttgctgggtttataggtcaacttaaaggatggtgggataattatctcacttttgaggatagaaatggtatcctaaaagcctacaggattaatgagaaaaatgaagtggttaaggacgaagatggtcatgatatagaggatgcagtggctactcttatatattcaatctcaaaacacttcattggcgatcctgcaaaaattaaggataagactgcagatcttttaaccaaccttaagtgtccaaagcttcatgactttaggtggtataaggaagtttttctaaccaaagtcatgttaagatcagactgtaaccaatccttttggaaagagaaattcatctctggattgcctagacttttctctgaaagaattaggattaagataagggaacggtttaatggtcaaatctcttatgataagctcacctatggtgaaattataagcattgtcactgctgaaggaattaaactatgtaatgattttaagctaaaacaacaaatgaagaatgaataaaaaatctacaagaatgaatttgggtcattctgtagccagtttggtttcagccagaaagaaactaagcccccctctaagaatttaaattcttaaaatatcattgatgaaattatgcatgagcaagatttcattaaggttataagggtttatagtcttcttgacttctggcttaacaactgatttcttaaaaacttcataaagatcttgcttagtcttatcatcttcaatttttctcaaaatatctaagactaattcttggtcttgacttatgacatttatggttttaggtcgggaattacaatttcccttaatacaaacatcttggtcattagaagattggctagaaacatcgccactactatctagttgattaatatcatcttcattatctgaatcagtccttgattcagattctgaggtttttaataaaacttcacataacatgtcttttaagtcttttgacacatcaagattgttaattttttgcttaactctacaatctttctttaagtgaccaagcctgccacacttatagcaaatgattggcttagcttctaaaggagcactatcttttttctgggcatccttgctcattctcctttggacgtgtcttgaatgcttggtttcattcatcctataattaccatgagtacctcttttactatggtaaaatttatccttgctaggtttcctgttggtttgttgcttagaggggggcttagtttctttcagcctatatcttgttattttataattttaaaaatcattgcattatttaacttatattattttcatcatttcatgcttatcattataaaataaatgtggagttaaatatttatatttatttaagggttttaaataatgaaaaaaaaaaaccaacattttataatttttcgtagcattttttaacaaaagcataagtgacctagtggtcacccattggcttgctcacaacagaggccaaaacttgggcctgcaccacaacaataggcattttttggcaattatctaagtctaagctattccatcccaatttgaaaacaaatggaaatgatgaggtcttaaaatctgaagtctaatgatttgggcttgttgttcattagaaggcatcaagtgagactgagactggcccagtggtttgggccctccccaccctaatacccgtttcagatggaattaaaaatctggtcgttttctagaaaacctgctggtccacccgatttggcggtttgactgccgagttggtcggttcaatggaaaaatgagtcacttacatgaatcaaacctaaaagtggtctggtcagtggttgaactggtcccactggctggtacggtctgagtttgaaaatactgctatttacactcttgagtcgtctattttattagggcagtatgcattcccctctattttttttttgtttatattttgaatctaataattattgttttctttgagttagttgacttttgcctttttgtaagcacttgcaggattctttgttactatttggatatccgctgta

SEQ ID NO: 11408 - DNA, 1862 bp, Vitis vinifera
  Intron number 5 from transcript GSVIVT01027073001 (locus G SVIVG01027073001) derived from phytozome v7.0 (chr-ID chr1 5; pos 18160100 to 18161961)
gttggacagccgaagctttagtagcacttcaggaggtatcataacttccattttaatgtgactggatagagttgtttgtttgaatgcatgaatgcaattaggtctgatcatgttttatttttgtagatttgggcatgcatgcatctgtatatttttgcaagtttttgctcttcttcaaattatttattaagcttatctctgatggtctatagctatacaattcttatacttgctgaacctattttcaattcttcagaattaaattttcaaatgtacttgtgtttctacatggtatgtttgagattgttctaattgcagcatatgtttttgaatgggtgttgggattgctctgatctgtttagttccgttgtatatgactgcataagtttggtttgggatcatatatttcatttgagaaagtggcactgttgttcgtcaccccacaggtgtttaaaagttttacttacttggactggtgaatttatttttttaataggcaaataggatgtattactaaaagtgccaaacaaaaaagaagtggaacctatatacaaacactgtaaacaagctgcacacatacaaaatctagacctttgacaagctaacctatatccaaactgtctacaaaatccagaaagagcagattggcttaagcccattccttcatatgaccacaagaactaggtgtttggaagcaaatctttcaccaccaagcagcagcgccccacaccttcaaaagtcctaatgttgcactgcttccaggtggtccaaagtagacataatggcatcaacctccaaaactaccttgcggttggctcctgcaaaagcatgatgccagctgagcaaaacctttctaatcaagcaggggagaacccatgaaacagtaaaacaccaatgaagagaaggccaacagccaagctcaggaatccatttgtagtggatgcaaatatggtccacatacccaaggtcttccatgcaaatgcagcaacgattgaccaaactctagtttctcctcataagttgttcaaaactcctgattttcttccatgctgcttcccacacaatagaactggactggtaagtcttaatagaagatttttaaatgttgacacaagtttgaggtagctcatcaaaactagttggttccaggcacttaaacggtagttctgctactaagcatccgagataattatcttgtaaatagttgatcgttaactgataatcattagtacatttacaaaatccatttttgggctcaaatttcagacaaattgttgcgagtattgaatacttggatgattttatattacattacattttcttcaagcttactggaatcatcttcgattgtcggatataggcccactgcccaccggattaggaatcgttgaaagccattagcatgtcattcagatattcttattcttgacaacagactaccttttgacagaattatggaagttttatggccttgcctttcacattgtcaagtttttatgtaggggaaatccactagcttgcttttcatgactaaacaaatcttgtgctcatcccaatatgccattttatctgcagtgaatttgagagttaaccagcaaagaaaactcaatcacatgtcagatggttctaaatgtagtgaaattagaagacatgatctatgcatctgacatgaaatgttagaatgaaatttctatagcattcaccatttctgaaaaaggcaatttgtggaatcaattcctgctttttgtgtggttcattttgattagacatgggaagattgatataatcaatatttcagtaaaaggtttttcatttttctttttgtaggcagcagaggattatctggttcatttgtttgaaga

SEQ ID NO: 11409 - DNA, 3628 bp, Vitis vinifera
  Intron number 1 from transcript GSVIVT01020093001 (locus G SVIVG01020093001) derived from phytozome v7.0 (chr-ID chr1 ; pos 10398478 to 10402105)
gctggtcgaggccaccggccatgtcatccgcctcaagagctgccacggccgctaccttaccgcctcacacgatccatttcttctgggcgtggctgggaagagggtcactcagactgtgcccgggactgtatcaaactcgttgattgagtggcagcctacatgggatgggttccaggtgaagttgagagctcgaagtggccaatatctgcgcgcaaacggagggacgccgccgtggagaaactccattactcacgatcaccccagtggcattatgacacgagactgggttctttgggacgtggaagctgtggaggtgccggagtgtgagtcggttgtcgattatctttcggcgatttcggggtttcctccaatttctgacgacagatcaacgatggcgtggcccatctccattctcgcctccttgtactcttcaaaggtatcatctatctatcttctctctcccgcctcttccgtgtaggcctctgccaaggtttgttccttcgttgattttaaggataatctacaaaatccccctctttaattttcaagaaacagttaacaagatttattccctgagttttttttttttagtttttaagtaataattacaaaaatcttcccttcaacttcctggattcaatttgcacccttctatgtgtgaagaacataaatagttgatataaaatttaatagaataagagataaaaaggaagagataatataaatatgaattttttgttcttaataagacataataaactatcttatcacttattttattatggattcaacaaaataataaatacatatattatccaactatttttttcattattttaattattttatattatttatttttcaaaacaaaaaaatttgattctaaaattaaatttgtagttaaaaagaaaaattaaaaattttatataaatatattgtaaaataatattaatacatgtattatttaatataaaaattattttcatgaataaagtaatgtaaatttttatttataaattttaaatattttaatgatgaaaattataaaaataaataaaaacttattatttaattttaaattgatgaatatttttaaaataaaactaaacacaacatacacttataactttttaataataaatattaaaatataatataatttttattttaaataattatagaacactgaaggataatcctttcattttattttataaattaatataaatattatgtagtatttcctatttaggggtgtaacttgaattagttgggcaacccaatttgaacataattcatatttggatgggatttgacaaatattttgaatattcaagttgagtttaagttaagttttctccattcgaactcaatttgatttggattaaggtttaaacaacttgagaatttgatttaatatttttataatatttatattttatataataatattcattttctttttagatttcaaaaaaaaatatcaaattataattatatcatatactttttcattttttttaaagatatataagtttatttttactttttcattgttatcttgaaattttatcttatttattatttaaattatgatatatatattaaactatgcatgaattttgaatgattccacctaattaacctaaccaatttagtttaatccaatcaaccggagtttaatccgattaacttgaattcaacccaagtttggaaaaacaagattgagttggacttgaattaagtattataggttaaaagtcggatgtgattgaacttgaattaattatttcttaatttgggttgaatttaaattagctatcaaaagttagtatttaatatctaagcataatgcaacagtggcattactaaattgggagttatctttttttttttcttcttctaattctagttgaaatattactttgttggcattatatatgcttaaacattttaaaaatattttcttttatctatatagtatttgaaattatttttaaaaataaattttggtcgtatgcaaaccatcacatccaaaggacaaaacaaaattaacttgaaataaattaatattaaaaaataatataattttgactttatttattgtattttgtaatttgtaggggcattaattgcttctaaggcggacaaaatgaaaacctcggtcttgttattcaaatcaaatcagaaaatatatttagatgaagtttaaggatgattttaaaaagtatttttaatatttttaatatttaaaaaaataatttttttaaacacttccattactataaaatatactctttctaatatttgaaaaataaaaaatttaaatattaaaaacgttaaaaacattttttaaaatcactaaaatatgcatttttagataatgttattttgctttaagtttttaaaaaattgttaatattttcaaaaaaaaaattaatacattaaaaataaataaataaaataaaattagaaatatgaatgttataaaagaaatgttaatatgaataaaatattaaaatcaaatattatctttaagagtattttatttatttattaaaatatggattattatgagtgaatatatttttaaattagaataatttagatggttaattataaatatattagaatattttagtataaaatatagtacaaaatttaaaagaataaaaagttaatacaatataagaatatatatataatttttattatatttttctcacaatttttacatgaatggaaatttaaaataaaagaagatcatacaaattttatattttagaaaccaaattaaaaaaagaaaaaaaaaagaaaattagaaactctggttgacttctcttcttcgtcctttctatgctcaacttttcgtgatggaaaattttcatttaattaaaaataaaacagtaaaaaattataaaatacaagagcgtacggtgggggtgtgcttagaaatttagaattaacgattgggaatttgggagagaaagtggcgtcgcttccatcttcaacgcggtaattttaattcttgacggctaccacgcggctctgcttctggaaggaccgtgagtctgtgagccaatcccacgcgcaacttaaaactacctcacccacgccaaccatccccttttatgaatgcaaggaagttatggcaacttcctttctatttgaagtaaaaaaggaaatatccttttattttttatttattcttattaaatagtagtatatttgggagtttgaagttggagtggatgtttggtaattctaagaaatatttatatcatttaaaaaaagaattagaaatcatttgaagtttcgaaaaatttaaatttgttgagaaaatccggatatcttataatttatactgtcttataaaaggaagatagggttgttgctgtataggattcaaaacttctttaagggaataagagagatcacgtcgttaactaagtttggaaagagagttatgtagttgtggtaacagaaagtggtttatatggtgtgtaaaaatttatttgattttgggaaaccttggattaaatggaagcacattatacacgtttacagatttagtggcgatgaagtgaatatgtttcttgtactctatttcgcagcgcgtggagtttag

SEQ ID NO: 11410 - DNA, 2466 bp, Vitis vinifera
  Intron number 1 from transcript GSVIVT01009943001 (locus G SVIVG01009943001) derived from phytozome v7.0 (chr-ID chr1 8; pos 12688946 to 12691411 reverse strand)
tgaaggtcagtttcttctttctctctgttattttctcctctccatctcacacatattttgtttttgattgcaatctgggttcgttctatgattttcttggctctgttttgttcagatgtttccttttttaggttttcaatactaaagtgggtgcttgccaatttgggtgtttgttcatttctttttcctaggttgatctgaaaactacaggaaaacatagggtaaagattgtctccttatatacaatcaaagaaatgatgtatgatttagtatgcctctttctgcgttgtcttcaccagccaagtgtctaagtttaattgtttgagttcacatattctactctggcttgcgttaaaaatcaaaaaagaaaaactcaaatggatttgtttccattatctcggtgatgcattccattatgtcattagatgttgatcacaatttgcttaggcgtaggtctttcttgaataggatttggtagtaaacctttttagagagccagagatctaaacttaagataggaagaggattagggggtctatgaattttttttctttcttgttattgtgtagtgggttttgtcttattctatggagtgggtatacattagaatgggaagacgttgaaaccaaaggtgcaagttcttacacctagtaatatccgcattataatagatcaggagggcaggtggttccattgtccgtgacatttgaaaattactattgcattgttgtctgcagaaatttttattgaactgggccagtttaattgagttcgttgctcttctaggcttttatctttaggatgttttcagtcatcaaagatatgtctgaattgttttgacatgaaaatatggaaactaatttagaaatgaggcagtgccaaattccgggccttgactttggggcttgtagatgctctttacccatggcttctggaaaatgaataattgtgtgggaaataataactaaaagttttggttgatatgggaattgtgaaatacatgaaaaatgcaatgcaaaagagctagcaagtgacaaatagagaaacacagaataatgaaaatggtcttggagatcacaatttgtgagttctttagtagtgtttgccattcatttctttttgtggtctccttgttatttttggtccctcacccacatgatgccttttacgtttttcaacttcagtggaactggaagagagctcccattctaaaaatatgcttgagctctagttcttgtgataatcatgtcttttggcaattacagatgagccatttgaaattatgctaaggtcattcgctttcactttctgtcttgttgccaataactttaagagcccctttagttattttctttttcgttttctttttcttgttattttttttcagcatatgaattgtttccgagtgataccatatggaatgggtttgcagtttacttccggacaggttgctagcaaagtgtgttattgtcttttccttttcatttattattatcatccataaccatatgatttctttctccgtttctgaatgtggatttctttcttaatttattatgaaatacgatttttgcctgcattctggaatttgccaggacaacaactttagggaatctgaacttcaaaggacacagggttttcaagtgtcatatctagacatgtggcatatatttagtggcatatggcaacattttatgatatattttatgagttacatttctctgcttttcttttgtgtttgggggttgtggggttggtttagttttttctattaaacatttaggtatggcagcaatgtcggttgaacttgggtattttgttaggataaagcttgtatgatgatgattgtgtaagttgtcttaattattttcttctttgggttttgatagtctgtactctatttttggtaaaatattttttgttccttcatgacctttattagctctggatctcagataatatttgtttagcaaaccagaagtatgaatgttgcttttaagaggaaaagcctttcaattttcatatctacaagtaaggaagtaaggaagttcttccaaattaccaatcaaataattctctttgctgtgctgataaccatttattctgtcaatcatcaccttaacatgcatacttatgatgggaggatacagactggataagttacaatcatattttgggatggggtcatttctgttatttcaagttaggctatttgatcagcagtcacctgcacatgtagtccactctgctccacttctttactctttattttttgaaaccttttgcttagtttgtggctttagtggcatgtagattagtgagagaagttatggaaaggaaacataaaataatatacaatgtgtttcatgttgtgactaattatgctatgagttgattttattctcatttctttggattttgatttattcaggatcctatagttcgtcctctagttgaacaagattc

SEQ ID NO: 11411 - DNA, 14579 bp, Vitis vinifera
  Intron number 13 from transcript GSVIVT01025133001 (locus GSVIVG01025133001) derived from phytozome v7.0 (chr-ID chr 6; pos 4095165 to 4109743 reverse strand)
caggtataagccaggattgtggccgttatatcgaggtaagcattcttcgttttattcatcttatcatttatcaatgtctttttaattgccattacaaacttttaactaaaatatttgagttgtttttttgttcgttggattctaggtaaaatattttattttagatataggattttttccccttttttttagaggcaaacaacaaaaagaatagattgaaatatggtttgctatcattttcaaaaaaattgctatgccatgcaagcaatgcttctcttagtgaaagagaacccaaggcatgttgaacgggaagaatattaaagactagagactagtggcctaactagtgttaggataggacccttaaaagtatgatatgatataacaaattgaagtttattattcatttaataaagtcctagtagcactttaacctatccttattccatgcagtgcattttatgagtattattgtttgcatttcttacattgtacatgacttgggtgcattaatagttgcatgataaatccaagtcataggctccttgcaagtagatgacttgttcacagtcagttcattggtttaggtaactcttttgaggttgtagtgtactaccttgactgcaccaaaatttgtataaataaaatgatagatccctaagcatagaggtgtggttgtagctttaaaaccccggtgagtcaagtgtcgaaccatggggaagtgatcttggaatataggtgaagtggagagattcaaaaaatgaaagaaaatgtgatggagaactctttcttgaattcttgctttgggtaagaaagttgttatgggaaaaacaagaattggttagaaagaatcttaactaatttgtaactaatagttgaggaaaagggaatccctatggtcccttccttaccatgaaatgatccttgttatcaatattttttactacaagtgttcacctataaattgaaacccctatgttcacttcatttttactaaagtattaatgacttgaaaattgtcatcctgggcttacataaggttgttccaagttaaaatggctttcccattaagtgcttggaataccctacgaggaccttaggcttcaatctctaatgaggcataaatatgtggtggttttttgaacccaatatcccaaccatttgcctaattgcggtatttaaggcttaatcaaggtcatcccaagtcaaaatggctctaccattatgtgcttgggattccttattgagacctataatccctaattgtcaaatgctaacatacaatgctttctaatgaataaaagggttacaatgacaagctactttgaattaaaaatgtacattcatgtaaggattcattttagttgaaggatgggaagccttagggttccctttccttaacctagatgactactcataaatcattggaagtacatcaaattgaaagaataaagaacaaaacagggaattgaacattaaattcaaatatgaaattgtattaaattaataaaatgaaatggttcaattgtgcacttaataagaaaacaattcaaaactaggagcaaatatagaaatccgaaataagaacaaatgaaattgaaaacctaagatgaatcaagattccaaaatccgaattccccaagtttgttggttgatgcaatagatgaacccctctcaaagggagaggatctgaacacccttagtggttgcccattcccctttttatatccctaagttctctcatgtgagagtatctttcctccttgtgaaaaaggccaaggatgattagaaattaataagcattggacctagcccatttccttaggtttaaacataaaaaaggtcacttatgagttgcaatcacgcgctccttcaaaaaagggggtggctttactagggagtagtgcccttatggagcccttgttggcatcattttgagttggaacatcatttttgtttctctaatttattctttaggcaatcgaccttcaaaatttctaaaatttggtcaaatttaagtttagaaagtgaggaattcaacaaaatttgtttcggctcaattggacgtgtctagccccttcaatcacttcaaaatattttattggttggacaaggttagcacttgaaaagtccttgaaaatttagtcttttggttcaatttacccttcgtccttgcatttgagatgtcccaagaggattttaaggtcatcattattcatgaaataagcctataaatataaaaaaatctaagaaaacatgagaaaatcaaatatacacaatatgacataattgcttagttgaagggtgtttttaatagtgaaatcaagttaaagatgtgatcatcgcctctatttttatacaaaatatgacattaatcataccttctaattggagggatgattggtcttggaattgggatagattttgaatggtgagtgtactagtgtgtatggtaatcatcctaaaagggggggaggggtggtgaatagggttatggtttttttttgcaaatttaaattatatgaatgcaagagacaattatatgtaaatatataataaaacaatatataaacaattacatataaagtaaaagagtagggaagagagaatccaaacacaagatttttaaagtggttcggcgcaacccaacttccatccactctcttctagctttaatcccaagcttcaagttccactaattcaaggcttccaaaccaaaccttcaaacaatacaattagattatggttctaatccactctcttaaaattttgaccccaagcaccttttactaacctcaagagatacctcactcttgaataacccctcaagtgataccccacacttgagaatccccaaatgatacctcacacttagattcttcctctcaaagatttacaaataatttcataaaatcttagtacaaaactttaggctcaaatgatacaagaaaactaggattgaatggtgcactaataatatgcatgttttagaacaatgatgcattcaaaaacactcttccaaggctcaaatatattcaagaaaggtataggaagtttaagttcatgaaacaatgaagattgaagtttttttataaaggaaaaccaccaaactagccgttgggggttcgatcggttgagttgggggtcgattgattgactagccattagtatttaatgcttggcaggtgattgttggacctcgatcgccccttgactagacctcgaccggttgaggctcaacctcaaccggttgaacaatcgttttggaagagagaaggtttttgcacccttcgattagttgagctaaacaggtcgatcgattcctcatctggttcaacttgagttgtttttggctcaacgaccatccttttcaacttaaaaccttttaaacaaatttgaaaagtatttgacataaggttttagttaaaaacatgaaatcatcccattttaaaggatttaaaacaaaattacttttggatgattttggtacataaattaataatgtaatgtataaaaaacctagtgcaccaacaaccttacaaagagatcttatgaagcttaagttttgaaaaacatttctctttgaggtcgtcttcttattattgatttatttttgatttgattttgtctttgggattgccactttttttttttttttgatagataaacgcacaaggatatattagataaagggtgcttgaaaggcgacccagagcatatagggagtatacaagtgtcacctaaaaacaggaaacaaaagggacaaacactcactggccctcaacaagaacccaaccagtccacaaagttaaggggcctacaactatagaagatttagcctaggaaaaaagattacaaacaaaggaatttttcaatctttgaatcgacaggacctcattatcaaaaactatcctttttatttccttccaaactgtccaaaataagcaaagaggagctgttcgccaaacctttctatgtttcttgtccttagaagaagcataccaacctaaaagagtgtctctaaccgtaaatggaaggacccaattaacaccaaataaagaaaacacgagatcccacaaaaccttcgccttagaacaatgaacaaaaatgtgatttattgtctcctcttcaacacaacacaaggaacatctgttagctaaaatccagcccctcctcttgagttgttcttgagtaagaaccttcccctatgaagcttcccaagcaaaaaaacccattagttccaaatcttgttttgttatcactttggaaatcgtcttgcctaatcacacttgaaatataatcattagtttcaaatcttgttttgttattatcaaaattgagattaatcaaaccttggtttcacatattgtcttttaatattctaagaatgctgatcttgtgtcaaagttaataatgactttgacttacgggtgagaccctaaagtgatcatatattccctatggattgagtcactattgatggaagttggtagtaataggtatttttaataaaagcaccatgatatctcatgggattgagacaatgtctccttgggtgatcctaaggaggtgtgtttagttaaactatgattatagtagttttttaaatgagatttgacattagttcttggtgtgataggacatgtcaatagatcacaccattgaagaatctaaaacttaaggataatagaggtaatcttgagaggttgatagttttcactttgttagattattgataccagttcatggggagattgtgtgcaacagataggcaagtcacggacttgggcacttagtgttttgttgttattacgtagggtattaaagtgcagttgtttctctatagttttagaattggattatgagggagccaacactatcatatgagtttcaatggccctctctcgatctcatataccttgatatcatggattatgagggttggatagacttttgattcacttttgtgcataaaggtgttttggtaattttgtaaggttgcacaagggttagtgaacgatatctttagattgggctaattaattaattaaacggtcttgttaggttaattaataaattagaacccttttttgggttaaatttagtgatctaatcatatgacagattcaagtcacttaagcctaatacgaaccctataaatgaccctttaagggttagggtttttgagtcttcttctttttccaccatttagagagagccctatcctttaccctccaaatgagtgctaaggttcaagatagactcaattggtcggaagatcatgggtctatgagaattccaatgactttaaatttgttcttcattgtaagaaaaggatttgggaacatccaaatcataggtaaggttttttgatccaaatatctatatttttttttgtgtttaaaaaatgtgtttttgcttccattgctaggatctaaatgcactaggaagtaattcatgcacctaatcggatcctaggataaggaaaggagtaatccaaaattccccacaattacatggatgagaatgcactctattgatttttttgggcttcttacaaagatagtactagttaaccatagttcaacatctcttcataagttggtatatggtattttcttcaaggtcaccctctacacaaaaatatgaccttagaaggagcccttggaatctaaatctccttaatttgaaaagatgacaccacattaggtgacaaggacttgctataagatttaattaagcattctttgggatcttccttatcaatttgttcactactttaatgtttactataacaaggcttacacattgatacagtgccttcactaaaaaaggctccttatcctagattgccttcttgagctaaggctctagcttccttgaatcctcgttatctactctcaacattgtgccacccaagcatccttgtggactagttaacaaaacaatataaaaaacaatctttaataaggcccctccaacaccaagaattagtacaatttgtttcataaactctgcctcactaaaatgcttgtccttaagtagaaaccattctaccgtttcctaatggctttccataagcttgtgccatatgcttctttactctttcaagaacaacaccctgtaacacctcatattttccttttacaacttttgtccacaaatcatcttgatcaattgtgaacctctagttacttttgtaacaaagatttgttaaagaccccaaaattttttatgcccaaacacctatgagtcttctaacaacaaacaattcctcaccttactaagtggatcatcaagtccaagttgctacctcttaaaagaaaatccctataaatcttttctagcttgcatttcacttttcttgggataaccaataccaacatgtagtagattgggaggctagagaagatgcttttcaattaggttagtttgctacccttcaatgaaacttgtgtttcttaagttgtcaaaagttttcaaatgttcttaaacttttcctcaattagagtttgaattgaaaaagacttgaattttgctcctaaaggcaattttagatatttagaaggcaaacttcctatcccaatgaagaggccaacaaatccatttctcctacttctcctgctagattgagctcattgttcgttaaattgatctttaagcctaggattacttgaaactaaaataacacccaagtatcaacatttgctcctcgttggcctaataaacacaagaatatcatctacgaatggaatttgaaaaatctcaaccccccatctttttgtcctcttatcttgaagcctttaatgaagtcttattccattgcccttgacatgaatcagctcaaagcctccattaatcgcataggtttcttttaaagctctagaggtttgagacaatgagatcctctcaccctttctgtctcgctcctttaccttctatatatatatatatatatactttgaaattctaattaccaaatctcacaggttgtttcccttttggtagttttgagagttcctaagttcaattcttcttaagagctcgaatttttaagagcttcttgtatattttttggaatttctatagtggagagattagtgacaaaggcacagtaacttgaggataaatttccataagatgtgaacttcgaaatcggatgttgagtacacaatctaacaacttacctacaagcaattggaatattaggatcattactaggagaatcatcataaaaggattcatgaactatattacttgggagggaattaggattgtctaatcttggattggactcttggttttgcttggggagtgcatgatgctttttcttctcttgagttaatagtttccttgaataaacacaccctttgttatttgtaggttgtgtgtgggtttgagaatttgtgttctaaatgggtttagacttggatattttgaggagaaattggtgcggatagggtaataggattagacccaacaatatcctcatttagccaaaattgatattcttgtatgattgagttcttcccctgaatatgagttttggggtggaatggttgattttcaaagaaggttacattcatagaattgcaaaattttctagtgacaagcaattaacatttacaacctttttttatatcagtaaattttatcttcatttctagaaaaaaaaaaaaaaaacatttgtaacctttttgattgggagaataatggagacatagaccctttatggctttaggatgtagtttacttctgtgttgttgataaacatgaacatagcatagccacatacttttaaaggcaagaagagatgatccgagtttgaggataggattgaataagggtttggcaagggtttgaaatgactctagatggcatcctattgataagataggcaacgataaggataacttcccccttgaaatgttttgagacatgttgtgaacacaacatacctgatgccttcaaggaagtgttgattttttcttttagtgactccattttgttgttaggtctctacacaagaactttgttaaactataattactataccattattcaataggtactcctcaaggatagaatgaaagtattctcaagcattgtcaattctaataacctaaattcatgtttggtattgtgtttggaccatggagttgaagttctagaagattggaccaacttttaatttttctttcatgaaggatatccaagtagttcaagtgtgatcatcaacaaaacacacaaacccctaaaacattattgaccctagatgacccccaaatatcactgtgaatgactgaaaagggatgagacactttgtatgactaattttgataagtatttcaaacatgtttggaaaattgacaaatctctcattgaaaaaacttcagatttttattattgaataataaagaaaacaacttttccaaatacaaaaaatcaagatgaccaaatctatagtgccataacatgattgtataatcattattagaactaacaactgagatagaatccctattagattggctcactaaggcaagaatagaaatgcaactttcattttgagtttgttcttcaaagaagtcatcaattttgagaatataaagtcctacaaactccttggcattgccaatcattttccccgtgtccaaatcttgaaattcataatatgtgagaaaaaaatttagtaatacagttaaggtcccttgtaattttactaatggacaagttacaagtcttacaaaaggtcaggttctttgagataacaatggaacttataccagccaccatagaacacccattgacaattcggaccttatcattttcaaaacagagactgtaaggatgaaacaaagtggtatttccaatcatgtgatcaaaagcaccaaattcaattatccaggaacacagtttcttagttttgatgcttagagcacttaaaaaattacctttttgtactattgaaccagttccaatgataagtgttgtaggacttggttgagattagctgaacattttctaaaggaggtccatttgctctttgttgaagaaagttgcctcaaaagttggatgcttgtctcctatgatcatgaacccacaattttcatgttaaggtggtggtcttgttggtttccaatcaacgggcttaccatgtaacttcttgtaggtatctttggcatgtcttggtttaagatagtgatcacaccatggcctgcctctatgagttaggttgttgcctgaaaaattaatttaattccacgagagacgagcgttgaactctcaactgtggtagagaagctttgatttcccatcacgaccttcttgctacttctctctttggaccttagagaatgtttctcatatggatggcaaaggcttaattccaagaattctcccccttacttcatccaattttttattgagacccaacaaaaacttgaagattctttctttttcaatgattttcttgtatttgatgttgtctccagggcaatcctactctaattctttgaacatatctagttgttgccaatggcgagtgagggtattgaagtagagcgactaagagttccccttattggagatcatgtagaatgctctttatctcaaagaattaaataatgtttttgttgttggggtaaggttctttgcataccatatctcctttgttgttccataaaacatgaaattatcaccaattctatattcatggagttgatcaactagggcatcatcatattgttttttggtttccacccattaacttcggatattttagtggagttgttgcagtattggtgaggtagtcatccttcccttttccacaaataaacattataatggactaaaaccattgaagaaaatggtgtttgtttagttgtggcctgtaaggggaagaacaaagctttttgataggtgatcttagaggtgggaattatgcttattggtggtcatgtcgtacttgaccatcaagatttaatatgtttcaaaggaagctctgataccatgaagaatgaggagaaaactttctatttaattccttgtaaagtcctattgattacaaagggtcttgtatgagaaatatgacagcaaatctatcaataattctccttggttctagcaactaacaaatgggaaaaacaatccctaaaacctaggaaatgaaagtcggagatattggacaacagaatatccttatctctttatttaagcaataaaacttaactaaaataggctacaactcatgatctcctcaaattgccctataaaatcaggctctaagcccaaaatcccatagaccactagttcaatcagtgaattgtaacgcggtaacttatctagtttaatgattagttcaattttgaaaacattgagccaaccaagaacatcctcatttgaagaaaccactaattcctttctaccatcataattcattgaccactccaacctacatgactatctttcctttctagagttgatccctctccttgtcagcttttaagtcataataaaccccctcatcttcttctttaatgaagtcaaccctgattatcctttattcttttcaattttctataaaagaactttaatctcctccttaaaaccttttattgctacccctaaaaatctagtaaagacttgaaattttgagttggtccacatagagttttctaggacaccttcaccttgtgaactactccatgaaacacccttgatctctgattgaacaattgagatagggatcacgaactttggagaagtttgatgcaccaaaccagaatttgatcccccctcgctaccatatattttttgaacttggtggaatcgattgagttccatctaagagtgtagtgtagaggctaacaatttcctacaagggttttggaggtctttgtagagtgaagttaccgtgatgtattgttactctacattaatttaggttgtatgattagagaggaatgcaatgatttttgaggatagatggaaaagttttgaggcattatgggattcaatctatttctcctcttccatttgggtttcaactagtccatcatttgagggtgctcctttgagtattatattgttagattggaacctagtgtgtagagctataagatcggacgagaacactctccttaaagagactcctccattggttgtgctaagttgaattttggtagtgttcattaggaaatccacaacaaataggaattggaggaatgctcatgaattatcttggtacactgctgagagctttctctaaacatgttggagtggtctaacaattgacatggagattgtagccttgttggaaggtttaaagttgtctaaagttgagggtccttccaaccttctagttgagtagatttagcagttgtcctatctttagtgaataagaaagaattaagctcatgaagactgattggtggctttgtcaatgttttgattttgctgtagaactggagttatttttttggtaggattcttcatttagcaaatccacatggtggatttattaacaaagcagggagccaacacatgatgtcttttgtgggggtgttgtctacctccctgaatatttcttttgtatttggaaccactcttagatgtgcaaagacctacgcttgctagatgagatagttttctcctacttttgattagagttttagttttgtcctaccgattagagttttataatggctggtatatggaagaagaatttatcatcattctttgtattatttcatgggatgagatgtttgtttctgataaaataaaataaaacaaaatcagaagcctattcaaaccctccttggtggattgtatcaccttttagctaataaatctactgttctccaacattttgatttgacattttttaccaataacaaacttaaatttttcagagctggaaactttttgcttgcttagtcaaacttacaaaggaaaaggagtacaaacgtagtacattggaggtacacaggtactgcccaaacagtaaaatgagataaaaaaaaaaaaaagtgctttccacaaagtatctcctccccaaaccatatcaaggaaaaaattgctactgaagaatccctgatcaaccccgcaaaaattttaaaaaggaatttttttagactttgatctctcatatcttcaaatactctgatattacactcattctaaagcaaatatagcatggtcatcctctactccttaaaatgtgcatggtcatgaaattattttgccaacccaataacaaatccctcactgagggaacacctagaacaagccaaagcacagaagataccacagcatgctagccttactacagtggatgattattagagcaaattacattagtccaagaagactagtaaactggaaagttccctgaagtaggcaggatatatatgtacatatatttattggaaacagtagtttactaataattaattgaaggtacaaacaagaacaaactatccttcatggagaagttacaaaacaatagaatgcaaaaaatgtgaagcagtaagcaaacagaagccaagatggctgaacaaaggatccagaaaagagttacaactaaagtaaggcatgaattcttctacaacagcctctacaagccagtggtggagccaggaattccattctggtgggatgggggagggtgtgtgagattttgagtttgtttcaagtggagcaaaaaggaataagacaattcaatttagcttagttgtgaaggcaatcttcttccttgcccttggttacatattcaactccaccaaaaatacctgtattatttaaattttctaggggtgggggcacccttttactagatctgccactgctagttgtgaaatgcttctcttagccaattaatttgcttgctggttagataatttaggaatccaagtatataaagcaacccaactctctttacaaatcaatggttttatgcagccaactatccagtttccaaagctctcccttttcctgtataatccctaaaaccaactatgcctgagtcttcttccactatgggatggtgcttgagtggcaatcctggcatgctagagctacaggaatgcaatatgggtaagagtaccagttaaaatgctgaaccatgaagcatctacacaggtctgcaactggcttgaggatggagatttaactaaactgattctggaaaactgattcagaatctaaaatagctctcctcagggatggagtttgagcaccactcttaaatgcccttatccaagaccaagttctgttaaacgagtaatgtagtctatagagggaattgcatctgctgacttccttgctaaccttgggccactctcacaaagcccatccactagacttgatagccccctgttgacatgctggtgtctagtgtgggtttatttacatctacaaaactaagaaaaaacaaaatgatactggtcctacatgtgtatttaatctgaattgaacagtaataaatgaagaaataggccttgagccctagctcaagtaggaaggggttgaggttggtttgtgagagtttccaagttcaagttctagaagggacaaaaatgaagttgccagtcaagttaaaaaagaaaaaaagacaaaagaaaaaaaagaagcaatcagagaaaagaagggttcatcttatattaaagggtaaacttcactcacctctcccgaggtttggactaaattcacttagtcaccatgagtttaaaacttcatcaaatactttcccttcttatttgttatttttactcatctttgaatgaaatgaattatatataataaagatgatatatgatattcttatgtgaaaaagaatgacatatatgcaatataacttctttagaatcgacaaaaagaagaagaagaagaagaagaagaaaatcaatctggtaaagaaaagaagaattaaatggaatttagattggtgctcaaagcacttgaagaagaggaagaaggagcttagaattttaagggaatttagatttagtgctcctcgcacaccaaaatcattttaggaggaaaaatgagaagaaagaggagaagaacagggcaaagcttgttcaaacacgcgatactattcgaccaaagttttattctcttcaattttgtaatttctgtgtaaaaccctaaatacaggtagaaacatactaatctctttgtgaccaaaataatcgcatcctagggcttaaattctattcctagaaccactggaatttataaaaatatataaataaaacagtaccctaaagaatagaatcctagtaactctaaaatgataattaaacaaatatcttttgggtctgctcaaatgtaatgcataaaaacaaataaaaccactcttaaaaatcaataaaattcttttggggtccatcaaatgtaatgcataaaaatgtccttactttattagtagcttcaaagcttaaatgcataattttatttgatctcttccaacttttctgtgctgtgtatttttgtgtgtgtgtatttatatcagttgctgatgtttcttatttttttatttaggcttttttgttgatttaaatttgttcaaggcgaac

SEQ ID NO: 11412 - DNA, 2074 bp, Vitis vinifera
  Intron number 6 from transcript GSVIVT01009518001 (locus G SVIVG01009518001) derived from phytozome v7.0 (chr-ID chr1 8; pos 9014564 to 9016637 reverse strand)
taaagcaagtgaaggtttgttagccattttgttacatatatcttatatttattatgtgttagtgatgttgtttttccctgcttcttcccattgcctgctcaattgttatttatgtgactacatctggcccttgttacacatttcttgttagctttttcagctataagctatagcattgtggatagacttcactccagaaaaatatcttatgaatgatttttcttgcaaatctttactttgatattaccacttctatcctaactgttgcttcaagacagtagccaaatgattttaaaaattcaggtttccgtggaaaagagagagagagagagagagaagaaatatttataaaagtttgattttgtgggattctgcaacatttttattccaatttgtttagaagaattggaacaattcttttttggataaatttcctttgccatcagttgattgctcaaaaagggctggaaaagaagtcaggattttggttttattgggttcagtattgtttctattagggccatgaactataacttttagggtcagtttggcaaggttttcaagaacagttttttagaacaatttttttaaaaagttatcagttgttttaaattctgttttggttctcaaatatggaaaatagttttcttggcttattctctgtgaaggtactgtgcacttatgcacaatacaaatgttctcaaattattctccatattttcaagtatttctcaaaacattctacaaataacactttaaaacatctcaaatttattctaaaaaaattcagaagattttttaaaaaaaactatgttttttgtaggttagaaaattgctttcaacaacaatttccaagcagaccctttggttctaaaatttgatttctttcctttttcttcttcaatttctcaaagaccaaaaaaggccttattctttgcctattttcatccctatttagctttggacgttgatgcctataaaagatacatgcaaaataggtttcatgtggctaatatccccaaatgattaggatgacctttgttgaatttgttgaccctagcacaaactccttgggtctttaaatttcttagggattttttattaaaattaggtgacctcttgaggctgttggtagtatcattttctatggtagatgggatttgggctcaagggccaaatgttcaaatctgcttatggagtttaactgagctagcagacaaggatttatgctttaatgcaaaacatttcttttccattcaaattgaagcattttaggtgatttttggtttctctattttgaatatttggttcttgtgaggaaaatctcattatttgggccattgatacaaaattgatcatggttggcttaagatttcaaatttgttttataaagggataaagtcctttgtgatggaaccttttatgagtaaaatttgagcaattaatgtggggtttggacagatctccgtcaaccttggtctgttagcacagcaagagaagtggtaaatgaggaacaactgccagcacattcttgtacacactaccatttttctgaggaattatttgcaacgcttagaacttgaactgtggatttaaattgccttttacttctatttgtttgtgtctataattaatattaggagacatatcctaggatgcagatatcatatcccacaaaatgagggtaaaaaatggaaattcagatgtcaactaataatctccttgattatgaaataaacacaatcttagtttataattgagatgcttctttaagtaatttggcctcttgcattggcgtaccgtcctgttacttccattttactgaagaaatttcaacatggttgaaagaggttgaggaaacgtttgttactatgaatcatgcttccatcttattatggcactgctctcagtgcagctttacagcatgaatttttgttattaatctgagccttaattttcttttgttgaatactgccctaatcatcttattgttctattaaaggaactctaacacaactctcataatactattgctgcagttgtctactgctggtggtaggctcataatttcaag

SEQ ID NO: 11413 - DNA, 1396 bp, Vitis vinifera
  Intron number 3 from transcript GSVIVT01007912001 (locus G SVIVG01007912001) derived from phytozome v7.0 (chr-ID chr1 7; pos 7627182 to 7628577 reverse strand)
cagcgcctggtaagaattgctggtattggattgtttgcatatgtggtagttctatattagaacatatgccataaagataaaaatgatgtctattttttctgtatgtaaatattataggaccggtttggtgatagaaaaaactgttcttttgtttttttactgtgaaaaaagttgatgcagaaacatgtttagtagggtgtttttgcaagctgatttcaagaaaatttcctgaaaattggctattttcaagtaattcaaattgttgttttgtgagttttaaaaagttctagcactttaacaactgaaaatgaaaagtttctgaatatgtttgccattttcattttatgaaatagaattttagaacatcattttcatttttgtactgatgggtccttactctctcaaattccatattttggtattaaataccaaatgatgacatgttttgagttaacacattagattctatagatttaaggagatatcaaagtaattagaggtttaatttaaatagaaaacctaaatgctgccatgatctgttactaaactacatagacaaagtaggtaatatctacacaggacaatgagtcacgacaccaaagaagttcatttctaaaacatgatagattggggctaggaaatgctattcagtgatgaccctggttcacctattgttgttgtaaattgttgagttgttctgaggatttctatatgtttcttaaaattttcatcaaaaaactagtgcaattctgtttaacttagtaattcccatttttaactaagatcctcaaatatcggaacaactgaattattgcctttattggcaagtttccagttgatctttttttcattcattattttcacgctgtcaaattcatactctggttttggaattattctggtatttttatgactggcttccttgactgaatcatttgaatgctgaataaatcttgtatcttgaatctgtcattatatcctagaagatctcattaggttattacttttataaaacttcttctagactttttacttaagtggcttatttaactgtcaagaacagtaaccatacctcactacatctcattggtacatccttctttcgacatagaacttttgcttattagtttgacttattgttttatggcaccttacgcccggctttgcattggttatgtggctgtgaccatcaagaaaggattttttttttaaaaaaaaaaatttattcctcagacatatattgactttctcatttggatattggtaatcatcatggatattttgattgagttgtagtttcatatgactccaccaagataacatagacttgaatgcctgtgacaatgactctttcttttcagattctagcggataatctaattgagcgactcccaat

SEQ ID NO: 11414 - DNA, 12699 bp, Vitis vinifera
  Intron number 1 from transcript GSVIVT01003085001 (locus G SVIVG01003085001) derived from phytozome v7.0 (chr-ID chr1 2; pos 8517831 to 8530529 reverse strand)
tagcagaggtgtctaagaggaagaaaccattgggtgtaaatgggtatatagaattgagtataactagaaagatataagattaggttagtaataaaaggctaacacaaacctatgaggttgattactgagcaacctttgctctcatagctattataaatatcataagggtgttattatcattggtagctaattttggttggagcttacaacaatttgatgtaaaaaaaaaatgtatttttgcatgaggacttagaagaagatatctatatggaaattcctttaggattttgcaaaagtcttggtagagccaatgcgtgaaaattaaagaaagctttatatgacttagaacaatctctaagaacacggtttaggagattttctaaagtgatgtttgcaatgaaatacaaatgaagtcaaggtgatcatactttgttcattaagcatttgactttaaagggagtgataactttgttggtgtatgtggatgatattattgtgattggtaataatccagagaaaataaggctctttgacaatatttaactagagaatttgagattaaagaactttttagattaaagtatttcctaagagtcaatgtggctcattccaaggagggtatcgttatttcataaccaaaatatgttattgatcttcttaaagaaaccaagaaacttggatgcaaactagtggacaaccccaaaccataaattagcagaggccctagaggataggattgtagattgtgccatgtattaatgacaagtgggcaaattaatttacttagcacatactagactagacattgcatatgttgtgagcattgttagtcaatttatgcacaatcccaaatacactcatctttaagctatttattgaatcatgcacaaccttaaatgaacatttgataaaggttgttattcaaaccagctatgaagttgtgcctgaaagcctacatggatccagattatgttgtattaattttaaatagaagatcaaccttaggagactatacttttcttaggggatatcttgatacttggcaaagtaaaaaaccattagaggtcacaagatctagtgttgagacagagtttcaagtaatggctcatggaatttgtgaattgttatggcttaagattatttttgatgatcttaaaatcaagcagagacaccctataagaatttactgtgataacaagtttgcattcaacatcactcataatctgctatagtatgatcgaataaagcatgtggaagtagattgacattttataaaggataagcttgatagtggtcttatttgaattccaagtattgagacacgtggctaacttgtatatgttgtaactaaagattggctaataccacattttaaggaattataggcaagttgggaataaagaatcatttttcaccaatttaaggggaagtgttgcaagtttgggtcttataatttaggattcttctctttttaggactcttcttatacaattgtaaattagttaggactttttctccttttaggacttatcttgtacaattataaattagttaggacttttctccttttaaaacacttcatgtacaactataaattagttagtaggagatttgaaattgatttgaattactatgtatagaaggataaatgtgtgtgtgtatatatatttatatatggcaataatatatagaacttgccaatatattttatattaaaatagtaaactatataaaacatgatggtataagtgtaataatattttattaaaaaaatatttgtagttatatcataaatttatatttattttatatttaattatttttagtatcatgtattttatatttttaataattgataatgagttcaatgaaatttgaaaattgtatggatataattatatacataattacaaaaaatgtaataagggtagtttatctttttagctagatgcttgccattcttgccctttgaattcttaccaaacatggcactaaaaaattcatgccaaacatggagcacaaatggtgagaacacgacacacaatgagctaatttcatgtgcggtagtgaattatctgaagaattccaaaatattaagaaataggaaaaaaatcgtgaaaaatgatgaaaaagtaaaaaaaaaaaaaaaaaaaaaaaaaagtccattggatgacatttctccactaatttgttagagttgtctaatgcatgatttgtaattttttaatcaattatcatattaatattttgaccttatttttaacctttagccactaatattgctttgtaatggttttaactcccatatatcatttgttgatagcatctctccatctctttgtttttcattccttcttcaaaccttattgattggtcataataagaaaatagattaaaatatatattttttatttatttctttttacctcaaaacatttttataggcttttgtaatattatgcacttttatttgtacttttcaataaagacgatggagatgagtcttcataagtagatggtggtgatagaagaggagtaatgatctcttacaactctttattcatttgtcttcttcttaaaaaaaaggaagaaattcatagtcatcttctttgtcatacgaatcccacatttcatcaaacttgcaatctctactagtgttgtaatatttagagtatgagtcataacaaataaaaataaagttcactcttgatatctaacttttactagtttcttttggcacatgggcacattcaatactttaaaaagaattctcaagtgtgagatacacaatattctttcactaagacaatcctatgttatgtagactacatgtaatcaacctctttggtttaaaattcattagatattttcttatattttatcatacttcaagtcatgtcaataatagatttattttttcttactctttatcatgcttcaactcatgtcaggaatagatctatctatttcattttattgtgaagaaatgatactcatactttaaaggttataaggttagtaaagataccaagtttaatgaaacataaaattaggctttcgaagaagatagctatgaattttttctattctttgaatgaaaagttcagatgaataaagcattgcaagagctctctactctatctctatcatgaccacaattttcttaggaggacctatgcttttagtagattttacaacaaggtttttacttgaataaatgaaaccaacttagttgttgaaactcttagtccttgaaccaaaaataaaaagaactaatagcttgtatagtggttagcttgtctccatagggacttctacttgagagtagcaaaggtaaagagcaagaggtatgaatgtagtttaagagcccaaatagaattgcttctcttgaagtcatgggataaaacatgaaattaaaaaacaaaaaactaatagaaaacagactttaagagtagagatccattgaaatcaccacttctatctataattcttttacaaggcactaaattagtgtttgtgactccaagtctaagccaagggtttatacctaaaagtacatacttaagaggaatgggaaccatattaaaaaggattaactcactctagttgttcttgtttaggtccttgcaactagaagcttttgttgggtttcatttcaacttagtaggtttgtgctctactcaaggaaatcaatactatgatcccttaggcattctcctaaggtttcttaacttgcagccctcataaccatgacaacatatacttgctctgcatggttagtccttttggtcattataaccactacaaaaggctagctttacttgagtcttacacaaatcaaaccactagagatttgaactgggatatggaaaaatcttggctttacttaccccttgaagtgtaaagctagctaaacatgatgaaaattaaatgaaaagcaagaactgtataggcatcctttactcttagttatactgaattccttaggttggactatgggcaaacttcattcttctagatttaactcattgctttaacattccaacatttttttcaacataaaggaatacaaacactctcatatccttgttacttagcctatgaatcccatactagtttgtctaaggaattgagtgataaagcacccttgaggacctacaactaagcttcaagtggtggaaatggatttctcaagttttttgcttcgctaaatcctcatacgggatgcaagtggcattagatctttttattaatcttcatttcctttttgcaatatatcattattttcctcagtttgccacaacttcccttccttgggaactttagtattttaacactaacagatgtgcacaatgtgtgaaaatgatttaaggaaaaattctcaatgggaatactttttttttttttttctccaagtaccatgagattctttactatctatctaaatgtctctttttgtttctccaaggaccttgagattctttattgtcgatctaaaggcatctaattagtcatttgagcaaataagttcataagtggaattaaagcaagaaggttaaagcttaacttgctttacttaatctaattatttcccataaaagtaaactaaaagaaaataaaagatatgcaggtaaagaagttattctaactaaggacctttgaaaaactcaattgatttgacactccaagctccctaaggtatattcctctactcatttcttcttttcattgttacatatttgaattcttcattgagtaagaatcatcaacaaaattcaatatctcccctttttagttttagattctcattatatgttaatattggaccatgatttatgcaataagagttggaaatgaggttaagatatatatatatatatatatatatatatatatacatatataatgttgtaagtcttttttgcttggatgttcctctaattgaacactttgttgggttgttatgatattacggctagcatggtgactggttcaaccaccttggctttcatagattggcttggtcattcatctacagctcgctttcttctctaccttgtgcttgacacttagttcttacccttttcaaagttgcatgctaagctcttgtgtattctttggggtgcatacaatggtagtaaaaattcttccaccatcttgtctagtgaatatccctgaagtgcgccatcattgttcttcaaggagcgccaattggtgaagatgactagaagcatgcataggatgttggagaagatggtgtgcaaaagtggtagttggaggagttccaattgtgaagaaggatgcaaggttggttttaatgaaggtgagctacttagttggaggaaagtggtgcataatttaagcgagttggggtatgtaagttaagtgagttagagatggtgcctaatttaaatgagcttggagatgtgaaacttgagtcccctaagtggtgaacaatttacctaacccatttgagaggtgtgtggcctcaatctgacgtgcctcttagatgcgtcaactactttagatacctcttctccaattcttaagttttcttactctttaagcttcattcaagtcctccccaaaaattctaacacactttaaaataccttgaagacctacataattctcacaaaaacttcaaatataaaagactaaggtattaaaaacaaaagtaagtagtggatcaattatgagtccctcaaacatactaaaataagccttttagagccattagagtgttgagtttgagttcttatcacatatctctgtcatttgctttgaaaagttcaaatgaaatgagacaatgctataaaacttacaagaacatttgaaggtaacaaaaaatccaaacaattaatctaattctttttatctattcttttattgttatcaacaaataagatttgaagaatccacaaaaataaagaaaaatagagaaatgttatctattgtgacattaaatttaatatttttcataccttaccctctcatttcattttccattgctccatcttctatccttctatagaattacaatattgacttttttcattgttgaatgaattgtaattatgtgttccacattttccatgtctaccatcaagattactttgacttatttcattattataaagtaagattgatgattactactcaaaaagtgctattttatagcttgtaattaactcttttaaacacttttgagtagtagttattaccttttaactcaattggtatgttaaggacccttgcaatcgtttctaatcaaattgtgttaagttttggtgttttttatagctttttgatcaccaaagcaatctaagataagggagatctttatataatccatggcaaagcaaatgaaagctcatttacatgaagaatccaagctttggagctttgcagtcttttgctaaaagcaaatcaagaatgcaaggaggaaaaacaaaaagaggaatctaacatgaagaaattcaagaggacagcagctgtaggacacatttcgagaactttctggagtccattttatacatactatatatcgttttgaatctcgggaagtcaggagtccaacgcttcaaacggtgtgcgaatcggagctgaaatgaagaagttatagccatttgaagataatcgcaccaagctgagcgaaaatttcgcagctgcgaaatcatcttgtgaaaatttcgtagctgcgaaaccacctacaggcacacgtgtgccactttgcaagttcaaattatgttttcgcagctgcgaatcttgttgtgaaatcatctccaaactgcgaatcttgttacgaaatcatctctaagttgcaaaatcacctccaccttgcgaaatcaacattttcttgtgaaatggacacttccaacttgcgaaatccacctgtgtaaccttagatatttacaatcgactcagttagattttttctgaagatattttgtgtaaatttctattttctccttgtaatcagctaaagatattatctggatattcttagaaaatatcttatatatatatatatatatatatatatatatatatatatatatatatatatatatatatatatatatatatatatatctgaaccaatgtaaaaagatatatgtaatccacgagaggaggatcatagtaagaaatatatctacagaacacttgctctgttttttcttcacatttttgttttctcgttatttttatttctagccaaacaaactctgaggatgtttccttagaggatgagtggctaagctttttgtttcttggagtgaagggagctgggtaaggtgccgaatgcaaaatttggaagttttgttgtttcagcttttaatgaagagaaagtgtgacccgttaatggtttctatgtttttagttaacttaaaacgccttaaaatcacctgggccaacacttggtaaggcaagtgatctccgtccattgaaatacactagtttatctcttacgatcctttggaaggtggtttaaaggtaggattttctagaatagccaacactttgtaagcttttggactctaaggggacatccattagttatctcttgcgagcttttgacgggtaatccaaggttaaagatcaccttgaatggcaaatgctaggtgagaggcacgagccattacaagatgattcaatgatagggaattagtgtttgaatccattaaagggaagcatctgtaccacactggttcaggaaataactatatgttaaatccccaatgtgaggaaaagattcaagtgaccagaactccctttttgcaataggaacctgagcccaatgatccaaaaactccaagaagcacttttctttataagtaattttcgttactttattttttgttagcttaaaaccaatcctttttcaaccaaaaattatgttttcttttaaagctaaccttgaaatgaaaaagcaccaattcagctttgaattaatatcaattgtgaagtgaaaacccatcccagtgaacgatcctagagccactatgctatgctagttgaggttatcctagtacatggtgatataggttataaattttgttgattattcccgtctaaggaccgaaatcaaggtacaccagttgattgagcaccaatcaacaggacatacaccagctgggcacgaaatcaattgatttgaagaagtttctccaattttctttcttctttcattttaatattattcatggacttgtaaagatcccatgagttgatcactggtcatgggatcatgatttttggacttttgaataatgataacaacataataacttcttggattaaaatatgaaaggatcttttcaatcacttgaataccattcaaactttcaatatttcttttaattgatccaaaattactaaaactttcaatatttcttttaattgatccaaaattactaatactctagaaaaagtaataggaatatttttttaacttttttaagaggtttccattatctccaatgcatccttcatggcctcacatatttcttgagtaaggataaaattttatcatttattgtcaataatcattgtcatttactgtcacaagtttttagattaattgtcgatcaatggctaaaaaaagtttttagccattggtattttttttttacgtgtcacgacatcaatagtgcccctaaaatataaaaatccctcttgtatggaaacaccttacaagtggggcaactttgcccttgttataatatttatgactttaatataatatctatttgtgatatatcaatgatatttctcatttgagtgattattgaaaatataaaaacttaaatacaaaataaacacaaatatatattaccaattttatcatacatatattatattttcaataaaataattttatatgttattattacttgtttgatgatttcttggaatttttttaatatttttttgagtcgtaattaatttccttcctattgagattttttttattactatcaatattatcttcctttaaaaaaaaaatccaaccattaatatttcattaactcctaaattttgatccttgattttaagaaccaagtaaagccttcattttgttttttcaattcttgaattttttttttctttggttgagacttcaaatggaaaaatacctatgcaccatctttgccttttattcatatatgtgtgtgtgtgtgtgtgtgtgtgtagaatcaaattcctaaaattctatgatgtgcctattatacaaagtctatggtctttcataactaaatattcctaagtgtttgatagcatttaactttctaatattacaacacaagttttaaatttgactccattattaataaaatacattaaatctattatggctaaacaatcacatttaattccaatagcctgtgatatggatagatatattataattactaccattgacatttttttttttaagtaatccaattaaactagtaaattggatcaaaacattgactttttttttcagcaaatatattagggacactataaacttatccatgcttatcatgaatagcttgataatggaataagtgaaattaacatcaaatgtggactttatttgtgtattgcaaacttattggtacatttgttgatcacttatgagattatatagggattagataccaattcaagcaagaagacaataatgattggtgattcgactcatggtagcttagctttaaaggcgtatcaacaaaatttataccttaaatactattactaaagtagccaagctactatagcatagtggttctaggatcgttcactgggaagggttttcgcaaacacaagtgatattcaaattaggaaaataggtgattttcttatggatgttagctttaaaagaagatgtaaatgttttagaaagatttaaactaatctaagctaaaattaaagactaaaatgaaagggtgtaaaaacaagtttctcaaagataggatagctatgctctggcttttatgcaaattggaaatctcaggataggctcctcgcgttggggttgcaactatggtgatgcttgcttcccgaaccggtatggatttagcaaatcaagttttaatcctttaaaatggcaaaacagatggtagtgaatttcatcaatggttattcaacttagacttcctttgaatggctcataagagataactaatggtctaaagccaaaagcttaccaaatattggcaactcaaagtcattccaggtgataaactcacctttcaatggccattgaaattggttctaatggattaatgcaaaacttggaattgaaaacctcaccttccaatagctcgtaggagataactaatggatagaaatccaaaagcttatcaagtattggccgttggaagttgtccaaaggaaataaaaaccaaactttgcattaatgaaccattaatgaaaaatgactaccttaccttctaggtgcgagaaatttccatgggagtgcatccaagccatcacataacatccatactttaagaaactaaaagttttagccaatcatcctctgaggaaaagccctcagaggctgtttggctactaagaaaataaaatagtaaagagaaaagagaaacgagagagctctgtatatcactcagtgtaaaacgtaacacgcatgttctatatcttccaagaggtgatttccaccccttatatagtctttacaaaagcaaaagcttgtgattggttagttacaaggataagaaaggaaattacatcaaaaaatacataggaaaatatctaaagtggagtcggcaaaaacagaggaaaattcgcaccacgcatgggctgtgcgaatttggaaggtgttgtgcgaaattttcgcacaagcctagagcagttggcttccgaaggccatatcttcctcatttcagctccaaatcgtacacggtttgaagcgttggattcttgacttcctgagctttgaaatgatatatagcatgtagaaaatggactttggtaagtgctccaaaagtgcaaaagaagactgaagctactgtcctctattttcttcactctgttttcctcttctccattgttctttccttgcatactttgaacgactttggaaaagggctatggagctccaaagcttggttcttcatgaatttgagcttcccaaagctttgccgtaacttgtccaagtagctcctccatcatttggcatgcttgaattgattcataagttgataaaaacatgtaaacttgccacaaaatggttaaaaccaattactaaggaccttaatgaattaattgggttaaatgaatatgattactactcaaagatgcttaaaaccattataattaggtttacaaaatagcactttttggtagtaatcaattggctaatgaattgattgatatacttcaaactctagtactcactatgactttcatgtagttgttcatgcatactttagagggaattaattctaacataatttaagtttgcctaaatattaactggttagtctttagggttacagacatgaaaattcctacataaaagtagattgggaaaatgttgtagtgcataacaaaattacattaaaatatcacacctttagagaagtggcccatttaagagtggaggcatatcctagaatctataaggcgtgcaaaataaaaccatggttagtagtgatgaaatgctaatatagttaatcaatatattggagctatatatagaaattctttaaataccaaattatcaagccaataattaggcatgacctaaccaagttgcttttacaaaggttcttcttcactacactctggtgcacaacaaaactatcttatattttccattcaacttgtttagcttacctcgacaattgataaggttttatgaacttctctaaaatactactttaaggttaaagaaaatttattttagtagatgaaacgcagatttagtgagcgaagacatttatgctactctctactaattgctatttgctatggtacttttactataaaatatatttgcatttcataggtacatactcttattttcatagtaatcatataagtacaaatagtttatcgagcattattttgagcaaacacccataaaggtggaacatatatttcaatgggtgaagacactttctcctgctttttgctacctactattgtgcttcaaaatatgtctacatatcatacatgtgtactcctatttttatagcagtcacattagtataaatggttgattgggcatcattttcagttgacttatgagggtttaaacttgctccacctcttttaattaaataagtttagatattacaaattatgtatatgggagagagattatgatctatatcatactagttaagtaaaaaatgtatagttcacattttctttactagctacatggtagcattttctttaattggtaaactttttttttttcctttgtctcttttttcctggtgggactccaacctataatcatttgtctttgctaagtgagcaactctcctaaaacatccttaagatttaatttcttctaagacaatcttaaatttataagaattaattaattaatgaataattcattatttgaattaatgcttgaagtggataagactttttaacttattaatctgtacttcttatgatgatatcttaccaggaaggtgacaaagatctttgtgggagattttggaa

SEQ ID NO: 11415 - DNA, 1741 bp, Vitis vinifera
  Intron number 1 from transcript GSVIVT01019893001 (locus G SVIVG01019893001) derived from phytozome v7.0 (chr-ID chr2 ; pos 4288160 to 4289900)
ggtccacgaagggagattatccgcttggttggaaggtaggctggtacttccttggtaggtcatgttggtcacgtacttagtcacgtagttcaaataacctatgaataatatttaggttaaaaatatatatgtaaatatgatcaataacatgttatttaacttatttaataacaaatttttatttaataataagattgggttaggctttctttgagcagatattattaatctttcaatctaatatgtttaagattcaattcatctatttattcaaaatcaaaatttaaataagagtgtatttaagagtgattttagaaaacgttttaaatatttttaactcttatatggtaaaacttttcaagtattaaaaatgttaaaaacgttttctaaaattattatctaacgggttttaagtcaaatatgaattaaatatattggttgtgattataactaggttaattaacataattattaaataaattaattttatattatgcaaattgacctaatatattattaaaatcaacataaatttaactcatacatcatcatacttaatctaaactcgtgaaaaatgtgtccacgtttaactcatattaataaattgtatcaaattttactatctcatatgaaatgacggtaacattcactaattaaaaaattagatttaaatttcataaaattattgaaattgtcaaaattatttaatacaatgcttggacgttagtgaatgactgtatttacttttatttccctcccttctactcttcaatatgaaattaaaacgctagctattcatacaagcccttaggtaattaattaggctaaaacctgtaacgtatcactcgcttctttacccatgttaagctttttgttgatgcaatctagcatatgctaaagctttaaaagcccacttcctttctctcccacctccgctagcccaaatgctgcttagcgatttcagtctatttgctgactattttaaaaaatatttttctttttaattttatgatttataaaataaatgtctatttgagaatttaaaatatttttaatttattttttatatttttaaaaataatttttatatataattttttttttttttaatcattcttcgtagtataattattttttaaaatcacctttaaaaaaacacacaagggaaaacagttaaaatatattatttaaaaatatcatattttatattttgaagaacagagaatggttttgtgttttttggttattaaatgaatttttttttttttgaaagataaaaagttattttaaaaaaccgttactaaaatagacccttcagttgcctattcttttcctctgttttctctccgccgtcaaaagggtgggatgggaagccctaaaattaaataaacggttggctgctaattggtcctttgtttgtacttcagatgttactcattggtgaatgatgatcctcaatgccactttaggtgcggtaagatgctgaagtaaatgtcacatttatcccaattaatgaggatcattgccagttgaaaacacgagtcacagttcaaatatgtgtcatcatataatgttggaatcctgccatggcttttgtccctccactagtactatgtgctttttgtactacgtaatacatgtttgttacagtgatatttcattaaattggtttttgagcttcacaggtgacttggttatttttgcagctagggggaaagcgagttggaattgtgggactggg

SEQ ID NO: 11416 - DNA, 9868 bp, Vitis vinifera
  Intron number 20 from transcript GSVIVT01022591001 (locus GSVIVG01022591001) derived from phytozome v7.0 (chr-ID chr 8; pos 5664342 to 5674209)
ctgatttttcacttggaggaggtgaaagaattgtaagtattgcagaagaataggtgaataaatccacaaagatctaatttctgttaaaatctatatgctagttttgaggagcttgttgaatgtttgaagaaatatatatatattttttttataggaaacgacaaaggaatatattaatagaaaaaagaagtacaagagaaggatgaggaatcctcccaccaaagaaaactaaactataagaatatgaaaacaaagaaatacaatgtaataacgaacaaacactctagactagaccaacccaaaggaattacttgccgctagccaatcaagttgtaacacaataaggggagtccccttaaagaccttggaacaaaaagcccaaagagaagcaaggaaatgaatagaatctcaaagattctttgaattccttgctttattctcaaagatcctcacgtttctttcccaccacacaacccaaattataactatgcacgtagcttgccacaaaactgcccctttcttaaataaaccaaaaccattgtaattgatggacaacatgtcggaaatggtcctcgtgggaactcaatccgtcttggctaactgaaataatccgtgtcataactccatcgtcaaagaacaatgtaggaaaagatgatctgttgattctccgtgcctcatgcacaacttacaaatatccggactaagagctttgtagggtcttatcaattgtagcaagtcattagtatttaccttcttgtgtgccaccaaccagacaaaggacttgactttgaaagggatttgagaattccaaacaaacttagtaaggaaaactagagaagatccagaacattgggataaggcaagaaagaaagatttgactgtaaaaagccttgatgaagataaataccaggatctcgcatttgaaaccaaagatgacaaatgcaaacaatccagtgactgcatgaggctttctaaatcttctatctcagaattggataggttgcggcgaaaattaaagttccaagataagggatgagtagatccgagaattgaagaaataggaatatttttatttgtgactactctaaatagtcttggatattgggatcccaaagttggtccccccaccacaagtcttcccagaaccgaattctttccccatctcctaccacaaaccgagtaaacttggaaaactcctgaaagacttgtgcaatagccttccaaggacagcgatgtgaccatctgattatggtgttggcatcccaacgattagagtgtgattcataaatgcttaaaataacctgatgccatagagttgaaccctccctagggtacctccacaaccatgtccctaagagagtgacattcctcagaacaatctttccaaatcccaaaccccctcttgccactacatcccaactgacaagatgatctcttttaccttccccaacccctaaccataaaaaatcccttcgtaatctctcaatttttgtagccactgaagcgggtatcttaaacaaggaaaggaagtagcaaggcatgtgggtgagacaagattggataagaattatcctacctccaaaagataaataagccttttgccacccatctaatcttctcgagatcctctcaatcactggatctcaaaagccacaagccttgggattccctcccaaaggaagacccaagtagggtataggccaaccagaagccttgcaatctagtaacttggccaacctagaaagatgattctgttcaagattgatgccataaatattactcttgtcaagattaaccttaagccccgaaatatgccgaaacactagcaataaactcttgagagtctgcaaatcttcctcactagtgttagaaaagaaaatggtatcatctgcaaattgcaaatgggacacccttgtattgttcctacccaccctgaaaccatccaacgaatttctttcctctgctctcaataacatcctgctcaatacatctgcgactaaagtaaacaacaagggagacaaagggttgccttgtcttaagcctctagatgccttgacccaccctttagcgtttccatttactaagattgcaaaagataccgtggacaaacaacctcttatccatttcctccacctaggactaaatcccttattttccaacacatgatccaaaaaatcccaactcacatggtcgtaagctttttcaaagtcgattttgaatacaactccttcctcccctgaacgtcttttctcatccactatctcattggctatgagaattgcatccaatatttgtctcccttgaacaaacgcgtcttgagtagaatgaatagtttcatgaagtaccccttttagatgccctgataacactttggctataatcttgtaaaggctagtgatcaagctaataggtctaaagtctgagattttctttgtcatgctttttttgggcaacagaactatgaaggaggcattagtgctttgattgataatcccgttactgtgaaactctgcaaatactctcactaaatcctccttgatcacatcccagcaatcttgaaacactgcaatggtaaagtcatcaggacccggcgccttatccctatccaactgaaaaatggccttataaatctcttcttcgataaaaggggagttcaacctagacacattctcttcagatataggggaccaatttaagccttcaactctccaggactctctagtaggacccgagtagagcttttcaaagtaatgtaaattctcctttgtgatgctctctgaattattcaacactattcctcattcattctccaccaccttgataaatttcctatttcgcctaccattagccactttatgaaaaaactttgagttacaatccccttccttcacccatttcaccctagctttttgtctccaatgaattttttccctcaaaaattaattcctctagctctccttttcttagagctctttgaactaaaagttcagaagtgagaccccctccttgctcaatggcatcaaagttagctatttcattcaggatgctttttttcctttcgtttagcactccaaaagaaaccttgtaccactctttcaaattggccttaacaaattgtaatttcctcatgaacttgtgaccttcccacccaattctttaaaaacctctccaccaacttttaaagcactccttgaaactaggatgttgcagccacatattctcaaacctaaaaggagttgggccccacttgaacgggttggtttccaaaactatcggccaatgatccgatgtccttctaggaagaacttcttgaaggctttgaggaaagtgatgctcccacttatttgagtaaagaaatcggtccaatcttttacacacgagagactcttgcatgtttggccaagtgaatggtgcgttccgtaaagatggatcaaacaattcacattctcttataaaatcatcaaagtcctttatgcttgaagttagactagatcctcccaatttttctgagcttccccttattacattaaaatcaccgcccacacaccataacagaaaagatagtctaaaaatgtgtaacaattccacccaaaaatccttcctaagtaaggggctgttagggccataaaccacgaacagccaaaggggcccacaaccatccaaagcaaacttgactgagaccgaaaaggatcctattaccacctcctcactatgcaatttattagagtcccaaataatcaaaatctcacctaaagccccgcacgtcggaagagcagctcaatccttatttttgatcgaccagatactacccacaaaccttctgtcacactccacctttttttgtttcctagatcatcactacatccggattctctaaccttagaaaatctttaaccacccttcgctttttccttgatcccaaacctctggtattccaactaattattttcatggaaaaacagaaaccctaagcccccaaccagttccaataggtctcacaaacctgtagagcatctgctcttccttctggaatataccttaatatccagagagcataaaacctcacgcactttagccattttcctgggagatagaccttcaatttggaactcgcctaatgaggagaccccatcatcaccctggctacctgtaacccggttgggcacctcactgggcaaaacgggtttagtcttaatggagttgaaagtcttgggcaactggtttgaacaaattaactgggaccccaccgcaacatggttaggattgccaacacagttttgacataaagaacccacatcatctttttttggaaaaaatttcagaaaatactcgatttttcataggaaattgagactgaatgattagattagggagatcgggagcagaaggactcacaaatggaattgccaacccagaagaagtgggaaaagaagacaagagtgactaagaaagagaggacgagtttacctccaagttttccgctaccaacattccacaaatcaccgaaaagttgatacctttacctctgatttctggattagaaggcaataacgtgactgaagaaccacgaagatcggatcccactcggcccaagagtccttctctgccttcttcaaaaaaaggtttgcgcacttgcagatcacgcatagcctcttcgtctctagatgacgaagccccttccccaaacatcgaatccttggcgatcggcaaaagaagataggactcgcattgaatcctcgttcccattgggcttcctccctgaaagccccgtcctttggaaattcttcgctatctaacgaaggcttcccgagcaaaagaggctcgctgcgactacgagaaccttgtcggcaattgaagcttgaagaaaatagggtatttcacagcttctttgaaccaaacttcacttccttttttgcggatcctctcgtctactcatcctgatcgtctgaaactcctttcccctttcccctttcccctttacccctacaacgacttcttctcttcgtggtgtaacctgcttctcagaggtcttcttttctccttctccttggcctagcctcaacgggccttttaaattttgcaacatttattgggctgaaattggggagagactggacctctctctcgaaggcctgaccattctcgtctgagaaggcctcgtccccgtcgactgtagctatgctcgccatctttgtcccaacaggcccaaagttcagttttcttaaatttgaactaaaccagctattccccatagcctgaccactcttatcacgtgtccccactggaagaacatcagccgacctcctttcttctcccttcttctttctgccaactttcccaacacggaaactacctccaaccgttgatctaagtctctgagccttccaccacctgtccccgagtgagattcaagaaccacccaagtcgactcacctattgctctacctttcctaacctcttcatcttcgatcactgcgacagaaatagtgaacacccaatccccgtctatcacctcaatcaaagctggaagaactaaccgatccttcattgcaattcttatcctcgccttgctaagatcaaacaatttcaacgttcgccaattaatttcagtcatcgtcccccacttctccactattttcttcagatgtacctcagaccagagatgaaatggcaaaccccgtagctcaatccaacctcctctcaacttccgaattttcctttggcaaccaccttctcaattgaattgaattccctccctcaatcttaataaaccttaaatcctggagaaagagagcttcctccatcgtttctacaaaaaaaactcctttttggcctaagaattgcacaatcatagccactcctttcttccttaatcttctcgccacaactcggccaacctcaacccatttaacgctatctgcactgcattcacacaccacggctcgcgcccatctcccaacaggaacaagtccgcctctcttttgttctttgtctctgactacgttcgcaaaagaccagtacagaggacccacgtgattgtgggtaaccctttccacattgtaatgtcttccttttttatatgcattcaatggggggaccaccgacattgaagacaacgcactttttagaatctcccatcctctgcccttcttgccctcaggaataactagaaaaattggttttctgttggtagcgaactctgaaatccttatgaaccttccgtggttgttgaagcaaacttccaacaaatggacacaaaattttcccttgaactttctgttgaaccccaagttactcttcatttcgatggctttcgtcaaatgttcgatcaaccacctgacttcttccttttcaaatcctaagacataaacagagcctttgctgtgctctgtgatcgaacaccaatttcctccgtgctcgccttccaacctaaccaagaaggtcttcctcagagaccttcaacgtccttaacatattctcaaaaatttcggattttcctttgcattcctgtgtagttttacatgtatgtcagctgcttggagacacgttgcagctctcccttcaatcgattgacttggggttctctggtgtctccatggtgagcgtctgtgatgagtctttgggagagatgcggaggatcatcgaacaattatcattctatggcaaaggattaactcttaagatttcacaaacaatgttacttcaatattcatattttcatgtttgaagaaatgttacaaaatcctttccccctctgcagaaccctgcttattctgaatcctttacacaaacaattccttattcctttacacaaaccaacctagtcagctgccctgaggtcctgattgttcatcccccccacacaaacctttcaggtatactttataccttcttctgcagcttgtcatttcttagagcataccttcatggttgcttcctgcaagggctttatcgaacagagggagattttgaaaaccaaaacagatgacattttttacaacttgaatcgatgaaactttattcccccccttccaggtggtttgcacatttttcccatgcaaacagatgaagcgttggttccctcttgaaccttcatagttgggttcctccttgaaatttcttttgcagcagtgctattcaagggactgtgaaaaatgatattaaatatgcaggcagagtagccaaagcgctcttgattgaagttaacctaccccctttgagaaatgttgctccttcaagtggcctttgcttgaaacactacaccagaatcaccactgcatcccacaatgacttaaacaaaagaggccccaaagggagtgtcaggcatgttgtagacagtgaaacaaaactgcatcttaaattctcatgctgttgaggactgaacctattaaaaaagtaacaatacttctgttgaaatttgtcctgataccagacactgcttcatggaaattgccaaggtatctcaatttcagctgatttggcccataaactaccatatcattgtcatcatataataggtgagacacactaatagatttccctaacctactcctcatcctcatctcaaaactctccagtttgctccttgtatcttctctatcgctcttgatgtttaaagaattttttaggattgcttttgatttgacctctttggactaaggggacagtttgctctcccatcccaagaaagagcttttttggtagtagtgtgctaggtggagcttctttggaattctatgtttgatgctgtatgtaggggagggaatttagtattattgtttgtttatttttttgagaaggatctttaatctttatttagagttgacctctttggagtaagggcacagtttgctctcccatcccaagaaagagctattttggtagtagtatgctaggtgaagcttcgttggaattgtatgtttgatgttgtatgtaggggtgggaatttagtattattttttgtttctttttttgagaaggatctttaatccttatttttatatttactctctacttataaaattttttgttctctattattaagctacaaattgaccccacaatttaagctactaaatgatgagccaacaatgtatatcaagtcaacttgagctaaatccctgacaccccaccttataggcaatcttctttgaacttgcatgtgagcttaataaacgaagaaaataaacatcaagaaaatttgaacccttgacctcttgttaaccaaggctttggtactatgttaacctaccaagtcaataatgcatatcaagtcaacttggtatacattcttgtcttgacccctatcatcatcactccaccctatgttgtatttgatagctatagcttagggagaaaagttttgggaggataagcattttcattaattggaaaagaagggcttaataagttactccaaaattccttaaggtctgattcataaacacaatggactgttttgagtactatctggaatccctctctatcatttctcaatgttttgcatgggcttaaggagatctaagaggaaatttcatttcacacaattagtgatttctcaatgtctagttcctagaagaattttctaagtatcacttttgatttggagtctagacactcatttggtactaaattccatgcccaagattttattttttcattttttttttcaatcagaaacgaattagttgcattgaaaaggtaagtacaaagaaggatgagaagtcctttaagaatacaaaattgtctatagtaacaataaggcagataagtgtatactagtacaaaaaggtggataagtgtatactagtccaaaaaggcaaatctatttgtgtacatcaaaatgattagggcaacactagttatattggaggaaatagtcaaatttttagaaatttgtattctagaccacctggagactcatggatgatagaagagttggattgatctcccatttctaaagagagcgttgtttggttggaatgccccttcatggaagaagtttgcgaagttggttttcagctagataaggaataggtcatgaaattgataaaccatggcatcatcatgttgttttcagatttccaggccttgtacttcggatcctctattggcggagtggtggttgccttggtgaaaaaaatcatcttttcctttcccacagatgaaaagcataactgaatggcttcattggaggtaattatttacactcagcttatgcctagtaatcgacataaccaaactttctgatccgctattgatgttggaagaagtaacctcttggatggagatcaaatccaagttggaggttgtgtctagagtagtcattccgtatttcaccatttggatggtgaggtacggatgtggttctgacaccataatgaaattcagagaggaaaactttgatttttcttattaaataaacagtagaagaagctagaatatatacgagaagcatgacaacaagcttatctgaatccccataattcaagtagcaaacaatccctcaaaataaaggatatatgctgattgaattagaatagagatttcagatacaatcatctttatatctttatttaaaataggaaataaaatcagaatctaaccccaaaatactaggaaactaattcctaaaagttaggaattaaattggaaatccacatgtctccaccttgttttctacctaattggctattactattgtataggggtaagtgttgacattccttcccttctttgccttgattcctgattttattttaaagacaaatttgtgcatctgttatttttatcttgaggaattctgtaaacttgcaatcgctattcattttcaggtacaacttacagtcactcccagaatagaaggcat

SEQ ID NO: 11417 - DNA, 7231 bp, Vitis vinifera
  Intron number 1 from transcript GSVIVT01000713001 (locus G SVIVG01000713001) derived from phytozome v7.0 (chr-ID chr7 ; pos 89709 to 96939)
aatcaaacaccattggaatgtgctaggtacatgtgatggaattaatgatcattaccaaagaatatcaacacaacctgttatctaattaattagtctctatgtttgacaattaattttaagattcctaaagaagaatggtctagtaagccaattgatcttttagttcttaaagtatttggttgtcctgcttatgtctatgtgcggagtgaagaaagatcaaagcatattctgaaatcaataaagtgcatattccttggatttgagaaaggaattaaagagaatagaccttaggatctagtaattggtgagctaaggtgtggtattggtggaaagcatgtatggaaagaaagaccaaaacaaataaaattgttaacaaaagcactcaactacaagagtaaatcattgaaatgaaattttagaaataaaagattagctaaagatggaagtgaaaaattgattgatgtcaaatatttctataaattagagtagaaatcatattctttgttcaatatttgtatcatcaaccacattcctcaatcacccaattttgcaatatcgatctcgcgtatgctcgaatttgtgacacttttctctagtttatgatgtcttgtagacattttaagcaaataactatgtagtgaagcctcctagaaggcatgaagtacaagaatcaagtgaaaggagtgcaggaaaatgaaataagggaagcatgcttatcaatgatttgggtgacatagtccatgctacccaatgagtggtgcccaacctagcagcctcacctatgcttgttgccatttttgttgacaagttcaatgccatgacccatatcaatgaaaggtttgtgctattcaccttttttgaggttttagtgaagtacacttagtctctattggtttgaaatttcattaaatatatgtcttatccattttatttattatttttacttatttccactcccactcaaaacaaaagaggtatttgatggtttttcaaatcaatgctgactttgtgtatttagtcaaaatcttaggagaagtgactaaaattaaccttacctaggagtagtgccctcgtcatcagaaatgttgcttgtgcctaggcctactttttaaacaatttcctccctaacctttagatctttggtggttcctcatgatgccttcatgtgtttgaggcttatgacaacattttagggttataaaaattattttgtagttgaaaagagggccttttttcccctttgcatgccttcatgtgtttgaggtttacgacaacattttagggttataaaaattattttgtagttgaaaagagggcctttcttcccttgtgcaagccctttgttcatttcatgggtttagcttctcttcatgtcctccatgctttccattagattttagtttgtttttggtttattctcgcttaggatatcttccttgagctccatttttgtaattacttttccacaattgcacaatgtattttggttgttgggctcatttatgaaggtatttatgtttatcatgtttaggtagttttctatcacaagggagatagatttttcaagagtaaactctcatggttgttttgcattaaacacttcaaatttagtgtatggagtttgacttggtcgtatcttgtttttttttttttaattttttttcaatccatccatataatgcttgtgagacacttctaatgcttgggttttgtatgccttgacttatatttttcctctacttgcctttgtaattctagggtttgggtcgagcttttaagtgtggtacttctcattccttgcaacccaattttaggttatggaatgcttgtagatactttagatgcttctgtttttaactcgacctatatttgactgacttaattataagtttactattgaagtcaaggatttgaagtttttttgttcatttatttgtgaaaagcaagacaattgtgtagataccatgtttttgaaaatgtctaattagttttaaacttatatcctccaatctaggtcactcttactataatgctagagttatataaattgtttggggcaaaggaccatgtgagggaacttcaagaagatgcctactctatagcatattttctactattttaatctaagtttttcaatcatctttcttctcccttacttttagcaaatcctttatttgtagatgtctcaaaggaatatatggattagtgctataaagatttaacacaaatgaagccaacagataagtatctcttttgttacacattttggattatcatcccagttatgtcctagtactaagaatgaggtgaggtttatgtcaaaagttccttaccctaatgtcgttaattacctcctatatttgattgtttgtaacaacctaatatcatatctgcaataagtgtacttaatagatatatggagaatctcgaaaagtagtattgaaatgctacaaaatggattcttagatgcctcttagatacttgcaatttagaagttttatttgaaagagaaggtgcattttattaaaatcgttagatatattgattcaaattatgtaaaagatcttgattcaaagacgtctataattaggtttttgttcatttttgttggtggatctattaattggaatttgtattattggataccgttgcattatctaggaaaaaggaaaagtacatggttttattaatgaagctacaaaataagttatttgattgaaaaaataaatttgactttgagtgggggagtatattactacattgtgataatcaaaataccattcacttggaaaagaatcaaaattttcatgctagaaaaaaacatgtttgtgtgaaatatcatagggataatggagattatatatgttaactaaagtaattcctagggaaatcaagcattccttgaatattatttgtttcgcattttgttaaagatggaaggtcgggtacttttacctataaaggagtataatttagtatattaatagagatattgtgaagatgttcataagtttggggctttgagttaaagtggaggttattgaaaaatgtctcaaatttccatttggcctatttctaaatctttgatttggataatattttgtatgaacttctctattaccataaaataagttttctatggtgagattttgttagaaaaataggtttttctctacaccaaatatttttatgagatgtagaaagagattttgaccgaaatggtgaagtccttttgagtgtaattaagacatttgagttgagatttttaagtttttaactactcttttatgtatagtgaatcgatttccaatctctccatggatgcaagcaaattgcaaaaccatggtaaatattattttttctcatgttctcattcatattctagatctagctagtctttgctcatttatttttgcataacaattgacaagatccaaagtgtcttaaggcaaataaagttttagggcttgaaaacctagatttttgtacttacaagagagaagaaagaattcaagttaagattgaaatcaataaattggaaagtctgtcgatggatgtaaaagtaaatgagggaaatgcttttaatgacttaaatctatcatgcatccctacaacattttcttatcagttttgaatccaaagatttgtctttgttaggaaaattaagctaatccaacctatggtaatcaccctagggggggggggtgaatagggtgatggtctctttttgcaaatttaaactatgtgaatgtaagagacaattatatgcaagtatataataagcaatataaagacaattgcatataaattaaagagtaaggaagagagaatgcaaacataagagtttatagtggttcggcgcaacccgacttacatccgctcttctttagcttcaatcccaagcttgaggttccactaatttaaggcttccaaaccaagccttcaagcaatacaattggattatggtttcaattcaccatcttggacttttggctccaagcaccctttacacttcttaagagataccatactcttgagagacttcttctcaaaggtttacaagtaaatgatctcacaaaaatcctaacacaagaactttaagctcaaatgatataagaaaactaggattaaaagatgcactaagaatatgcaagttttagaacaatggtgcactaaaaaacactcttccaaggctcaaatataatcaagaaaggtttgggaaggttaagctctttaaacaatgaagattataatctttttatagaagagaaaagtcaaactagccgtttgggggttcgactggtcaagttaggggtcgatcggttgattagtcgttagcattaaatgcttgacaggtgatcgttgggcctcgaccggacctcaaccgaacctcgacctgacctcaaccgattgaggttcaaccttgaccggttgaacaaccgttctgaaagaaagaaaaagttttttgcacccttaaccggttgagctgggggtctacccgggcctcgaccggttgagctgtgggtcgacttggacctcgatcaattgagctgggggttgacccggacctcgaccggttgagcttgctgtcgaccggttcctcatccggttcaaccggttgagccgttttttggctcaacaaccaacttttccaacttaaaaccttttaaaacaagtttgaaagacatttaacataagattttagttgaaaacatgaagtcatccaattcttaaaatatttaaaacaaaataactcttcgatgattttggtgcataagtaaagaatgtaatggatgaaaatcctagtgcaccaataaccttacaaagagttcttatgaagcttgggtcttgaaaaacacttctctttgaggtggtcttcttcttcatgatttctctttggcttgatttgtctttgtgattgccactttggaattcgtcttacttaatcacacttgaaatataatcattagttctaaaccttgttttgttattatcaaaatcaagattaaccaaaccttggtttgacaatcttgtttggaatctctatatttcaaccaccataaacaagtgttacccccttagaccttaactttagtccatgcatataactagattctgataaatttgaagctcagaccatcattcccaatttcattatgaatctatgattataattaatactaatatgcaacaatcttaaaaaattttgaaggaagtagaacttcatgacacaccattgacaacattaagtgggtaaccaattacccaaagaaacaatgaccaaatatatatgtccagtgccactcataaattcatcatactttcaattcttgccatttttctccattaagtgttcataagtaattgcttttcatgatttcagaagtacaaacaattttctcatggagaaggaagcaatggactgattaatttatctagctatccaagcaagtctctactcccccattcaaagccctacataaaaatgaaagttgataattaaattcttcttttcatatatatgcttcttggcaacaaaggctacataatgatgagtactatatacctcattttgtaaaacaagaattcattagtgtatatgcagcaaattctatatatattgtcataggacaattaacgtcataattacaatgcctaaaatcttctcaaataaacattgatttcgttaaatacattttcactgtttgccaaaaggttgtctcaaaacggctaagtggtttccattatttttctacctttttctctcttcgattgagcttgttttgcttactatggtgagggatttgtttagggtattcagatttaattttaaaaatgaagggtggatttgaagaagctaaaaataaacacaaaggttagatcttaagtatgcatatagttaatttttgtcatgcaacatctgtttgttcatgtgatctttgttgaattttcattgcttgcctcattttgttgatctttaattagtttatctgatttttcgctccatgtcatataggctctcttcagacctatttttggtagttgaaacaaatcttagtactcccaatactatatatattgaattaattaatcacttcatcactagtattgatccctaacaaatctttcaatatattttttagctaggattaatttttcttagaggcctagagatgtgaatgttgtgtatctaaagagactctagttccgtatttggtcgcttaattatgccacatgtcattttttatttatttatggagaatcgatatacaataattattattcaaagcttgttgataaattgatattattttcaaattaattatttgtctttaatatatgaaatttaagctgttttacattgtagtctgttgacaacaggaaaaagaagcctaaccctgggacaaattcagaaaattaaccggttgatggcgtgggggcttcctctttttctagccctaggccaaacttcccatgaacaagcgggaagatttttctttgccaacccttaatgtcgacatgatcaagaacaaagtgatcgactacatagattacttggttagcaaaaattgtgttgaatgttggcgaattttctacttgcttcaaatattttttaacttcttcagaatgttgcaagtattgaaaaagtttccgaagttgcaaactgcattagtaatgaaaccgagctgtttaaggtttatattcactattactgttaacaaatcccatatgaaatatatccaatgcacttttttcctattgaaagtatttatgtagatatttctttaatttcaaccagcattcattgaagtttcttggataattggccaattgatcttattcattaagcttacacaactgcaatgaagtatctgataaggagacggtactgcttccaactttggctccatcgatctaactgatccatcaactgtgtttcttagccatattggcatgacaaggtattagaattgatatttggcctatttgtatttttttctaaacattaagataattaattttattaaatttacctcatacttgttatatatatatatatatatgagaatctcattgctatatattatgtaggtgttttttaggttaaaaaaccatacatggttgcaattgtagaagatagaagctagcattttggaagcatagcatcatttcatcatgacatgcagctctaggagattttgtgcttcaacatagagtcaaaactcttcat

SEQ ID NO: 11418 - DNA, 2200 bp, Vitis vinifera
  Intron number 2 from transcript GSVIVT01037870001 (locus G SVIVG01037870001) derived from phytozome v7.0 (chr-ID chr3 ; pos 6906243 to 6908442)
atcccatttcaggtaattgatgtagttgactgtgcttctcattttgaattttcgaatttgaagagattgctattcatactcctggtggattattctatatctagagatactatctgctagtctggcttcttaagttaaagtttgatttgtttaaattagttgcctatgaaaaagattaaaaaaaaaaaaaaaaagaagaaaacgagttctataaattagtggttgcatttgagtctgaggaatttgagcatgattgattgcaagaaactgtatttgatttgagaattcagttctctggaatttgtaaattttgattttaccatggaattggaattaggggcaggtggtgatgactgtgatatgtagaggatcagtcacatatttatttttggtatgaagagcattgtttttcatcagtgatttgctgcagtgctataaaagtgagtttcaaattgagttgagcaatttgagattagtttgaagcactgctcctagaaaccaattgtattggaacatgcttcgccatatcaggttaaagcctcattctcatttgagagagatgctaccagcctgctgcctcccaaaagcaaatcaaggtttaggtggtttaattaataaatttgaatttgtatttgtctatttagcatttagttaattgattaaggctttgctgagtagaatcaatcactttaaacttttgctcatttgtacaattaaaaaatttaaactatcaatttgagaatatttaattaggcatctctgtcccctccttgaatttccttccttctgtcaagttttgtagctcagtaggggaaatttcatgcgcatatgtaatctgatattggttgtagataatccaagtttgttctgtagtttcttaatttttacggtatcttcctgtggaagtggatattgtgggtcctttttttcctcaggagattgaaaaaattgaagaaaaactagaattgtatgaattccgtgagggtttatcatttacttgttgacctctgtcattaaagcaacacaatctgaactcagcttgaagaatattgaagatgtaacttaaaaagaaaaggttgggacaaagatgcagatttcctttatcattggcttagtttttaattggggattctgtggtgtgaaacaaatgaaaagttgaaagactggcactaggaaattccctgttctgttatttgttaacctcaaatctctttgttggagcccctaagatgaatttccaatacccttcttcactaaccccttctctctctttcttccctttagcaggaacttagctatggatgttctttccacaccttttctgcattcttttatgaataagaaaagttggaccttcctactttacagattctgtgagcttttttaggttccaggcttgttcttccatgaattgaagaacctagcctttataaaaggctatgatgtttgcatgccaaataaagactcattccaaattgttgttgtttgtttatactatatttctcagtgtttgtttctagggtgtgggtgaaaagtggctgcgcaggtgaaatttcatatgcctgtaggcgctacctaaatggttctacattgtaccatttgatgcttggctctttaatgcttacatctctgcaaaagatatctgggaaacagaaagaaacatctttaacatttggctgaaggccttagaatctaaatgttggcttggactcagttcatacttgattccaagttgagttagctcagagcttgattctgagttgagttgaacccaagtttgcagtgttggcaatttaagtttagaaaaatggattggaagtttctgatatcaaagtgaaagagttggccaaaaccaagaaacagggaaaacagtagaccattagaagtggcagtttaagatgtattgggctgcacctgtctttttttattcgcctataaagaaaaagtggcagttagaaaggtaaacattagaaataaacacatgaaattaaaatttaaaaaaaaaaagatcaagaagttcttttaagagtatcaaccccatgtatttagtcagcacttaaggcaggcattctttctggaattcaatcaagtcataaattttttttaaagctttttcgtttacttttgtgtcatttcattatgagcccttttgattttaaatgcaggtcttgagttggaaaccacgagctctctattttcc

SEQ ID NO: 11419 - DNA, 12483 bp, Vitis vinifera
  Intron number 9 from transcript GSVIVT01018178001 (locus G SVIVG01018178001) derived from phytozome v7.0 (chr-ID chr1 5; pos 13524629 to 13537111)
tgactagaattttggatatctgcaaggagctaaaggtaaaaattggagtggacttggtatttgtccttatcacactatctttttcccctcctaagtgcttgtatgtttctttacttttgttagtgtttattaaaggttatgatttgattggacatgttgatctagatagtgggttagtggaatagaattgtctaggtgacccaaattgggattattatggaacataatttgtgcaagtgatccgaataagcaggataatgcactcttcagctgagtttaattgtatcatatgagtgcatcttgtttgtttggtacatcacctagcttatttgttttcctgctctcaccattcttctgccatccgcttttaggtagcgcctttttgaggtatttttatcttgaactctttatgttcctagggaggtgtattgcatattgctttaagtgatgtctttctccaatagatactgtttagctaattgagaacttccgtctcatcctaagaaagaggatggtttgggactaggctatgtaatcttgagttaaggcttgcatttataaatggttgtgaaggtttccttgagagataaattctctgttgcagcttgtgattaaaattatggcttgtaggataatggttggggcaacaactttgatgcaaagggatgttaatgggggcagatttggggtggggcctcctatcatgtccctggctgattatttaagatgttttcatcatcatcttcccaaactcaaattagggcagtgaggtacaggaatttccatactcacattgggccttcgccccattaatctttttaatggttaaaagtttttttttttctccaaacttttaaataaataaattaagttatccatagatttgtatttttttttttatcagagacaaacatatgtattaattaagaataaataaaacatgagaaggatgagaaatcctcctcatgaaatatagacctaataaaaaagaactaagtaaacctcctcaatacaagggactaaacaaaatgaacaaaaagtctatacaagtgtaacaactcttggccctataaaccctaccctaaggtgtgcaaatcaaaaagcaactaagctgaattacactcaaaggatagagtttaaaaatgtttgtacagtaagcccaaaaagaaacaaagaaatgaaatacatcccacatcatctctagcgtcttccaagtgtcctaaaaaatcctagcgttcttctttctccaaacaatccataacgaaaacaaacacacgagcctccaaagagtcttgcctctgatatagtttccaagacacttgaaaaaaatcaccatcatatcaagaatactgtctagctgaacccacgccatcctcgttgtgagaaaattctatgccacaatcccaaagtaattgaataatgtaagaagagatgatcaaccgtctaattacttctcttataaaggatgcaccaatcatggctaagggctaagtgtcctcaataatagatttgtatcttttatttatttttatgggaagtaaacttacattttcattttatacttgctcaaaaggggaaaagatgaaaaaaattaaattagactaaattttattttattttattaataattggggtggggaaaggttggtcaatgtagtccccaattccacactaagtttaaaaacaaaatcctaaacttgctttatttaaacctcaacaaaacttattctatagaagaacattgtgggtggatccttgaaaatacctaccttgttgtcatcctaatcaatgccatgtgttgaggtgctatactgatttgcatccaaattcatttgttttatttatttatttatttaattattattatttattttataggtaaatatagaaatgtatagattaaaaatagaaaaagatacaccggagtacacaagacgtatacaaagagcacaaaaaggaaggcctcgaaaaagtacacaaaaaacccttaagaaactcaaggagacccaacttactctacaaaatcaaacaaagacattgaaccttctcttatatataagctaacctaagcagaaaggttacaaaggaacacaagttttaactcttgatcgtttgttccttatcctcaaaagctctttgattatgttccttccagattgtccaaaatatgcgaaggggggaggctttccacacctttttccttttcttccctacaaaggacacataccaacttaaaaggatatctttgatcgaggaagagatcacacaatctacactaaaaagggagaacaaaaggtgccaaagaatccttactttggagcagtgaagaagaatatgatcaatggactcttcctcctatttgctcaaaaagtatctattcattactgatcaccctctcttctaaagattgtctaaggtcaaaacttttcctcaacttgcttctcatgccaaaaaaactcaccttagattggacccatgggttccaaataatgttcttttgcaaaaggaccgccttttccacctttaaggttgtatagaaagatttgattgaaaacaatcctttttttttttttttttttgcttctttccatatcatcttgtcattaacttcccttataatcctctttgtttgcaacaatggaaaatttttttcaacaacttccatttcccaatcattaacatgctttgtgaatagcggagaccaaagtccctcctccaaagtctttcaacaaatccgccacccaagctttctttgacgaggctaaagcatacaaagagggaaaggagttacacaagggctcctttgcacaccatttatccgtccaaaacttaatctttttgccatcacccatttcaaacgaggtttttctaaagaatagatcccatcccttccttatagctttccaaacacaaaccccacaactacctctcacttcacaagggtgctaacctgctccttccttcccattctacccctctataatttgcttccataaaacttcccctttaggtttattcacaacaccactttccaaagagggcttgatttagcaaagagactcttctactacccaatcccttatttcttttatccttacaaatagtagaccaactaaccaagtgaagcttcttttccaaattcctacatctctaaagaaagtcctttgaattttttctaatctcaatcttacctttctagggattacaaaaaaggacatgaagtagattggcaagcttgacaaaatacttctaatcaaagtaagtactccctgcccttgagatgtattgtcttttctacttcgaaagtcttctacaaaacttcttctccactttgttccaaactgttttagacttgcaagaggctcctagaggcaatcctaagtaaaaagaaagaattttccccacctggtagtagcccaattctattgccaaaacctctacatctataacccccccaattgggatcaattagtttttttcaagattaattttaagccctaataaatcctcaaatcacatgagcaaccgacttagatgaaccaattgatcttatgaatcttaaaaaaagaccacagtattatttggaaacaaaagatgagagacttccatcccctctctccccttccctcctccttccacccccccaccctactcgaaaacctaacaaggagcccccctcccttgtcctctccaacaaccaactcaacacctccatggccaggacaaacaaaaaaagggaaaaatggtccccttgtctcaaccgtcttgaactctaaaagaaacttgaaggagttccatttactagcattgaaaactttgttgtggaaatacaccaatgtatccatgtaatccatttttggccaaaagccttttttttctataattgctaataagaaagctcaattgacatggtcataagcttttctaacatctaacttattaatgacaccattagtaccattcttctacaaagaattgattacttcatttgctataaggttcatatctaaaatttgtctctcttctacaaaaataggattgaattaggctataatactcctcaatagaagagaaaaagaaaacgatcagaaaaaaaaaagtgaaacaaggcaaaaacaatattgcaatacgaaaaataaaaaaacatgagtggagctaatatgaatgggcaacgacgagtatggctggaaaaaaaaacacctaatgacattttttttttttttttttaacagatgaaaaacagaggagaatagaaaaaaaaatagtaaggaatcgaatttgataccatgtgtgcaaccatggagaaactagaataaacgattttattgaggaagactttttctgatactttacaatatcagtagatacaaaatatataagaaaaaatatatccaactagaactcctagaaatcctagaaaaaaaaatattactttttttttttttcttatccaaaaaaaaaaaaaaaagaactcctagaaatcggttgtaatatacatgaaaatacattaaagaataatatttattttcttaattctgatcctatccttcattgcccaaaaattttatgtttaaattaggaagaaaatttgacgttaattgtcggaagtcaaagaataatatgagctatttttctacatcatttatgattggaaatgaatgtagtgctgagttcttagaggaactttgatagggagactagtctatcaaagagtctttctcttgtccttctaggcacctttagattcaaagaatcactaattgttgaccttcttgtttgtttaagtgactccttttcattttatcaaaaccttttcagaaatttaaaatgattgtggaactttggcttgctttccttgtcaaaccttaattgatgcctatttatttaattgtgtggcggtgctcattaggtcattatttttcttaaaaatcattttttcattgtttctcctaacatatgagtctgttatcccttttcctattgggaaaccatctagagttgagcaagttgcatcttgtgaaatggaagacaattttcatgaataaaaagtgtggaaggttgggaataaaaattgggattttgtaaattgcacctttctttgtaaatggtgtgttatgtatgttgaaagagagagagaaaaaaccttaattctcattcatatattaaattcttacaatagagtaatatatatgcaaggctagattgaactaactaccatatatgtgacctatattaagaaaggaaagaaagattgtacactataaatacattatattcaacactccccctcaagctggagcatttatgtcatatgcaccaagcttgttacaaatgtatttaattctagcgcctttgagagatttagtgaagatgtctgctagttgatcatttgaattaacaaaacttgtagcaacacaccctgatgcgatcttctctcaaatgaagtgacagtcaacttcaatatgcttggtcatttcatgaaagactggattggatgcaatatgtaatgcaacctgattgtcacagactagctttatctgttcatcttttccaaatctcaattcctgaaagagttgcctcaaccatatgagttcacatgttgccaaagccatagctcgatactcagcttcagcgcttgatctggctactacatcttgtttcttactcttctaggatattaagttacctccaataaaaacacagtaccctgaggtggaatgcctatctgagggtgaaccagcccagtctgcatctgtgtaaccaacaatttgggtatagtccctgtcttcatacaacatactttggcctggtgttcctttaatatatcgaagaatgcggatcacatcatcccaatggttgtcacatggtgactgtagaaattgactaaccacactcacaggaaaaaagagatgtttggccgagtgatggtgaggtagttcagtttgcctacaagtcgtcgatatctcccaggatctcttagaagctccccctgtcttggtacaagtttgacatttggatccataggagtttcaacaggtttacatcataacatatctgtttcttccaagatgtctaaggcatacttcctttgtgacataaccacacctgaactagattgagctatttcaagtcccagaaagtacttgagtttgcccaagtctttggtttgaaagtggttgaaaaagtggtgctttagtctttggataccctcctaatcgctgcctgtaatgacaatgtcatccacataaaccaccaaatagatgcactgattcaaagagttatgatgatagaaaactgaatgatccgcttcactctgaagcattccaaattcttgaacaactgaactaaaacgcccaaatcatgcccgaggagattgtttcaagctatatagagagcggtgtaacttgcacactaaaccaggtggttgctccatatacacttcctcgagaagttcaccatgaaggaaaacattcttaatatccaactgataaagaggccaatgacacatagctgccatggggagaaataagcgaacaaaagcaatcttggtaacaggagagaaggtgtcaccatagtcacaaccataaatctgagtataacctatagcaaccaagcgggccttaaggcgatcaaccggaccatcaggaccaactttaacagcatagacccaacgacatccaattgtagatttaccaggaggtaaataaacaagatctcatgtgccattggagtgcagaacagccatttcatcaaccattgcctgtcaccacccaggatgagaaagtgccgcactagtgctcttaggaagagaaacagaggataaagtagagacaaagacagaataggatgaagataatcgatggtagttcaaaaaattataaataggatgaggattacgagtagatcgattatctttccgaagagcaatagacaaatggtcggtagatgacagggccggggtaggagaaattggtgggacaggaagtgagtcatcaggtacctcagctgaagagagaggaggagcaacaacacaatgtcgacgatgataaacctgaagaggatgagagaacgcatctgaagggggggatatatagggaagtggcaatacttcaaaaatggaaagagattaagaagatgagaagaatggagatgcctcaaagaagttgacatcagaggagataaaataacgatgagtgtcaggggaataacaacgataacccttttgaagtcgagagtatcccaagaagatgcatttcgtagccttggcggagagcttgtcctgtccaggtgtgagagtatgaacaaaacaagtatagccaaagacacgaggaggaaggaaataaagaggttgggtaggaaaaaggagggaatgagggatttggtcatataatatagatgagggcatacgattaatcaagtaacagactgtaagaacaacatccccccaaaaatgaaaaggaacatgactatggagaaggagggtacgagctgtctcaacaagatgtcgatttttacgttcagcaaccccattttgttgtggagtatgagcacaagatgactgatggaggatcccatgttgggacataaaagaagtaaagggtgtagaaaaatattcccaagcattgtcattgcgtaacgctcgaatagaaacattgaattgtgtttggatttcaacataaaatttatggaaaatagagaataactcagctcgatttttcattaaaaataatcaagtacatcttgaatagtcatcaatgaaagtgacaaaatattgaaatcctaaagtagacgtggttcggcatggaccccaaacatcagtgtggacaagttcaaaaggagactttgcccgattattcaaacgctttgggaacgagacacgagtatgtttcccaagctgacacgactcacacgcaagcgacaacaaagtggaaaaacgagggaccatcttctggaacttggagagactaggatgacccagacgactgtgaatgagaagaggagcatcggtggaaatgcaagctgcaggagatgaaggtgatgtgaggtgatagatgccttgagactcacgccctatgccaatcgtcttccccgtactccggtcctgcaagatgatagatttataaaaaaaaagtgatagaacagtcaagagtgcgagttattttgctgatggaaataagattaaaaggacattcagagtcataaaggacagaatggagaggtagggaagagagaggatgagccaaaccaatacctttagccatagtttgggaaccattagctaaagtaacagtaggtaaggcagaggtagtagtaataaaggagaaaaagtgtttattaccagagatatggtcagatgctccagaatctagaatccatgggccaagagaaggagattgtgtaaagcagacaaagatattaccggtctgggcaacagaagctgatgtggctgcctgatatcggagataggcatcataatcactaccaatcattttttccgatgtgatagtgggagatccagagatgacggatgtaaaaataggatttttagtcgccatatccacttcacctgagattgaatcatgtttggatcgaagagagccctaaagggaggtcggatcacagctgtggaagaagaacttggtatgtcgggacccaaacaaaggagaaaaggactggagatgaagaagaggccaacctaaggcacacacaggtctcggccaaggaagggagttgctttcagaggctgaaagaagacttgcggaggctgaaatgccaaaaaaatggagaagcagggtttggagaggactgacggaggcttagaagtgtaagatggtgtcggatgagcctgctggtagaagctcggcaccagaaagtgggccacgcgctggcgtgtgggatttaggctgccggagaaaaacggcgcgtggatcgatttttggctccggtgctttgaaaaaagttgcatatctcttctttgcgctcctgatgatgtggtcggtgtcggaaaatatcgtctggaaaaaaagtcgtcggaaaagtctctggaaaatatcaccggaaaaatgttgacggtgatgagggttttctgaccacgatatggctgactagaaagctttgagagatggaaaaggtgaccggaatgaaacacggtcactcgacggattcccggaattaattacacgggtaaaccagaaagaataaagttttctcccttgactctgataccatgttgaaagagagagagagaaaaccttaattctcattcatatattaacttcttacaatagagaaatatatatacaaggctaggttgaactaactaccatatatgtgacctatattaagaaaggaaagaaagattgtacactataaatacattatattcaacaatgtagtcgagcaattaaaggcaagtttggagaaagagatgtgggatggtgcactagaggtgggggacttttgggatggggttgtggaatggcatcataagaagttggaaagagtttagtcttggagtctttatttaggttagaaatggattgagaaccaaattttggatggacaggtggttaggtgaatgcctttcaaaagaggctttttgttagctctttagaatcactttcaccaaagatgctaaatttgggaggttggagaggaagatgatttttgggtgttctagcttttggaagcattgttaggattgggagctgggaggtctgccagttcatgacttgcatgaatgaggctcagattttatggagaggaagaggataaccttttgtagaaggagagactgggggaaggttccatgtaaagtcttattatagtttcctttgcacagtgtcctcaaatctgttccttgccaaagaggtctggggtgcttgtgctcccttgagagcatatatatatatatatatatatattttttttttcttatgaggagaaagattttgtttccctttgtctgttttgatgcatctagaaagaacgtaagagtaggaccttctaggggcaggagctaagataaaaaattgaaataagttttcaacaagtctcttatggagtggtatagggcattgctggagctagcaaactgtcattattgaattttattgatagctgaagttgggatttgtttatgttttgagcagactatttctttccataattggttttcatctcctttgtggtgcctcttaaataacccccttgtgcatagggtgagccctttttgtttggtatttttttaaatctcatttatttgccaattaaaaataaaaagagcattgttatctttttcatgctaatctggaggactaaaattctcttgaaatcaagacgtataagaggttcaatactgaggagagacaccaaattagaatacttgataactccttttgctttaatgagttataagagaaagcaaatgacattttttaaagaaaagccatgtgcaaattgtatgaagcaactcaagttgctattgttggaccaactatgtagaagtgggaaagagccatcctaattatgctccttaaaaaggtccattttgagattgtgtgttgcatttgtgaaaagatagaaaagggagaatccctaatttttgttattaaaaactgttaataatacacattggacttgagtatatatatacatgttagtgggacccacaatacaataaggaaagaaaaggaaaagtaaataactgaaataactgtacactatttaacactccccttcaagctggagcatatatgttatatgcaccaagcttgttacaaatgtatttaattctaggacctctgagagatttagtaaaaatatctgctagttgatcatttgaattgacaaaactagtcgccacacatcctgatgcaatcttctctctaatgaagtgacagtcaacttcaatgtgtttggtcctttcatggaagaatggattggatgcaatatgcaaagcggcttggttgtcacagatgagcttcatctgttcatcttttccaaatctcaactctcgaagaagatgtttcagccatatgagttcacatgttgccagagccatagctcgatactcggcttcagcactagatctggccactacatcttatttcttactcttccaggatattaggttacctccaataaaaacacaatacctggaagtgaaacgtctatttgtgggtgagccagcccaatctgcatctgtgtaaccagcagcctgggtatgacctctgttctcgtacaacacaccttggcctggtgtgcttttgatatatcgaagaatgcggattacaacatcccaatggctatgacatggtgactgtaggaattgactaacaacacttacaagaaaagaaatgtctggacgagtaatggtgaggtagttcaatttacctacaagtcgccgatatctcctaggatctcctaaaggctccccctgtcctggtataagtttgacatttggatccataggagtgtctaccggtttacagtctaacataccggtttcttccaagatgtctaaagcatacttcctttgggaaagagccacaccggaactggattgagctatctcaatccctaagaaatacttgagtttccccatgtctttagtccaaaagtgggtgaaaaggtgttgctttagtttctgaataccattatgatcactgcctgtaatgacgatgtcgttcacataaactactagataaatacactgccccgaagagttataatgatagaaaacggaatggtctgctgtactgcggaacatgccaaactcctgaacaatagaactaaaatggctaaaccatgctcgaggagattgtttcaagccatatagagaacggcgtaacttgcacactaaaccagactccccctaagcaacaaaaccaggtggttgctccatataaacttcctcagcaagatccccatgaaggaaagcattaggagatgggaaaggtgaccggaatgaaacatggtcactgaaaggtttcccagaattgattcacggataaaccggaaataattaggttttttttctccctaggctctgataccatgtgaaaagagagaaaagggagaatccctaatttttgttattaaaaactgttaataatacacattggacttgggtatatatatatatatgttagtgggacccacaatacaataaggaaagaaaaggaaaagtaaataactaaaataactgtacactatctaacaacattgaattgcttttatcatccaaatgaaaaaagatattcaggttggaccatactgctgattatcccttcaaaatagataaaaatgtgctaatattttggagttttcattgcttagatttttttttttttttaataaattaaaccttttgtatttcaaatatttttgtagctctttttgtttagtcaaactgttttcatacttgtattccttttttgtggtgcagattctatcacaagtattggaattaattccttctcc

SEQ ID NO: 11420 - DNA, 12511 bp, Vitis vinifera
  Intron number 1 from transcript GSVIVT01018321001 (locus G SVIVG01018321001) derived from phytozome v7.0 (chr-ID chr1 5; pos 11123364 to 11135874)
gtgttttttatcgagttccagggaagtaaaaactaggtttaacattctaacatattttttgtttcattgttaataagccccaaaacaaatgaaaacaagaaaaattaattatttttaaaaattttgtctaattgagaatgagagatacactagtttgtagtaattattttttcgcatgaaataatattttattgaagacttgactatataatgtattggttgtaatttttcacatgtgaaaatattttattgaagacttgactatatttgatacttttttccaccgtgctaggagctttttggtgaagtctaacaatagagattgacatctactacaagatgatgctcaattaatctaaaagcacttaagttatttagggttttcttctgttaacctaagaaaatattcccactttttttgtattgagtcacctaaatagaatagaatattgggtatcagagtggtaaagggtattataaatatgactttttttttagagtcacctacatggaatgaattattggtaggtgaacaaaatattggggtgattgtaatagttgaattagtaaatggaagataagtgtatgttgctttgtttattctataaaaacaataattttagtagttgaaatttacatgctttgttgttttataaaaacaataattttagtatttgaaattttaaaatgtgaatgaaatgcctgaaaatatgttttgaaaaataggatagtaataaatggaaaatagctcatttcctaaaaatattttgataaattaaaataatatgtggttaaaatatatttttgtgaaagtatttaaaaatgaatcaaaatattaataattgttattttgtttgaaaataatttaggaatataaaataatattggggataatttttgagtttaaattgggttataaatggttaaattttttaggactgtcttttttgaaaataatccaatgataatttttttaaataagaatgttgaaaataattttaaaaataaaattttgttggcaatgatttttctaaaagtattttaggcataaatggaaatttcttgtatgaaaataagagaatttatatatatatatatatataatagacataaaaatagacttctttgatatttaataaacaagtgaatttttctctaaaaaaggaataaaataagaatttctctatataataaaataatttatatatgagatagttttcaataagaaagttttgaaaataaatttgggataaaatatttttttagtaagttttgtttagataattcaagaataaagtggtttattaacttttcttaaaaaataacattcttctttcttttttgaattgatcaatttttttagaaataaaattgttagattctattttttgtaaatgtttaagaaattctaaaaaattatttaaaaataaaatgacctttctaccacattccttgtaataaataattgtttttttatacatattgtaaagtaaaaaaaaaagtctttgtttagttaacctaagaagacattcctacttttctttgtgttgagagtcacctaaatggaataaaatattcaatatcataggagagtaaaaagtattgtagaaatgattttgttgagagagttatctaaatggaatgagatattggtaggtgaataaaatattacggtgattataatagttgacttagtgagtggagaagaagtgtatgcttctttgtttattctataaaaacaataattttagtagttgaaaacgtgtatgaaatgaccgaaaatattttttgaaaaataagaaaataataaatggataatagctcatttcctaaaaatcttttgataaattaaaataacttgtagttaaaatatattcttgtgaaagtatttaaaaatgaaccaatatattaattattgttattttgtttaaaaataatttaagagtaaaaaaataatactgagttcaaatatgactactttgttatgagattcattaaagaaataattgttgattttacagttattgcatcaaaggttttactcgtttaataaattgtacataatttcatactttcaattattgtgatattaatgttattctcatttgatttcagtttgatgacaaataaaacatattctcaagtagaatttgatgaaattagagaagaatagattacttttgtgttataactaatcatgaatcatattgatgtatcgtgatcattcatggtaagtcccttagttgttatacgattgaattttccattgatattgtataacattacttattctttacgaactatttttataccaaaatgagaaaaaggaaaaagaaaaagaaaacattagtacttagatttgtttattgtttataacatcacatttttattttcaataagaactctaaaactcattaaactatgaaatgcaggtatacactcttgggaggacaatatgaagaataaaaagaaaggagaaagaggcaacaagatttaggtttttagatatgactcttatgtcatacatgaatgttaggaagcttaacatttctaaatcatgttttaatgtgtatttacttttcttttttagttttggtgggtttgatgtgtttgatgtactatcattttgtgaacatttgatatacaaatattattggatgatgtaatatgttacaaattaattcataagcattatgaaaagataagttaaatgtaatatgattattatatttatggacaatttacacaggttagtcttatttattaataagcattacaaaaatctacaaactaatcaacaaaaaacaaccatatcttccataatcatttacaatgatgtgacaccataaattaaaggtgatacatttaacgtgacactataactcaaagatgatgcatttaatatgacaccttatatatctcatacaaccctatatcaaattaagcatcactaaaaatatatggtatctcttctgaatgtatcaccatttatttgctttggtgtcgcttccaaatacgtcgccaattgataccctctatggtgtcagtggataaggtgacgctatgttgtagtgacaccctatatttatagtgacttattataaatgttaccatatatctttttccttgtagtgaaagaagattattttgggggtccaacaaatctacatctataacaccctcttggtagctgcccatgcaccactgcagctataaaaccacaagaggacaattcatcatgcctctaggtgcggctggaatgggagtgaagccatgtgtgatatttagtggaggattttttttgcctcctaaaaccatgtcacagtatctttcattccttgtagtcctccccactatcacatttcacacacaaaaaaaaaaaaaaaagtttgatggatattaaaatatatcaaatattcatatgatgaaataactaaaaactaaatatttatataaatttatatttacaaccttataaattacactcaaatgttcgactagaaatattaaatttacaatgataattaatatggtcaaaactcaaaaagatataattatattaagggggtatttcacatatccaaacacttattacttaaatgacttaagttgaattttaagttaaattataattaaattatttatttaaaatttgttacttgattcttactttagagtattaagattatttgataaaatttaacttaatatttattttaaatcattaaattaacatatttttcctcataaattataattagaacaaaagaggttaaataataatagaagtcatgaagtagtaaaaaagatcatgaaaatagttcagacagatgaaaaccaaaaagtaaaatgaaaatatagatttaagaataagttaatatttttatttattacttaaagttgtttttttattttcaatcatgtcattgcattattttattaaacatgatttatttaataacttattattaaatcagtttaaattattaaatttgtttactaaacaccccctaaaactcaacatgaaagtttaattaaaattaaagttaatttgtttttttttttcctcaagttgaactaaaccctgtaggatgagcaaaacgtgggaaacgatgattcatttggagagaatttcttttcttttatttcgagatgacacaaggatacaattagagaagatgaaagcaacactgattctaacaatgaggaatattgtgtcagtggtattgggttgtttctacacatttacaatgccttggtgatgaaccaaggaagggttggatcaaagcttggaaagcagggaatcagaggacctccaccttctcttctctctttggaaatgtttctaaaattaggaagacgcagatgcaaaaccactcaacgactcccaatgaccacaaccaatgggatggcaacgggatgggttgggacgaatccgtctcatccttatcctgtctagtttattcaaaataattcatattattgtcccatttaaaaaattaaacggggcggggtaggactcccacccgtttcactttttttttttcgaaaatttaaaaatttttctttctaaaaaattaattgtaaaatttttaattacattaaaataaatatactttataaataattaaattattatattttgtataatttattttattaaaagatatttattattatctatatattaaaaatagtaaaataaaaattaatttaatttaattttatgtataatcaggtcgggccgaggcaggacaaggcaatagttgaacctgtctcgaacccattttgagttttaaaaaaattctcaaactcatttaattaaaattcaaagtcgtcttattaaaggtagtacccgaaaaaaccagcccattactatccctaaccaccatgttttgtttttccaatttcttccactagggttgatacattattcaaacaagtgacccaacaaaatcaccaatgttgtgcttaaatataagtataatttttagaggaaaaaaatagttgaatcaatgcaatcgatttatgacaacatcaaaatcgagttaaccttttagtgatggaaaaatcaaatcaaatcaaccttatttattataaatttggttcgatttaaattattgattggatacaaattaatttacatcttaattaagtccaatttaattttaaaagtaattaaaacaaatttggttttaaaatacatttaaaatttttaataaaaaacgtaatgaatataattaaaaattaatttgatcatagtctaattacaactaattattttaataaaatctaatataaaaaaatactaaactcgttaaatattgaatacttataaatgagttttacaatatcaatttgatttgatttttatttgtcaggagacaaagaaataaaaaatcaaattaataaagtcgatttttcttagatcaaagcttgtaaagcaaagaatcagaggacctccaccttctcttctctttggaaatgtttctgaagtgaagaggatacagctccaaaaccagtcaacagctcccaaggacctacaccaccatgtctggttttccattctctttccatagctggaccagtggaggaaagaatatggtatgccttctctgtctcagacttagacttatctatatgttgaatagtcctaatttcttgcacatgaatagtgaattctaaagaacatcttggtgcctttttaatcagcccaaaaagaatttaacaaaagaatatctaatgcataatgttatgagattggtggcaggacccatatacatgtattaccctggacacatgccagtactgctgataacagatgtggagatggtgaaggaaatagggctatgcacatctttgaatctaggaaagccttcctacttatccaaggataagaaagctctactaggccaaggcttacttgttaaccaaactttcataaactttatgcgaaaataattatttttgaaaacaattttggatacataaaacaaaataatttataagtgctaaaataatgatcatattactactttgatccatgaagtgatattgaatcaccttgtgaattgtattgtcaagatcttcaactcactactctcatatagtgaatgggtcacttgtgtggtgtatgttgctaaaaataaacaacaagaaagaaaagacataaaaatgagagtgtggcttgagacctcaatttataataagttatacatctcttaatcttcccatcaaagactatatgggagttatactcattatttacacccattatgtacaaattaatgggtaatggtgggttatgaacttgaatgcatctatgtaattgcataggttatacttttccattttcctccattactcataaacataatgtacaaattaattgcatatgggagttatactcattatttatacccattatgtacaaattaatgggtaatggtggattatgaacttgaatgcatctatgtaattgcataggttatacttttccattttcctccattactcataaacataatgtacaaattaatttcataatgatggggttacaaaagttgtaacaccacattcatatgagttaaattttctaactccccatttgtaatttgagtcttccatacataagactcttggatgcccaatcaattgattcatctacctatcaattgatactcttaaataatattcatataaatataattatatatgaccacacattatagaaaaaaagctaacaatctcccacttggcctacataattatatttataatagattaaaacataatatggccataacaatttctcaaaatagacaacttttactttaagattatgtttcatggaaccactaacaccaaatcattgaaatgattggatcacacaacgatccaatattcttcaaggattatagtactagcacctccattaacatgaatcaatgacttttatgacattagcaacattaaggtgataatgctaattcattcacataatggtcccaccaacttttaaacatctagattgtgcacaaaaatgatgtataaaagtaacataataatcatcaatatatcataatcaagaactttattctcattataatgtgatcacatacattacactctcaatcaatctaaaattgacaaacttgcccccaagcccatgcgcgcaacataatccataaaaagcttaggtggaagaccttttgtcaatggatctgccaacatgagtgtatttttaatatgttcagtagagacaactccattttgaattttctcccttataaccaagtacttaatatcaatgtgttttgatcctcctatagtcttattatttttagagaatcgcacaacagcactattatcacaatatattctcaatggtctcattatcgaatcaataacatgaagccctgagacaaagtttctcaaccatattgcatgacatgtggcttcataacatgctacatattctgcctccattgtaaaaagaagctatcaacgattgcttatgacccttccatgaaataggtccatttgataacataaaaatatgcccaaatgtagactttctggtatccttataaccagcataatcggaatcagaataaccaataatctctagattatttgttcttctgtatgtaagcatgtagtccttagtcccttgcaaataacgcaatactttcttaactgctttccaatgatcaatacctggattactttggtatcgaccaagcatgcctaccacataagctatgtttggtcgagtgcagacttgagcatacatgatactccctattgcagaagcataaggaattttgtccatttgtttcttttcaatatcatttttgggacattgaagttcacaaaatatgtcccctttcacaacaggggcaacactgctagaacaattttgtatgttgaatcttttaagaactttttcaatatagttcttttgggataatcctaataatccacatgacctatctcgatgaatttcaattcctatcacatagaatgcttcacaaagatctttcatatcaaaattcttggataaaaattgtttggtctccaaaatcattctcatattgttgctagcaagcaacatatcatcaacatacaatacaataatacaaattttgctcccactgatcttaaggtatatacattgatccactagcttctctttgaaaccaaaagtgatgagaatttcatggaacttaagataccattgtctagaagactgctttagaccatagatggactttttaagtttacataccatatgttccttgtctttatcctgaaaaccctcaggttgattcatataaacctcttcatgcaagtcaccattcaaaaagacagttttaacgtccatttgatgtaactccaagtcaaaatgagctactaaagccatgactattcttaaggaatctttcttggaaacaggagaaaatgtttccttatagtcgattccttctttttgagtgtatccttttgcaactaacctgaccttgtatctttcgacattgcccttagaatcatgtttggttttaaaaatccatttgcaaccaatagttttaattcctttaggcaattctacaagatcccaaacttcattatctttcattgatttcaactcttcttctatagcataaagtcatagagttgaattttcactattgatggcttgatcataagaagtaagatcactttccaagccaacatcataatcacactcattaagataaacttcgtagtcatttgatatagcaggtattttctctctttgtgatctacgtaaagataatacttctgtagttgggacattctcattttcattacgagaaacctcttaagtcacaccatattccatcattggtgttgatacttcattagaggtcgactttttaagctcagttctcccactaaaatattcattttccaaaaacacagcatgtctagtttcaacaattttagtgccctaaccatgacaataaaatctaaaaccttttgatcttttaggatagccaatgaaattacagcttatggttttagaatccaatttctttatttgtgggttaaaaattttagcttcacctacacatccccatacatgtaaataattcaaagtcggtttcctacccacccataactcataaggagttttgggtacagccttactaggaacacgattgaggatgtgaacagcaattttcaatgcttcaccccacaaaaattcaggcaaggttgagttactcatcatacttctcaccatgtcaattagagtacgatttcgtcgctctgctacaccattttgctctggtattccaggcattgtgtagtttgtaatgataccatgctctcttaaaaataaggcaaaagcactaagatgttgacctgattcggtgaacctgccataatattcaccacctctatcagatcttacacttttaattcgcctattgagttgattttcaacctcagctttataaatcttaaaaacatctaatgcttcagatttttcacgaataagatacacataagaataccttgaaaagtcatcaataaaactaataaagtacttatgtccattgatagttggaattgaataaggtccccaaatgtcagaatgaatacattctaacaattcagtagcccttaaggcaccatttttcttaaccttagtgtattttccctttatgcattcaacacaactagtaaaatcaaaaaaattaagtgaagtctagatttcatctttaataagatgttccatcctttctcttgaaatgtgacctaatcacttatgccacaatatggatgaattttcattcactcgattgcgttttttagagaattcatacacatgataagataaaagagactatgaatatttgcaatctaaattcaaagaataaacattaccacgtaaagtgccagagccaacgaaacaagaattatagaacaaggaaactcctttatttccaaactttaattcataaccataagaatcaagtcttggaactgaaattaggtttctagtaaaaacaagaacataaactgtatctactaaatccataatgaaaccagtatccaaaattaaacgaagagtgtcaatagccttaatttccacttttgttccatttcccaaagtaatggttcgctctcctttacttagtctcttgcttataaggtatccttgcaatgaattcgttatgtgaatgcttgtaccagtgtcaatccaccaagagttttctggtatatcaactaaataagattgataagacactaagcattgagttttacctttcttttccaaccaggccttaaaaccataacaatctcttcttttgtgacctttcttatggcaaaaatgacattgtatcttattttcatccttttgcccattgtgagatacatcattaccttgcttctttttattacctttacctttcttaaaggattttttatttggaccaatagtgaggtgagccacatcgagtttttccactttaagcctctcttcttcttgaacacacatggcaattagttcactcattttccgcttatccttctgagtattataattaattttgaaatgaccaaattgtgaaggaagggaagtcattatgaagtgaacaagaaaacctttagaaattgccatgtccattcctttcaattgagaagccatgtcactcatcttcatgatgtgctcacatacaccactatgaccatcatatttcattgttatcattttgatcataagagtacttgctaaggacttggaagttcctaagaattgttcttcaactgatttaatatagctcattgcattatctgaattcgggattgctccacgaattgtaggagtgattgaacctttcataatcattagactcatgcgattagagcgctcccacttttcatataaagccttttgttcattagtactttcggaagtaggctttgtgggtgtaggctctcttaaggcatagtctaaatccatgcaaccaagaacaattccaatttgttccttccattttttaaaatttgccccacttaattattcaataccagacaaatagcctgtaatagcagtaggattcattgctgcaaaataaaatttaattcaaaaggaaaattattttatatcatgacaatatttaacaccacactttacaataatctaactacaacaaaaattaagttagatatcacattaattataaacataagagatcatatcatagttcttttgttggaccgaactacaatcacataatccaaaagtatattattataatccctccgttgggttggattataataattcataaatcatatagatgtgacataattattaaaataaaagtattgaaacataaagaagtttaataccgttgggtaaaaacttcatcaaccttttattattaaactctaatcatataatcaaacatggtgatgatcctccgttgggttaatcaacacttgtttcataagttaaacaacacacacacacacacacacacatatatatatatataatcatcttcaaacaaacaagtaaataaacatgcatactagaaaaactatttcttgagatttccataatcacacatttaaattactaatcatattttttgcaactttcataaaatcatgcaaatatgattgaaatcatgaaacattgaaaatgtatgttactacatcattcatatgcatcacatcatatatattttagttgtccataagatcaaacaataatcaaaaacggaaaaatatgttttatgatccaaaattggttggctctgataccaattgttaaccaaactttcataaactttatgtgaaaataattatttttgaaaacaattttggatacataaaacaaaataatttataagtgctaaaataatgatcatattattacattgatccataaagtgagattgagtcaccttgtgaattgtattgtcaaagtcttcaactcactactctcatatagtggatgagtcacttgtgtggtgtatgttgttaaaaataaacaacaagaaagaaaagacataagaatgagagtgtggcttgggacctcaatttataataagttatacatctcttagtctttccatcaaagactatatgggagttatactcattatttacacccattatgtacaaattaatgggtaatggtgggttatgaacttgaatgcatctatgtaattgcataggttatacttttccatttttctccattactcataaacataatgtacaaattaatttcataatgatggggttacaaaagttgtaacaccacattcatatgagttaaattttctaactccccatttgtaatttgagttttccatacataaaactcttgggtgcccaatcaattgattcgcctacctatcaattgatacccttaaataatattcatataaatataattatatattgccacacattatagaaaaaaagctaacattactcacttcaa

SEQ ID NO: 11421 - DNA, 8930 bp, Vitis vinifera
  Intron number 1 from transcript GSVIVT01015052001 (locus G SVIVG01015052001) derived from phytozome v7.0 (chr-ID chr1 1; pos 721743 to 730672)
ttttcattgcagcaagttatgtaatttttgaatgacctcatttccattattccatctttccattttcaaacatttgtagaatttatttttataaaaaggaaaaaaaaaaaaaaactttattttctaagtgaaacaaacaaagaaatgccttgtgtctcattcgacatagggtcctcacatttttgggttctgcttctaccttgcccatatatgaaaggtctttgggttctggggaaaagggtatgaaatcctttgggagccagctctggattcatctttcttcctaggtaaattttcttttctattttcatgagtatgcacactgtttcgtctctttctgtgatggttgttattgtttatttttatgttaagggtttaagtgtgacattattatattccaacaatctctcgttacgattcttggattgtacattaaagctttttatgacattcaattatcatcatacaggtgacttatcccaaacttaaaagtggattgtcgtactgtaacacttcatattttcggttgatgacattgtcacacttcaacatactttatattatgggctcaagagccatattattgcactttgaaaatgactcaatccaaaattgcgactctaatatcaatttttggattggttattacccatgtcatttgaaaattaattggtgttcaataaaggtaaatttaaccttttataacattcggttattgtgactcttccccaaaaatagcattcttgcacactaacacatccatcaacgtgtagataactataatttccattcatgattcatcattcatcacacattatactatgataactaatgagaatgtaccatgataacatacgcatgcctagtatgataccacttctttaatcttttgcctagttcatttactccttttccccccaaattaagagttctactacatgttggtagcttcacctaggcctgaaatcgcttccaacacttagatatcattttggtggtatcacacctccaaccatgtgaaaaaatggaagaccggttagcaagggaacaacacatgacttgctttgcatgtagccttcgatctctagacactctgcatatgtggttcttgcgttcatcaactttcatgggattgttaatggaagatgtgacaaaattttcagctccctactgaataattgaattcttgcatccaaagcatatagtttgggccttacattaaaagtatctgcatagcaattaatcactaattcagttataaatccaaaaaaaaaaaggttatgaagcaatctaatttaagaagtatgcatgcttaaccttgtaatgttttcgcataggccatgggaggcaagttatatctcaagaacaatgtctgcaaatcagaaaatacacacattaactttctgtgaattttttgcagatataaacaaatcaacgcataacgacttacattcagaatccgtcttcacccatttacttccttccgtcaccttctcatttacttcatcttcattgtcagatttgggcatatgcctattcgccaagtatctcataatagacaatgttgaactagaactttgggggtatattttcttgtgaagcagcaacctcagaatctgcagatgcatatcaaatatgaattagctccaagactaaatatgaatagacatgtatgatatatgttatacgtcacatacttttatgcatgtatgcatgtatgcaaagatgttatttttgatactgctgctctgatgcatcacccaatggcatctatatatagagtgttatgtatcaattaccatgtatgcatgcatgtaataggaactatgtagtatgattatataccttgtccattcttgactctggaactggatcttttaaactgggggttggagcaaaaccacttctgcaaataaacatctttttaagaagaaaagacaatgattttttcgctatggcactcttactgtcatccaaacaaacatctttccctctactgataattaggccgctgttacgctgtagacggtcgtctctttgtttcaaatcattggtagatgcattgctagttgctgtatcaaatccccagcttgacaacgaatcaagaattttatccaatggaagattaggattgtctagttctggaattgaaccatgttcagctgaaacttgtttatgcaataatgacttcaactctttctgaagttttcccacttcttcaggtgtgagatcttgcaggtgatcttgggaggaaggcaggctcccctgaagattgtgcttctctggatcttccttcacatcatttttcccgaacgtcccaattgccagaagcccatgaggccagtcactgaattcttctttttgaggttcttgctgacaccctttttcagttatcaaggaaaaactatattagttcagaagatgaatctgtagaaaggattctctgactcctctcgttgtcagcagcacgaaaaggattagtacaaaacttggtcattaagtgcatgagtttggtttcagacacagactttaaagggtatgaaagaacttaaaagaatgcttccttaagtacttacaattagctgaaatcgggttttgtttcttgctgccatgtctcctattaagcctgctttgcacccagtttaatatctgcaatcaaacatgtcatttccttgataaaccatgagtacatatcaaattctctctttccctatcaatcttcttaccttcattttataagatggatttgattgctctccaaaacagtaagagatatagatggatatatggtgactgtgggcttacagaaatctatctcttgaacacagatccaataagccagtgaatctgttcagcttggtaagtgataaatagaggtggggttgggaaattccacagccaagctagtagttgccattggttcaagttcctaaacactgacttttgccgcctatcttctattctctctttatctctttggccttttttttccaactactatgtcctactcccactaatttaattcattcccttcattcccaatcaatacaaaataaacaatacattatcttcctatttcacttattcaaaagaaagcccctttaccttaatccttgagcatcttctaacctacccatttaccttctaatttttaccttaaagcttaatccctatcattcgatagagttacatcatggacaaaggccgggttcatgactatatttttctttgtgaagatgtaattactctgaaattcaagcttctctccttcactggtaaagcacatagcctgggaaatttactaatatgcagttggctaaccgaggacaaaaaatagggaggtgcatagagctctgcctacaaggactttaataataggaacccagaaagcatggggcctatggacagaaggtgggggatacagcccatgttcccatggggatgtcccttactgaccgaaccacccagcacctactgaatcttaccaccgccccaatcaacccctctctataaacccttaccaaattcctgaaaaatcttcagaagcatgctgcatcagatgctatttgctcttccattttttattaaccatgaagaattataattaaagtcccatttcaaagggactattggtctccacaatatgcttgtatatcttcattaataggctctagttgtaatgaccaggtcggtcccaaccgtgtaaatatggtctaaagaaactaattaaaagtctcatttcaaagtgactattggtctccacaatatgctgcctatgtatcttcattaataggctatagttgtaatgactcggtcggtcccaaaattgtaaatattgttaaaaagcttatggtgtgagtgggatatcacaattgacgtcctcatcccgacctacaggattgaggtcaaataataaattcccacaccaaacgttggcttcaacctttcaattacttagatattgttcatttaagttcacaagttttcatgactttaaaatgcatttatatgtttaaaaataatctatacttgaacactgtcgggaacttttcccctgagtcggttaccacaatagtactaacactgatttgatctcgttctctttctctcagcttgttcattaacaggaagaaatagcaagtgggggagcttcatgctgatctcatcggaagcgaatcccgcatgctggaagctcgtgaaattccagccctgaattcaaaggcaatgtcgtggaaagctggctgtctgtgaccagctaaaatttaatctgtggcgtggcttcaacactatatcttcatgggcctattgcagaccacagggccacgtgaagatgtcctggtcatgtcaccacacaagtggatccctgcaagtggctctgtactctcaaggttacgaaggcgaaccacgcgtcaagatgacaacatgttgatgactccccatccatcactatccgaccaacacgtgtgtctcaggagggggcaagccagagattttcttatactctctgctactcttccccatatgccactgttctttcattggaaactaccatctgagttcaaatatatatcctcattggctgttttctatagaagatctagccattttaattgtttatcaacactgccccggaatcaatatcccactctacaaggaggtcacttgataatccctacatgaagcttggacatgattggattatattagtgtatatcaacagtatcttctgtaaaatcatgaaaacaactcctccataatcattctcaactcaacctagatgttggggtgcgagtaacagtactgttaacagtttcattctaaaacgtttctccttctccatcacattttatttggaatctctacatttttgtggtccatggaaattcttatgtatcactcaagagagttcaagctcaatctttaagaagctttaagaggtaacatgatatttatatatatacatatctatacaaactgtccattagtgggcacacgctgcaacaaaagaatactatgctcaataggttacttagaacaagattgcacagattataaacagatagatgagaaaataaagaggggagaggttaaaatagaagactcctaccatgcgagggagtatgatacataccgtggttcaaatatgtagtgacctgttaaattaacatgttttaaagctacaagggtttattagacttagagcaaagaatatttacatgggaatgaacatatagtttatatatgatagtgtgaaaatctaagtattttctctagtctcaattacgatgaagacattatgcagggtgattgacatatctcatatccattagagaaattaagttcttaaaaccatatatatatagtaaacttgactttgtaaacgtatttcaaaactatgaaaactcatagtggttcatcacaaatcttaacaacttaaacttgagatagaatgtgatctatgtaatagcaagtttgtaaaaaacatctttatattactttcatcttcaaattttataaatcatttttaattataatctctcaagatcttgggcttacatgcaaaaaggaccgttggtgatttatatagtgactagattgtaaaggattattttgtgttactcctatccttaaattctacaaattattttcaacaataatttgtcttaagatctaaaaatcttaaaagttaacaacataacactcgaacaaatttagctataattaacacttaattttatgggtgcttttcttttgaacatatacatgaactaataaacaaaagtaataaaaaatgataaagtttcaaacttcaattgaaattgattcattatcttgtcttttatattatgttaaactaccaattaacgtaaaatttttatacttggatatattcattaagcttttattattattttaggacaacaagcaccctttaaaaagtagtaggatttaataatttatttggtttattttaaggatatttctggatctggcactgttcaacaccatatgcattggggttcttcaaccaaaaatcctcgagatgtaagtagaaggaaatggaaaagggtctccacctacgagaacacacttgcaccaacgcaacaaagaatttgtagaaattttgaatgagagctgagagaccatgtgagtttttggggacaacaaatatcttttatgggactcagaggagtcttgcctatacttggaaacccattacaagacttccctaatgtggaaagtctctcacgtttagaaaatataaagtaatcctcatggaaaattgctcaatgaataaaataaaacttttcaaatattaacatttaagcaagatatcaaaaacccctcacaccaatgcaatatattgggaggagtcttgcctatacttggaaacccattacaagactttcctaatgtgggaagtctctcacgtttagaaaatattaagtaatcctcatggaaacccctcacaccaatgaaatacattgggttagaagcatttttctaatgttgggatacatttttttctataaaaataagatatttttttaaaaaataaaaacaatttgttagaggtacaaatcgttatagtttaaatatcgattatctaatatagtttattagagttttgtttaatgaacagtatcgagatttaaagcataacgtaaaataaaaaaatttaagttaaaagtaagattttgtcacctagatagcaactcacacatttaagaaaatttattgtcctttcgatttttataagtttgaaaggacagtacgatgtatcaatgttttgtttaacaaaatgttatgggattcaaagtccgatacaaaaaagtttaagcgaaaaacaagattgtctcatatatatcaacttaaacattttaaaaagtttatcatcctctagtctttacaatagtacaattataaattcaaattttgataattaaaaagaaaattgattattctcctcttacaaaaatacaatatatattgtagacccaaatcttaataggttaaactttctcttttcaaaactatgatatatatatatatatatatatatatatatatatatatatcatagatttaagctttttaaaatattaattattttataactattaaaagtcttgagaataaattgaagtaagtcactaattcttgaacaagttgggaaccatatggcgtcgatagaataagttgggagttcaaactattatatttagtcgtttattatttcctgttgagcccaagtccatcagtgtgcatgcgcctggcccataagcccattttcactatttggacacatcgtgcgatgatgaacccgttttggagagagcatggaatagggttacgggtgataatttgtgttgatggattgtgtttatattgtgttaaagcttaaatattctattatataggtcaaatcaaacctgaataagaattatgttaaaaacgtaaattcaaataacaaataatctaattatataaatatatatgattaatatctcaatcaaataacaaatttaaactaaatcaaatatatattaaatttataagtcaaatttatgttacataagctaaacaaaaaataataatttattcattaaacaagttatacggatgcatatgaatttgattaaaattaggttatgcttaatttaacaaaaaaaaatatttattggatttgaatcatattgacgaatcttatcaaattttaatgttatgatagtcatttcatatattatatttaatggatttatctttctcgaaaaataattaatatacgatcaatcgaaaattaaagatattatggtttatatctattaagtaatgagatgtttttttagcccttgtgcgatttgatgagctctcttgagagggtaacaccctcaagttgagtcatgctctaatgataatttcatatattaataaatttgatcatttaaaaacattaatccttacaatttaaagaaacattatgaattttttacaagaatatttaaaaatttatataaaaaatgtctatcttaaaagtgatttattttgaataatattttagacgactatttcaaggggaaaaaaaatcatacaatgggcataggtttttttatgcttatatacgcaataaaaaataaataaataaaacatgaaaaataaaaataaaatgcacgtttatcggcaagaccgccttgagagggttgccgcgagtagtccttccgcgcaaaccacgtggcacatttataactgcaatattacacgtgtcgtattcagaggcaaacatatataaaggcctcagtattgaaccctcttatttccacaactccatcactcacgttattctccactctctcctccacatcggggctctgttaagaactctgaattagggtttcaaaaccgccatgggagatcgggttctgcagcaatggcaaagaacttgaggttggaattttgcatttctagtcctgtgagttatttcttcgtaatgcgatccttgaaatctgcaaaggaagggaagattatattaatgaagatatatcgattttgctttttttcttctgtcataaaggagtattgatgatttgctttttgtctgattatgaaaaatgtgaaagaacaacaaaatgatgttttgctggttctcgtttttttttttttttttttggtttaattatggagaatatgagcgggaaaaaaaaaaagcatagtgagaattatgtgaatactatacatttgttaaattttctcattgtctgttaaaagtgaataaaaatggaatagatctggcgattctgtaattgctgcaatcactggattttttttattttttttttcaatttcattagatgaatcacatgttttggccttaatgttaatattgttggtgatattttggtttaatcaatacatacagcacagcaaggagt

SEQ ID NO: 11422 - DNA, 670 bp, Vitis vinifera
  Intron number 2 from transcript GSVIVT01011819001 (locus G SVIVG01011819001) derived from phytozome v7.0 (chr-ID chr1 ; pos 3858955 to 3859624)
aagaagctctctcccctttttgacacctggttcaggtgatacttctttgatttatgccgtagtagcttctttcctacgcctgtttcctatggattttctagggtttgtgcaatctttatgggtagacttggatgttatgatactagtttcagtagtttcccccggaagattattttattttgctgcttttcaatcctccaacaaactttcaattgtcttgtaatggatttttggtgttttcagcattgaagctaaagatcttcattaaattgttatttgatttgaatctttctgtttgattgttttcttgtgttgtcattgaatctgaagattagaagtggttttaatttttttctctgattagtgttcatttaattttcgttgtgaaataattattgaatctgaagaatagaagtactagttttagcatgttcattgaatgcagattttttttttctttttttgatcagttcttgtgattgattattgaatctcaagactaatcctgtgttaatgatctgttttttttcttggaagctttctctatttccttggttttgtgaatgctttagatctgaattttgaacagaaagaaactatccaaagttttctttaatgttataactggattatctttttctatggtatttccagcaagaacccgacgcaa

SEQ ID NO: 11423 - DNA, 4370 bp, Vitis vinifera
  Intron number 4 from transcript GSVIVT01008461001 (locus G SVIVG01008461001) derived from phytozome v7.0 (chr-ID chr1 7; pos 1744611 to 1748980)
atacagaagcttgagaagcgtcttacaggcaacttgttttctcatattttttggcaataattgacattatatgagtaaacttctctgaaagaagttcatattaaataatattttatgcttcatttagttgctgagaagacaacatggcaaggtccaaatattttttttttaaacctccatcttctcagcaatctaatggagcatatggtttctgtccaacaatgacaaatatcattgtacattttttatattgttatataaataaagtaaagaaaagcagaaaatagaataaggagcagggggaaaaaagaggtggacataatatcaacctgtatcctatgaaaggtaaggtaatgttagtctgtaccttttcatagatattgagtagcatttttctaggtggatgattatgggaagtggttcatccagaaggaagaggaaccaatggtgcatagcctgaaagaagaagacaggtgggttatttagattggagatgtaaaaggatgatgtggtttgtttatgtttttggatgagggcaaatgttttgttttgttttcttggaaattgcaagtagttttggctggtcatcttggctttgatgctctgggatatttcttctagagtaaatagcaataatatatggtgccaaggaggtttccgaacaaatattctgtgatcacaggatggttttgattggttttggagttgttgggtgggcagaagtctttttgggcttttaccttttgtgggttttgccaaaagttggtttctagagtggagaattgcaaggaagagtctagctgagccattgtgggtgattgaaaattctgtgtggagagcctcagattcatggctagatgtttgctgagttgattttggggtgggctttgactgtgatgcctggtaaagaaaagtttctagggagtaaagttcatcttggctgttggtgctaatgtttcttcataatcaaatcaaagttgttttggaggattgctcaaggaccgctttgatagaatggtaggaacattctataaatctattggtctgggtttagtggttgaggcaaagattctagctcttttggagggtttgttgaaggcaaaagctttgggcctctccaatctcttaggaaagctgtcattatgacattgacatatcatgggcttcaaaagaatgaggacaatgaaagtttgatcatgatgcactaagttaactgatatttcttgagagttgggatgctccttttttttctcactgaaacaatcttgcagctgatgtgttagcgaagtgtggtgcaagatatttggtttcttttgtatgagattttctatttccttgagttatagcaagtgttgttttgaccattttgacctgtgtagatagatttggccttttggactagtatacacctatccttctttatacttttatttcaatgaaatcaaatgatttgtttttgataaaaaaaatcaaatcataagtcaaatggaagttcttggccaccaatgtagccttctacctcttgacaaagccatgaaccaaatacttttgtatgaagatctgattacatccccaaaccttcttacccatatcagctccaaccttttgtttataggtaatttttttcctttttttagtgtccctattgggacttgaatctggaacctcccatgaacccatcccaaccctttgccacttggccaggtctcaagggcatcaactacgacttattattctttcttagagttcttatctcctctacaatggcttcttttcatgtggacgcctggtataaacctatatttcttaactagcaacttcatctttacttttctccaaagaatcaacctgaaatcaaatcataggtccaatggaagttcttggccactaatctagccttctacctcttgacaaagccataaacctcatactttagtatgaacacctgattacttccccaaaccttcttatccattggaaaattatcagctccaacattttttttgtaggtaatttttttcccttttttgtctccattgggacttgaacttggaacctcccacgaacccatcctgacactttaccacttgagctaggtctcaagggcattggctccaacttattatcctttcttagagctcttatctcctctacaatggcttcttttcatgtggatgcttggtataaacctatatttcattactagcaatttcatctttacttttctccaaagaatcagcctgaggatgaggctgcaggaaatggatatggggaggaatcgactgaagtggtagctgaggaatatgaacatgtgacatctctcccttagggtttcccaatgaggaggcataaaaaactaaggaagttgggtcttaactcaaaaaatttaacatccctgttaataattttttttcttgttggaggttaagacttaatctgttttgaatagcagaatattgggataggcacatttttcccactgagttgaacaagaagtaaattacatccaaataggtaaagtggaatagaaaacaatcatgaagatggaatatgacttgtacagttggtttaaaattcaaaaacaatcatgaagatggaatatgacttctacagttggtttacaattcaatcctctaaaggcatatgattaatcaagtaagcagctccagaactgtatcaacctgcatttaactgaaaaaggtcagtcctcctgatcttcatttgaaatgattgatctgctttgacaagttttacagtccattctagtatccaaggcataaccacatgagtaaatgaatcactaaattttttttttgatagaaaaagagaaaaattgattaaaacacgcctaaacagggggcgctccctacgtacacagacagtatacaaagaaagccaaacccaaggccacaaaagaaggaaaaaacctagagaggaaaaagctaaacaacaatcccatcacccaaaaaattcagaaaagagagatagtccaaatccagaaactgtttagaccactcaagaagagactgaaaaaagaggttcctcaagctcgtatttgacatttcttcctcttggaacgtttttcggtttcgctctccccaaatgcaccaaaaaagacatataagcgccagtctccaaactgccctcattttcttccctaggcccttaattttccatttgaaaaacaaatttctcactgaagccgggaacacccacatcaccccaaaagaagacagcagcaaagtccaaagctcccttgtcttaccgcaatgaataaggatgtggtccgccgattcctcattctctttacaaagaatgcatctattaaccatagaccaacccctcctcactaacatatcaacaatataaattttgccccaaattgctttccaagcaaaaaaaacgagttctaaaaggggcatgcgaaccccaaacctctttggctagaaaaaaaaggttgttctcatcctttaaagacctataataagatttaacactaaacttttccctcctctcaatcatccaaactaaagaatcctccctttcttgaacctttactgcggaaatatgattcagaaaacgagtcaccttctccaattcccaatcttgaaaggattttctaaagtgcacctcccaacccccgccaccacctccttgtctcccttaaagatcagccactacagtagaattatgcgttgcaattctgaacaggaaagagaagagatccctcaacttagaatctcctacccagacgtcccaccaaaatctagtgcatctgccatttccaatacgaatactagttctaagaaagaactcctctcaaccctttctaatgtttttccaaaggcccatcccatgagactccctcacctctctagtggtttagcccccttcctcctctccaaatttaccaataatgactttcctccaaaaactctcactctctagaggaaatctccaaagccattttctgagcaaagcatgattgaaatccttcaaatgccttaaccccaaccctccatacctcttatctttgcaaataaccgtccatcttaccaagtgaatcttccttctttcctccaagtctccccacaaaaactccatttgaattttctccaatctaagtctcattttccttgggattacaaaaagcgacataaaatagatggggatatttgagagagtgctcttaatgagagtaagacgacctcccttcgaaagatattgttttttccacgtagccaaatttctcttgaatctttcctctacaacatcccaaactctacacgaattgtgaggggctccaagaggtaaacctagataagtagtagggagattccctactttacacccaaaaaccgcagctgctc

SEQ ID NO: 11424 - DNA, 7006 bp, Vitis vinifera
  Intron number 3 from transcript GSVIVT01020671001 (locus G SVIVG01020671001) derived from phytozome v7.0 (chr-ID chr1 2; pos 3208792 to 3215797 reverse strand)
ttgctgcacgtctggtggcaatcccactggtccaggtgacctcatgctttaggaacacaattctaaggcatgataatgcagagtacttaaggcacaataatgcaatgctttattgcttatgctttaaggaaataataacttgcagcattacttgctttatcttccttttttctctacaattttttcttattcaagtacaaaacttgttaggattctagctatatcaacttaaggtaatcactctgggggagggggttgaataaggtgataatcagtttttaaaaatttaaacttagagaatgcaaatgacaatataagcaattatataataaaaataataaaggacaataaataaagagattcgagaaaagagattgcaaactccaatttatagtggttcggctcaatcccggcctatatatactctcctttagcttcaatcccaagcttgaggttccactataccaaggtttccaaaccaagccttcaagctttatagttggattgatttgctctaatgagcatttacaattttcctcgagagatgcctcactcttgaattccctaagtgataccttagatttagatttttcccttaagtgatacctcatacttgatctcacttcacaagatttacaagaagtgaatttttcaatactgtttacaaattttgcttaaggatacaaagaaaactataattgattaggtgcattaagaatagaatgcaagtctaagccctatgtactcaaaactattttccgaaggctcaaaagttgattcaataattgtttggaaatcttctcttatttataaatgaagtataaagcttttatataagagttaaaagtcaaactagccattggaaataagtttcctaagactagacgttcgtgtggtcatccgcatattagccattggaggccataaagaagatgtgcatgtccacctggtcatccacattgccaagtgatcgtctaggtggacgtccccacatggcctccagtagccaaaaatcacttcttaaggtaagtggctgttcaggtgaacgcctgttttgctttgaaatttccaatagccattttgtcccaaaacaaggcaagtggatgaccacctagatatccatatgacaactagatgactgtttggacatctgcatgacaattggataatcacctaggcatctgcataataattggatgattgcctagccatccgtatgtcatctaacccaatattttttgaaagttcatgcatgttttggggttaagacctttttaaactaacttatatgaatgtagaccaccttctaacaaagtcttaaccgatgttttgagaaatttttcaagtgtaaagcactttagttaagtcgataatgttttaaagaaaccgtaaagattttcgtgaaaagcttgaagttcaaggtagtctcctaggctatgtctttctatactcaaaattattttcatacaaattataaaagtataaaaccaattagaaacttatggatgaatgttttggtgctttaacaaaaacatgcattcctaatttaatgcatccatcatcttacataaagtatcccaatgataaacttgataaacattttcttgaaatcctcttttgcttcatgtatcttctttttgatggttccaaggaggtcttcttgcctataacgcttaaatataatcattagatttaaaccttattttgttatcatcaaaatcaaaattagccaaaccttagtttaatagaactaaaggttttattgtaggtaatgttactaatgttaagaatttaaatgagggaaacatcttcaattattattatatgaaggaagaaaataaataaaaattctttcatggttgaatgttttttgttgtggcaacaaaagatttgataccattttgttgtgtaataacataaagatcaacaaatccattccttaatatatgtatggttttaatatgatttgaccaactacgcctcaatttataaatgagatagaacaaatctaatcatagagaaaattacagaggaaagagaacatagatataagaccaagttccgagacaattccatgcttcattgcttctagtagccatatattaaattcaagctatgctccattgcatgtctcctactctttctaatatctctacatccttagccatgactttatatgtctatctctatctaataatgtttttctttgtaagaatatttatagagatattccttaatccggtgttttaaaaggctattgaggcttacgctttaaggtgagactctatgaattagcctctaggctatagactcaacattgggatacttgaggctataaccttgatatagggatactcaagtcttaagcctcaaatatttgaaggattttaatggttttagaacctttgtgagcttttgatatatattttataagagatttaagccttaatatttaatggttttatgcttttgtgaggtttggttatagattttatatgttttaacttgggtccaatgctagggttaaaccttttaaaatcatggctttgttggtttcaaattaaccctttgtagtatttgagcttatgtataatatttatcttattattaatatttatctttggggcggtggcagtttggagcgtaaaccacatctagtaagatggaaggtggtgtgcttaagcaagaagaaagggggtttagggatcaaatgcctttccaatctcaataaggcactcctttctaaatggaattggcgttttgcaaacgagagagaggctttgtggaatcaagtgattagagggaagtatggggaagatagagggggttggcgcacgcgggaagtgagagaggcgcatggcgtggggctttggaaagcgataaggatggactgggatttggtgggtgagcggatttcttttagtgttggcaatgggaggagggtgagcttttggagggatagatggtgtggggatgcccctctgtgcgattcgtttccttccatctatgccttatcgattgaaaaggaagcttgggtggcggatgtttgggatcccttggtacaagggggtagagggggttggaacccttgtttttcaagagccctaaatgattgggagatggaggaggcggaattatttttggggtgtcttcatgggaaagagagtcattggcgacgaagatgataaggtagtttggactgaaacaaagagtggtattttttcggctaagtctctataccttgctctagaagcggactgccctagttctttcccatctagctgcatttggaaggtgtgggtacaacccaaaatcagcttttttgcgtgggaggccgcatggggcaaggcgcttaccctagatctttgtcagagaagaggatggtcattggctaatagatgttacatgtgtatggaaaaggaggagaccatagatcatctgttgctccactgctccaaaacaagagtcttatgggagttgcttttttctttgtttggggtgtcttgggtgatgccgtgttcagttagagagactttgcttagttggcagacttcttctgtgggcaagaaacacaggaaagtgtggagggcggcgcccttgcatattttttggacggtttggaaggcgagaaatcgtttagccttcaaggatgatgttatatcaatacagaggttgaaatattcctttttatgctcgctttggtctgaggcaaagctgtttatagtagaatgccctcaaactttggtgaattttatagattgggtgggatcattgtaagatgttgggccttttggtgggtgggtctttatatgtttttggtctcttttggtggcgggtgtataggtttgtataccttacataggctgtataccttgagtcgctctttaggcgtctctttttaaatgaattttctttacttatcaaaaaaaaattattaatagatataggaaaaaaaccacctagttgacggatgaagaagaatgagtaagcattcaggctaatagaaaattagatatgattatgattcattgaagggcactactagagatagttatggtattattgaatttttttttatgaagccataagagatggttggattttcaaagagaggaagaggaattaaattagaaacttttgataatgaaaaacgactaatttggttgttatgaatttcataattttcttattatccaaattttgtcattttattagtattttttttcaaaaattttaagatttttttctttattatttatttattattttccttattccaccttgagtcttatgcttcaccatttttgggtaaaatgcccatgaccacctttagccttttaacaaaaattgcctaaatccttttctttgtccaataaagaaacctcttttcataacttgtggagctctctattcaaaggctgaaattcttatttttatataacttgttaacctagaccaaactatttataggtgaaagctcaatgtctataattgatttcattaattggtcgagtttagtttgagggagggagtagttttttgttttctcttcctttttttggcactttttggtggccgtcgtataaatcgtgtgtactttggtgcaaccctttttagcacttttcaatactcttttcatttactgatcaaacaaaaaaaaatatacaatattttacactaaaattagctctcatgcaattgacaattaaaccaaaaattaggaatttgagacactttttgacctttttattctagtaatagtttgacttcattatggattctattaataaagcttttttgtcgtaagttaaaataattgcttcttcctttaaggtgctgctcaaggttggaaaacacttgttaagggtctccatttgtatccttaaattcttttcttctttttttaatacccttcatcttcctaagtctatcttcattcctttgacctcttattcatcctcttcctcgtcttattattgtttatatttggaatcaaatgttatgtgactctatgattccttgtcttgaaagaacttcatgtcatatcaatggtgcattgatatgatatcttcaaaagcttgcatttagcaactgcttattgtagttggtaaatgttctgggtaatgatgatgcaagttaacagtgtagaaagagtacatgagtaaaggcttatttccttgtcccacattggataaggaataggagtcagaaagtgctttataagcctcaagggcttgtgaccagataatggaaaggcacacatgctcatgagacctgatttttagggggttggactagagaccatttaactgggattcattgcaagaacaaaggggaaccccatccacactaatttttttggatttggatatatgaaatttgaatttcaaatttcagttatacagtgcaatttcattacttaaccaagtgcaatcaccattcattgatgaaattaaatcccttgagtgattcatttatctggccttttcccccacctcgccgacggacacccaggctcctttgagtttcttattcttccttctgagagcttctaagttctacagccttctacctgagagtctcctttatgagtttttctgtgagtgccgttgtgattgctctctcctactcataactgacagcatttcatctctgtcgttcattcaagtcctggaggaacaaacccaaagaattgcctttacattccatcttggctgttcatcactaatcttggaggaacaaactcaaagagttgtctttactgttttcctaaggagtgcacctctactagcattgttggctgttgaatcttagaggtagaacacctatcatcttgctgcacttaggatgtcttaaaggataatagaactactttaaggacagtgacatatcatgctttaggcaaactttaatgagtatcacctctctaatttcttctaactgttttttggttgcttgctttctgcttttgtttccccatattatttttctgatggatggatggttgcacttacacttttaagaaatgggagaagctgattaaaatgtggaattcgaaagacaatgtgctgctggaaacatacaatacaaattgctatagcctaaaaaatcaatgtctttggatgatgatggtataggataaatctgtatagtttgtttacaggtgcttgggagcaggcaagcacttctagattgcttattaggagtttctctaagcctttgctgaaacccaaatgctgcagttatatacaactttaaacttcatttatcatttttatgactaaaaccatttttatgttgatttcctaaaaaaaaaaagggaaagaaaaaggaaaaagggaaaacaggctacgatctgttcttttggtagatgttgagaaagggctaggattcttgctgaagctgcattcctacacctactatttgaatgtcactttttaagataaaattaagcaggttatttggagtttgctcttgcttctgaacatgcccttcaatatagtttgttaagttttatacaaattcctcatccatgtttttatttgatttaaatgtgtttccttctctcttttggattttttgttgtacttactctctgtatttgtgtgaatgatggggtgtttacataaccatcctttttagatatttggataacttgagggggttcttatagaatcgaggcctctatctgtatgtgtatctgtagcaggttgaggcatctgttttagcatgagattccttatattaattgatgtatttcctaaactgctttaatattttccccctgttacagaagttattctgtatgagaagagaagagaaacgacagttcctctgtcagattctggctgaagcatctggctgaagcagcctaagaaagttctatatagttcctataggaccactgcccttgagttgcacatctaatcaagtttctggatatgttttagtttatttatatatgagaattttcttctgttattggtgtaggaggctcgaggactgg

SEQ ID NO: 11425 - DNA, 3220 bp, Vitis vinifera
  Intron number 1 from transcript GSVIVT01030742001 (locus G SVIVG01030742001) derived from phytozome v7.0 (chr-ID chr1 4; pos 14923333 to 14926552)
aactcagtggaagttgtccagatgattccatgaaagtccatgcgggtcttttaataaaaaacatttataaaacctatgacctcatactagtgtagcaaagctactatagcatagtggctctagggtcgaactctgggatgggttttcattctaccagtgatatactcaagattagaaattgaatttaatgatttcctttatcaaaaacttaaagtttaaaagaaaataaaatttgttttgagaggggtgtttaaaactaaactaatatagaactaggtaaaaatggaagaaataaagtttcccggagctagaggttgctaggatcaagttcaaaatgcaaagtgggaaattccgaatttttcttctcgcattggggacaacaacataaaggatggttgtttcctgaaccgatataggtttaacaatgaagatttaatccataaaaagtcaatagaaatggtagtcaagttccattaatggctttagacactatgggtcttcaccttgagccactttccaatggctcgtacatgataactaatggactaatatggatctagcaataagtatccatagagacctgaagcttaccatgtattggccattcaaagtgattctaaaggatttaaagcaaaactttagatttaaaagccatttatgaactccaactacctgtatttaatgcacgagagttttccactttagcatctggacttttcacctagcttccttcactccaagaaactaaagatttagcctctcatcctctgggaaaacaccctcagaggttatttggcttccaagaaaaagaaaatagtagagagaaaaggaaagcaagagccctctgtattttactaagtgtcaaatataacatgtgttccgagagatgatttccacccctcttatagtctttacaaagcaaagcctgtgattggctaattacagggataagaaaggaatttacatcaaaaaatacaaaagaaaagatctaatgtggagtcggcagatgattactacccaaaaagtgctattttacacctttaattcattatgttttaagcacttttgtgtagtagttctccatctttattccaattggcatgttaaggacctagaaatgacttctaatcatatttttggctagttttagtgttttgacagctttttggatcattaagacaagccaagtaaaggagagaagcaaagaggaaaaacaagcaaagtgaagataacagatgacagaagctgcagtcttcctttgaacttttggagtactattcgaagtccattttctacatgatatataccatttcaaagctcaggaagtcaagaatccaacgcttcaaactgtgtatgatttggagctgaaatgaggaagatatggccttcggaagacaactgcatcaagccatgggaacaccatttcgcaaggagattttcttcatggtgcgaaatttggccatttcgcaccatgaagacccaccttgcgaaatttcgcaaggtggcttttcaccttgcgaaatttggatccttcatctttccccttgcgaaaatgcctttgaaatcctctgtttctccacgcacgcaccaccgacttcccagatatttttagcttgatattttctcatgtaaattccttttgtaaccttgtattcagccgacataaggctttatcttgtaattttactatatatagaggtgcacaacacctctaagggatattggggaattggggggatcgatcctctgtacattaacttagaaatatataaagctctgtttttctctcttctcctgttcttccccatttctattttttcagtagccaaacagcctctgaggacttttcctcagaggatgattggctaaaacttttaagtttctcaaagtatggatgttatgtgatggcttggatgcaatcccatggaaatttctcgcacctggaaggtaaggtagtcgtttatcattaatggttcattaatgcaaagtttggtttttatttcctttggacaacttccaacggccaatacttgataagcttttggatttctatccattagttatctcctacgagctattggaaggtgaggttttcaattccaagttttacattaattcgttagaaccaatttcaatggccattgaaaggtgagtttatcacctggaatgactttgagttgccaatatttggtaagcttttggctagaccattagttatctcttagagccattcaaaggaagtctaaggtgaataaccattgatgaaattcactaccatctgttttgccattttaaaggattaaaacttgatttgctaaatccataccggttcgggaagcaagcatcaccatagttgcaaccccaacccaaggagcctatcctgagatttccaatttgcataagagctagagcatagttatcctatctttgagaaacttgtttttacaccctttcattttagtctttaatgttagcttagattagtttaaatctttctaaaacatttacatcttcttttaaagctaacatccataagaaaatcacctattttcctaatttgaatatcactagtgtttgcgaaaacccttcccagtgaacgatcctagaaccactatgctatagtagcttggctactttagtaatagtatttaaggtataaattttgttgatacgcctttaaagctaagctaccaagagtcgcatcagcagaatagaggagaattcgcaccacgcatgggctggtgcgaatttcgcacaaggagaggtgttgtgcgaatttcgcacaaggagaggtgttgtgcgaatttcgcacaagcttggagtagttgtcttccgaaggccatatcttcctcatttcagctccaaatagtacacgatttgaagtgttggatttttgacttcctgagctttgaaatggtatatagcatgtagaaaatggatttctagaagtgctccaaaagtgtgaaagaagactgcagcagctgtcctctgttttcttcattctgtttgtttttcctctttgcttctctcctttacttggcttgtcttaatgatccaaaaagctgtcaaaatactaaaactagccacaaatatgattagaagtcattgctaggtcgttaacatgccaattggaataaagatggagaactactacacaaaagtgcttaaaacataatgaattaaaggtgcaaaatagcactttttgggtagtaatcaccag

SEQ ID NO: 11426 - DNA, 7773 bp, Vitis vinifera
  Intron number 4 from transcript GSVIVT01020564001 (locus G SVIVG01020564001) derived from phytozome v7.0 (chr-ID chr1 2; pos 4286711 to 4294483)
cgataaaacaagtcctaacgagatcaagcttgccagtgagtccagccacagcttgtgatttaaagcctgttagttgtttctactttctgaagattatttgttgcctgcctctcaattctctgatttaacttagttcaaagttactaaagagtatttaattgtaggtttatgtaacttttgttgctaatgctgcttttacgtttatagaagtgtggaaaacaaatgtataggcatttagtcatatgattatattgttttctagaatttctactggtgaacaggtgttgcagtttgcattagtttatgcgcatacaccttttatacattcttttgttggtaggttagagttttcgatgattttctgtaaatacatgctgaaggtccattagagttaatcttctactcttttcttagtgatcaagatttagtttgttttttatgtagtttcagtgagtactaccatctaataagctgtttggtaagagggagcttaagggaaaggaattgaatttcgttttctttacctggagttgaggagaattaaaaaagaacaagtgacagtttttgccttaaaatgttacaaacaaaagagggaaaaataaaatgaaataaaaaagaatgatggggagtcttgctggttgccacttgttgcaattttttaagttacatccccacccctgtcatcgtatgcaatcatcactacttgaggaagaaaaaaggggggaaatgatagaagaaaatgaaatatggaaataagggatagaaaaagagttgctgctttgacaacaaaattgagaaggtttgtgaagaatttctgaactcctttattgataatgaatcggtacacaccatacacatatatatacacaaatgactgaataagaaacaatcaatctagcttaattctctcctaaaattaggaaactaaatcataaggaaatatcctaaatgatctctccttttttttattcctaaattaaagtcctaactttggcattatttcaacactccccctcaagctggagaatatatatcatataatcccagcttgcaagttaagtcttcgaagttaggcctaggtaaaactttggtgaggatgtctgcggtttggtgcttggtaggaacatagtttaatttgaccgtctcactagtcaccttctctgtgataaagtgtctgtcaatctcaacatgcttggtcctgtcatgatgcacggggttctttgctatgcttatagctgcctgattatcacacatcatcagaattggagatgaactcgtttgtcccagttcactaagaaccctttttatccaaatcccttcacagattccctgtgcaagagctctgtactcagcttctgcactacttctggctacaactgattgcttcttactcctccaggtaacaagatttccccagacaaaagaacaatatccggaagtggaccgcctgtcaatgatgtttcctgcccagtccgcatctgagtatacttcagtgtcacggttctctgtctttctgaagaataggcctttccctggtgtcatttttaaatatctaagaatcctgtagactgcttccatgtgttcctcagtggggctgtgcatgaattgacttacagcactcactgcaaagccaatatctggccgagtgtgtgagagataaatcaagcgcccgacaagccgctgatatctccccctgtctaccggtgtactttctttctcgataccaagtttcttctgactatccataggagtatcaattggtttgcatccaagcataccggtctccttaagaagatcgagtatgtattttctttgagagactacgattcctttccttgatctagccacttccataccaaggaaatatttcaaatttccaaggtctttaacttcaaactcttctgacaaatacttcttcaaattctgtaactcccccatatcatttccagatagaataatatcatcgacatagactatcaatatgaccaatttcccggcatgagatttcttgacaaatagagtatgatcagcctgaccttgtttgtagcccagcttcaggactgcttttgtgaatctatcaaaccaggctcgaggagattgtttaaggccgtacaatgatttttggagtttgcaaacctgattctttgccatactttcttcgaaaccaggtggtatttccatgtagacttcctcttctaggtccccatttagaaacgcattttttatgtccagttgttgcaagcaccaatcttgattgacagccaatgagagaaggatcctgatagtgttcagttttgcaacaggagcaaaagtctcctgatagtctatcccataggattgtgtaaaccctctagctaccaaacgagccttgaatctttcgactgatccatctgctttgtattttatggtgaaaatccacttgcaccccacaggcctcttcccaaccggcaaatctgtgatagtccacgtcccattcttctcaagtgcatcaatctcatcttgtactgccttcttccattctgaaatttttaatgcctcttgtattgtgttgggaacctgagtatcatcaagagaagtagcaaatgctctgtaagatggtgataacccttcatacgtaacataattcccaattggatgatctgtacatctcctaacacccttcctcaatgcaattggcaaagtagaatcatcaatgctgggaattaacacctctccagccctatcctcacctatgttctcttcaggaagacttgaattgaagtcaatatattggccacatgttgactgtgatccgtgctctaattcctgtcttttcctcctcctgatgtaaacttgtaagttctcattagcaagttgtggggctataggttgaataggcatgggagactggatggtcacgagagaaggaacatttgtgtgctgggctggctgaactgatggcggcatgggtgtggacaactcagtgggcgcgaattgggaaggatttggtgactctgagtgaaaagaaggtacaccatcaagaaaagactcccaaacttgatgttcattcatgctctccccctgaacatgagatttgggatagaagaagacatgttcaaagaaagagacgtccatggtggtgtaaaatcttttgttggttggagaatagcatttgtaccctttttgggttggagaataccctagaaaaatgcacttatttgctcgaggagcaaatttgctacgattttgaggatacacatgaacgaatgccgtacaaccaaatactttgagtggtaaatcagaagaggcggcatgggtgtgaggaaactgttttaagaaaagttgacgtggggattgaaaggtaagcactctggatggcatacggttaatcaaataggtagctgtgagaatagcttccccccagaaatagtttggaacattagaggaaaacataaggcaccgggcaacctccaagagatgtctattcttgcgttcggccaccccattttgttgtggggtgtcaacgcaagaacttatgtggataatgccatgattttgaagataagtactgagactactagtaaagtattcctttgcattatctgacttgaggacttgtattttggaattgaattgattttgaaccatacgattgaaggtttgaaaaatgtgcccgacctctgacttttctttcataaggaaaacccatgttacccgagtatgatcatcaacgaatgtcacaaaccatcgagtgccagaaatattttttatccgggagggaccccacacatcactatgtactagagagaaaacagtcgaaggtttgtatgggatttgaggatatactgttcgagtatgctttgcaaactgacaaatttcacagtgataagatgctggatttttattgataaataatctgggaaacaattttgcaaggtaaacaaagctaggatgaccaaggcgatagtgtaacattataatctcactatctttattgaccttagaatttgacacagaattgaaagactctgacatactctgagactgtacgcaacttgcttgagagacttggttggagaattggccacatgaaaggaggtagagcccggaacacagttcagcactgccaatcatcttccccgatttcaagtcctgaaaaacacacaagtttggatagaatttagtaacacattggagatcatgagccaatttgctaatggacaaaagattgcaatccaagtttggaacatggaggacagagtcaagatataagtctttagtaagttttatagaacctgtcccgacaatttttgactttgaaccatcagcaatatggacggatgaatgaccattacttggcttgtaattttgaagaatggcagcatctcctgtcatgtgatcagaagcacctgtgtctactatccacgacctcattcctcctcgattagcagtgaaggctacaccggtagtactgccactgccaacttggcttaataatttctgtagcatctccatctgctctttgttgaatggactcggctcgggaacagaggtgctctcagagttggcagccacgtgtgctctgccatctctgtcaaaccgtggctttggtttccaatcagcaggtttgccatgaagcttccagcaagtctccttataatggcctggtttcttacaataatcacaccaaggcctatcccgtttctgacgatctccaccactactattaaatgaccgagccgcaagggcagaggcatccaaagttggggcaggttgctcttttgatcccatcatcactttctttctactttcttcacgtctaacctctgaaaaagcctccctgagacttggcaggggtttaatgcccatgattcggcctctaacatcatccaattccctgtttagtcctaggaagaacttgaacagtctcttttgttccacaatttgcctgtatgttgctgcatcatccgaacatttccatgagtgagtctcaaataagtcaagttgctgccaataccttgtgagtgtgttgtaatactgagtaactgactgctctccttggcggaagtcatgtagagctgattcaacctgaaacagttctgaagtattttcagaacttgagtaagtttctttggctgcatcccatatgtcctttgcagtcccaaacagcaaaaaattttcgcctatgtcattgttcatggaattgataagccatgacatgatcatgctgttttcaatcttccacttcctgaaacccggttctgtagtttctggcatgattgcttctccagtgaggtactcatcctttcctttaccgcaaatgaacagcaacacagattgtgaccactgtaaatagttatggccatttaatttgtgtcctgtgatgagaataggagaggaatcattgccaccaaggtttggaatttcagatctgccccctgattctggtgacgtgacgctggatacttgtgatgatgccattccatattttgtcatggaccggaaaggtagaagaacacttttcaaggcacgtgcagggactggagttgagaaaaaatagccgaaggacgccggaaaatctgatcagagggcccgcggaagcaaaagaaccccaaaagaggcacgtgcagggctcggattgcacaaacaggtaggaagggtggctggtcggcgtcaggcgagcctggaggaggaagcgcgtcgccggaaagtggctcacgcgccctcacgcgccggcgcgtgagatgcagtcgccggccggaaaaacgcgcgtgggcggcgcgtggatgggtttctggttccggtgctttgggacaaattggagatctcctccaggcgctccttgcggtgtagaaaaaaaccgtcgccggaaagttcgccggaaaagttgccggcggtgagtgttttctgacgactattcgattgactggaaagtgttttctcccttggctctgagaacagggactgatggccggaatgagagagagagagagagagagatgatcggattgagatatggccagaaagatttggccggaatgagtgatggcctgaataagaggtggccagaagggattagggtttcagaaaactggctctgataccatgaagaatttctgaactcctttattgataatgaatcggtacacaccatacacatatatatacacaaatgactgaataagaaacaatcaatctagcttaattctctcctaaaattaggaaactaaatcataaggaaatatcctaaatgatctctccttttttttattcctaaattaaagtcctaactttggcattatttcaacagtttgttatgcatgaaagagaaatattggtgggctcactctatcttcttatgtcaggtgtgagagaagcgtactttggtgcatcctttttggcgcgttttaatacaattctcatttactgataaaaaaaaaaaatgtcaggtgtgagagaaatccatgtggaatcattgacccaagagtaagtaggtcactattgaccttgtgactttgcacctgtttttgtttcttagtgtctgaattaaagccattgaaggtacttgtttccttcaatttcagctgtgttttttaggctcctaagtcagttggcctattgtccaatttaattggagcccttttccttgtagaagcacatgtagaccttctctcatttgaagcattataaaggggagagtcctttctagaaattggagtgagcattaggagtatgaagagtctagctttggtgccaaatttattggtgaggagttgctctgtgtttttctttcttatattaggttaattagctacattaaagatagaatagagtctgatatcattgtccataaataccctgtgaggggttatttgtatctagctttcattgttctctcttaataaaaactcgagttatatttttacaactatgtttgtttgatgcttttatcttaacataacttgttggaggatgacatatactgtgggcccaaattctaacaacttaagcttttaggaaaattggttgcttaacatggtgttccaggtttatgtcctcccttcatcaatttatccatctaataattgtgatacaaaaattgcaacttgtttgctccatggcaggtaagggtccacacgtgagggggctattgcttgatatccttttaggaaaattggttatttgcttgatatccttttaggaaaattggttattaacttattatatatatgcaacttttacaacatgatattctgctataaatagtggcatatggtggtaattcatttgattgatttaaccagaacttaaaatttgaaaattaggaaatttgaaatagtggaatgtttggacagtttattaatataatcaacaacacttgtaatttttaatgctgtaaactcccctagtggtggatttgttcctttccatttgaatgacagttggaggatatctctcaaaaattccctggccgtggaggcttgtaatattatcccttagggaatttttcttttctttttaaattttttgctctagattaacttccatggcttcataattattttaatctcacaagaaataatcttttatgatcttcaacatcatggttaaaaaattggacacttatgataattatctctgccattagtgaaaattgatgtggtacatctttattaaggtaaattcctgttgctttttcctttactttatatatttcttctacctgcggtttatatgaaaatgctaattgcttcaacaggaaatagtggggtagtttttgctgtaaagttgtac

SEQ ID NO: 11427 - DNA, 5147 bp, Vitis vinifera
  Intron number 2 from transcript GSVIVT01031532001 (locus G SVIVG01031532001) derived from phytozome v7.0 (chr-ID chr6 ; pos 17457094 to 17462240 reverse strand)
gctatttcaggttgggcctggttgcaaccataaaggtattgctaatttctcacctttcacatatttttcattctcatcatgtgttggaacattcatattatttaactagaattttctgcaatgtataaggcatggtgttctttcctgattgttgtttatgctgtatatcttgtgttgggggttttccttgagctttctatgattgtatagtgtgtattaggagtaaaatgaaccctatatgagcttggctggagttcagcccactaaaaagtcaattctggctgaggccagtttgaaagtgttatgctcgatagtgtaaaaggcctaatttgattggtcatatatattgtaagccacatgagtccactctcatgtggtagacatggattgataggcaataaatactctctttgaaggcccaccccttacaatatcagtatttgttggattctttagttgccttattttgtttcttatatgattcagattttctctgaagggattggtgttaggggctgatattaaatggatcaaggatgtgtaggagtgagggaaatcttgggaataaaattagcatctatagggttttttctttagtaggtttgaagataagctttcatcccagatggggaaagctatgctgaaatcagaaaattttagtgaaaagaagaaaaggtgaggatggttggaagaacgtttacttatccctaggtggcaagattactctagtgcagtcatgtttatcccttatcctgttgtatttttttatcttttcacaaagctccaattatagtagccttcaggattcctggattgctgagagattttatgtggtcaggtgtagggaaagggaggagagatcactttgttaggcattgggagaatatccttgaggaatagaacccttctaaggaagtggttgtggaggttccttagggagagtgatgctttatggaacaaggtcatcttgggtatctttcaaacgctgatggatgggatgtcaactatattgttaggtggttagataaatgcccttggaaggctattacacaggcctcctcagaattctttgtttgcacttgttattctgtgtgtaatgatacaaaaattcacttttaaaaagatatttggttaggtaataaatctcttagtgagtagttcccaaacatctatagagtgttgaggttgagaaactgttatttcctcagtgcaagtttcttcctccttgtctatatcttggaacttcaaatttcatcgtaatctcttagcaagaaattgagggactagcttgtctaatggttgttttagccatgtctatttgtcactcacttttcttgacatgagagtttgttcctggacatcctcaagattgttttcagttagctttttctttaatgctatcctgactttgaccatttcagttcattttattcttgcatatttaatttggaaattcaaagctccaccaaaagtaaaggcctttgcatagcttatggaaaataagaagttcaatactaatgacttgctctaatgggaaaaatcatataaagcacatagccaggaatggtgtgtcatatgcagggggagtggagagtctaatagatcatttttttttttatgttgccttgaagcactaacattatggtgtagattactttgacttctagggattgattgagttccacccagaagggtgatggaaatgttaattatatcatttagagatttcggtcgactttccttaaggcaagactttttggtgtattgtttgcctcactttgatttggaccatttggtgggaaaggaaagcaaaaattttatgggacagatggactcaagaaacagtttgagttttgcttgttttacttcccgtcttcggtgtgggcttctaccagtgaagcttttactgatatttctttgagcctcattctactagatgggaatatgagttttagaaccatgaggttgactaaggagacagtttgtgaatgactaccaactccagtgggttttgtttagctaaattttgagggatgacaactcaaggcatttagggattggatggttgcttagagattattgtggcagagtgttaagacattctctaaacttgcaggttggggtttagccattgagatagaaattctagctcttttagaagggttgttacaagtgaaagctttgggtccctccaattttctagtagaagatgattccactactattatatcatgagaacaagtttgatgttccttctcttgggctcctcgcttaggcaatcatgcaatagatgtgttaacaaaatatggagctagacacatggtttcttttataggagaatttttacctctgaattatagctagatctgcctttgtgaagtagtgtacaccagtgtactttttggaaggatttctcatcattctttacacttaatatttcattgcattgaaatcattgtttcttatccaaaaataaaataaaattgaagatggaatgtagtagaagagcaggtgtaggagaaggaagaaaatgatgatgaagatagagatgtagtactagaacagatataagagcaaattaataataatctcacactctgaacaaagggtgaagctgaaactctcaatgttcagtaactggaaagcgatgagtacaacccttacaacaattaatagtaacccttaaatcaagctaatctcagtcatcaatatataaccaaagtaaaagaaactaaaaggggaaaaatgaaaataaaaaactagtgtctatatgggtatactttttattttctattttaaaaataaaaaaatagtaataaattatatttttaaaatttaaaaatttaaaaatttgacttagtaaaaaaatttttatacctcgatttttttaaatgatttttaaaaccattacatttttaatgtaagcatctaagccttcttctatcttatataaaagttattactattttctaattttaaaaacagaaaataagaagtgtatccaatggaacacctagtaacttcttgctaagctagggtgaacattaagtgaacattaactcattactgtagcatgaatgcagaatagtacccattacagtgactcgttattgcataataataccaactacttaactctttttcccaccaaagacggcttcttgataggcatgcagtccacatccttgggtttgggcttccgaataatatttatttaatcagtcaatagcatcgattaaaatgttggaatttgtcagtgaaatatggggcagatatcttgattggcctatgtttccattttttttgccatttagcatgccttttcgacaatatactgatattttagtgatatttcgataatatcgctgatattccggtgccatgtcagcacctttttaccatttaatgataaaattaattgggctgctaggcgcatagtgcagcgcagtccagccatctaagactcaatgctcctaggcctaaatgcgttccatcaagccacctgatgctgtgccttattaaataaggcatctctttcctttgaaaatccgatgtgggattctctcttgaagagaaaaaaacataaaaaactgcaagggccttggtccttaagtgtgatgcatatgaacccccaaatgtgttttgtcactaaaaacgcacatgtaatttatatattgaaaatcaattaaaataaattcaattttaattatattattatgtattttatatagtaattgcatacaggaggaatataaatttataaataaagtttttaatattattaaataaaaatattaaatatattctcattttattattaatgtgttttcaaattcaatatattattgtctaattttataaatttattataaatatatcaatttcttccttaaaataacttcaatgttatattgttgttttttctataattgaaaagttttgattaattttcatttatcaatatcttttgtcaaaatatccactgatatttcccgatatacccataaaatccaactacctatatatccgtaaaaagcaatattttcatccttggtcaataggtctataaggaaaggaatatgggtttactctaaccaaagctattgcatcctttgtccttttttgttatcatccatattctgatcaagttaaagttttaattttctcatgtggtggctgtagtttagtggtgagaattccacgttgtggccatggagacctgggctcgaatcccagcagccacaaggtagaagttaaattttcgaatttttaggttatcaaaaaaagttttaattttcatttttacgactctctttttgaagaatatagtttgtagtgctcattctattgatattggaaaagccaactcatgtttccactccattatatcaagtctcctctactaataggaatttaacttggcacattaaaggtggttctaagatgccatcaggaggaaaggtcaattgaatggggaatggactcttattttatttcagtgcatgtatatttatgggatatctaagaatataatgaacctcaccattggtaaatgagttgtgttgacaagccctgcttgatgcattcttatatccaagattgcagtgaagcattctaagaaagtgtggcttatgattttgttcatctttcatttttatggctgatcatgcttggccgaactatcttattcctgattttttattttgtgtgtttctttgacctctttctgcttattgcacgaataggaacttatggaaaaaaccattgattggaagtatggttgatggttttgatgtaaattcttaagcattatgcctatgcttgcagattggtgtttaatatttgctactagtggtttgattggtcctcaaatattagcgtgaagctgcattccttctttgaacttaatcttatctttatcatttctctaaaatactctgctgtctgaatgtgttttgaacttaattggggatatgtatttggttccacatgtttatgtggtgttcttgcatgtccaaggaatgatcacttaagaaagtgtttctacttttggatgctttgtgtctatcttgatctcaactgaaagtcctggtttagactggccatgtgttgatgtatctgtgacttccatattaaggacctggcca

SEQ ID NO: 11428 - DNA, 1896 bp, Vitis vinifera
  Intron number 1 from transcript GSVIVT01024418001 (locus G SVIVG01024418001) derived from phytozome v7.0 (chr-ID chr1 6; pos 2314908 to 2316803)
tcgcggccttctacggcactggatctaaggaggaggtggggttgcttttgggtttttggttttggttttggtttgttttcgtctctctttggagtgtgtttagttcccatggaaatgtgggaggggagagggaattgtagtttttccgaacttgattaaatcatgccgctttgggagtgggtttggtgttgattttcttgcgagccaaacggggggtttagtgtttggtgaattttgcgatctgtattttgttggatttgtcttgattttctcgctgttttgcctttgctccaaaaccctctgtttggttgccaagaaagtcgcgggcaagggaaaaggtgggaaatttgaggtttgcatttgcggtcgttgggttgtttgtaaaatgggggattgaagatagttgagtcgactacttgtttttgtaggaactgaaaaatcagagtttatcattattgttactttgatttcactttatcggtaagcagcggagtgttattgttgctcaggtttgtccttaaaccatctgattggctgctgagaaagttgtggaggggggaaggtgcaaatttgagatttttccttgctggttgttgataaaatggggaactcaacttaatcgagttgactctgtttgtatggaaactgaaaataaagagcttatgattcgttttgttttactttcttttagttattttcattggtttctcagtaaccaaacataccattagtattgtgcattaattttgctttaggcgggaaaagcacttttttgggttaactttgtttttttatatgagttctcttattaattctgatgtgtttctagcacttaaaattttcttatccactgtttggtagtcgctccttttttgggtgcatgctatttctatgccatttttttcccaaatttttttctctattctggtgcttaaacttgattgaattcaatgatgctttgcttggaaggaataaatggaaatgaaacacaatgattttgatatctgtgaaagcaagctgaattatgtattaacaatcatttggcttccatgggaaccacacagtagaaaatttgaagttcaatctcttttttccaatggagtaaactgtatatggtcctgaaattgtattttagaaatcattttttttttggttttatgtattcatactttgttttatatcatagtgaaattactcagaaaattcacggttttgtctcaattctcctagaaatatcaatggttgcagttgtatttttattcatgccatcaagttcttttgaatctatgtcaagtagcatccacccatttttcaaggggtaaaacatatgacataacccatctaattacttttagcgtaaagataaaaaataaaacggaaattttatgcgagtgggccccatgataaccggatttactcttttaacttctcttgtatataccggctttttaaaatcttctctccccccttactctttattcttaactctttatttccttataattcacgccttattttccatgcacgtggaatgtgtgtttctttagtactaagtaaaagtttccttttgaactgtaattatcaagaataagtggataatttttaactgaatctggtcggaggacttctgtttttagcctatgatttggaatgctccttttctaaaactaggatttgcatagaatagaaatggggtatatatgattgtaataattggattgtctcaataaaaaagagggtttgaaatcatttgctatttgcttagttgtcaattaatagttgattcatttggagttgtcaataaaaaataactaatttttttcttgatatccctttttcatgctggataatggtgatgcagaggacagctgcagaccagattttgagggagctgca

SEQ ID NO: 11429 - DNA, 30814 bp, Vitis vinifera
  Intron number 3 from transcript GSVIVT01018284001 (locus G SVIVG01018284001) derived from phytozome v7.0 (chr-ID chr1 5; pos 11900494 to 11931307)
cttgtagcactttgtgaggtaactattgtacaactcatatttgaagaaatcagttattagttttattgtggttggtaattttgtagtctctatacacctttgtggtttatttatttattattattatttttatttttatttgtccatattatatttaaggattgcacaatagcatattatataacaaatcctaggctatttttctatcattatgactgctcttaaatgtgtatgcctaatatgcacaatagcatgttatttttttttctgataggtgcacaatagcatattatataaccaatgaatcaggtattgaaccatagggaggtaaccttaggggtgtaggggagatgaaaagaccgggataatgaatagatgatcctcattcatgtctctatagctgagattatcttctggtattttcaactgagagatattcaacacaagcctctatttcttttccttctaattgcctcaaccatgtgacttagatcactagatagtatctttaaagcgtcctcctctttgcttaccaaactgcattagaagctcaattagagtggtatctcaagttataatgatgcttatccatcaagcactcgagatactccataagaggcttgtaaactcttgtttccaagtattaacgagtgcttttctaataaaatacaagagggttcaagccatgagacaagattatcattaaagaacttagtttgagggtcatttcatgggcataagggaggtcccaaggacccccttttccacggcctaagccactactcaaaaagcatggattcaacactaaagtataaaaagctaagtgtggaatcattgccattaaaatccaaatttaaggtttaaagttatacaaaaatgaaggggaactatagctaaatgaagatacaaccaatatgaaagtttgtaagacatccaagtcacttaaaacatccaaaacattacaaagttctaagttgcaataatagttcccaaggttgaaggttgaagaatagctccccatcaagggacccctagtccatgtccatcaagtccaaaatggacatttataggtttttttgggttgacctaagtggtaggccatgtgaaggtataaaaagcaaggtggagatttgattgtgagctaggaagggtctaaaaaaagtggtaggcttgtgctgtcccagagcatcaatatgaaatggtgttaaggcttgagtgatgccatttttcacaacatgatggatttgcatagggtgaaatgatgccaaagcaaggtgaaatggagctaagtctttgtggtgccatcttggtaccatttagggaataggcaagatgttttccttaaactatttttttatttttcatcaatcttttatgcaaacagtgtccaaattttgtgcaaatcaatgagaatagaatgtaaaaaaaattgtttcagctcatatggattctgaccccttcaactaacatcaaacttaggagtggttgaaatagggttgcatcattgagctttatgcaactttgctcctttggctctgctattactccattcttgcctcttgagtgtcacaaaagcatcttggattaacaggaaaatgtgagaaagctgaacatatctggtgtagcgtataattaacttgttggggagtgcttttaatgctaaaaacgagtctaagatatgatttttgccctcattaccatgcaatatatgatgtcaatcacattgcctattatcttacagtttcattatcttatcttctttactcttttaaaattgataatgtaacttggtgttgatgtgattgggcatttgttctatcattcttatattaatccttttctttaccacttaatgttacgtccttcctaaacttaggttactatagttgtttgatgttgattatccaaacaagaaagagggtctttgaggattaccagtgttgctatacctattgggtgaattcttacaagtaggtgtcatatgcataaggggcatgaggagcttttgaggcttggctcaattggcacgaaggtggggtggggatgtggaatgttctaggttcaagtcccatcaagttagattagttgtaggttttaggttcaagtcccttctattattagattggtcccttgtatttaggtctaggagattggttgagaagaccttcctaatggggttactcttctaggagttatgccaaattaaatttttatggatgttctttggataccctaaggcatctagggattggggtgctttaaagatcattggggcatgtaactaaaagcatactctaaacttgaaagagtaggttttgctattggggttgagattctagctcttcttgaggtccttgtgtaagctacaactttgggccttgtcaatcttctaatggaagaagatgccattgctatcattttttcagtatctaaaaaaaaaaaaaaaaaaaaaaagaagggaagggaggcatggaggtttgatcaattgcttcttcgagttttttgatacttatacaaagttagggtgttcttttccttgcggtccttgcttagcaaatcaagtggtgaattgtttaatcaaaggaggagcaaaactcttagtttcttttgaagttgattttttttttatcagaaacgaagaagaatatattaataaaagaacaaatacaagagagaaaaaagagacaaaagaaagagaaaaaaaaccaagggaaggatgagaggtccttcctacacaaaaccaaggaaaaacacccaacaatagaactctaaaaacaaaagaaaccccaacaatcttcaaactcttgaaacgcaaaccccaatccaattgagttgtagaatgcttagaggaattcctctaaaagcttcagtacaagaagcccatagagaagaataaaaccggatcaaatcccaaaccatctcttccgttctccctttatcctcaaagatcctattgttcctttcttgccacaccatccaaatcaaagtaaagcaagcaatttgccaaagtatcttgcctcttaatgagttccccaagcctttaaaagaaataaccaacatgtcctcaaggctccttggagggacccaaatcacacctactagattgaacaacctgtgccaaagtccaatggtaacgggacaatgaagaaaaaggtggtcaatcgactctccatttcgtttgcaaagaatgcaccattgaggacagagggctttgtagggttttctcaattgcaacttgtcattagtgtttaccttcccatgtgctactaaccaagcgagggccttaacctttgaagggacttttgagctccataaaaacttggccggaaggaacattaaaggatttgaaacttttgacaaggcatagaaaaaagatttcactgaaaacgagcctgacgaagacaaagaccacactcttgagtctgatgaagaaggagaaagaagcacaaaattaagggaggacattaatctctgaaggagatcaatttctggatccgttagattgcggcgaaagttaaaattccaagacaatggtaaggaattgccaaggacatttgagacagtaaggtttttcacagaaataactctgtagagatcagcaaattgagaacacaaagtttggtttctccatcaaagatcttcccaaaaccgaattctctccccattgcccaccactaggcggacaaaaggggagaactcttggaaaacttgagcaatagccttccaaggacatctgtgagaccatctaaccaccatgttggcgtcccatccattaggatgtgtcccatatatactcgcaataaccttatgccaaagaccgctcctttctctagggaacctccaaagccatttccctaagagggcactatttctcatagaagtcttcccaaagcccaaacctcccatctcccttggtctactaacaacctcccatctgattaggtgatctttcttcccttccccggccctagaccaaagaaaatccctttgcatcttctcaatctttgaagctatagatacagggattttgaagagggagaggaagtagctagggatgtgagacagacaagactgaattaaagtaatcctccctcccaaagacaaataggcctttttccacccatccagcctcctcgaaattttctcaaccactggatcccaaaatcctattgtctttgggttccctcccaaaggaaggcctaaataagacaaaggtcactctgacactctgcactccaaaaccaaagccaaactagacaacatttcctgcctagtgttaatacctgaaatggtgcttttttctaagttgatttttaaaccagatacttgcccaaaaaccaaaaggataatcttaaggttttgaagaagatccaaagaggctttagagaaaaatatggtatcatcagcaaactgtaacaaggacactctagtcctatccctccccacaatgaaaccctcagttatcccagtttcctcagctctaatcatcaatctacttagaacatctgctactagagtaaaaaggaaaggagaaagaggatctccctgtctcaaacctctagaggccttaacccaaccctttgcattcccattaactaggatagcaaaactagaagaagataaacaacctcttctgaagttgatttttattctcccaattagaaaatctttgggttattcttagacctttttatttcttccttgagtgtgtagcttgtattgtttctttgtgtggagtttcactttttttctttttttataattagattttttatactttagaaggatgtattgtcctcctttctatttaatagaaatgcgtcacttttgtttctggtaaaaaataggtttgagtcccatcaaggaaaaaaaaaaatgaaaaaaaaatgttatctataaaattaaaagggcatgaagagttaggcaatcatctcctcatttagtgccctttggctaaacaactttttgtttttgaattttatcctatttagtgttaagtaggcctttcttttgctagagaagttattagttaagtaggtgaaggaaattctttcaccaagaattgaccattggaaattttttccaaattttctcaatgttagagccaacaccacctagattttcgttgagacatttgctctagctgctaagatgaacacaatcaaaattttgttagcattgacaacaaataataattgggatctacaacaattcaatgtcaaaaatgcatttctgaatggatatctggaataagagatttatatgaaagtctctcttggatttagaagtgatctagccactaaaaaagtgtgtaaattgaagaaagctctatacgggctaaaacagtctccaaaggcgtggtttggaaggttttctaaagtgatgaaaaacatgggatatatacaaagttagggagatcataggttgttcatcaagcattcagattcaggaagagttacaactcttgtggtatatgtaaatgacatcattgtgacgggaaatgatgaaaaggagagacggactttgaggcaatgcttgatcgaggagtttgaaattgaagagttaagaaggttaaaatacttcttaggaattgaagttgcacattcttagtagggaatttttatttctcatcaaaaatatgtaactgacctcctcaaggaaacagggaagttggcatgtaaaccaacaagcacactaatagatcctaatcataagtttggagaggttgaggaagatgctgcagtagatagagaaatgtattaatgtttggtaggaaaactcatttatctctctaacacaagatcatatatgtcatattttgtgagtgtggttagccagttcatgtatagtctaaaagaagtttatttgcaagttgctaatcgagtgctatagtaccttaaggggtctccaggaaagggcatcctatttaaatgaaacttaagactagaacttgaagcatacacaaatgcagattatgttggatctgtggttgacaaaagatcgataactgggtattgcaccttttttggtgggaatatggtaatattaagaattaagaaacaaagtttggtggcgaggtctagtgtagaagtagaattttgcacaatggcctaaggagtttgtgaactactatggttgaagattattttggaagatttgaagattaaatgggatggcccaatgagcctttactgcgacaataaatcagcaataagtattgcacataatccaatgcaacatgatcgaatgaagcacatagagatacacagacatttcatttaggataaattagatagcgggttgatatgtactccttatgtatctaccgatcaccaacttgcaaatatattcaccaaagatttaagtagtacaacgtttcaaacaagtgtatccaagttgggaatagaaaacatctatttaccagcttgatggggagtgtagaagaatgtaattaggaaagattataactgtataatgttgtaattaaagaaaggattaagataatcccgtaatcaaggggatttgatagtgaaggtaggttaggaaagtttctattttttgtgcttggaatacttgtataaatatgtggatatgtacttatggactaacatttttcacgtgcgtccccacttatggactccttataaaaattggagtcgtcatttatttttaaaaaggaaagtaaaataaaaaagaaaaccttaaaaaaatgacttcttaagttttggaaaaacatatctttgaaaaacccgagtctaggtctgaggattggattacttattgagaaggtaccataaaggtagcacccctttaagccctaaataaaggtctctactgataagttgagagaagcatgacaattaacttatggattgaggacaccaaggaaggccaaaggtgattatctaaattctaacaacatggtaagcaagccaaacaattattctaaggcactagcataaaggaaagacagtgtgcacatctggactacaactcaaagtgctatcataaaaacatcaaggttagtttgggtaacataacatacaatgtgcatttcatcttaataaaaaaatcaagcaacaatcaaagcaaccgatagcaatattaaacatggagatgttcacacatgaaacatgcatgtttgtagaattaaggatagaagatgaggagtgtacttgaatggcatcaattatttagaatgtgcttccataagactaaggaggttagaataagttacaacaaataacaagataccaaatcctaacatgcatggtatatgtacaacataaaggaaatgacaagagtccaaagaaaatatcacctattcacaagggtcatgcatacagctcattgtttaggccgaactatgtaccaaatggtagaatcaagggttaagacaaaacatatagtaaaagatcagaataatactattcataagataaatgctaaataaaaatctgggagcattatttcataaggcaacctttcccattatgtctatatcataatacaacaaccaatgtcaagtcatgagatgccgattaatctttaattaaacaataaagtgagtacaatgcaaaattttcagcatgctattagaaaaagaaacattcagaaataaatcctaaaaaaatatcaaaaatgagaatttgatcatgccaaaggtcaagagacctctcctatatgtctagataatcatacaagtatctaaataatcatttgagacttagattaattccaaattacaaaaaaggttgcagaaggttcagaatgcaaagacatgaataaactaatctttaaaactaactctgatgcctcgtaaaatcacacaaaaaaatcacacaagtcatttagaatgtctagtttacataaaaatagaaagaaaactagagagccacaaatcaatttttaaatcatgcaagcatatcttttgtctagaattagaccagtgttgtgggtgtatcttagaaaaaatatatttattgctagggaaaacatatctcaatacatattttatgtgttaaaactcaagtttaggaagtctagaatttagaaaaaatatcaaattaaattaaatagaccaaaaagtaatttttatttacaaaacacacttgggtgtatagtattgggtgaatacagaacctatagaaagaaacaatcataactttcaattagaaaaagcttttgaactcaaataaaatctcagaatcaatttcaagaattaaataatatcatattaccattagaattttttttttaagacactccaaaatgctcaaacgaattttatttccaaggatgtagttgctgggctaaaagggtagcaagagagtttggaaattctttttatgttggggtttcactaaatcctcattccatctacattagttcaacttgtgcatccttaacctcaaatgaatgtttgcaaattcactaaggccaagaatcatcccattaacttgggatcacaagtttaaactcatgtcctaaaatcaaaatttttagaaaatcagagaagaatgcattttaagtaaaaatgaatcgcataccctttaaagaaagtgaattttttacccttatgactgaaaatgaattttcaagagatatttgtggtttaaactcttttagaaaaaggtttaaaaaaaacaaaggacgactggtcttcaagtgataaacataccaagcaaccctaaacactagaaagacacaagacatgagattttcaattagtaatcaaggaggaattaaatgaataaaacaaaaacaaaaaaatatcaattagataattttaggctacctctcatttgtgattaaggagtcatactctaagtgaaaacatccccacaaagaaagggtttagcttaatccttttgaagggaactaacatgcgattttcaaaaactaatatccgaacatttgctaaagaaaataactaacatcaatatttatcaaaactaatatcaaaagaattagaaaaaaaaaaaactaacatcaatatttatcaaaactaacatttaaagattttttttttaaataactaagacgagatatcaaaatgaacaaactagaaacatgaaaaattaataaccaacatcaatttctattacaattaacatctacagaattttgttttaaaaaataactaacatttatatttatcaaaattagcatccaaggaatttaaaaaaaaataactaacatcaatatgtagaacaagatgatcatgaagaataaatcaataaataatcattaaaaaaaactaacctttaaatattttttttaaaaagaaaaaaatttaactttgcatcattaatattaaaaacaagataattatggaaaataaacaaataaataatcattaaaaaaaaactaaccttcaaatatttataaaaaaaattcaaactttgcatcattaatattaaaagcaagataattacgaaaaataaatcaacaaataatcattaaaaaaaaactaactttaaaatatatatataaaaaaatctaactttacatcattaatattaagaagtggataatcatagagaataaacaaaaagcctaactgtaaaatatttaaaaaaaattgaactttgcataattaatattaagaacaagataatcatggaaaataaattaataaataatcattcaaaaaaaaaaaaaaaaactaaccttaaaatgttttaaaaaaattccaactttgcatcattaatattacaaacaagataattatgaagaataaatcaacagataatcattaaaaaaaaaaactaaccttaaaatgtttaaaaaaattctaactttgcatcattaatattaataacaagataatcatggaaaataaattaacaaatagtcattaaagaaaaaaaccaaccttaaaatattttaaaaattctaactttgtataattaatattaagaataagataatcatgtagaataaatcaacaaataatcattcaaaaaaactaatcttaaaatatttttaaaaaattccaactttgtatcatttattaagaacaagataatcataaagaataaatcaacaaatagtcattgaaaaaagaaaagctaaccttaaaattctttacatcgttaatattaacctcttaatcaaattttaaggttaggtattattattttttaatgactatttgttgatttattcttcataattatcttatttttaatattaatgatgcaaagttggaatttttttaaatattgtaaggttattattatttttttttctaataatcatttgttgatttattcttcatgattatcttgttcttattattaatgatacaaagttagaatttttttaaaatattttaaggttaatttttttgaatgattagttgttgatttattgttcatgattatccagttcttaatattaatgatgcaaagttagtttttttaaatttatatatttaaaggttggtttttttgaatgattattttttgatttatttttcatgattatcttgttcttaatattaatgatacaaagttgaaattttttaataagtttttttttaatgattatttgttaatttattttctatgattatcttgttcttaatatcaatgatgtaaatttggatttttttctaaaatatttaaggttaggtttttttttttttttttcgaatgattatttgttgatttattctccatgattattttgttcttaatattaatgatgcaaagttcgaatttttttaaaaatattttaaggttagtttttttgaatgattatttgttggtttattctccatgattattcaattcttaatattaataatgcaaagttagatttttcttatatttaaacgttaggttttttgaatgattatctgttgatttattttccatgattatcatattcttaatattaatgatgcaaaattggatttttttttttataaatatttgaaagttagcctttttttaatgattatttgttggtttattttccatgactatcttattcttaatattagtgatgtaaagttagattttttttttcctcttttacaaaaatatttaaatgtcaatttttttaaatgattatttgtttatttatactccatgattatcttgttctaaatattgatgttagttatttttttttttaaaaattccttggatgctaattttgataaatattaatgttaattttttttttttaaattttgtggattttaattgtgatagaaattggtgttggtttttaattcttcatgtttctagtttgttcattttgatatcccgtcttaattatttatttatttattttaaattctttaaatgttagttttgataaatattgatgttagtcattttttttaattatttggatgttaattttgataaatattgatgttagttattttctttagtaaatcttcggatattagtttttgaaaatcacagattagttcccttcaaaaggattaaagctaaaccttttctttgtggggatgttttcacttagggcatgactctttgatcacaaataagaggtaacccaagattgtctaattgttattttctttgttcttattttattcatttagtttctccttggttgctaattgaaaatcttctgtcttttgtctttctagtgtttagggttccttggtatgcttattgcttgaagactagttgtcttttgttttttaaacctttttactagaaatgtctcttgaaaatccattctaggtcttaagggtaaaaatttcattttctttaaaaggtatgcaattcatttgtacttagaatacattcttctctgatttttttaaaattctgattttagcacatgagtttaaacttgtgatcccaagttaatgggaagattcttggtcttagtgaatttacaagaattcatttgaagttgaagatgcacaagttgaacttatgtagcttgaatgaggacttagtggagccccaacataaaaagaatttcaaaactctcttgcaacccctttagcccaattactgcatccttataaataaaattcgatttgagcattttggagtgtcttaaaattttttctaatggtaatatgatattatttgcttcttgaaattgattctggggttttgtttgaatttgaaggctttttctaattgagagttataattgtttcttttaataggttatgcattcacccaatattatacacctgagtgtgttttgtaaataaaaattacttttggtttttttaatttaatttgatattgtttctaaattctagacttcttgaacttgagttttgacacatgaaatattgagatatgttttccctagtaagaaatatattttttgtaagatgcatccactacactagcctaattttggatagaaaatatgtttgtatgatttgaaaattgatttgtgtgctttcttgttttcttattatttttcttgtaaactagacactctaaatgacttgtttgattttttgtgtgattttttaaggcctctgtgtttgttttaaaaatcggtttttggatgtctttgcattctgtcctattctaaacctgttagaaatttttgtaagttggatttaatctgagtcttgaatgattgattgaccacttggatgataaactaggcacgtaggagatgttccctgaaaatttttgtggttaaattcacattctagctattttttgtaagatttgttttatgaaccttcttgttctaattacatgccaaaattcctgtatagtgattgcattgttatttaatttggtgttgtttggcatattttgacttgactttggcctatgtattgtaatgtagacagaatgaggatgttgtatgattattttcatgatgaaataatgtttttagatatttgtttgagatttttgaagtgaatacaactgttcttcctcttgctacatgttttgttttagcatctaattttggtacttcttgctatctcatgtattagtttaactttaaaaatgagtttgcatggatatcctatgtgataattgacctttctttggtttcttaacacttcatttaagttatatatgtatatatatcacgtaattctttgagttattattgttgtccataagttaacccttattagctttacaggagcattgtaaataattatgctatgtttaatattgttattggttgctttcattgttgcttgattatttgattaagatgaaatgtatgttgtatgttatattatctgaactaagcttgatgtttttatgatagcgcttcgagttgcaatccatgtacgcacactatcttttctttatgcttgtgtcttagaatgattatttggcttgcttagcttgttgttaggatttagataatcacctttggccttcgttggtatcctcgatccattaattaattttcatgcttctctcgacttagtgagtagcctttatttagggcttaaaggggtgctacttttattgtactttcccaacagataatccgattctcagacctagactcaggtttttcaaaaacatgcttttccaaaacttaggagttatctttatttagggttttctttcttattttattttccctttaaaaaataaataaaagtggcgactccatttttttaataaaaacatttttttaaaataaaaatgtggtttttctccttaaaaaaggagtcacactattgagtggggatgcatgtgaaaactgcaggtccatagtattgatttaaatcaatgaagatatttattctttttaccttccaattctgctgcttctacaaagcctttttccacttatcaagtctcctaaagggttgttgttgttgttgttgttttttttaataagggtctcaaaaatgatgtctccaagaatttcttcccaaggggaggtctagatagatctattatggccttttcagtcttacacttggtaaaggatgcaaatctacaacattgcaatcaacgttgagactggctaaagtactcttgctgataagatctgaagatcttatactatccttataatttggatggtgagtttttgttaggattttgaggtctaaggataaggaagacttctttgagaaattgtgctctcttcgggaagtggttttggaagttccctaaggaaagttgtggtttttggcattaggttgttgtgagcgtttatgagacacatcctaatggacgagatgccaacattatggtttgatggtcacacaaatgtccttagaaggctattgcataagtcttttagaattttgacccacacacccgctttgtagtggggaatggggagagaatccggttttgggaagatttatggtggcgaagtcaacctttgtattcctaatttttaaaactttatagagttatctcagtgaaaaaactcaccatctcaaccattcttggtagttcttacttgccttcttagaatttcaacttctattgcagtctcattgatattgaaattgtttctcttgaaagactcatgtcatcactcatattcgtgccttgtctcccaccacggtagattcaagggcatggtctttatactcctctggcttattctcagtaaaaatctttctttttggtcttgtccaagtccttaaatccaagtcctttctttttggccgattttgtttggaaatcaaaagcctctttaaagggtaaggcctttgcttggttagtggtgtacaagaaggtaaataccaatgacttgctgtaggtgagaagaccctgtaaatcccttggtccgcattggtgcattttatgcagaggaagtggagaatcgatcgaccatctttttctacattgttcattagctttggggctttggcataagcacttcagtttagccaatatggtttgggtgccgcctaggagtatcagagatatgatgatcacctcttttagacaattggggaattcagtgagagacaagattctttggcaaacaatttgcctcactattctttggattgtgtggcaagagagaaatgctagggtttttgaggaaagatggagataaaaagaaacgttatgggatctacttcatttctactccttttgggcctcttgtctgtcacctttaggagagttccgcttaatgttattcaacaaagttggctttcggtttgtaattcataaggggtggataacattgagaggagttattttcagtttcttcattattttgtgtatgcctatgttttagtttctccttgtatagtggaggagtatactctttctttgatcaagttttgtattttgtgagaagaaccctcattcttctctctttcttttatcaatataatttatctgcgcttttgataaaaaaaaaaaatgaagtttttgttaggatttatttcctcaaaatgtgtatgctcaaaattttattgcaaaattgttgtaacttgggtctaattcattcttctaaaacttgcatgggaaggcttcaagaggttgtagttgaagagaaaattttgttatgtcaaggcaaacctgatgaaaactgaaaacctattatagctactatccaagtaaactacaaccaagttactccaaacaccgtcggagccaagatttcttaaggaaaaatctaagaaaaccctttgcaaaaagctgaaactaggaacttctggttaatcaattcttatattttttttggataatcatcaaaagtccttacaataagcaagttcttctcttttataatgataacccttaactactttctgaaggtttccaagacacaattagtagcctttaataaaaaaaaactaacattttgacttcaatttaataacaaacttttcccatgcaaaccttcgatattttcaaactgccataaattgtctagtactgattgcatcattctcccctccttagaagaagctcgtctttgagtttggtgctgctggaaacctcttttacgttttcaccagtgtaagaacataaatatgaaatgttgaatgttggatctattttcatatgttttggcaaatcaaccacataagcattctcccaatcttcttggtgattttgtaaggtcctatctttcttttacttagcttggaataatagccagctggaattctttccttgcataggtacaccatcaacatgtcatcttcttaaaagctttggctgcacctcttctgatctgcatctttcttatacttcacattcaactcctcaatcttcaattttatttcttcatgtagttttttcattaagttggccatgttttccatggttgttccgagaagttgcagcaatgggtcgccagagttgaaggtcaggggtgatgactgtggtggatcacccgcagtacaagcgtggagaaagacatatttctgttgcagtctggaagggaagacgtgtcaaactttggagggaagagtggccgttttggcgaaagtttggactgctgtgttcaaaaagttgttgcaggtgggaaagattttggaggcggtggcagggggagtttagtgggcaggagggtctgtttggaggagatcgtgggcttagagggggtaagtgggccgatgggggaaggcccatctgtgttgcaaaaggcctagagggtgaatgggctggttgttggagaagacggtgggttgggcagggcccaagggtgtggcccttcttttataacgaaggaggttagtgtgggggtggatagccctttaaggctactcgttggggatgatagagcagcagagactgtcctgacggagttgatcgagtcaccttcagcttggatttcatgcaccgatgaggctctctaggctgaagcgacaaggtactcctctcattcctttcgtttcgtgtttcggggggtacggggtttctcttcttcttctccttcttgtcggaaaagggctgcgaaaggggactgcagtcgtgtttgtggcttggggacagaggtggttgaagcggatgtgagtatttgtcgtctaagagtggttttggctgacgggagtgttgcagtgacctcttttagggaggaaagggtgttagttgtggtaggagagacgagccccgaggaaagcaacttcatgaggcggctcgagtatggagcgaagtcagctaaggagtggaaatcctcttgcctcgctcagtttagtgacattctgggcatgccaaccatgggatttgaggaggaaattctagctttgctcaagaaatggattatgaggaaagaacaaaagaaccggtggtctggggctaaaagggttaaggttgaatcctcaaggtctgaaagggaactttgaaggttggagtgctccattaattttaaaagttcaagaagtggaagagctctctcccgagagagtgggggttcagtctctgagggtaaatgaagttaagaatcctctcttggaacgtgggaggggcaaatgatagcgataaagaaggatcatcaaatctatagtcaaggctcaaaaagtggatttggtttgtcttcaggaaaccaaaatccaaagtttgtcgtgtaatggttcggtcattggggatgggcaggttcctggaatggggcgctcttaattctcggggtatggcatggggggtgttagtcttttgggatagtagggttttagagctgactggaatggaaattggtgatttttcggtttcctgtcggtttaagaatgtggagaatggtttctgttgggttttacaggggtgtatgacccttctgttgggaggcttagggaagatttctgggaggagttggggactatcagggggggtgtttgtggcaagatccatggtgcataggaggagattttaatgttattagatttttagagagaggaacagtctttcaagattgtcttcagcaatgagaagattctcggaggtcattaaggatttggaattatgggatctccctttgcaggggggggggttgtctttcacgtggaggggtggtttgaataataaattacagtcaaggttggatagatttctagtttctgaggattgagagtgctatttcagtggggcagttaagagtcttcttcccagacttgtctttgaccactgcccaatcttgttggacgctggaggagcgaggaagggtccttcccccttcaggttcgagaatatgtggctgaaggatgacggttttaaggatttgttaaggagttggtggatgggtttccaattcagagggtctttcagtttcactctgaaaaacttaaagcgcttaaggctaaattgaagatttggaatagagaagtgtttggaaatatcactgctagaaaagaatcagctttaaagtagatggtgttttgggtttcagtagaaggggatagggtgttgtctgtagaaaagaaaaatctcagaaaacaggctttggaggagtataagaagtgtgtgataatggaagagacctcttggaggaaaaagtctagagagttatgtctgagggagggagacagaaatattggttttttccacaaaatggccaatgcacataagagggtcaactccttggtgaagattaagataaatgggtcctggttaacagaagagcgtgacatcaaagatggtgtggttcaggttttccattctcttttgttagaaacaaatgagtggaggcccagatgcaatgtgctgtaggttagggtccttgaaggggaagatgtagcaatgctagaggctcttttctctgaggaagaggtttttggtgctctctcggacctcaatggagataaagctcctggtccttatggtttctcaatggcgttttggcaattcaactgaagttttctgaaggagtaagttatgggttctttaaggattttcatgatcggggtaggtttatcaagagcactaatgcttcttttctggttttaattcctaagaaaggaggagctgaagatctcaaggactttaggcctataagcttggtgggcagtgtttataagttgttaataaaggtgcgctagctaataggcttaaaaaggtgatgggtaagatagtgtctaagtcccaaaatgcatttgtggagggaagacaaatcttggatgcctcgctaattgcgaatgaggcgattgattcgatgcagaaaagcgggggtggtggcatcctttgtaagttgaatattgagaaggcgtacgaccatgtaaattggagttttcttctttggttgccagaaaggatgggttttggagcttagtggattagttggattcagtggtgtattggtactatcagtttctccgtccttattaatggaactccctccggtttcttccaaagttctcagggcttgagatagggggatcctttatccccttaccttttcatgattttcatggaggctctcagttgcttgttgaagagagtgaatgagggagggtttttgccggggtggcaactcagtggtagaggaggtgcgggagtggagatcactcatttgctgttcgcagatgacactttagtattttgtgagccttctattgatcaggtgtcctacttgagttggcttcttttgtggttcgaagccatgtcggggttgaaggtgaatttggacaaaagtgagatcatctcaatggggagagtggagaatgtagaggatttggctcttgagtttggttgtaaggttagcacgctcccatcttcttacttaggtcttcctttgggtgcttgtttcaagaaggtggcagtttgagatggggttgaggaaaggatgaggaagagacattccttttggaaaagacagtatatctccaaagggggcagactgactttgatccggagcactctgcccactatgcctatctactgtatgtccctgttttatatgccaaggagtgtgagtttgagattggagtggatccaaagggattttctttagggtggtggggccctggagaggaagccgcatttagtggattggtctattgtttgcttagataaatgaaagggtggtttgggtgtaaggaatttggcgttgttgaataaggccctcttatgtaagtggagttgtccttttgcggtggagagggaagctttgtggaggcaagttgtttgtgcgaagtatggggaagaagagggcggatggaggtcttgtgttgtgagaggtagttttggggttggtttgtggacagcgattaggagagtttgggatgtgataggcgacaatatggtttattctgtggggaatggtaggagggttaaattttggaaggacaagtggcatggagacgatcctttgtgtacttattttccctctttatttgctatatctttggccaaggaggcttgggtggaggatgtgtggagccattttggagggggagtgtgggctcctaggttctctaggtggcttaatgattgggaagtgttcgatgtggagcgttttctcttagggcaagggaggagggtttatagtgatgtggaagatcaagtagtttgggcaaaggcaaaggacggaagattttctattaaatctatataaggctttggaaccggaaagtctaagggattttcttacaagagttatttggaactctttggtgcctccaagggtgagtttttttgcttgggaggctatgtggaaaaaggtcttaaccttggattgtattcagaggagagggttctctttggctaatagatgttatttgtgcctgtcagaggaagagtctattgatcacatcctcttgcattgtgtgctggcaagacgtttatggaacttacttttttccctttttggggtttcgtgggtgctcctctattcagttagagaggcattattggggtggcttgggccttgtgtgggaaaggagagggagagagtgtggttttcagctcccttgtgtcttttttggattgtttggaaggaaagaaatagtagggcttttgaaaatgaggggcattcagttcaagggtgtaaatcatttttcctttgtaatctttaggcgtggactaaggggttttttgactctggccccccttcttttgtagattttttcgatcggttaggccttggttaaggggttcttttttctctctcttgtatactaccggtacactttggggcacgtccttgatgtgccttttttcttttaatatattgctttttattcatcaaaaaaattaagtcagccatgttttcactcttgaagctatttcttccaatttctagtaaaggagctaaatcataaagatgcattggttgcttcccataaacaacttcaaaaggacttttgcctgtagttcgattcttggaatggtcatatgcaaattttgcttgcacaaccatagcttctcattgcttaggattttctccaaccaggcacctcaataaatcacccaaacttctattgacaacttcaatttgtccatccgtttgaggatgataggaagtagtatattgcagcctacttccaaacttctttctattgacaacctcaatttgtccattcgtttgaggatgataggagtactatcttgcagcctagttccaaacttcttccataaagttctccaaaaatgagagagaaacttggagtctcgatctgaggtgattgattttggaactccatgtaatggcacaacttctctaaagtaaagatttgttatatttgatgcatccacggtcttcttgctacaactgaaatgagccatttttgaaaatctgtcaaccaccacaaagatggaatccattccccatttacttcctaggcaatcccactacaaaagtccatacttaaatcttccgaaggagctgcaagaactggtagtggagtgtacaaacttgtattttgaacttttccttttgattcttggcatattagacaccgtttaacaaatttgtagacatccctcatttttggccaaaagaatttctgttcaatcatagcatatgttttatcttgcccaaaatgtcctcctaagcctccatcatgcatgtcttgaatgatcttttcctttaaagagcaatttggaacacaaagttgattccctttgaatacgaagccatcatgcagcaaatactttcctgcatgcccattagtacaatctttccaaattgaaccaaagaaagggtcaccaggataaagatccttaaaggaatcaaaacccttaatagtagcagtcctactaggcaacaacaaacttctttgactaagtgcatccgccactttattacttgcttcaaacttatgctttatcacaaatgtgaatcattgcaagtaagaaacccaatgggcatgcctcttgtttaacttttgctagctgttaagatgcttcaaagcttcatgatctgtatgcaaaataaattcttgatgtatcaagtaatggtcccaatgcttaagtgcctgaatgatagcataaaattctttatcaaaagtgttgtatctccttcttatgtcattcaatttttcactataaaatgacacaggcctgccttcttgacttagaacagctccaatcctaattctggaagcatcacactttacttgatagacccttttaaaatctggcagcactggtacagaggctgagctaagcatctctttaatcctttgaaaactttcttcagcttgttctgatcattgaaacctccctttcttcatgcaatcagttataggagcaattatggtgctgaaattcttgatgaaatgtctataaaatgaggctagaccatgaaaactccacatttctcccattggtcttggtattggccaacttctaattgcttcaaccttattgtcatcaacttttatcccttcagtgctaactatatatcccagaaacaacaaagaattagtgaaaaatctgcacttcttcatattggcatgaaacttctctcttttgagaacttctaatactgtcttcaggtgttgcaaatgagactccttggatgggctataaataagtatatcatcaaaatacaccaccacaaactttccaatgaatggcttcagaatttgatctatcaaacgcataaatgtggttggtgcatttgacaaaccaaaaggcattacagtccattcataaagcccatgtttagttttgaaggctgttttccactcatcaccttcccgaatcctaatttgttgataaccacttttaagatcaattttagaaaatacctttgctccatgcaacatatccaacatatcatcaagtcttgggatcgggtatcgatactttatcgttattcaatttattgcctgactattgatgcacattctttaggtaccatctttctttgtttggagttaatagtgctggaactgcacacagactcattgatccccttatgtatcccttttgcaacaactcttccacttgtctttgaagttcttcatgttcttttggaggcattctataatgtggtagttttggtcggctggctcctggtactagatcaatatggtgctggatgcttgtttctagaggcaatccatttagtagctctatagcaaaattttccaacaatgcctttgcttcattagaaacatcttgctggtcttctaagacttcttttgctaataataaaaaggcaattccattagcttcaaactcatttaaaaagcatgggacagtcacacaagattgttcttgtttgaccttagaaaacaaattcttcttctttcattggggcaagtaccaccttaagccatttttgtagaaagcataaacattcttctctccatggtgaacagttttatattcaaattgccatggccttccgagtgacaaatggcaggcttccatttccaccacatcacatagaaacttatttgaatagtttttcccaattgagaagggaacaagacaccgctgcactacttctacttcacttcctttcttgaaccaagcaattcgatatggctttgggtgtggtagcacttccaagttgagcttcatcaccatttctatagaaacaagattctcacaaccctgcccgcccctccccccaaccctccatcaataataacattgcaaagcctcccatgtgaagaacatctagtttaaaaaatattgtttctccaccaatcactttttgatgcttttagagttaacatggaatctcttaccactaaatttggaagatcatggtcttcatatgtgacttcatcttctgtgaattccagcagcccttcaccgccttgagattccatctctacctcctcattatcattattctcctcttcttcattaagctgtaaattgctggcttgtttttggcaatcagaagatttgtgaccctcttttcgacatttataacattattctatgtcctgcaggctgaaatgagttgctactattttcgagaacatgatttctcattgttgcatgcccttggccttggttgcgagtttgaaagtgagtgtttgatctagaattctgcaaatcatcagttgctgccactgatttttgcttgacatctccctgcctcctactatcctccaattgattaggcccccttgcacttttaatcgggtggttgttggaccatctttattaactttcaaccttcattgccaactgaacaacaccaaataacatccaacaaggttgtagctccaccaaatttctaacatttggcctcaatcccaccaaataacgatgaatgacctgcacttccgtttcagttagttgcattctagttcgcattctgtaaaactcattagtgtattctcacacagaacgttggccttactgaagtgcttggtattactgaaaaagaattccttcatagttcaatggaaggaatagactttggatttgctactgcattttagtccagctctggattttctcctttccagattggattcttgtcatctgcacttgtttccaccaagaggaagcatatcccttcaattttatagccatcaacttcacctttttattttttggaagatttagaaactcaaaaaccctttcaacttcattcaaccaatctaagacctccttcagttgctcctctccagtaaagtgtggaatgtctaccttaatgtttagattttgatcatgatttgtagaatgatgaaacttcggttgcctctccaaaggtaaaactccactttcttcatctgaaaagtcccctacaatttgttggaactcctccatagggggttgatttctcacattcctctgctggtaagttcgaaaattctgcctcgtttggcctccaatggtggaatttggagcaccaaaaataccagctcgctccaatttggcacataattgattaaactgttgcaagtttgcaaactcttctctagttgggctgcttccagctggttgtgatgctacagcattcaaatgatccccagacccagccattgattcaaacaatgataaatctggaacaaaggctcaaataccaattgatgaaaactgaaaagctattatagcttctatccaagtaaactacaaccaagttactccaaacaccgttagagccaagaattctcaagggaaaatttagaagaaaccctttgcaaaaagctgaaaccaggaacttctggttaatcacttatattttttttagataattatcaaaagtccttacaataagcaagttcttctttttataatgataaccctcaactgctttctgaaggtttccaagacacaattaatagtctttaataacaaaaaattgaccttttgacttctaatttgataacaaacttttcctttgcaaacctctgatgttttcaaactgccataaattgtctaatactgactacatcagaacctgtgtttgagtgtactgtattatgatagagagatctagagacgttgtctttttgtactttataaacttaaaattgatttttgaatgttttagaagactgtttgaatttcattgcaattgagttcgctcaaatcaagactagtaattgtgaaattcattatggagatcatggatgagggttgcttatcttcaacaagttttgcaatcttagttaatggaaatgccaaaggttgggttaaagccactaaaggtttgagacaaggagaccccctctctctccttttgtttttaccatagtagcacatgtcctaagtaggatgatgattagatcagaggaaagtgggttaattgagggcttcattgtaggaaagggtaggactagagtgcttctactacaatttgcagatgatatcattttcttctttaaagtctctcgaacatctacaaaacctcgagcaaatcctcttggtttttgggcaattatcaagtttgaaaatcaatttagagaagttcactcttttcggtattaatgcaagctaggagttgttatttaggttgactttgatccttgattgtaaagtgtcaaagtggccattgtcttatctaggtcttcccttgggagagaacccaaagatgataggattttaggatccagtggttgatagaatttcgaggaggctggatgggtgaaaaatgacctttttgtcattagggtgggggggaggggggattaccttaatttagtcaagtctatctcacatccttagctatttcctctatctttttcaagatcccagtatcaatagcttcaaagattgagaaattgcaaagtgatttcctttggttaggggttagggagggaaagaaagatcatcttatcagttgggatgttgtttgtaggtaaaaagagttaggaggtctggggattgagaagacttctttgagaaatcgtgctcttttagggaagtgactttggaggttccttaaggaaaggtgtggcctttggcatcaggttattgcaagtatttatgggacatatcctaatgtatgggatgctaacatggtgattagatggtcatacaaatatccttggaaggccattgcaaaagttttttaggacttctcaccatatatctgtcttgtggtgggaaacagggaaagaatccgattttgggaagatctatggtggggcgaccaaccattgtgctcacaattcctaggactttatagagttatcttagtgaaagacctcactgtctcagttgtccttggtaattcctatcttctattttggaattttaactttcgttgtgatctttctgatatagaaattgaacttcttgagagactcatgtcttcccttagtttagtgcatttgtctcctattgtagattcaaaagtttggtctttatcttcctcatgcttatttacagtaaaatcttttttcttagccttgtctatttttcaaatcctattttgttcctttcggccaagtttctatggaaatcaaaagccctttcaaaggttaaggcctttgcttggttggtagcacataggaaggtaaacaccaataacatgttacagttgagaagaccctacaaatcccttagtcctcaatggtgcactttttgtgaaggaaatggagaatcgatcaattacctttttctacattgccctttaactctagggctatggcacaggctcttcagtctagcaaggatggattgggttccaccaaggagtattggagacatgatgattactttttttagaggtttggggaatttaataagaggcaagattctgtggcaaattgcttgccccactttattgtggattgtgtgacaagagagaaacactaggattttttaggataacgggagattggaagggatgttatgggatttacttcacttctactcctctctgggcattttgtattgtcacttttaggggagttccacttagtgttattcaactcaactggctttcggtttgtgactcaaaagtttgagatagttgggggttgccttgtatatagtttttgtataacaggacgtatggtcttactttgatcagaatttgtattatgagggacggacacctcatccttctcttgtacctttattatttattaatataatacatatgctgtttttgataagaaaaaaaaaagaaattcacctattgatcagagaggatttttacacctcaataattgaaggacactttcaatctgatcacaaaataggatgtcttctaatttgacttaaactcttatctgttatagttctagccttcttctagttcttttctctattaattaagaaaagaaaaagcatgcaatttgtttttgacatctaagctcttgcattaatatttggagatttcttgttttcaaaatcatactttcatgggctagatttgccattgagtttgaaaacctcaaaaagttcctcttacgtttccttgtttcttttctttctttagttattgacttgtgatgagtcattggatttagtggagttcctgatttctgttagatctgcttgaaggtgaattacgagagtgagttcatggagcactgtgaggtcttgaagactggaattcgtgaaaaactgtttcttggacttgggtgcataggtcaacccttcaatttaaaagctcatatattctttgatttaatctggatattattgataataagaacaaaacattatttctttcacattactctatacacattcttaacggattccctcatctaaaagccacttgtgagtccttgatctttagccctataaagcatcctactgaagacatccatcaccatcattaatagcaaaggattacacaatattgggttgctttagagtgacttgttgagaccttagagagtgtgttgatagtgtcctgaggtagtctaaatccatttgattagttttgggttgaaatctattgtgcaagtgttgaagaaacacttaaatgttaagctctgggtctagccatgttatggtgcactaccagcacagtggagaaaagaggagtgaacttccaatgtcaacttcacttctagtgaacttgctggtttgctacaagtacaatgttaggcagggtggtcttctggagagatgcttgctaccaaagaactgtctttgtgctaccagtatagggccatggagatgttttcatcattgtactctgctgctatgcagtatatattgctgtgcagccttaggcataatgaatatgtattgaagttcatctggttttaccagtgtgtgtgggtgtgccactaaccgaatcgagacccagtaaagttatgtttctggtttaagttgcggtgctagtgcggctgcaacggggtgtttttaaggtatatttctggtgctttctgtgctaccagtgcaatagaggtggtgctactagcgcaactatgggcagaggtgtggtttaaaccagcttcgtgttctgttttgaatggttggtggtgttttcatatttcttgctaatttgagtgagagccaacttcattcacctataaataggtggcaatctcatttgtgataattggaggagagaaccagtttagtgagagattacttttagagagattcagattttccacctctgttttgagggttttcaattccagatcttgtggatttgtgagtgttcaatctgaaagttttcccaagatttttaaagaatcaatccatgattattgtgtttaattgagtggacttctctgaagattgaattgcaagaggattgtgatctttgatctgagttcttcctattgtggtgaattctggagggagtgtgcaattgaaatccgaaaagagttcagtgaagctgttgatgcaaaatcaacattgaggtgagaggtttcagatttagtgtgactctggatcagtttgatgagacatcgaatatccatgggtcatgatcaatcacattgagtagattgcacaaagagtaattatcagtaattcgtcttcaaactcagattcagtaagtcaactagtgtaatttgatcattgattgttgtggattttccttgctgtgatagctgcctggcttttttaatcttagtttgaggtttcccatgcaaagtgccatagtcatatggttgtttgtttggtttagattcatcttagtacttatattaacagtgatcacataatctggtataatcaggcttgttgagaataaaatggagtaattgaattggcatctcatctggatcaagttttataattgagataattagatattcaatttgatgtcagagcgagagattaaattaagttatttttctttcaacagaaaatatgaccatggacttgaagcctagaaattttttttttttctatgaagggcttagtccaaaaatccctgcaggatattagtgtaggcttttcaatatcgatcttgaaagaccctctcttctcttagtgtaatttttcaactattaatccattagcaaccaaaacacatccagaatctggtgaccacaacctagggctatctggtccctaaagagtattgaaattccgaatatccttagctttgctttctcccaggttgtgaaaaactgatgctttagtttgtctctatccatgatagtacccttgaagccaaataaacctctgcataggtgtttagaagtaccatttccataagattgagcaggtatatcatgtgcatggaaattctggaattttatttgtcagtttgttccagtcttgttaatttttacacagttttgttagctgaatcatgcttggaattattcatctacttctttgcatggttaaatctcattgtgtttgacaatgcattttcaatcaattggtctagtacattccaggaaagggtttcctccaatttgtattggattttaagtggatgcattgcctcaaatgattggtgtcgagtgtttacacccgttatgatattaaagttccaaaaattgcaataaatactcctgtatattgaattccaaattttagcaatatattgactgttttaaatatattactaggaagcggtggagagactgtctaca

SEQ ID NO: 11430 - DNA, 2648 bp, Vitis vinifera
  Intron number 1 from transcript GSVIVT01035901001 (locus G SVIVG01035901001) derived from phytozome v7.0 (chr-ID chr4 ; pos 5518867 to 5521514)
tcactagctccggcgcgcagatccggcagtctacagtaactccatctccgtctttttactttcctgctttctgtctataaatcgaaaccctagctcaaataagcttcaaggacatgcaaaacggaagttcaataagtagtatttcgaaaatgggttactaattttctgtttctgaacatctatatgtgaactcttgcttagaagtcctgatgatttggggttaatttttgtttttttggttaatttgtcgttttgacatgtgggcgatcctttatttcgcaattaaatgcatatttactgggaacactctggtgggtttgcttttgtacttggttatgtgtttgttttgctgagttttagctcctatgcttgtttctgatgcggtttcttgctttttagctgagaattttgtaaaattacgatgctagaacatatgcagattgaatttaaaaacagtagattgattttatattctagattgtttagacacttatgtgtgtgggtgtatatgcttcaattgtggccttttttggttttaattctaaatggtggatcttgtgtttgatttggtaatttctgtacaaagttgttgcttctttgggttagaaatctggtctttaagatgctgcttggagtaatggtagaggctgtaattattgaaattttgcaagagtaaaggctagaagcatcacttaaaatttaaacactattatttaaactttttggcaaatttaaaatttttatctgaactctactcacctttacaaatttgcacttattttttttttgataagcacgcacatatattaaagaaggcttaaaagccgcaaagcatacagggagtatacgaggtggctaaggcctctcaaacaaaaaacaaaacaacccaacccctaattggaggctaaccactccaagaatcctattagggaattcgactccatatcaatgtacactttagcccaaccccaaatattctacacaaacgaagtttttaacttctgaaatgctttacaaatttgcacttataaacctaagtcggcgttctttcagcattctgcaatgatgtatgtgggtatatacatatacatatatatggcgatagtgttgaatcttgagcccgccaatgccccgtctaaagaagaatacattcatttactagaggaagtatgtatcatttttagatgcatggttccatagacaatactaaaaagtgttcaatatgagtttggatgcccttgactgttaatattaaagtgttccatgatttgtttctaaaatacattatttgtcatgaggcacacacccattacagaaatgatggggtaaagttggctaaactacaaacatccaaacagagctctatagcccttaccaatttattgttgttgctaggtatttgggatgcttagctaatcacactgcaaagtaattagcttttctcttaagtggtttggacatcttcttttttatcagattttatatactttagaatgatgtctcatccttctgtccttatttattctttttttttatttatcagaaacaaagataattttttattgcgtccttattaattcttattaatgaattctttgtttttgagaaagagaggacattctctaaactagaaactaggttagaatctttgtctcagctctgaagaggaaaactttatgcacatgagatgcaaaccatcaccacacttgcagagaagttttttgtatcgttgattccaatcttggaacaagtgtgatggttgaaccttagtgcttggcacatgagcgatagatgacctaggatatgtcacctgagatacaattgcaaattaaagctgaaggggcatggatgagcaattatatttgtcattgtagcctccccttttatcagacatcttggctgccttgaataccatgattctatgaatgttttttattctatgttcttgattttaaatatccatgatctaaaaaaccttttccatgatcaacattataaagcttgtggagggatatcttcaaaggagagatcagtaacatgaaggaattgaagagagaattggttttatttgaagaagtggtggaattttttcattcttcaattcagtcccaggttacctagggagcacctacaaatttgagcttaaggcaattgatcggtggagggctccacttagccataatatttattttgttctttaaattttatatcagctcttgccccaggaaagtggaagtgtttgactatgtcaaaggtggaaattagtagctgtatctgttattttattttattttattttttcaattatagaaaacagttaggattgtgttggggcatgtcttggtgtttttttctggtcataagctgaacatcctacaaaataatctctgaatttattcaaattttatgtaactaaaacttgttttttcttttgttcagttgtgtgtgaatgaaccttatgtttctctggttgattgcctcccatttttgctagttaaagattttaacaattgctttcttatgaaaaaggttaataaaaagcgtttggatgttcatttttgttgattactgctgcttttagtatttttctagtcatagatagtagaatttcttatttttttcttcttcttttgtctttgttgcagaat

SEQ ID NO: 11431 - DNA, 7931 bp, Vitis vinifera
  Intron number 2 from transcript GSVIVT01029310001 (locus G SVIVG01029310001) derived from phytozome v7.0 (chr-ID chr1 1; pos 17109461 to 17117391 reverse strand)
agctcttcaatccacctgcgacagtctcaagcaaggttgattccctccttttctgctttcacttgcatttttggctctgtttggatcccgagaaaagaaaatgggagaaagttggaagtctctttttctgttttcatttgcatcacgccattcttcgaaccgaagaaaaatgttgaaatttgctttgaaatggatttatctaactattttctgcattttctcggcatccaaacggggatagaggtcttgttttcttttcagtgcaaagacgagaaatgctaatggcaggcagcaattacatgaattgctttactgaacaaagataataaaattagcgtaattttattaagcactgtggttgattaatgcttatgtttattcggagaaacaattcatgggatttagcattatttggacaaagaagcttcagcttgaattatgaattgaagattttttctttctgtttttcaatgttttgttttgttttctcttttccttttgttttatagattcaaatggagccaataggaataaaaaaactttgcaacctatgttttcatatctttctgaactgggaaaccaaagcctctactggattgaccctaacacatacaactgtttggtttctttcataagagttttttttttctttccatattcatctttttccctttgaggaaaaaaatgtgaaacataatactaattcttatggttatgactatttctaatgttcctatttggttgctgagaaatagaggacaaagattataaaatttttgaaaccttatattctatgctttttataaaaaaaaaaggggagaacaaatcaccttagagttggttgaggataactcaatggagttaggattttcatcctttatttttattggaaatttttttgggtcctaagtaatgaaaaattgaggtggatttttttttaaaattaatttattgggtcctgaatgatgaaatcaaggattcaaagttttgattgactttagattttctcaagaaccaaacagaccactaaaacaaggaaattcaatgaattagtgagtgttttagtttgtactggccagatggcatagagatgcttttgcagtaattgaaaagaagaattggctgaattacatttcattgatgtcaattgatgtaattatacagaaagtaaacttcggttacacattagtctctcctataattaagctatcaccaatcagtctaactacaatctaggaatacaaagaggaaactattatatacagaatatatcttctttatatagaagatttgctagattaatttcctaacactccccctcaagttggagagtggatatcttgtactcccaacttgcgaatcataggagtaaaaacttcttttcccagagctttagtcaagacatctgccaattgatgtgcagagttcacaaatcttgtagcaacggatccatcttgaatcttatctcggatgtaatgacaatccatttcaatgtgtttggtccgctcatgaaagactaggtttgctgcaatatgcaatgcagctttgttgtcgcagtataacaatgaaggctctcgatgcaatactcccaaatctctgagaaggtatctcagccaagttaactcacaacaagcacctgtcatagcacgatattctgcttcagctgaagaaagcgagactgttttctgacgtttagatctccatgagactaatgaggggccaaggaagacacagtaacctgtggttgaccttctagtgattggacatcctgcccaatctgaatcacaataggctcgcaacctaaaatcactgtttgaggagaagaacaatccttgcccaggtgcgttcttgagatagcgcacaacacgaagtgctgcctccacatgaagcttacgaggctgatgcataaacctgcttaatacatgcacagaatatgtaatatccggccttgagacagtaagatatatcaatctaccaaccaacctcctataatgacttggatccttgagtaaatcacttttatcagacaatttcaaacctcgctccataggagtatcaataggtgccgcacctaacaatcccgcatccttaatgatttctaaagcatccttacgttgagaaataaaaatcccattcttagaagaagatacttcaatgccaaggaaatacttcaaatcaccaagatccttaagacgaaattgactatggaggaatttcttaattgcagcaatactcacagaatcatttccagtaatcaaaatatcatcaacatatatcaggagggcagtgaaggacttgccttgtattctggtgaataaagagtagtcagctcgagattgaacataccctgcagctcgaatagctttcgagaattttgagaaccactgtcgagatgcttgcttcaagccatatagtgacttatgtaatcgacgcaccaagttttcctccccctgtctccgaagccctggcggcggggacatgtaaatctcttcatgaagatcgccgtgaaggaaggcgttattaacatctaattggtgaagtgaccaccttcgagcagcagccaaggcaagaagacaacgaactgtgatgattttggcagtgggagagaaggtatcctgataatcgacaccctccaattgtgtaaatcccttggcaactaatcgtgctttgtatctctcaattgatccatcggaacggtgtttaatcttatagacccaccgacaacctattggcgtcttccctgtcggaagagatgtgagagtccaagtaccattggcctggagagcctgcaattcggatcgcatcgcctcttgccattcaggatggatagcggcttcagaataacttttgggttctgtgacttgactgatctgggcaataaaagagcaatgtgcaggcttgtagcggtgatatgaaacataattggccaaaggataacgtgtacctttagtcagacttggaaacaaggaaggagattggtcggagcaagcgtgcgtgatgtgagagcatacataatcctgtagtttcgccaatggattatgggagcggttggagcgacgaagggtctcggttggggctggttgtggcgggccaaggagagatggggatgggtcgggagattggatgaagatagaagcaaggacggtgatgaaggaagggaggaggtagttggcaagagtgtctcgacagacggggaaggaggcgttgggatttccagcagaggtgaaggagcatgcttggggcggtgagtgtatgttttgaggagagctggagttggattcgcagtgggctgctcatcagggagggaggggagatcagaaattgtggatgaagagatgggtgtgacggaattgagtgtgtctgaattgggtgcgaaagaagaagagggagcagagtctgtggtgggaggaaggataaggcgagaaggattagtgacgtgagagggagttgggtcatgaattggagcaggaattgggcctgaagagtagcccaaattagaagtaggaaggacagactcgaaggaagcataaggaaagcgattttcgtgaaaacgtacatccctgctggtgaatatttttctggtggagagattgaacaatttgtatgctttttgtccaacgggataaccaatgaagatacaggcgatggcacggtgatcgaatttgtgagagacatggacattggtagcataagcgagacaaccaaacacacggaggtaagagtacgtaggtggtttcaagtaaaggcgttcgaatggtgttttgaaggagagaacgggtgaaggtaagcggttgatgatatggacggcggtgagtgcatattctccccaaaattgagtagggagttgagcttgaaatttcaaggctcgtgcaacttgtaaaatgtggcggtgtttgcgttccaccaccccattttgttggggcgtgtaaacacaagagtgttggaaaagaacaccgttatctttgaaaaaagattggagtgaaaggaattctccaccattgtcacttcgaaaaattttgatatgagatgcaaattgagtggaaacataactaaagaaatgtttgataagaggttgtgcttcatctttgtgtttcatcagaaaaatccaagtgaagcgcttgtaatcatcaacaatagtaaggaaataatgtgcaccagaaagtgaagaatgtttataacgaccccaaatgtcacaatgaataagatcaaatggtttttcggatgaaatttcactagtaccaaaaggtaaacgatgttgctttgccaaaggacaaatagggcaatcattattagactgaattgaaaaatttaaaaagttcttagcaatgaaactcagacgagaatgggaaacatgccctaaacggctatgccagagatcagtagatgaagtggtgaggttgcaggttggttgacgatttggtgatgagtaagaattggtctcggttttatttgtcgttaacgccgctaggtaatacaatccatcacgttgcttacccaaaccaatcatcctcctcgtagccagatcctgcaaaacacaccaatgagggaaaaatgttaccgaacaattcaggcctcttgttagacgactaactgacattaaatcgactttgaatgtaggtacacataatacatcacgcagataataaacagagtttagcggcaaggaccccttggcaacaatgttagccttttctccactaggtaacaatactggaggcaatgaaatatttttatctttatgcaagaacagctttggagatgaagagatatggtctgttgcgccgctgtcgatgatccagtggtgtgaagaaattttaaacaaacctggttttgctacagctgcatttgcttgagaacttgtacctccatctttgtcattcagaagggacaggagctgttgaagttatgcttctgtgattccagtcaacaccgacttcccaccatctttgtttgcaccatcagaaacttgattagccacagaagtattcttgtggcggttaaaattggaacctgttcttgcctttgggtgtcttggaggatatccgtgcagctgataacacttctcgacaaagtgtcccatttccccacaataggtgcactgaggtcgccctctggaagatcctgaacgacgtttgtcttgatcaaatcgtcgtgaatcttgtgaaccgctgtagaagcggtctgaacgatctgaccttgcgttcccagcagagttgttcttcatttgattgctccttacggccatggcagcgctggagttagactctgcagctgtgtgtgtcgcactaagaagcctctgtttttcttcttggcacacagaggaatatgcttgacggacagagggaagaggattcatgagaagtatctgcccatgaattgcactgtaggattcattcaaccccattagaaattgcatcaatctttgttgatcctgctgtgccccgcttgacgcatcattgtacgaggccagttcatcccacaagctcttgaattttgtgtagtaaaccgagatagaaagctgctcttgtcgatggtaggcaatttctcgctggatctcaaatatgcgaggtgcattgctttgagagaatcgctcacaaagatcttcccaaacctcatgagcggttgcataatagattacagaatctgaaatttcaggattgagagtgttgacgatccaggaatgcaccatatcattgcaacgtgaccaagttgcatagtcatcaggattagtttcttccgaaggcgccttgatggtgccattgacaaaacccaatttgttcttggcatttaaagccaaggtcatggctctgcgccaagctgagtagttatctccattcagaggtttggaaatcaaaaccaaacctggatgatttgagtgatgagtgaaataaggatttgagagatcagactttgatgcatctgatggaaggacagaggaattaacttgtttttctgtctttgatgagtctggttttgatattccagaagaagtaggattcctttcatcaaccatggtggccaaaggatgagagattgctgcacgagaaagtagagtgcggccacaatagagttcaggattttagtccctgctctgataccatgaaaagaagaattggctgaattacatttcattgatgtcaattgatgtaattatacagaaagtaaacttcggttacacattagtctctcctataattaagctatcaccaatcagtctaactacaatctaggaatacaaaggggaaactattatatacagaatatatcttctttatatagaagatttgctagattaatttcctaacagtaatcatcaagctataatgttcaaggagaaaagaggagaagtaccagtcttcccatgatacactagtgtctagaattttgctcatcaagctctaataatgaaacatgagaagactagaaaaatacaagtcttctgaaattttattcaatatacatgtgagaatttggccataaccagtggaagaagaaaggtacaacttagggaaggagtagggttttattttggttggcacttgcagttttacttttatttttctgatacagctttcttgatatcattgctaaaatcaattatttggcacaatccttggtgcagtgatgatcccttaaagcaccattttctggagcttttcaataaattggtccagaaagattcttgattggcaaacttttgggatgggaattgttggaatcctagattcagaaggtacttctcagataggaagttgtcagccatggaatctcggcagcttttaaatccttttatcagtggcaaccaatgtgtaggacacgttgatttggaagattgaaagaaagggtttattctccatcagctcatatcacttgacccttgtctcaaaggagccccattcctttcctgccaagctgattggaacttgagagtgccttctaaggtgtgggaagcagcatgagacaaaatcttgaccatagatcaacttatgaagtgaggattgagcttggttaacaggtcttatctctatgaagatgatatggagtttcactgcaaatggacctctgagttgtgatctttggtctagtcactttttggtgtatcttgggtgtttcccctatcaattaggaaagtccttagttagcatggctctcatgttggaaccaaacacaaggatgtttggaggatgatccttctctggttttttttaatcacttggaaagagtgcaataaaagaacattcatagttgtggagcgttgatcctaaagtctttatgtttgtggttaggtgggcatttgcattctcatttgttgcattctttatttttgggagttggttagtttagctctgtttttttggtgttttgggcatttcgtatatacatcgtgtgtatttgggttgcaccccctcttttgttacgtgcctcttaattcattctttttatttgcttataaaaaagaatcaagggttttcaaacttccagaagacttacgattttgaaaaagttgtagtttccacgatttgcattgagcttttggttgtagacatcactctcttttatttcatagatcaacctttctttacaagggtgtgttcttttatgttgttgtctagttgggaacaacatgagatttacaactcattaagatgagaaaatattatgatattgggagaatcgactgttttgttaatttacttgagttccattcacaatatttgatgctgtttttctgtttaccagagcatcttttgttgcttagagttgaactgatggctttttacactgtgacttgggaaaccagaaatcttctatgtgctcttttggatgacattttgttgttttctttcttttctttcaagtctattcttttctacttaatcttgtatcttttgattctaaattgatatagagtatattgtgacatgcagata

SEQ ID NO: 11432 - DNA, 8088 bp, Vitis vinifera
  Intron number 1 from transcript GSVIVT01019059001 (locus G SVIVG01019059001) derived from phytozome v7.0 (chr-ID chr4 ; pos 17250750 to 17258837 reverse strand)
tcgtcaagaacttccagaaagtggatccttctaaggtataaaagtttcatttgcgagatattgttttgtttgctgtatgtttggatagtgagaaaactcaggaataaaaacaaaaatgatatttttttatgatttgttttagcttggattttaaaagctagtgagttctgttgtttctgtgcgaagatttctttttcgttgatgataacttaaaaagaaaagagtttcccgaaatatagaggaatgcctggattaaagtaaatgactggtttaggctcatttgagtttagattttaggatttgatttctttaccattctgcttgtttaccctgtaaccaaccggagtattgattgaaattttgggggggaagaaaagaaaatatatattttttatttaaaaaatgtgaagttgaaaaaatcctggaaaagaatggaaatagttttagacttttctgcgtctcatctgttttgccagcatcggaatggggctttgtctaattgtgttttggaaggtgaaattagggtttctgtttggaaattggttgaaatgatacagcattggggtgtgacaacttagggtttctgtttggaaatcattaatgtttggataatgatttgcacaaattttaggcacctccttttactcagtcaactaattgatggatgagtctaggtttttgctttcttgggtccttgataatataaatctatgattgatcacatatagtgatggtcatcatcaaagattcagcattttgttttttcttctattttcccacattttcgagaaaccaaatggagtattagtagttatgttctggaaaactgactagtggggtctgagtttttgtacataatatgaagctcctcatgaggatatttgataaaatgaatagttgcttacatttttttaggtaaaaatttaagttataaaaagcctgaattctagaatctgaatgactcgtagattaaactcaattagtaatgagtttgtatcctaatcaccatgcaagagacataaatttacattcttcaagagagttttgatggaatcccaaaagagtaaaaggacttaaggccctagttgggaactgttattgaaaacagttttctaatttagaaaacatgtttgataaacttttgagaaaaaaaaaacagcttttaaagaatttgttctgaggtgtttcaggttttttttttttttttttttttttatagtatttttgtaacaattgaaaatatggagtatactttgagaacttttacattgtatataagtgtataatatcttcatggaaatgcagaataactagaaaaaaaaatgtttttcatatttaagttctcaaacagaatttctttcttaaaactattttatgagaactatttttgaaaatgtttccaaacaaaccctactattttgagctaaagtttttttgtttacttagaacctaactggaaactgttacaatactcatgttgatactaattacattgtaagaatcagagtaattttcactagaccatgagaactggggtagttttaatgttgggagtattgttgaaacttttgaaggatccaaacttttgtagtctgcatattggcttacactatctagtcaagtgttgtgtcaatggctttaggttctccttccatttttatttatttattttggtgataggtaaacaagaattgtattaaaagaaagaaagtatacacgttgtatacaaaagacaaaaaggagcgaagacacaaaaacacgctaccacaccctatcgagagcctacacaatccacaaagtctaacaacgataaacaaccacccttactatatagtttaactcaatcccaaaatagatacaagaaagaatttttaattgattgatccgtgttttcaaagttgtcaaaaaccctcttattcctttctcaccataaggcccaaaataaacacaacagagcaaccttccaagccttcttcctctttttaccaacaaaggacccgtgccagcttataaggacctctctaatgaaatagttcaacacccattggataccaaagagttcaaaaatcaattgtcacagcagaggagcttttgaataatgaaagagtatatggtcacttgtttcttcttattccttgcacaagtaacatctattaggaatcctccatcccctttttttgagctgatccaaagtcaaaatcttggcccaagttgcttcccaagcaaagaagctaattttcggggacacccaaatattctaagctatactacaagggaatgactctattctcctattggtcaaagaagaatagaaaaacttaacaagaaaagcaccatcatttgtaggcaaccaaaccatgacatcatcagtctcaatggagatggggtgtgctgacaacctcccgaagaaggcttgcacctcctctagtttccaagcatgtagtgcctagtaaacctaggactccagccaccatcctcccaaagatcactaactcaagtatcttttgaggaagctatagaatatggatttggaaaggactccctcaaggtcaaatttccacaccatttgtccttctagaacttcaccttgttttcaaaccctaccttaaacccaattctaatcttgaacatcttccatctgcctctaatagccttccacacccccacaccatgcccttctctcactacttccgtgcactaacccccctcatcgagcccatacttgcccacaattacccgtttcgagagaatgtctctttcacttacaaatctccaagaccacttgcctaggagagcctcattgaggatggataaagctctaatacccaatccctctttctgtttgtccaatcgaacaataaaccatttcaccaagaccaagtgcggcttttgttccaaagctcctcctccccataaaaggtctctttgaatcttttccaatctaacagtcgctctctttgggatgacaaaaagaaacatgaagtaaatcaacagactagacaaagtgctcttcaccaaagtcaacattccaccttttgaaagatgctatctcttccacaacgctaatctttttcaaaatatttcttccaccccatcccaaaccctagagcacttgaaaggggctcccaacggaagtcctaaatagatggttgggagagcacccaccttacaacctaaaggcccaacaagatcctctaagtttgagactttcccaatagggatgagctcacttttctccaaattgatctttaagcctaacataactgcaaaccacctatttgtgattgtcatggaggctcttagttgtttgttgaagagagcgaaggaggggggtttttgccggggtggcagcttagtggtagaggaggtgtgggggtggagatcactcatttgctgttcgtggatgacactttagtattttgtgagccttccattgatcaggtgtcctacttgagttggcttcttatgtggttcgaagccatgtcagggttgaaggtgaacttggacaaaagtgagatcatcgtggtgggaagagtggagaatgtagaggagttggcccttgagtttggttgcaaggttagccagctcccttcttcttatttgggtcttcctttgggtgctcgtttcaaggaggtggcaacttgggacagggttgaggaaaggttgaggaagaggctttcattttggaaaaggcagtatatctccaaggggggcagaatgaccttgatccggagcactctgtccagcatgcctatctactgtatgtccctgtttcatatgccgagaagcgtgagcttgagattggagcggatccaaagggattttctttggggtggtggggccctggaaaggatgccccatttagtggaatggtctattgtttgcttagataaacgaaagagtggattgggtgtgaggaacttggcgttgctaaataaggcactcctttgtaagtggagttggcgttttgcggtggaaagggaagctttatggaggcaagttatatgtgcaaagtatgggaaagaagagggtggttggaggtcccgtgttgtgagagacaattttggggttggtttgtggaaagcgattaggagaggttgggatgtgttaggcgacaatttggtttattctgtgggaaatggtagaagggttagattttggaaggacaagtggtgtggagatgatcctttgtgtacttcttttccctctttatttgctatatccttggataaggaggcttgggtggcggatgtgtggagccattttggagggtgagtgtgggctcttaggttctttaggcggcttaatgattgggaagtgttcgatgtggagcgtcttctcttaaggttgcaaaggaggagggtttgtagtgatgtggaagatcaagtaatttggactaaggcaaaggacggaagattttccgttaagtctctttacaaggcgttggagtcagaaagactaggagattttcctacaagagttatttggaattctttagtgcctccgagggtgagtttttttgcttgggaggctatgtggaaaaaggccttaaccttggatcgtatttagaaaagagggttttctttggctaatagatgttatttgtgtctggcagaggaagagtctattgatcacatcctcctgtattgtgggttggccaaaagtttatggagcttacttttttccctctttggggtttcgtgggtgctcccctctttagttaaagaggcgttattggggcggtttgggccttgtgtgggaaaggaaaggaagaaagtgtggttttcagctcccttgtgccttttttggattgtttggaaggaaaaaaacagtagggtgtttgaaaatgaagagcattcgattcatgggtgtaaatcgtttttcctttgtaatctgtgggcgtggcccagagggttttttggttttggttctccttccgttgtagattttgttgattggttaggccctggttagggggttttttttctcccttttgtatacctcctgtatactctggggtgcttccttgaagtgcctcttttcttttaatatatttctctttattcatcaaaaaaaaaaaaaaaaacctcaaaccacataagaatctagcccaagtactcaaggttttccttcctagcatcacaaaaaatgagggtatcgttcgcaaacaagaagtaggaaatctctaccccctttccatctcttccccttactagaaatccattgataaaccctctctcctttgccttcataagaataagagaaagaacctccattgccaagatgaataaataaggagacaaagggttgtcttgccttaaacccctagaactttgaaagaagcttgaaggggacatgttgacctagactaagaaacggactatagagatgcaccatctaatccaattggtccatttggagccaaaacttatcttttccaatactagaagaataaagttccaatttacatggtcataggccttttcaatagccaacttacaaatgacccctctcaagttggctttaactctagaatcaatggcttcatttgcaatcaaaacaacaacttccaaaatttgtctccctgccatgctgaaaatccaacactatgttacccaccaccttcttgaggcgaatagcaaaggaccttagctagaagcttatataagcctcctaccaagctaattggcctgaagtccttctatgaatattatttctccctgctttttcatgtttatcattgatctgtgcatttacatgtggggatgtccaataactgcagattcctttgttttgccccttccatttttattttaagttctaattgcaggattctcttccttgtttttatctcatttaagttttgtttcttgaatatacagctagcccaacctctctcaccagttatggaatgaaataggattttatagtttaagtggatttaattcaagttggagtagcttaaatttctttggtggatcttattcatttattttatttatttggataagaaataagaaacaagaagtagattaaaataaaacccaattgaggaagagtaagaaggccttcaaggtttaagggaggaaaaccaagaaacaaatcaatgaattaattgtacctgcttgcacaattagctatagcacattatttttatgtaaaacatcaatcaatcaagaatgacatagctgctttttttgagtgtccttgtaactgcttgctcagatttaacttttaaggctttggtcaggactttggcatctgtttcagatattgatttatggagttgtacttggtttgtttttcagtttctcaattgtataatagaaggatatgttttgattatgtattggggtggatgttagctgttagcttttgtgttgttggcatcatttatctaactacctatgaatggctccctagcatttattttcattttcaagtttatgtcctaaggtttactctttagtgccctagctggaaaccttttgctccctctttcatcagtcgcctaagcttgaacaagctaatgcatgggtagagagccattaaggtgaagaccttccttcacttaagctatgctcgattcctcaaaagcacggaggaaagaagaagatgttaaggaaaatgattttcttatggttggttttaccacggaaaatacgaaagaaaattcaaatataattaaaattaattaaaaaaatatctattttcaactttttttaatctttatatagaagaattaaaataagtgaaataagtttgaagtattatattaaaaataatttatggatttaaaatctatttgtcatttttccttcactttttcttaggttatattttagttctcagaatatactaaggaaaggaaaaaaatgttaaggaaaatgattttttcatgcttggttgtaccaatggaaatatcaaagaaaatcaaatataattaaaattagttagaaatttatgaattttcaaattatttaatctttatttatattaatataatatacttcgtttatgatgaaagaaaaaagagataaaataagtgaaatgagttcgaaacaacatataaaaataatctattgactttaaatctattttttatttttcttacctttttctttctatttacttttccttccattttccttcaaattttctgggaactaaacatagttttaatatttttttcattcttaacttgaatatttgttggtgtttgttgttgtaggttgaaattgatgaagcgaaaggatcttcaaattcctcaaaacgttttgatttttttttttttcaattgaaatctgtactaacaaaatccatcccatgtttaagatttttcattcatctgttcatgcatatttgtatgcaaacaaaaaagtatatgttttggtttccctctagagttagtgtgcttaatggaatcgcactgttaccccccacaacccctattccatgaatgaagcagtggctatagtaaatctgaggattgctatttgggattagaatctgtaaaactggaaaaatttaagtgtgtttatcatttgttacaactattctgggacagtttctgaggtcaattcagtggatggaaacaatccatttttagatctgaaaaccaaagagcagagaattgacagctactctggcttaatgcccttttgatctcaaaaccaaaaaccaaatatgctctgtgtaatggtgtttgtggtgatgaaatcagtgctttgatatgtttggtattattagagtttacataaaattataccagggaattgctcaaagcaattgagttgtgaccaaataaagaattcaaaagcaactgatggagagaggttttttctagcatatccactgggttgagaagtaaaaacaaaggaccaggaagatgttcaattgctgataacaaagtagagaatgctgtcttgtttgttttgttttattttgtagaatggtttcccactgtagctgtttctgttttcaagggcgtcaatagctagtaccaccatttgtttcttgagcctacctgatatctgctttttcttgtctccaggttacaccaaccgctaatttccagactgatcttgg

SEQ ID NO: 11433 - DNA, 3291 bp, Vitis vinifera
  Intron number 6 from transcript GSVIVT01018105001 (locus G SVIVG01018105001) derived from phytozome v7.0 (chr-ID chr5 ; pos 6595807 to 6599097)
aggtgagttcctttagccttcttattcatgtttttgttttgaaaaagaaaatctcacggttaaatttcagttcaccgaattttttaggttttgatagaaataccatagcagtatgagacataagtagatttttcaatatgttttatcggtattcctcattatattgatgcctcattagttctcatttgtatgtggtgtgcacatacatatgcatacatacacatatacaacatctttttccggcaaactactatgttgcagattttgaaacttgggcctgctttcaattttggttttcttttcatacttttcaaaccttgtctgatacgagtaatttacctaacgtttcaatttcaattcattcattagtactattcttttgtcttgataactaagtaatatgtatagagtaaggaagggggaggatgcaccagtgaaaagatcctcgttctcctctagtcaatacactgtgtggcctcttacatcatgccctgtaatttggcattaagatcatcctatttcttgatcagttacattcattacactagagcccccttgtgtagcaaattttagaagaattatggaagtgggaaaaatggattctgtttggaaagagtctaaagatgaattctaatttttcatttttatttttaataatttcatctttagatagttactggattaggaagagagtgagtgtacttattacttagtattatggaggataacctcaatatttttagttcacataattgttttgtcagtaaaaaagctaaataggatcctgctataaatttattaagtaaagttaactctttagttaggaaaaacaaacaccaggcaaaggaagacaccacacttggaagcttgaaagagtgcaagtgtattgttaaaaaagaaagttatacaagttttgctctcaaatatagagtgacttggccacaatgtgcctttacctatttataaagctcatttggaagtttttggaatctatgacaaggtggacctttacctatgtgtagattcatttgaagttttttggaattttgatgcttctatagacttcagatattcctgtaggacaaagtaagcctttacctatttatgggctcatttggaactttttggaattcttgtcaagttagctctttatttataagctcatttggagctttttggaatccttaatgttagacactttaatgtatgcagctcttactttataagttcatttggaactttttggtatcttgatgtttctaaaatccctctataaagtttttacaaatgctaggatctgtacaattatttacagtgttgtggagagtattacttgcaatgatccagcatttcataatgttccaaatgcttccttctaactttagggtctaggtccatagtattttataatgttctagattctttcatctagctttggatataccccctcatatttccatccaactttggatagacccacatgacttttagtgaactccaggcaccactacaagcttctggaactttccaattctctttgacaaaccccactaagtgccttacgtagttttctcagcagtaggccctgatataaatactagtgagagtgtgcagctatgaaggtgtgttcaataactgtagatgctgagtaagtttttacttttacttttattgtatcccttgacctatttagtaggataaactaaatattattgtaccgagtagctaattcaattgcccatattagtgaactagaatgtggctattagtgaactagaatgtggctgaggtgaacttgattaatacaaagtcattgccatgaattggtaggcttagattaaaaaattccaacccaactttgtgcaacctagggatggttaaggtcatggctcaacttgacccaaacccatcttgatctaatgcatgcttacatcattatggggttatatatggtattgttctccagaatttaagatattatctactaaaaactttgaaacactttgaccaaattgtttcttatataatatgaaaaaccaaactataatatgaacaaaaacaattctgtccttatcaaccttaacaagaaagccaatctgacctggaccaaggttgaacaggatgttccaagcctagccataatactatgcaacctcagtacaatgaataaagaattgaactaacaaggatggagaataagaatattgggttgattacctgactgcatttacaaactttatacttcattgtatcagcattgttgctatttgcttgcaaaaccctgacaaactagcccttggaacacgcatctggaatcatttgaactgctaggttttataatttttttgctctttctctcctcttatgatgaattagccaagctttgaacctgtttgatctcctaccttctcatgatactaacgttcccttatgcttgccatggtaaaaggctaggatattttccttttatgatttttgagctacaactacaactacaaatttttcccataaactttattagttgcatgtactacccaaggtatttttatgagctttcaaagaactttgatccaaagagtagaaataactcagttcatatagtatttgaaattaggcaattttgcatatgatagggattcagagtgaaacttgcagaattgaaggtaacttcaaagctcatagacatcttgatccttctgtctttgttttctctctccttatggatatttactttttctggattatgctgttcttggggttcttgtttcttcacaaatctttcattatcgggaagaccatacttggttaggggtgtccaatgaaaacagagcagtaagatttcatttttccacagcactggaagatagaaatccattcagtagaatagagttgctgtgtaaattaaattcattaccgtattgtaaaaaaaattgaaacaacttgattgcaatcttaaaggtggattgatatttctactgatgtctctgctacctttaaggagttcattcattgaatattatgtggaacatttttattctaaggtcactcaatttattttttttgtatttattcatggttagtttctcagtgtatatgctttattgttttctccgatcattaggattttccatctatttgaaacaagagtttactattacatgatgaagaggagtcaaacaactataatatgatgatgctccacccttttgcagagatgcttcttgcagtttattgtgaaaaaatattttctgaattattaattcaattttttcctttttatttgttgcaggg

SEQ ID NO: 11434 - DNA, 6233 bp, Vitis vinifera
  Intron number 5 from transcript GSVIVT01019654001 (locus G SVIVG01019654001) derived from phytozome v7.0 (chr-ID chr2 ; pos 2240793 to 2247025)
atcagatcaccaaaggcaaaacggactccttcaaggtagtttctaactctatttccagttgatgtcatgagaattctgagcttccagatttcatcaatgaggataattctatttacctttcccctttatattttatttatgagtgacaatttggtaatctgcaaggcagaattaaaaattttctgaatacctaatttccattgaaaagtgtaggaagcacttctagtcctctcacaatcattcccaaatggacaatcttatggaaaaaatgtctatgtgcatttacctagaaaatgctgctagaactcaaataataattagcttgactttaggattttcttccacagatgacggttttctcgtatattaggtgttgaagggttctggcggctatctgaatttatggaagaggcaaatatattttgaagggaacgagacttaccctaatatgaagttcattgtctagtttgcccatatatttcatgtctttatttaaggtgcccagaaaggtcggatcaaggcttaagaaaattcagatagactttctttaggaaggatgggctttggaaaaaaaagattcatttggttaaatgactgattgtttatagggagaaaactaagggtggcctaggagtccttcacttaatagggttatcttgggaaaatgatgttggagatatgcatcaaagggggaagctttttttaaaaatgtcattgaaggaaagtacaggaaggatgaggggttggtgtttgtgcaaataacggaagtatatggggttggggtttggaaaaccattaggaagggatgagacttggttggcagtacagtatcctttatggtgagagatgggaagaggctgaagttttggaagtacaaaaggtgtcggaaagaacccttatctatggtttttccttccttgtatgtcttaaatgcgttacaaggggcttaggtggcagatgtgtgggtgagcatgaccattgcaatccttgcttcattacacatttgaatgattgggagctaaaagatatagaggtttttttctcaaggcttcaaggaaatttcgtgaaaagggaagtgaaggatagagtggtatggctaggttctatgaaaggggttttccctaacaacattttttattccattctgaagttggagcctgcaacttccttcctagtagtcatcatttggaattgttgggcccctccaatagcatgtttttgaacgagaaactagttgaggcaaagtgttgaccatggactggatttagaagagagggtgggcgttggcgaatagatgtgttctttgcaaatatgaagaggaaacgatatatcacattctcattcattgtgctgtagtaagggcgctattccaacttttgttttctatgctcaacattacttgggttctttcttctatttggagacacttttttaggttagcatggtctctttgttgggagaaatcataagaaggtttggagaacaactttcctttgcatttttttggacaatttggaaggaaagaaaccaaagaatgtttaaaaacaaagagtactcaactcaaacattgaaacactcatttcttagtaattttgtttcatgttagcttacacattgaaaaagattcaatgtctctttttgattttgtagattgggtgggttctagttgaaggagggagaggttgttttttttttgttctctctctatttggccgtgccttttggttcccttttttttttaatatatattttgcgctcatttatcaaaaaaaaaaaaatatttgccttcttgcttatcagaaaaaaaaaaaaaaaaaaagcaaaaagaaaatgtgggcaattcagccttgtgggatgtaaatgtggaagttaagtttgagaatacaacataacatagaggacttcaaaatgaaagcaatgcttattatgtatctaagagttgtcatttttattttgataacttggtagggagttgcttaattgtgttcttgtggtacaacatctttaattctgtataattttaatttatgatattgattgtatttgtgtgtgggtagctggggccttaggtttgttagacagttgcatgattgggagctagaggaggttgatgtattttttgggagattgtatgaccagtccattaggtcgggttttgaggatactatggtgtgattagggtcaaagaatggtaacttctcaattaagtctttctactcctctttggctagtaggagtgtgaagcctttctcccatgatatagtttgaaattcttgagtcttagtaatagttagcttctttgcttggaaagctacatggtaagattttgactttggatcagctcagaaaaaggggtggaggatccctaatagatgttatatgtgcaaagaagatgaagaaatggatgatcatattctccttcattacatgaaagcgcacaacttgtggcaattggtttttgctttgtttgctgtacagtgaatgatgcattctttagttggggaatttctcttaagatggtgtggttattttgttgggagaaaaagaaaaaaaggcttaccaggttgtcatgttatgcatatttttggaccatcttgagggagagaaataggagagccttcaataattgtgaaagcttagaccaaacaattaaaacctctgataggaatttgaggctaatccaaactatggtaatcaccctagagggggggtaaataggatgatggtctcttttccacaaatttaaactatgcaaaaataagagacaattatatgcaaatatataataaacaaaataaacacaattgcatataatttaaaagagttagggaagagagagtgcaaacacgagagtttatagtggttcggcacttccttgcctacgtccactctcctcaacctcctaaccgagtgagggttccactatcttgaaacttcaaccaagcttccaatctctttacaattggattatggtttcaattcaccctcttggacttttgactccaaacaccctttacacttctcaagagttatcccactcttgaacatcctcttaagtgatacccctcacttgagaaaattcctctcaaagatatacaaagattgatctcacaaaaaatcctagtaatacaactttaggttcaaagatacaagaaaaactaggattgaatggtgcactaaagatatgcaagttatgaaacaatgatgcactcaaaaacactctttcaaggctcaaatataattaataatgatttgggaaggtttagctcatgaaacaatgaagattggagcctttttatagaagaaaaaagccaaactagccgttgggggttcgaccgatcgagttaggggtcgaccggttgactagccgttaggaaaagtgactgttgggcctcaaccggaccttgactgggaagagaaggccattgggagagagagaaactttttggcctccctcaaccggtcctcgaccggacaagcacaaccggtcgaccggttgagccatttttttggctcaacactcaacctttttcaacttaaaaccttttaacacaagtttgaaaatcatttaatacaaggttttagttgaaaacatgaaatcattcaattcttaagatatttaaaacaatattactcttggatgattttggtgcataaataaagaatgaaatgcatgaaagtcctagtgcaccaacaaccgtacaaagagattttaagaagctttggtcttgaaaaattcttctctttgaggtggtcttcttcttcatgatttctccttggcttgatttgcctttggattgccactttggaagtcgtcttgcctaatcatacttgaaatatgatcattagttctaaaccttgttttgttatcatcaaaatcaagattaaccaaaccttggtttcacaacttcttttttgaacctttttggggattggattaaattgtatattggtgacggttctttgttggtgttagaatttatggattggttaggctttttgtagggggtgtttgatggtttttgtgtctttatctattaaaaaaaagttgtacttttgtgtcggtaggtaggacaccaaaatttgattgctctatgtagctgtgtttttcatgtacttcatacagaatgatttgctactaaaaactcttctgaagcctggaacttgtaacctcacatatttggttaagtttttcctgttaggcaaaatgaaatcagagtatgttgttgttttctttaatgttttaaactaaattctttttggggaaagcatattgtaaggtttcatcaatgcttgcatttgtttaatatataatacctcaaataaattgttaagacaacaattgagttatatggaggactagaaatagagtttctttataaatgatcagaattttctgccacatgtaaaaattgataatattatagtaagagctagtgcattatgtataattcacatactttagttccatctcttgccttaatattcatttgttgttttacccatctttttgataacctatattctctttgttcatggtatcatctgggtataggaggaatggttttgatctactgcctatacatgtattataccattagaggatgggattctggttttgaaggataacttaattttccctcttttgctaaagtagctttatttgagggaatagtgaaccgtgtggattgtcaatctggaagttgttgagtttgaggataccacgtaccataaaggacttgaaaaatgaaaatggtgtctgttatgcatctgggaagtgccatttttactttgatgacttggcagagaatttctccttttgttttattacagtaccttttttttataagtaaaagtaattgtattaagaaagcctgatgtacacctgaaattatacacgatgtatacaaggcaacaaggtcaaaaagaaaaggaatagcaaaaaatcacccccttacttacatcctaaccaattaatgaaatcgaaaatggaccatgatgtacaatctacatgcaccctaaccaaatccgaaaacatgtaaaacaaaaaaaaaaacaaaaaaaccataaaatagcttcatccgctaatttggtatcttcaaagacttttctatctctctccttccataaggtccaaaataaacatcaaggggctgcattgcacaccttttgtctttttttttccaccaaaggagctgttccaactaagaatggtttccttgatagaattgggcataacccattgaacaccaaaaagagcaaaaataaggtgccaaatcatggctgccttgggacagtgaataagcacatgatttgttgattcttcatccgctttacacaaaaagcttcaacttggtaaaatccaatcccacctttttagttgatccatagttataattcttccccaaatagcctctcaagcaaagaagccgactctcttcggaacccaataattccaaactaagcttgaaggaaactctctaccaatgcatggaactagggatgagtagaaaaatttaactgtaaagaagcctttctttgaaactcgccaagacatgacatcctcattgttttattatagtacctcctccttttattctgtatgatgctgttttatgatgttaatttcatttgtctgtccttggtaggatacatttgattgctttatgcaataatgcttttcatgtacttcatacagaatgatttgctgctgaaaaactcttctgacttaagaaacttgtaaccttacatatttggctatcttatgattgatattattattgttgttgttattgatattattattgttattattttctttctgggatgaactaaattatttatgggaaacacattataaatttataaggtttcaccagtgcttgtatttgtgtaatgatagtacctcaaataaattggaaaggtgaagatgacctgtatgatggattgggaacagactttctccttaaatagttagaatattctcgcacatgtggagttgattatatgctagtaagaataatgtccaagacacatactttggttccatcccttttcttcattattgatttgttttttgactagctcttttagaacctggagtctatttgttcatggatgtcatagatatgattttggtctgctggctgtacatgtatatctttatgctgaacactttcctgcttgtgttctgtgcagggtttacgcagacatctcttggaggaacttgagca

SEQ ID NO: 11435 - DNA, 3021 bp, Vitis vinifera
  Intron number 2 from transcript GSVIVT01008766001 (locus G SVIVG01008766001) derived from phytozome v7.0 (chr-ID chr1 8; pos 1794084 to 1797104)
gtaaaaatcctaagatacaacttcttgctctgtttgtgagtatttctcttttcttctacactccctagatatggatgttgttcttgttcttattaatcatgattgtataataaaacatattataatagcacttgatttttcaatatgcatgtttttcttataacttgtgaggtttgctcaatgttaacatattaaatggtgtatatgacaagactctagttggtcatcatgtcttaaaagaagtcatggaaaatagagaggacaataaaattgatagtaaatgaaaacataattttggaattttatcatacaacttccttattttgtattctaattgtaatacaattctactcatactaacttgggttgtcatcacacttcttccactccttttgttctgttgatgtctaaccacctatataatgtgttaaaatgttgaatataactagaatccttattttttaagtgtgtttacagtaaaaatggttggaatccttacatctagtaaggtattaagcaggtgacaggtctgaagatgcattataaggaacttctattagccaaatacgtaatcactcttttggataggttggatattaaaattagttttgcatcattccctcatttcaagcccacacaagatgaaccttctgactactaatcgtataacattgcaatagcataacaaccatctaacattattttctgacacatttaaagcattattcttttaataaaccatcttaatgttcactattgagcacgagagttgatttatgttaccagtgatcggttggtgaatatgtgcttaacataacaatgttttcatctctgacatgcttactacagaaatgatgttttcttcatgcatgagagttgatttatatttcttcatgctgaaactgcattatgctaaccattcaaaaatagcagagaacatcaagctctgcctctgataattgagcttccttaaatagtttgggatccatatgagtaagtataagggcatagcatgttgagaacacactcaagccacaattcagacaatctatgcaattgtttatcagtaacaagcatcaaaggaagtttaagtaagcatgacatcaaacacgactttataggcaaattaagaattcctgagccaagagggggtgcaacctagatacactagaagatgtaagtaacactattaacaaaagaaatatagaaaaaaaattaataacagataacctttactcctatgattaataaatataagaaagataaaattagtgacctctagagggatcctcacccaagcaaacataagtttaagaggaaaaactttatagtccatatctgagcattacacaccattgaaagttttcagctcttcctgaactcaccaaaacaagctcaaagggatacacttcccactttcttgacataattgctatgcttgtttggcaaacgacacccctttgcttgttttggtgcatttggaaagagtgaaatcacagaatcttaagggagaagaatttgcagatcagagtttaaaggagagttccattaattcccttggtcgaaatcttcgttagatgcgggaaacttgtcattgttgaccttcatagatagccttagctgcagatagcttggtttgaggctgattattttgtagatacaaattggtattttttattttgttttttgtgtatacttcctatatacttagggtgcgcccccttttattggcgctattccaatatattctttgattgcttataaataatctaggcatggtgtccttagggaaaaatcaaagaaatgccaaaaatagaaaagaagaaagaccacaaacttgacaagaaccctgctcctcataaattaattagttgtaagaattctctctcacattgctttccaaacaaagaaagcgatcttggagcacaaatattaatatcaacacctgttaaaagatatttgtcaatgtgttgcttcatttgctgtcttgcttttcatgatacttacttaactcatgccaaacctttgagaagtcatacttgacctgtaaatcatccagatgcttttaggtttacaccttaagaagggttcgtctttactcttaagtaggctctcttaagtaggctcatgcttctaggtgccaggcactcatgaagcaaattcctcatttcttgaggttcaccttgtgtctaaaatgggacttgagaatggcaaggtagttgctttgcatctatgacggcttacattgggtttagttaaacagagatttagggaccaatacatctagttgcattcattctacttataaaggctattttcctttgcacttaagttgtcactcccaggcctatttattgttcttttttacatgaactgtttctttccctccttcataggccccttttggtgtgtcattcagaggccagatttagccctatttgagaaacaaggatttatcatgcaaaataaataaaagaaaaaaagtttaaagggaatttaaaagtattagccttgtatgcattcttacttgcttcttgtcaactgtttgttgtaattcacttagttgatgaaacgatgactgaacccatgttatgcatggctttcatgatttttgtaattgtggacttcatgaacatctcaatatggtccttaaattttgaagaaaacattgtactgaaaataaatctaagaactgtgtaaaatacttaatctaagaattgtctgagaattgtgtaaaatttttaaaatgtactgcatcaaagttggccttatggttttctctctgttctagctttcttgttgctaagaccaaatcaattgtactgacaatagctggattattgtctgttttcatgttgttttttccccttgtttttgactttttagcatttcaattgtacatattccatgttgttatcttaccatttgcagatacagagaataattgctgtcttaagttgttctattttggaattttctaatataggtattggagactctcagcaaaaattgcggggagaa

SEQ ID NO: 11436 - DNA, 350 bp, Vitis vinifera
  Intron number 3 from transcript GSVIVT01034040001 (locus G SVIVG01034040001) derived from phytozome v7.0 (chr-ID chr8 ; pos 15659430 to 15659779)
cccaaagccccacaaggagtatcccattatcttaggtaccctgcttttccctactctgatccttttatgcaatctattctatggattttagtagctaatgcattcacaatttcgcaaaagtttcatcagagtctctttcgtcaatgttttcttatttttgaaaaaaaaaaatcattaccatttggtgccccaggataatctggttctctggcaaacctctaaccaatttgcagacgacttttcttgacaaagatttaattccaatcgagaaaatatttttatccggaaatttactcatggggttttcttcaccatcttccacgaaaatgcgattgcaggagagtggtgga

SEQ ID NO: 11437 - DNA, 2905 bp, Vitis vinifera
  Intron number 2 from transcript GSVIVT01036010001 (locus G SVIVG01036010001) derived from phytozome v7.0 (chr-ID chr4 ; pos 7152281 to 7155185)
ttgctaattcagaggtttttttgcatgatttttgatgatggatatggtgattgaaaagagtgatgattacccttggtcctatcattggatggtgcttagtaatggatgtaagttgtgttcatataatctttttgaagaaagtattttgtgttttaataccaaaagttccaaattgttttccaagttgaggagattgcagtcaatgtttatttattctacctgatagaaatatgaggagtcaagttatcatgcataactagttgttttgcatatagaattgtaaggaaatataagacctatgtgttcaactattgaatagtggatgttgtcttgcattttggcatgctgaaaagatggatgttagcatcatatagttaaagatgtgttataaaatttcactcatgggtggaaaaattccatatcatggcatggcaggatgtagttgaagcaagaactcatggtgggtagcaccaaataggagattctgaagcattcccataaacgctgagatcagatagtttagaggccagaatgattagaagtaaacctgatcgttcaatctcaacattcccataaaaaaaaaggggagcatgttatggcaaatgatagatcaggtagacattagcatttcactgatattggtttatcctttgaaaaatgtgtatcttacagtgtaaataacatctataaaatctttgatgatttattttttaattcacctgttcttatttcatttttgtggttttatttattcatgcaacaaaagtaattgggagcttccaaaactaaaggttacagctttgtatgtgaatcaaaaacaggtttaattatagggatgttgtatttgttttgtaaattaagtctagttctattgaataaacaagtttctacatattagcatagacacaaacacagatgcaaagcaggtgaaaaatataaatagaggcacctcagtgacaatttttcctaaacacaggactcgaacagcataacagcttgaaattaaagcttatcaatccattgctattagtaggttaagagaagttctcaagtatctttatgacatttaaattttgtgtgatattcttggttcttctgctgttgagacctgttgtttctattgacttcacttggctgctaatggagcagatttccttgctaaaaggagagcatcgatactgcagaattataggcacctttatctcctcagttcttgggatgctgtcttcctgctaggtcttggttgttactcttattatcattaggtatcctatattgaagtccagcttttcctccatgaacctttggtacatgttagaaacatttgtctcgccttaaaaatgttaagcctgtttggtaattgtatgcttttctgatatttattatgatagtttcactgcacaatgacatatacacattgctgcttaaatgataagtttagggttttttttgttgcaatagggtttgtaacttgcagtcaaaggaagaagtgagaagatagcttatgatatactccttgtgataagctccatcttgggaaactcatcatctctcagttctgaagtatcccatcagaagctgataagtatggcaagtactttacagatcctactttggagaataattgacttatgtggttttctttcccatgctctatgtaatgttgttgcttctacttgttttgtactgtaattttcattaatcaattatcaattattttgatggtgaagcaccatttgttggaggaaaataatattaataaagttgaacataattaattgaactctttcacttaagaaaaacatccctttggaacccttcttggttgacaagcttactattatgaggaaaaaaactatcacgggagtgaaatgggaaaaaaaatccttacaagcaaactttgttggatatattggcgaactccactcttgttccttgcttctataaatcctataatgcaatacttgaaatcaatatctatctactgattttttaatgagtttgagatagttttggtaattatgactattaattaactattttgacctctttatatcaatggtcgcaatgagtggctgctgcttccttttaatggctaattgtggcataatgttcagataatgagctacctttctggttcatctccttacataaaaagtggagcagtgtctgtgctatctgtactggtatataaggatacagatatttgtacttcagtacctgatctggccccttctgttttagctttgctgcaagggaaagctgttgaagttgcaaaagtgagtccctaactcataatccagattgttggttgcagttactctccatcactctgcttctcttcagggcttttaccaatttatttgttttcccaggttctttcttgtgtgcttgcattcaatcttaaaatcgtcgacgcaactgattatagctttaactgcaactatttctttgtcaatggcctcaacttgtggtgagtatataattagggacgattggaatgttggaatttaagaatgggagtgagtcctgagtcctgatgttacagaaaaaagaattagctgtacctttgattgaactgagccagtttcttttgtggcttttttgttagcttccttggcatcccaaaatagtagtgtttttattttttctttttacaaaaattgttgtagtacaaaccatcttaagttttgaaccatcattcatcttctgggtgatttgctaacaattggtatttcggattctgcagttcatgctaactattggttcaacactaatgtatttcattggagctcatttcaattggcatatattggtggtaataggtaagttcttttcacttgctctgtattaatgtgatctagaggtagtttttacagaacaaccttctatctgatacactgtc

SEQ ID NO: 11438 - DNA, 2667 bp, Vitis vinifera
  Intron number 5 from transcript GSVIVT01012068001 (locus G SVIVG01012068001) derived from phytozome v7.0 (chr-ID chr1 ; pos 1662776 to 1665442 reverse strand)
ctggaagtgtaactggattggaaagcgcttgaaaaaatgatagagattatgaaatggagtcagcttcaaaatgttgggaacttgaaagaagcttaaagccagacattcacagaaactagttcaggcaatcagaattcagaatcaaagatagtatatataaacattcaaaggtcaaggtcaggcatgtctgtccttttatcattggtcttgtagtttggattaactgatattcttttggtgttttgatgctgcctgctttgaatgggcttatgtatgtttttgacaaaacctgtttactcatctacagagtattctctctttctgcaatcttcatattctttcaccttgacctgttattctcattgaaatgagcattactccacctgagccaccttagaattaaggtttgatttggatttggcttttagaaaacctctaaagcgaaagatatgcttgtgtctactgcaatgaagattcttaaagataggagttgttaatcttcaagtgtattttcatggatcatgcttcttcccaggtcaacttatacctcacttaagggtagtcaattttggtgatgtggagattgtttctatgaatttgcagatgggtttgatttgtggatgtccagaggaagatgtgacaaaagttggatgaaataagggcattttggcaggagagcagggtgagtaatggtattatggtgaactagttaagaatattgctctatggctcttgccctacaaattgctctttccaaactaaaactaaatgaaataaaataaaataatcaatatgttgggctctaaaaagaaaaaagagaagcttaggcactattaggtaagtgtttttctgaaaatagttctttgttttttaaaataaaaaaaaaacaggaaataatcagaaaataaaaagtaattttttgttccttaaaatagaaaaaagaaaagaagaagctcaggcactattaggtaattgttttttggaaatggtttttggttttttaaaataaaaaaaataggaaaacatgtcagataataaaaaatatttttttgttccttaatatatgaaaaaagagaagcttatacactattatgtaattgttttttgaaaatggttttttgttttttaaaataaaaaagggaaaatgaaaaataatattttgttccttagtccttacaatagaaaattgggaggtttaatatcttttggttgttttcaaaattttaatgattatttcaaaaaataattatataaatatagaaaatgattaaaattaaagtattatttttgaaatatatttaaaaatataaaaaaaataggtaaaaaaacgtttccaaatggatttttttaataaaatactaaaaaattgtttttaaaattgttttttagaactgttatgtgaaaaaaaaaatcatgaacaagaatattgaatatgaagaaaaatgaatttaactagtttgaaaggaaaaattaatttattaattttaaatttatgttttattattattattatttatgtttttttcctttcctccattgcctttttcttgtattttcctcaacaaaacatactagacactacaaccgcattcaaaatttgaaagtgaacaaacctaatatgagagcgtgaagaacttgctccttgactaagcttccctgatgaatgggtttactctattttaagacttgtatttatgatttttgtaaatatttttctatcattttcctttttagttgcttcatttaaaaataagttgtttgttttgattagagagaattggataaggttgaaatgaggtgattgtgtataaaatatctattggttcaattgttgtatttttttttttataaatatttttgaaatgaaaatcacctataataaaataatagatatggtgtaagtatatatttttaatgtttggatcgagttctggttcggtatttgtaacataaactcaatttatatcgagtttataccaaagttcgggtttaatgaaatcttgttaatatttttatggtattataatttatatcaattatattaattttaacatattaaaaaatataacctttcttataaaatagtgcacttatattatatgcataatttcataaattattgatagttaaaataataataaaatatttaaaaaagaaaaatattgaagtaaggatttataatatatattatattttgatgtatttgggatattttattgttaaattaataaaaataatagttagataaaattaatatatatttttagatttataaatattaatctaattttacttttatcagtttatgtattagtaatttaaaaaatagaaataaaaataaaataacttagcctcttcccgcggtaaaggcaacggttctgctttcagcaacctcttttcgaagggaaaaaaggagctcgcccggaatcgttaaatttaacagaatgtccgcaatattgctcattttgtaaccggaaaatgctgaggactcttcgttcccggcgccgtcctcgttacggtgcacaggtgtgcgccgtcatcgctgctcttcttctcctcttgtcggtcacagttctgcacagtcgccttagcttctctcgcgactcccgcctctcccccaaagtagggttagggttacggtttccaaattctaaagttcccccaata

SEQ ID NO: 11439 - DNA, 6329 bp, Vitis vinifera
  Intron number 9 from transcript GSVIVT01034615001 (locus G SVIVG01034615001) derived from phytozome v7.0 (chr-ID chr1 3; pos 14270343 to 14276671)
gtagaagacagatcaagtattgcaggtactttgcctctatataattacagatatacagttaagtgttttgttacatggtctattgggccatactcatttagcatagtaaccaaaatctctgagtaagaagctactttcaaaattaagtgacttcccccaacccccaatgccccagcttacatatggcccttatatttctatcatctttaaatattcgctctatttgttccaaactttactggttcacctatagtgtcattacattgtggatttgatttttgaggttaagagaatattaggatagggcaacaacttatttactcttgaactttccatggagttgcttttgctttaccaatagccaatattgtgttttttcaaaggtaaaatgcatcatatatacttatttttatatggagaaaggaatatttctatgtagtacttaaactaaccacaaagtttttaagtagatggctaagttaccaaatttggtctcaggtgtcaactagatgaaagctaagtagaataaaatgctaaaatttaaagcatattgatgacatgagtgattctgagttttaggttgagaggactgaactcaacctttttcatacaggagtttaaatctgctgagttggtaaccaaatcatggtattaagtttctcagttccttcattccaggatttttccttataattttgaaaggtttaagttgaagcaaatgaggtggtatgactttagtacttcaaatttcatatgttgttcttgaaacagacaaaacactaagcacttattcacgcttgggtttatgcttaaagctcttttccctttacatgaaatcaagactacaagttagccatcagataaataaccaacctaaatttgaattgaagatcaaaagccagttgtgataggagaaaaattcaaaatgggcttttatttcagaacaaacagttcaaagttaagatggcatcagagcttaaccctggctgatcactaaatcattgactattgaagtatatgttagaaaatgtgaaaggaggtgagaacaccttctctatatgttcattaattttcagaaaaaataaagagcaataaactatatactgcactcctaataaccctattattaaataatggaataataccctcagtaatagactttaactctccacttaagctaaagcacaaaaattttcaatggccaacttggaatagaaaaataaaaacaattttttttgcacagaatgttgaactagcaattttcttaaaagcttaagcttgtaggatttaagctcatgatgtatatcatgcactctagcaccctccctcatgtgtagtctcttttgggcttacatgtaggcttaataatttgaggaaataaagtaaccttttttagcttaataaattaaggaaatagatagtggtaaggttcaaacacacgacctcttgctaaacaaggctctgctactatgttgaactaccaattttcctaaaagctaaacttgtgggatttgggttcactatgtatatcatgcactctaacatagaacataaaaaaatatatgtctaagggatcttctaatttgacataagaagtaattaaattacctttcataattacttttcaaatgaaacgataatttgggaaattctactctgtttaactgtatattaggatctgtaggtgtatctattggttttaaccttaacatagttgtttgagtaaatcttgctcatatttactccaagacaaattggtcctttcttgctacaagtaacctaaattcccaagaaatatttaagtagctctaggtcttcagtttgaaaagtcttttttagttgcattttcaactcttcaatcctacacaaatcataccagtattttattaatataaacaatcaataccacactacttgaccttatgttcttcacattggctaagtaattagaatgacatctggaaaaacctagagagatcagtatgctattaacctaatcaaaccgagccctatgttgactgagccagtgaaattaacaggtgcaaagaatttaatctagccacaagcagaaaggggtcaaactctatgtatacccccttggtaaccagttgtgtttttaacctttcaatggtatcacatggacagcatttgacatcaaagacctacttgtaatcaacaattttcttacattcttttaaggtagctaataccatgtgccacacctgcacaagacattcatctcttcttccaaaagcaaatttccaatcaggatgagaaagagcctcatagtaaacattagtaatagcaataccaaatagagaaataagaaaaaattgaacaagagaaaataactaagcaaaacctaggtggttaacaagaaagtgttgagtggtagttattataccttttcaaagaacaatacaaagattagcattatatgaggctatggatttactagttggagaaaaacctctatcagaagttggccttcgaacaatgggctactcatctggaggagtaatctcccttgcagccacctttttttttcactttgacctgtaaaggtttcttagacacaagaaatgcgaactggtgacatcctagtttgggcataagagtaatgggtggatgaataggactaagggaagaaaatagttgtgttgagatttgaccttttagaggagaaaaaggaataagttaaaagaggttacattttcattgactaggtatatatttgaagtaggataaaaacgtttgtaacctttttcagtgttggaataccaaagggagacacacttgtagctcgaggggaagtttatctgaacctacaaccacattgtacacaaagcagacaattaaatacttgaaggggaagacaaaactgtggaagattggatataaaatagaatatggccaatactaagaatagtaaagtgagaaaggattaaaaagaaaacaagcagtaagaatagcatatccctaaaaccttttcagaacttgcatatggaaaagaagtgaatgggaaacttccaaaagatgtttgtttctatgcttagccatctcattttgttatggagtgtaagagcaggatgattaataattccattaatttcataaactttgcaatagaagaatatgaagtttttagagcattatttgaatgaaaattttgagtaggcacacaaaaatgagtttttattcctttggaaaaagactaaagggaatttttgatttgtctctaactacaactaagtgactctagactaatcatcaataaaaattaaaaaatacttaaggtatgtgtcatttgtaggaggaaatttggtaacttggaggagtgagaaacaaaatgtggtcttagtgtctagcgcagaagctgaatattgtgtgccccatcatgcaacaagggaacttacttggctaagaattctcttaagcgagcttgggtttggtcccaaaaaacctatgatcctctttggtgatgacatgatagctattgagattgcaaataatccaatgcaacatgatcgaactaagcatattgaacttgacaggaactacatcaaggacaacctagattctggcatgataaaggttccctacatcaagagtgcagatcagttggatgatatgatgactcatgctgttattagtggtctattctatgcatcattatccaggttgggcatgtgtgatatttatgcaccaacttgagggggagagtcggctgtgtatagttgttcattgataccttacatcaaatacaagagagggatacatagaatatacaactataacagctgttaatacacggctatatcaactgtgagaagatcccttaaaatcaatacagccgtaacaactataacagttgcgagaatatctcttaaaattagggatttacatggctaaatctaaaaaataaaaaatatagtcagatcccaccttatttgaggtcatatatttaccaaattaaaactaaatatctcataattaaataggataataggtcaaccaaatctggtcattaaaaccaaatttccacatcttacaaaatgggaaaaaggaaaaaaaattattctattgtaggcttagacttacttcactaaatcaaccactaattacaggaaataagtactcagtcaactccactgaaaaagaaacaaatccaaattaaatcccatctagtaaaggctatataatctggcaattactgcatagatattctccaacaaaaaggacaagcaatttttcaagagaaaaaattggggacatccaaaaagaaacagaactctaaaacaagtacaaagtgaaaatacagctgaatgcccatcataagccaaaatgaaaaaatggtagtctatatgttatgcttttatttaactctgaaaatgcaataatcaatatacagtatgaattgagtaaattaacttgtggattatgtttttcctctgaaaatgaccccagaggtgctgagctccaggcagtttcactacttgtctgttaacctcaaactctactggatgatgactaccctttccaatggatatgggagaaatgatcaaactccactaaaacaaagccaagaggaataaaaatctggtttctcaaaagaggtgcccatgttatgtacatttgtattcccttgtgcaaatatctcattttccattagaattctcatttttttgccctattattatgctgtacatagggtcaatggcttgacatgataaaaggagaataattagttgaaactatagttattctcatgctagctatgccccttctaatatcttacatagaagtaggtcaaacactaaattgccctttctttttttgtttgtctcttggaatcacaatctagagtcaaatttacaatttattgttttctattaaaaaaaaaaagaaatctatattctagaagggaagtcaaaatatacaatttctttgagtttgatgactatattgtgtatgtgtgtatatatacatgctattagaaaagataaacaacatagcaaaatgttttatattttaatatatgattttagaacaagagttataggtttcttggagtttctaatatgaattaaatattacatgatatttattctacgtaattgacattaccttgttttctgttaaattataacctaatcatgaataatgtttcttcatggtgcaatccacttattggagcggaagaaaacatgactaagaaggagaataagggtgctaagttgagctaatattataggtggaacacctagaccttgatccaaaagagagactggaattgcaattaaagatgaaatttattcacagtttgcaaaaaagaaaaggtactggctacaagcttgggcacccttttataagaaggtgagatgccataaatagtgaagctcatcactctttgagttggagagctcttattttgtcataagagaaaaatagctaaaacaactaatttatccttaagtgattaccagattcatgaaagaaatcacatgacataccgagatcacttattcacaaactaaacacttaaataagattccaagcttcaaaacaaaagcactggaatagctgcaatcctgaatgttctctttaataaggtcgcccttgccaggctcttcgcatataactcttccccattctgctggagcacagctatgggacgattgaagtaatgaggcctcttggctttctccaatgtgtttctttgagatgttcacttaccttcagcaagatgaaccttaacattatctgcatccgtccctccaagtgacaggaggcttaaactctagttagtatcttgccacttggagtaactattatctggtgtagacaatgagcattgcaaatatccagtatgttgacaaaatttggaacctttaatgtgtttacactaccataatctcttcaaaatcttcacaaggtccaatatttttgcactcagcttattgtttttgattgccagttgcctctccaggattaaatcagcccacatagtcatcaaaattcagtaaattgtgggaatctgcttgacacttttttgtaaacttcagtggactatgacataaggaatttccttttcataatgagggatagaaattcttttgcattgctgtggtgttagattattataaccttttgcagttactaaatggttccaaataaattttcaaatacattctggttttttcccgtttcctcttttattctgcctctagtgctgcaatcttcagcaattcatgtttctttacaaaggtctaacctcacatcttctctgtgtagtgttagatactgctgctggcgtctggtgtgacacg

SEQ ID NO: 11440 - DNA, 4100 bp, Vitis vinifera
  Intron number 2 from transcript GSVIVT01021154001 (locus G SVIVG01021154001) derived from phytozome v7.0 (chr-ID chr1 0; pos 1882910 to 1887009)
cgcatctggatttgtgcgaggaagaagagcttggggtatgcttgcttactcataaaaaggaggaaatagaaatgaaaataggggtcttgtgtggaaaaattatagtcaactaggataaaaaattaagattaaagggggttgtgtagggttagctgttcgaaagggtgaatataccaatatgaatatgacatgcctggtttattgtcgcgcattagccagtaggatatcactaagtacctgttgagctggtatcggttgctctcgaggatgattaaaggaaaagaaaaataataacagttcaccttacacttcggccttcttccatgactatagaaaatcccaaagctttcagtgcttttagggttttgagaccgaaccctggaagagtaggataattgagttcctataccattttcatgatgcacagtttggagcaatgtccttcacgcaaactgggtgtcaattgttaaagaagtgcgggagattgaaaatcatccagtttgctccctctaagtaagaactttggcgttctcctctttccactatgcccttttagttttattcggggaattgatgattacagtgcaatctgtccttgggttagtctgccttgattagcccaaaattgaaaagggtcactgatgagaagcagatttttaacctacttgcaagctagggatggataaacgaggaaccaaattagtgaatgactaaagcgagacatagcatctttctgtttccctcatgggaactcccatatctagcatgaaagctccaccacttgagctattttatttagaggaaaaccctcagtggaattccctaaaaggcgtaatattaaatggaaagatagagctgaattgaggctccccatctctttcctcctcctcctcttcctgtgtgtgtgtgtgtattgaggcttctcctctgtgtgcgtgtgtgtattgaggctcctcctgtgtgtgtgtgtctttctctctctgtgtctgtgtgtgtgtgtctgtgtttgtgttacaaaagttctctgatatggaaagctccctctgcccacaatgccacttgacgttcagaaccttccataatggctctccagaggaagattttgaaccactttctcaattccttgatcctaaaggctgtctacaaaagttctctgatatggaaagctccctctgccttgggactgaactgttgagctgtaaatagaataggagaattattttcctattatattagtttcctatttctgtaaataaatagttttattagtttcctatttctgtaaataaatagttttattatttaggaataagttagtttaggaataagttagtttcttattatgtctcttgtaatctcctatataaactgtgcgtatagtcaatctaatagacataatttattatttttcatcccatatttcgtgtcatgaacctttgcccacaatgccacttgatgttcagaaccttccataatttctctccagaggaagattttgaacaactttctcaattccttgatcctaaaggatgatattataaataaggaatccctgtgtgctttgtggcctttttgccctttaatatatctgtgtttatctataaaaataaaataaaatattataaataaggaataaaagggaattttgataaaagtcaccattctaccctcagaaacttgcccttttaagagaaaagatcctctcatacttctaaagaatgttgcctcaagtgaaatggtttctcaatcagctctcagcagaaggtcaaacaacaaaatatgatgtttcattgcctagaatgcaaatcccttactgaaatccaagaaagcttccatgttttgttgctaatgattggatgcttcactaaggttcaaacattcatggatgaacctgagatgggagacaactgcaaatgagagttattaagagactaccactagctccttgtagtaattggtccatacatttgatgactggaatgacaagcgaataatggatttctctgtcaacaatctagacatggggataactgaataggattgtgagtagtgggtgctaagctatggcaggtgcatgcacatgtatcgtttaagttggtacagatataagttttggattttgtgtgtttaacataggtatgcatatcagtcttggattaaacacactagaatcagggccaaccgttaaggagtgttttattggtatcgacaatttcagtccacagttgtgttttcagatagttagatagccttctgcattcaatccgtgatcctttttagtgaagttcagaaacttaattgcattttcagtgtcaggttgtttgttgtcagcaaggattataagatgaaaattggggatttttccatgcattgagcattaccatttaatatattctgatgcattaaaaatctgaattttgagaaaattacattagcatataatttgaaattttatgatgcatttgcatagtttgtttcataagatatatatagggatagtggaatttgttggtttaaatatataatggcattcattgcatgcatgaagacattgtttttccttatgatttagataatggcattatttgcatgttatttgtgtttggttatggttggtttcaggacgtagataacatatggtaactgtacatagaaaatttgtttggtaggttttttttcttggggtttgaaacgatggtataaaacttttttttttttttttttgattttttgcattgaaatgtggttggctggctggagtaaaaatgttttgaaaacaaaatatatatctcaatgagccgatcaatcgagctccactagctgaatgattgagctctatattttctgaaaaaaatagttcttaaaagtagatcaattgacccacttttttggactgattaagcaatgtattttttttaaaaaaaaaatgtaatcaataatttatttatgttttgtagagaaaaagatatatttttatatttaaacattgttgtttaaaggaaggttaattaaattaattctctagggttttaggtacacattttcaattgaagatctctttagagagaattaattaagagtaggagtatcgtagacaattatttgtggaccagtttacactgagtaaagtttattattattatttttattggaaacagaattgtattaaaaataaataaaagtgcatgagaaggatgaagagtcctccccatagttacaaaaagctgataaaaaaagatgaaactttaccacaatacaaggagacctggccaacctgtttggactctgagtaaacattattaccatgtgatgaactgtgtcatctatgaatctctacaaaaggcctttatacaaattattcgattgggttttggaaagttggatatggctacacttggatctgcctggccataattctaaattcctaattgcatgatatcactagtgctgaagacactagttctttgggtgacatgacagggatatattgcggtggctccgttatgccttctttggcttccttggaatgagaggactggaatggtatttgtctttgtccaagcttaaataaggtgtatacctttattgaatctttggatctcagggaatgaacttcccttggtggggtttgcagattttatgtactgtgtagtttagtttcgtttttttcagtgttattatatttcttttgccttttctgagtccttttatactccctacatacttggtttgtgcccttgtttggaactttaacagaataatattccttatcagaaaaggatcacatgttttgttggttttgctgattctcattatttctgttcctctttttcgtcttacttaattgagcttaaaggttacctactattaaatgttgtcatggtcttgggtagttaatataacatgttttaagcaagtcattcttgcattttcctgttagataagttagtttgttatccttgttttcacttgttatgcttctatgatcaaccatacaccctctacctctctttactttctattcttttcaagtcttgaattttcattgttcatttatgtgtacaggttcgagtacaagcaattcgtggacttcccctttt

SEQ ID NO: 11441 - DNA, 19762 bp, Vitis vinifera
  Intron number 8 from transcript GSVIVT01029404001 (locus G SVIVG01029404001) derived from phytozome v7.0 (chr-ID chr1 7; pos 16376080 to 16395841 reverse strand)
cagaacttcctacaggctcttggacgaaggtacaactttcaccataacagttgcttgtttaaatgtttgtacatgcaaagattttgattgggacatgctgcaatccttgtatgtgcaatgttggttggttgtaatgttaactttttcttagagctttttctttttttcttttttttccttttttttcatttttgtgattgttgatcaccattactaaaagaatgaattgtatggaatactttttgataacaaagaacttgcagcatgtgtgtgtcccacttgtaatcattcattaaagaggatgttgtttcacattgaattgtaatatttaacacttctcttcaattctaaatatttgaatttacaaagtacaagttgtaaagtttggaggggaaatgtatgtgaaaaaacctatgtctagtagggtaacacccaatggggggtgaatgggtggtttttaaagattataatataagaattaaaaaacttgatccaaattaaacctatgagtgggaattaagcccttttaacacaattaaaccctaaagaaatcgggaatgattaaagaacaatcatacacatacgagacagatttttacatggaaaacccccacactaaccatggagataaaaaaccacaaggtttaagatctctaatataaaatccactatttgagatcaggatacacaaatttacctaactgttttatcttaaagacttattctctagtacctatttcgtgatccatgtccatgatacaacacctcccatgctctaatggatttgcctcaatttttgaggagatgcaagtcctttcaacaacctgaagattgtatattagatacctgagagtttagggaatgataaggcaagttagggttgattctctcagagcatccccctaaaacacatttaggtagggtatatataggagaaaacctagtggatttggattcaatttagaaatcatattttactaaaaacagtttagaaactcaagagttttaaaaagatttggaaagatttcatattttaaattaaaaaaatttggaaaatttttatttttaacttcttttccaaatctcttttgcaaattccttaaaagatttagaaagattttcttttttaaattctcaattcaaattatttccaaattaattaagacattttagcccaattttaaaatttatgatccaaccctaccttatcagaaaactaacttgcctttactcaaacctttttagacttacctgtgatggtccagttgtctaaatggtaacctcaaatcttcaatggagagtaagtcattgttcaaaaagattcctaacccataatgaaaaggaataaaattgacaatacataaaaatgtcctaacagtatgcattctaaacttatgtatatgtagacctttaaaaccgcaagaaaagactatctgatgcaaagtttgcaatgttagtttcacttaaaaccattttagttcccaatgtaattgccttttttccatatatatctgtggaatgcttaacttgcaatattaaatactttttggggccccattatgcagtaaaacttatttatttctctacacactcaacgaggtaaaaaatctcctagaaaagagaccaactactttactcttgtttggctagatggttcgaaatttgagtagttgagcatagaacgcaagtaaacaaacatcccaactttctagaaatatctagtcaagtcatccattaaacttcaactaacctctcttcctcttagatgcccaaaaattaataatggtagaatttctctccccacatcagtttgaaaggcctaagcattaacattcctttcttagtggccaaaccctctttagcaagtttatagtaacctctcaatgttgcacctaatggtgtttaagcatgctacctatatgtaattgtcctaggttacccaaagagcacctatcaaagtgttgacaaattagttaagaatccctatagaataaggaagtcaaaggctgataattagctggttttcaaatatagaaaattacttcttttttttttccaattttttccatgtctaattccttgattttaggaagttagtttttttgttttttttgttctatatagatgcctatcggattgtatagaatcattatccaaaatacactaatacgtatattcaacttcatggtataagagctttaggctctctcattttttggttatttcttggtttcaaagaattttgcaactattgatcttcattgccaatgctgaagaacaattgtcatcattcttttttttcatatcattctacgtggttacaaatttatcttttacccaacacaccacattggaaattttttaggtaaacaactagattgtggcatttcaacacactgtaggcatagttttaaaaggtgcaaggctcacctaagacacacacttgagtgaaatgaaacccgacttagaatgtatatcaattttataaaatatgatgtaaaatctaatccagttaataaaaaatttaaaagattttaaacatttgaaagaaacattcaacaaaaaaaaaagaagtaatgaaactctataaattttttttgatagaaacgacaaagtaatatattaatagaaaaatgaagtacaagagaaggatgagcaatcctcccaccaaagaaaactagtctacaagaaaccaaaaatccgaaattacactgtaataacgaacaactactctaggctaaaccaacccattggaactacacgctgctaaccaatcaagttgtaacacaataagggggatttccttgaaaaccttggaacaaaaagtccaaagagaagcaaggaaaaaaatagaatcccaaagactctctggattctttgctttatcctaaaaaatcctcacatttctctcccgccacacaacccaaattaacgctatgcacgcagcttgccataaaactatccctctcctcgataagccaaagctagtgaaagtgatggatagcatgtcggaaatgctcctcgggggaacccaatccatcttggctaactgaaataatttgtgccataaccctaatgtcaacgaacaatgtaggaaaagatgatctgctgattctccatgcctcatgcacaacttacaaatatccggactaagggctttgtgaggtcttctcaattgtagcaagtcattagtatttaccttcttgtgtgccaccaaccagacaaagaacttaaccttgaaagggacctgagaattccaaacgaacttggtagggaaaactgaaggagaattagggcaatgagataagacaagaaagaaagacttgattgtaaaaagccctgaagaagataaagacctggaaccgaaaatgtcaattgcaaacactcaagtgatcgcatgagaccttctaaatcttctatctcaggatcgaataggttgcgacaaaagttaaagttccaagagaagggacgagtagttccaagaattgaagaaatgggaatatttttatccgtgactactctaaatagtcttggatattgggaactcaaagattgatccccccaccacaagtcttcccagaaccgaattgtatccccatttcctaccgcgaaccgagtaaacttggaaaactcttgaaagacttgtgtaatagccttccaaggacaacgatgtgaccatcttactattgtgttggcatcccatccattagaatgtgatccgtaaatgcttgaaataacctcgtgccatagagctgaaccttccctagggtatctccacaaccatttccctaagagtgcgacattccttagaactatcatcccaaaacccaaaccccctattgccttcggtttacacactacatcctagctcacaagatgatctctttttccttccccaacccctgaccataaaaaatccctttgcaatctctcaatctttgcagccactgaagcaggtatcttaaacaagaaaaggaagtagcaaggcatgtgggtgaggcaagattggataagagttatcctaccaccaaaagatagaaaagccttttgccacccatctaatcttttcgagatcctctcaatcacaggatcccaaaagccacaagccttgggattccctcctagagggagacccaagtagtgaataggccatccagaagccttgcaatctagcaattcggccaacctagaaaggtgattttgttcaagattgatgccataaatgttactcttgtcaaggttaaccttaagcccagaaatttgcccaaacactagcaatagactcttgagagtctgcaaatcttcctcgctagtgttagaaaagaatatggtatcatctgcgaattgcaaatgtgacacccttgtactattccgacccaccttgaaaccctctaacaaatttctttcctctgctctcaacaacatcctactcagtatatctgctactaaagtgaacaaaaagggggataaaggatcgccttgtcttaagcctctagatgccttgacccaccccttagcatttccattcactaagactgcaaaagataccgaggacaaacaacctctcatccatttcctccatctaggactaaaccccttcttctccaacacatgatccaaaaaatcccaactcacatgatcataagccttttcaaagtcgattttgagaacgattccttcctcccctgaacgtcttttctcatccactatctcattggctatgagaactgcatccaatatttgtctcccttgaacaaaagcgccttgagtagaatgaatagtctcgtgtaatacccctcttagacgtcctgataacactttggctattatcttgtaaagactagtgatcaaactaataggtctaaagtctgagattttctttgtcacactttttttgggcaacaaaactatgaaggaggcattagtgctttgattgatgatcccgctactgtgaaactctgcaaacactctcactaaatcctccttgatcacatcccaacaatcttgaaacactgcaatggtaaagccatcaggacccggcgctttatccctatccaactgagatatggccttatgaatctcttcttcagtaaaaggggagtccaatctaaacgcactctcttcggatataggggaccaatctaagccttcaactctccatggcttgccaatatgacccaagtaaagcttttcaaagtaatgtaaaatctcctctgtaatgctctctgaatcattcaacactactcctctttcattttccaacaccttgataaatttcctatttctccttctattagccactttatgaaaaaactttgagttacaatccccttccttaacccatttcaccctgactttttgtctccaatgaatttcttccctcaagattaattcctctaactccccttttcttaaagctctttgaattataagttcagaactgagacccccaccttgctcaatgacatcaaggttagctatatctttcaggatgttttttttcctttcatttagctctccaaaagaaaccttattccactctttcaaattggccttaacaaattgtaatttcctcatgaacttgtggccttcccacctagttccttgaaagccactccaccaacttttaaagcactctttgaagctaggatgttgcaaccacatattctcaaacctaaaaggtgttgggccctacttgaacgggttggtttccaaaacaacaggccaatgatccgaagttcttctaggaagaacttcttgaaggctttgaggaaaggctcccactcatttgagtaaaggaaacggtccaatcttttacacacgggagactcttgcatgtttgaccaagtgaatggtgcattccgtagaggtggatccagcaattcacactctcttataaaatcatcgaagtccttcatgcttgaagttagattagatcttcccaacttttctgaacttctccttatgacattaaaatcaccgcctatgcaccataacggaaaagagattccaaaaatgtctaacaactccacccaaaaatccttcctaagtgagggacagtttgggccataaactatagtcagccatagaggtccacatccgtccaaagcaaacttgactgagatcgaaaaggatcctattaccacctcctcactacgcagtttattggagtcccaaatgatcaaaatcccacctgaagccccgctcgccggaagcgcggcccattccttatttctgaccgtccaaatactacccacaaaccttttatcacattcctccttttttgtttcctggatcatcactacattcgggttctctaacctcaggaaatctttaaccacccttcgctttttccttgatcccaaacctttggtattccaactaattattttcatagaaaaatagttcagcccctaatccccaaactaattccaacaggtctcacaaacctatagggtgtctactcttcctcctggaatataccttgatatccagagagcttaaaagctcaagcattttagccattttcctgggagataggccttcaatttggaactcgcccgatggggataccgcatcaagcccctgactgactgtaaccaagttggacacctcactgggcaacttgggtttagacttaaagggaatgagcctctcgggccatgggtttgaacaagcaggttgggactccaccccaacaaggattggattgccaacacaattttgacatgaagagccaacatcatcatttttggataaaagttcgggaattactcgattttccaaaggaaatggagactgaaagactaaactagagggaaagtgagcagaagtgctcagtaatggaagaggaggtgccaacctagaagaaatgggaaaagaataaaggggtgactgagaggaagcagattccacgttttcccctaccgacaatccacaattccctaaaaagttgagccctttacctctgatttctggactagaaggcaaatacgtgattgaaggaccacgaagatcgaaccccacacagcccaaaaatccttctctatcttcttcgaaaagtgatttgcgggcagcctcttcgccactagccgacaaagccccttcctctgaaccccactttcgattccttgtcaatcggctaaagaagatagggctcgcgctggctcctagatccttctgagctccaaccccgaaagcctcctcctttggagtctcttctctatttggcgatggcatcccgatcgaaataggctcgctgcagcttcaagagccatgtcggcgagtggaacttggcggaaatagggtattccacaacttctttgaaccgaacttcatttccttcacttccttcttcgcggatcctctagcctgaacatcaagatcagctggaactcctgtcccctttccctctgtaaagactcctcttcgtaacgatccctgctctccatcgggcttcttttctcctattccttaggccaccctcaacgggctttttaagttgcagcccatttttgcagcagttagtgggctgaaaatggagagagtctgggcctctctcacaaaggcccggccattctcgactgtgagggcctcattcccgccagccgaagctttgcccgccgccgctgtcccctcaggcccaaatcttagtttttttgaattcgaactgaaccagctgttccccttactttggccatttttaccacatgtccccgctggaagagcttcaatcgaactcctttctccttccttctcatttctaccagcttccccaacacggcaactacctccagccgttgatctgtccctctcctcacgccttccaccacctgtcccctgatgatatttagaacccttccgagtcaactcacccattactctgtctctcctggcctcttcttctccaaccattgcgacggaaatagtgaacacccaatcctcgtctatcacctcaatcaaagctggaagaactgaccgttccttcattgcaattcttatcttcgccttgcttagatcaaacaatttcgatgttcgccaattaatttcagtcaccgtcccccactgctccactattttcttcaggtgcacctcagaccagagatgaaatggcacaccccgtagctctatccatcctcctctgaacttcccctcaacaaccgagttttcctttggcgaccaccttttcaactgaactgaaatccccccctcaatcttaataaatcttaaatcctggagaaagagagcttcatctatcgtttctacaaagaaaacaccttttccgcctgagaagggcacaatcatggccactcctttcttccttagacatctcgccacagctcggccaacctcttcccatttaacattatcttcacaacattcacacatcacggctcgcgcccatctcccaacagggacaagtccacctctccttggaccttcgtctctgactacgttcgcaaaagatcgattcaagggacccacgtgattgtgggtaaaccttacctctctgtaatgtcttccatttccagaaacattcgatgaagggaccaccgacaatgaagccagagcgctttttagattctcccaacctctgcctttctcgccctcaggaataaccaaaaaggttggttttctgttggttgcgaacttcgaaatcctaatgaaccttccgtgattgttgaaggaaacttccaacaaatggacgcagaattttcccctatacttcttgttgaaccccaagtgactcttcaactcgatggcttttgtcaactgctcgatcaaccacctaacttctaccttttcaaatcctaagacgtaaatagaacctctgttgtgctctgcaatcgagcaccaacttcctccatactcggcttccctactaacctagaaggtcttcctctccattgagacctttcttgaccacatcatagctagagaatgcaatcaatattactctagatatttttcaatcgtaatttttcctttttcatttagaggaaaatggaaaaatggaaccacccatcttcagggattttgggtgtagaagattgcttccattcagagttttggtggaacacatgaaactctataaattcccatatacgattagaaatttcaagaataaatgtgtttaaaaaggaaaagcaaagtagacaaggcatgcctcttcaacaatgtgcatggcttagcacacaagttgctataactagggagtggttgtgcctacaactgagtattagaatcttcaagtgtcctaccaattgaatgggaggaattatcttgtttggtcacaactagtttgaaccttcttgaaaggtaaaggacaactaagtcatcttattagactagagcctagccatgatggttccgaatttaacatttgggaagacgatgatttaatgattatgttatggttttggaatcctatggaacttgagatcagtggcacttgtatgttcctaactacaatgaaggaaatctggaagctatgagacgaacatacttaaaggtccaagatactacccaaatctatgaaatcaagacagaacaactaccaaacaagatatcatgtcaatgacagagtattgtaatacaatgaagggactatggctggagttagatcattactagaattttaaaatgaaacatagtgaatatgcttctatgttacggttcccatgcaaagctaggcgggaggggatacatatctagaaacaaagagagaatctttgagttccttggctggttttaatgtggaatatgaccaagtttgtgtttaggtcttgcaaaaagagtttttgccatccttgagtgacgttttctcaataataaggattgaggaaggacattgaataataatgcttgataatcaatccaccaaaggttcaacacttattactaccaaacgaaacaatggagtgttaattacaaatcatggtttgcagaataacaacaatggatttactgtagaatctggaaaaataaaggcaaccaaatcaactattaataaagatggtctatggtgcaactactataaaaagccaggacacgccaagaataactattgaaagctttatagaaaaactctgtcatttaaccagaacattgacaaccgaggctcacgaactagacaatgtggaggataggcatatgttgctcattctaataaagcttgccaagagaatgcaatgaacaattctgaaattggaggattcaacaaagcggaaatcaagcaacttagaaatctcctctcatccttagaaaacccaagtggtttgtgttttttggcatgctcaggtaagtattttgattcttatgctcttagttccttaaaagattgtttttgaagttcctagctcattgacttgggcgctgctggccatatgacaatttttttcacatgatttctctacataaagtccattttttcatatcgtatggtggtttagctataatagatggttagggtacaataaacttgtcaccagatttgtgcttgaagttagtgttacacgtgccatagtcgtttgttaatctttaaccggtttatcaaatcagcaaagatttaaattgcaatgtaacacttttccttctcttgatgtatttcaagattgagttaggaagatgattggacatgctaaagaatagtaagggctctaccttcttgtagctagtagtagaagtggtgacaaattaccactctcttatcttttataaaagctctcatccaataaagaccaaatttggctacatcacctctgattaggacatccaccattcttttattgagaaaaatgtttcctttgttattctagactttagatatcgatgaatttgcagagaatattgtttaggaacaagtttgctatgtcttagttttattaatattttgttttttaaattcaaaatagtaggtgattaggaaactttatctctttaaatttttcactccttattttctaattagtttagcctagattctatttggtggttaggttttttttctataaatgtactagttgtttattccaataaatcaagtgagctattccatttattttatagcctttgtttacatggtatatgagttgtaactttggccctagggtttaatggttgaaacaaccatggtgaggagaagcatattgcaaggaggggagaatgcttctctccaatttatagcccacaagttgaatggaaaaaattacctgtaatggtcttagttggtcaaattggtgatttgagggagaggaaaacttggatgcctgactggagccactaaaccaccaaaggaggatgatcctgctttttaaggatgggatgcagaaatcaatagtaattgcatggctgagtatttctatggagattgaaattagctaaacatacctttttgtgcaaactgtaaaggatgttgtaaaatgacatactcagatatgagaaattttgcacaagtatttgagatcaaatcagagctatgtgatacaaaacaaggaagctaatctatgactcaatactataatatcttgaagaacttatggcaagagcttgatttattttatgaggctgattaggggaatgttgagtgtagtatgaagactaaaaaaaaaaaaatgattgaaaagaagagtgtttgagtttctcactagtctcaataaaggcttagatgaagtaagagggagaattcttgggaaggaaccattaccttcaaattaagaagtatttgcagaggttagacaaagaagaaagtaaaggaaaagtgatgatggaagaaggcagagactcggccacaacatccttgaacaccgaaggttctactttgtgatcaaggggctatgagaacttaggtcgcagaagttgagtttaacaaagaaccagcaaaggagaaagaattatgatgtgaccattatcataggccttgctactccaaggagacctattggaagctgcatggcaagttaccaaattggaaaccaagtataccaactgatgtgagaggtttcctagcaaatagtagatcatcatgctgccaccaaatccgagagtactacaagggagaatgcacttaatagggaacaacttaaagagcagctagacaacttatataagctcttaaatcagtcccaatcttaatcacaaccgatggtccatacttcctcatgcactctagcccaaacaagtacatccgtaacttctcttcatcttggtcaaaataaaatgaagccctggatcattgatataggtgcttcagatcatatgacttgtagttcacattcctttatttcttattctccatgtcctagtaactacaaagtaaagatcgccaatggctcactttccactgttgttgaaaaaggttcaataaaaatctcaaaaaaacttgacacttcatttagttctccatgttccaaatttgtcttgtaaccttttatcaatttgcaaagtaacaaaagataaaaaaaaacgtgttattaaattctctccatctttctatgaattttaagaaccactttcggggaatacaattggcaatgctagagaacatgaggagttatactactttgaagaggaagaacctgagtataaaaaggtttactttctagttgtaaatctgattttgtttctaatgatcaggaaataatgttatggtatcgtaggttaggtaatcctagctttccatatttgaaaaacttgtttccattgttatttagaaataaaaatccatgtttgttccaatgtgaagtatgaaaatttgtcaaacacagctgtgcaatgtttcttgctcaagcctataaattttcaaagtcattttcttaattcatagtgacatttgagggccttctagagtaacaattacctttgataaaaattggtttttaacatttatagataaccatacacaagtatgcttgatttatctcttgaagaaaaaatttgaaacttgccaaattttccaaaacttccattccatggcccaaaatcagttccaaacaaaaattcaggttctaagaatggatcatagtagagaatacttccattctatcttggaagaatacctagccaaacaagggataattcatcagagttcatatgtggacattccacaatagaatggggtttccaaaaggaaaaataggcatttactaaaggtttcaagggcttttatgttcactatgcatgttcctatgtacctatggggagaggccattcttactacctcttacttgataaatagaatgccatctagggttctgaactgctaaactccaatttcaagcctcatgaagtcctatcctcgtttcaagtctatgaactctttaccccttcaaatctttggttgtatagtgtttgttcataatcattcacctaatcaaagtaagcttgaacctcaagccatttagtgtttctttcttggttattcacctactcaaaagggttacaaatgctactatatggttataaaaaaattcttggtgtccaaagatgttgccttctttgagtcttaaccatatttcctagagacttctccttagggggagacacaaccaagtaaagatcgtttatgggaattatcattgcccaatcattccaagttagcagctaaagatagtaagactcacacaatgttcatttttgcgattggtgcacgtgtctcttagtagttgaggctataattttaaatgaaaccttttgccacaagccttaccttatacctttcaatagatcaatcaactttgaatttttaggtaaacactcaattacatccaacagtcttttttcctaatgaaagtttagtgagttcctgtgactcattcttatataaagctttcatttcctcttgagcaactgctttccattttgaaattcttggagcctcctgcgtagttttagcaacgtttacataggaaagattagtggtaaaggccttaaaagtaggattgagtttgctataggaaatatatctagatattggatattaagtataaattttgtgttaggatagagcccttaaaaaaatgacatgatgtaacaaatttagaagtcattattcatttaatgatattctagtttcacttttatctattcttattccatgcattatactctatgacaattctaactcaatatttcttgcattgaacatgacttgggtgtattaggagttacatagaagatccaagtcataggttccttgcaagtagatgatttgttcatagttggttcgtggacttagagaatccattagaggttgtagtgcatatggaagaatgtaattaggaaatattatagttgtatatttttgtaattaaggtctcttcttctaggtttccatccagaaatgcatttttgatatcgaattgttgtagatcccaataataatttattgctaatgataacaaaattctgattgtgttcatcttggaaatcggggcaaatgtctctagacgatccacaccatatgtttgagtgtatcctttagccactaatctcgccttgtacctttctaatgactcatacactctatattgaacaatatacacccacttacattccattggctttttctctacgggcaaatctaccaactcccaaatttaattcttctctagagcctccatttctatattcatggcatgtttctaatcttcatttgataaaaccttaaataaaggggtaggaatatgaatattgttcaaacttataaaaaaactcttatgggacagagactacttttcaaatgacacaacatgggaaagtggatacaaaggacgtttagtgcattctcacattcccttcttgatagcaataggaaggttatgatttatgtgtttttcagactaaaattctgactgagtttgtaaaggaggatgagaaattgttaactcatttttagaagttggttcagattcttgaacttgtataagtcctgagactacaactttcttccttcaacacactttgccaatcattcaatccttacgaacaactatgggctcaatggatgacttgggttcagagaaggaaggtatggaaactggatcagatactttgggaagttcaatgagaaagggatcaatgaaacaggaatcccaatccttatcttccttgatggaattctccccttgaagataagaagtaggaaaataagactcacttcgttgcaagtaacatcaactgggacaaaattttggatggtgggtggtaactcttatatcgcttttgagttgaagaatatccgaaaaaagtacatttaattgctcttggatccaattttcccttattttgactatgaacatgcataaatgacacatacacccaaatatcttaggaatgggatggtttatggttctcatattaagataaaatgtcgagattattttcatgggacatttgaaacctaagattctagagggtaatcggttgagatgtgtggcagttaggacgacttcccctcaataagatttagatacacgtttttggaacaaaaaaacttgtgttgtataaaggaagtgaccatttttcctcttagcaactccattttgttgtagggtgtttacacaagatgattcatgaattattctttcatgttgagagtatgaagttaggcattgattgaaataatctctggtgctgtcagaccaaaacctcttaattttgacgctaaactggtttcttatcatgttgtggaaattttggagaacaataatcatatcaaatttatgtttaagtaagaagactcaagagaccctagaacaattatcgatgaaagagacaagccaatgtgcccgagatatattaggacagtagaaggaatccaaatatcactatgaatagatgaaaaggatctgaacttcttttattattggttggaaaggtggtacacttgtgtttggctagttcatatacatcacaatgaaatctctcaacatctaatatcttaaatagagaaggaaacaagatcttaagagttctaaacgatggatgtccaagtctatgataatgaagctagattttatttatttttaattgaaaatatggttcttagaaagaaaatatacaaatgattttcttagtgtctcaaggtagtataattcgttctattccttagcaagttcaatcattttcctcaaatcttagtcctgaaatacatagtaaggtaaaaaatcacattgcaactcaaatcttgtgtaagctttttgtatagagacaagattagttgacaactatggaacatgaaacacatttctaactaagtgtaggactaatttggatttctcctacacctgcgacagtggttaatgaactattagctgtgactattttcctactgtttggacaaaggttatagttcttaaattggtgtgatgaatgagtcatgtgatctgtgacacctgaatctataacctatgaattgacaaaggtttcatccgagacttttcatacaatggaaataggaaacttatctgaaagtgtcagtgagcaaggacctgaaggtttctcaagagttcacaacaaatttctcagtttctcattctcctccttattgaatttgtcttgttgcagggatctttcttcaactggttgaacaaaagataagtgtgcttgcccattatcctttttctgcccttcactatcaccccactctcatgtatgtcttgccttctggcaggaagtgcaccataagttattcctataatcacgatttggaacccttgaccggtcaacccttttatgattagcaatgtttgttttttgatcacttcctttgttggcaaccatagttaagtattcccaattttgaggttcaagcatgacactcctactttcttttgttgggataatagagatagtctcattcaaaatttggagctttttgctaagtatttgaactcttacttggtcaaacttcatattaagaccaactaaaaattcatagactcaatccttttttatataattcttcaagattgttgcatcctcagggcatcttatctcaatgcatcaatgatgatcaagttcttgccatagattttttaacatattggcatactctgtgattgtcttgtttccttattttgctgctccaatcttaacttttatttcgtacacttggtttgcatttaatgccttcgagtatgtttaatgaactgcatcctagatatctttagcagttgttaggaacatacatttgtcattgatttcaagcgtcattgagttccataaccgtgccataattgttaagtcttgctcatcccaagcatcaaaccaagggtcttttctccttggtctagttcctaggagatgacttaatttccatttatccttcaaaaaggtatgaacaagttgtgaccattttaaataattcttcctattaaacttgtatgccacttgaatagtttgtaattctcctatggtgagattggttatcacggcctcaaactaagtagtgatattaggagtttctaatacctaggacattttcttttttaaatataaaagaactttttgagggttatttgacccattgaggataacccataaagcttagttgttctggaaaagcagctgcaatagttgtgtcagaggtctggcacccttgacagtcacggaagtagtgtcagtggtctagcacccttgattttcaacaatatccacaacatagtaggaacaaggatcatctgttgttctcctgatgagttcatgatcccatttttgcaacaatggagagatggagatgcagtgtgaggaggagttgagagacaacacaagggaaacaaaggcatgagggttgtcaacgatggtagagatgatgagaagggcattggtgatggcgcgatttctattttgcggtgagtttgcaagagcaacggtgcaaagatgatgaaaatggttgaggtctttgattgctttcacactaagttcgtgatctaggtttgttgcgtcaatgagaagctgtgtttgcaatgcaaataatgatgagactcagatgagagggaaaccttaaggtcgatgataaaggtcaactgtgatcttcagcttggcaatgaaggccgaaaacttcttctcttcccagatttatgagcctagagctctaataccatgtacactatgaagaattggaaggtaaaagaataaatttcttccttgatttcaacttgtacataccatacccacatattgtacaaaaattcctaacacaaaaaatagaagccttcctaacctaattataccagatcctctggattatggtattgtcctaattctctcctaaattacaaaattatacaactataatccttcctaattacattcttctacaagtagagtacaatatcttataggagctaaatttttaaatcagggagatcattcaaagcttcaggcacaattgtaagatatgaaaccactgttgaaattattgtagatggaaatgaagctgaaaattataccccgaaaggtagttcaaagtatgataagaaacaatagattaatggaggtaataggattttgtcaccttgcttttttttattccaaaagatttttgttgttaatatgttgaggaaggtaggacaaataaattgtctttaggtctatgttaagagaagatccacctaaatctgctaaaatggagggaaagttttgcttcttgtttaatgtctggttttgaggaaaaagtaaagaagattggccagttctttgctttggtagtgtaggatggagttaagcagagttctctaatattccaacacagctgtaaccattccattgaaatgttcaaagatttgatactagaaaaatatgctcgaatttaaccaaataacatttgtttggttccaggactagcctatggaatcttcctttttaccaaataagtatggagtcagattttgcaagaggaattggagaagttgattctgaagtgtaaatttgttcttgtaccatctcatccatgtattggaaaccttatcttgaccacattgacaatttgatgtgatgtatcacagataacaagaaataaatgaaagaattgttcataaccataatttttttttttggtagaaaaagaataaaggaaaagcatagatattttcagtttgatctataaattttacttgacattatttactcaaattttgttagaaatttcgcagttgttttctgttatggcaatttctttttgtttccaaaagtaagcttaaattaatgtcttcagtctttagctataacactgttaaccctgatcatgatttttattgtctaaagtgtcctcctgctattagactcattacatcattccaatctttaattttatcaggcaactaaaaccaacaaggtaggtgtttaacatagtttgtagggacaatatgagactaatatgaagttataaaagttctcacatgtatgtttaaagtcttcggcattagaagttacttctggtaaatgatgtacttccattgtggtaatgtaccacatcttataatgatgatttcataacatgaaaaatttgtattttttggagtaatggtgtgatttagactaatcaggcactaatagaaggttttggacctttcaattttgctgtgattgcttgggaagtaaaacattttttacaagcccaataccctagttaaggtacaataagtctatgttttcaatatggtggtcagcattcttattgaagttttagctgcaccctttttattctctaattggaaagtgttactaattgtggcatttgttctctttcttcagaaggttagaa

SEQ ID NO: 11442 - DNA, 18917 bp, Vitis vinifera
  Intron number 11 from transcript GSVIVT01016080001 (locus GSVIVG01016080001) derived from phytozome v7.0 (chr-ID chr 9; pos 18505590 to 18524506 reverse strand)
aacagttcatggcaaagaagcaatgtatatcattaatcttgggattggctatggattgtgtagcagattcacctgaggagaggatcaagatgaaagatgttgtaactacactcaagaaaattaaaactcacatatctagctagcagatattgaaaggactcgaggtaactgagctttcatgttcagtagtacttatatcctagttttatttgaatgagttctttaaatttcatattctaagaacccactcagagattaatgttgtattctgatataagcgtgccaggcccttcaaatttgttaattgtaggatcagacacacaaaactttaaaatgttcggtggttagcataatacaggtctctcatgcaccccttgaagccttatacaaggcatatgattttagaatttttttctagctctcaagcatgttggcttggggcctactaccaaatatactaaggatgcatttgataataattgtagaaagtatttttattctttttaatatttgaaagataaaaaaatttcaagcattaaaaatattataaatactccctaaaatcactatcaaacacactctaagaatctatttagtagtgattcttggaagccattttaacatttctaacactcaaaaacttttatcaaaagagttgttttcaagtgttaaaaagattagaaacattttgtatgtatatatatttgttataagattgagataaacttgtaaagatagatttgtaaggaaaagtaaaagatactcgaaggagcaaggtctcaccattcaaattatagataaaataggtgggaatatatgtatgagaggtttcaaggttcaatagttgtatcaatttttccaattctacataatcttccctatggcatagtaaaattattctatttcatttataaatgtagatataattggtcaaaccatattaaaacctcttgtatctttgtacatggatgattttattcttatacaattgcactattaagtgacattttaaccttcattagtacaaccaatggctccaaagtttttctagtataacaatggtaaaattttcttaaggaaaaaaaaagaaaaagaaaaagaaaaagaaaaagaagaagaatcctaaagtagagggaacacataagagtattagaaaatgaattttgaaaggtgaaaatatgaattggcgaaatagtttgaatttgcagtgcatgaggagatcatggtgcctagaagggactatggccacgaggagatcatagcatgtggatagttgtgcatagggtaaggattcaataaatcaaacattgtagggattggaaataatagatggtcatttggtattcttttacttcaaacttcaatttttgggaagaatctacttaaatttctagtaaatatattttaaataagtttttacatataatacattaggcgactatcttaattatgactcattaaaggtgtcatatgcatcaaagaaagcatatgctaaaaggtaacgtatatataaaaataagtttctttgttgaattatgaaagggtttaggaatatttccataaatattctagattgagggaaattgacttggtcttgtgaaaattatacatgtgatagatagaaatatgagaaatagtgagagacattctatagagcgagggctcattgtgtaagttatggatataggaagcaagaaaacatatataggatatttcaacgctcaatagttatatatgttttccttatcctatgtaatattatttataatatagccgaacaatttgatctcttacatgatgcatggttggtgaaattggattcaaaatttatatacctttgagagtgtggataaatttattatttttattgcactaacaagtgaatatttatcatttgaagatcgttgaagaaagtaaataacaaaggtttttcataactaactaaacttacgatattttgggcaaaattttcaaaaacattttaagaatgtacaattctttaaaaaaaaaattctcaattgtttttataaacaaaattctgcttgagaattcaaatatgaacattaattttctcaaacttacacttcttgaaagtattgtgcacttatgtacaatataaaaattcccaagtatatattcctcatattttcaattgtttcttaaaatactctataaaaaaaattttaaaaaaataccatcaaaattgattctaaaaaataaatggttttcacaaaaattgtcaaaaaattattgaggcaaaatttgccaagcaagcctttatcttctgaagaacaaaaaaacaaaataagttttctctcctctaagaactctcctaattttgtaacttcttgcccagaaatatgaatgcactataatttttcttggggtcttctaatcctagggttacatcatcatcaaattatctagaaatggaaaaatcaataaaaaatcacaatcaccgatcaatcagccatcatggatccaaataagtgatgaccaattttataaattgctcaaatgaattattaatagcaaaagatccaaataagtgatgaattattaattgcctcaaataagtgaggcaattaattatgaactttgagtttaagtaagctatcaatcacctgacttgcagataaatcgattacctttaaaaatgtatttttagctaatttgagtttcttgatgatgtttactacttaaaacaaaagttgggttgagtggtttccagtgaaaattattcataccactaaaggcataattacaatatttgatacctaaaattcttatgttgataatgttacatttgagtcttaggaaggcaggtagcatgggagatgcccgtaaacacctaatcaaccaatagaacaaatgagtttttacattagaaatgcctacaaaatttctatggtttgggtaatcctgcattttgaactttgatactaaaaaagagatgaggattctaatgggtttatcatccaagtatatatatacagaacttaagaagatgatattaaattcatatgcaacaaactcaagtgactcatcccatcttcaagaacagactgatcaagttaaaattcaaaatagaaatgccccatgcaaaaagcttgaaagacaggggagtgtttggtaaacctaatacttattacttaataatttaaattgactttaagttaaattacacttaagttgttgactttaaactttaaacttataacttaattcttactttaagtattaaggttatttgataaaattaacttaaaatttattttaaatcatcattaatatatttattctcataaattataattaaggcaaaagaggtcgagtaataatggaagtcatggagtagcaaaagatttatgaaagtaattaggataaatgaaaagaaaaaggtaaaataaagatatggacttaagaataaatttttttttcttacttattacttaaacttgtttttaactttaagtcatattattaagttattttatcaaacatacttaatttacttaatgaattaaattaagttattaagtcattttaagtttttaagttggtttatcaaacacctacaaagtgacttgagttggctgttaatatgacattagagagaacagagataatcatgtcaacaaatagaatggacagaaagcaaatagggaaccatgaaaggaaggatagtatcccatcaatttttaatataaaaaaaattatgatagaatggttattaaatatttcatgtattttaacatttacattattttaaaaagttttgtgactaaactaagtgtgagtttgacaatgattccaggaaacatttctagtctttttaatatttaaaagataaaaatcttcaagtgctaaaaaggttagaagcgcttcctataatcactaccaaacggactcttaggttaaaaatgcttcctataatcactaccaaacaatcagaatgcgtttagcagtgattctaggaagtgtttctagccttttttatgcttgaaagataaaaaaaataaaaaaaattaagtgttaaaatgagtagaatgcattattggcagtgattctaggaagcacttttggtctaaaaaggtttttgaaaaaaaattaggtatttaacaaaatttaggaaacacttttaaaattctgaaaaatcacttgtagtattaaacaatcacttgcaacgttttctagagaaatatttgataagtgattctcctaaaaatactttcagataaaacactttcactaagagtgtgtttgacagtgattctagaaagtgattttaggaaacatttttaacatctttaatgcttaaaaagataaaaaaatttattagaaatattttttaaaatcattgtcaaacacaatttaagttatgagtaacaatgtggaataattttttgtaatttatatttttttataatataaactttaaagacattataaacaaattggataagtcacaattgataagaaaattgtgacatgaaagaactacaaccaccattcatcacttcattttggacactatccctccgtttgatagctaagaaaatgaaaacataaaaaataaataaataaatagataaaaacaatctttttggttttagctaaaagaaaatgaaatccgagggaaaaaaatcaaatattaattttacaaagaaaagggaatagatcaagacaagcaatagaagggaagtttttgtagccacataaataaaattttcattttaaagcttgaaccaataacattataccaaaataacaattttacaaaagtattcaatccttgttactgcatatgcatgcacacaacaatcaaacacgaaaatcaaatttaaagccacaggccataatgttctcaacactattgaacaaatgcgatagaatatgaaaattacacatgaagaagaagagggtactaattgaataagagtgtgtttgaattgataatgattcttggaaacgtttttagtctttttaatatttaagaaataaaaattttcaagtgttcgaaatattaaaaatgctttctaaaatcactataaaatgaactctaaatgttttttagtttctgaaaataataaatatataattttcattgataaagtggtaaaataatcacatgaaaaatatggtaaaattatttccattaattaattgaaaagatagaaaattaaaatacattgttaaaaccgtatttcaaaattgttacccaagcctttgaaattacaattcgaaggcgagattgttttcacaagagctcagaggtggtgtcgttttttctggagatgtttacctcacgtccaaatcttgtatggttgttttgcggatcatgttcttatcggtagtagagcatcattatctgcaatgcttcttcccgttgttggtggagggttagggctaggggtttgtcttttaagctagagaacggtttttatattgttcactttcttttgggcctgagagtggtttcaatgttgttcactttccttgaattttgttcataggagattattgattgatttaaattttgttcactctcctttttgtaggtctcgtgtattttttaaccagtttagtttaggtatcagaggggcgtactcaaggggcactctgattactcctttttgtaggtcttgtgtatcaagagaagtttttaacttattttttatgttttaaaaataaatcatatatattcctataattattttttaaaatagtcataataaaataattgaaaataacttaaaatgttatttgaaaataatatatatatatatatatatatatagaaaattattttatttttttattattaaacatgtttttcttttttcttttttcgtcttagaaaacaataaactgttttaaaaaataattaccaaataaaactttaattttttttctttttttcttactttttttcacaattttccactcctaaatcatttctaaattcttcttaaatgtgttttcatttatgtttaaaacaattttttttaaaatcaaaatttgcataaaaaaaataagtcttaaaacatagattctcttaagtttagttctttgagagtattaagaaaagaaatgaaaagttaaatacgaaagaaaataaaatataattaagattggttataaattcacttatttttaaattattgaatctttgtataattaaagagaataagttaaatgtatttgaagaaacatataaaaataatttatttattttcaacgtatattttttaatttccttctatttttcctcattattttattttctttgcattttttttttaattttctagtaaccaaatattgcttgagggtttgttattgagaaggaaaactaaatctgttgagtttcttaccatgtattttctttagatggaaaggttgttaagttgaagtttgggccattgaactacaaagaaggttttgatgccaaatgtagaaaccttagcttcatctaccagcagatgattctgaattttccaaagttttctggtcattattttaaatgagcagaccatgcatgcaatttaaattaaaattgattatagagacaatcatctcaaaatatgtgaaattcgactaaaatagtaaaaattgttcataaaatattgcaatatccatgtcacactcccaaggtattctcttgtattaaaaaaagaaatacctatttaaaacatggttttagtcaccaaggctctctcaatagaaaatgttttactcctctcttatcttatttcagtgtttatagtgcagtgtatcagcggtacgtgcagctgatatctgagaaatttctagtgatcaatcttcactacttggcttgaaaatctgccattcttagagtaactggtcaaccaaaactgccggccatctaagagtttcttttggagtgatttggagaatttgattagatttttctaatccttaaaagatttttctttacaaagtcttttatgcatttcattatcaaaaatcacctagcaaacaataattttggggttgtttggcaactattttcaaaaacagttttctgtttttcataacaaaaaaataagaaaacatgtttgacaactagaaactattttttgttttctattcttaaaaacaaaaaacatgatgttttcaaagaacattttttaattgttttatattgttttcacttgttttatgagggttgttttaaaaaataattatacaagtatgtagaatgattaaaaataaagcactgatataaaaaaaattatttttaaaacatattcaaaaatattaaaaatattttaggttcccaaacagacttttgttctacaaaacatcaaagaacaacttttaaaaattgttctcaaaaactattttttggaaccgttttcaaaaatagttaccaaacaggctcttatgcacagtgtttctcacaccctaggttatgaaaatactttacactcaatcacaagcttctgaatttactatggaacttctcaaacttcctaataagacacctatcattagagtaaactttcttatgaaatttttttttgttctctagattgcttcatttcaagccctagacagttggggtacatgaaaaactatcttaagcatctctagatctatacatatagcaataaagaccattaataaccatagatttagagataaaaaccatgcttgtgatctagatgttcccacatttattccagttgatggagaagctggtgaggttcttaaaaaccaagggatctttcaaccaatggctctctttcttggatttaggcacttgaggatggtgaaatcctctcataagggtggaagtctctctgaatcctcagaaaattgaagaagaagactaaagctctaacccctaaggaggtttacataagcttccttgtgggtttattatcctaatcagagataacattcacaaactcatgtgcaaccttgcatttgtaccacaacatgcacacatgtgaataaataacctaactaaccctaaaaaaccatgccacctaggaacatgagctaaggcgaggtgttaggataaagtccttaaaagcatgacttgatgtaacaaaatttgaaaatttttatttattaataaagttccagtttcacttttatctatcctcattccatgcattgtacttttgagccttatggcttgcatctcttatattgtacatgacttaggtgcattaggatttccatggaagatccaaaccatgagtttattgtaagtgggtgacatattcacaatcagttcatgggcctaggcaacttattagagattgtagtgcacttcctccaaatttgaaggatggttggtcttagccatcggaataggtttcccatgatgagtgcattagtgtctatagttacacattagataggacttacgatgagtcatgaaataaggctaatgggtagcgatagttgtgacttcaccaagatgttatattgtgttgtctctcaaccttgagaaaatattaagtttgtgcccaagttagcaataacttttacctacagatgaaatcataaagtgatcatatattccctatgtattggatcattattaatggaagtcggtagcaataggtattctcaataaagccactttgatgtcttatggattgagacaaagtgtcttcttaggtgatcttaaggaggtgtgttcatgtaaatatggttatagaagttctttaagtggaacttgacataagtcttagtgagcttacatatgtcagttgatcacacaataggaggatttgtaactcaagggtagtaaggtagtcctaatagactgatagcttttacctcattagactactaacactaggtcacagacacgagcactttgtgtctcattatcattatataaggtactagagtggagtcaattctctatactaggatattgaatcaagttcataattgaattttgagcaagccaatgctatcttatgggtccaagtggtcctcacttgagctcatacaccttgttagcacgatttataatggttggatcgactcttagttcactaatgtgaataagggcgttttgctaattatacaaggttgcataggagttagtgaattatatctctaaattgggctaattgattaattagataaccttattgagttaactaatcaatcataacccattttggcctagattcggcgactttaacccttggtgggctcgagtcacttaagcctagtagagaaccctataaataccctcttaggggttagagtttcaagctttgtcttcttccaccattcaaagagagccttagcctccaccctttcaaacttcccactaggaaagtacacctcatcccaacttactcaatgctcacaaaacactagcaaacataaatgtgtttttcattcaataataaatcaagcacacaacaacattcatcagtgtgcaattctgtcatcaataactcaatgcactccccttttaataaagcatcttctctcccatcaagaagcgcaccccaaagctcatctcactacattgtcttaattgctccacctgtacacaagctacatcttccaaacatcacaccatcgtcaagctacacaacaaatagcacccttgaagctcctaaacactccatcatttatcatcatgctaacaaactgacaagacaagaggagcgatttctatttgcttcactaagacatctcttaactgatgtctatgctactacactattgacatggatatgaagcatagctcaaagggaataactttagagcaatgatgaggagagagatatttcacctataaatatgagaactataaatagtagagactctcatggaggggactctcttagagggggcacacgactctcttagagggggcacactatctcttagaagagagatacactcttgtcctctcgagtagagatgctagggaaataatttagtttgttgttgttgatttttttttcctttcttgtaatttatttttttcaataaagttttatgtttcaatgttgcatatgtttttatctttatgtttgtgtgttttccttgttgtctttgtgtttttgctttttagtttttgaaaggggataagatctcttatcttagtttgattcaccatggtttagctatctatggttgaaaaggccatactaaggtttgtggtcacaaagaccaaaaggagtgtccatatactggagttagtggttacgagaaccaaaagaagtaataacagtcatgagtgtaatatactagaaacgagttttttgacatgagaataaacccatctaattcatctaattgtaaggaccaaaatgagcaattagactgaattgagtttttattgaggtggttaattatcctattaattggaaccctactattggtgtaaaccccctatccgatccaaaagctacaagcattgggtcaagaccaagcttgtgagttaagcttgagaaaggaaatttcagtgactttcctccctataagttttttttttttcccatcagtttctaagtttccaattgcaccttaaaaattaccaaaaatatgtttcatcctccatagttacaaccaagattcctacctctagtgttatcaatcttaagtttcctatagagacgacataaccactatatagcttttatttctttttacgtctttggttcaagaactaagagtctcaatgactaagctagtttaaattttgctttttgttattttgtttttagactagtgaggatctaagtgacctaagaaattatcgttgttgctagagaaactccttagcatgatagtgccaaaagtattgtggtccccaaaatgaaccattcaccaaaaggaattgatttaggatcatccaaatcataggttaagttttctaacgcattgatctagatcctatttatgttaaaaattgtatttttgcttctattgcgtaggatctcaatccctaaggagattttatgtacctaacctattcctaggagagggaatggagtgatcctagattcccaacaactagtatcaaagccataggttagaacaagtatgttagaacctttctaaggtgtgctaacctttgctttgtaggctatgttattcatgccatggcctcaaggatgaatgtatgtgcaagtcaatgtataattttaatatgatgattataattgtgattataagccaaaaggcttccttaactgtttaagaagctgcaacatattcgacttctatagtgaagtcaataatgcaagattgtttcacacttctccaactaatagtcgtaccacgaaatataaatacaaaactataggtagaccgatgagaatccttatcatactaaaagtaggaatctatgtactatttaggtattaactcctcactctggaatacaagcatattatctatcattctcctaagacacttgagtatatgcttgacaatcgcccaatgctctggtcctgttttttattgatatctactcaccatgcccactacaaagtaaatacctagtctagtacaaagtaccacatacataaggttacccacaatagaggcataaggtactgcttgtatgcactcattctccttaggtgttcttaggacactaatactgggaaagaggaattccatgtttgaaatgtaagaaacccttcttggaatcctatatcacatacttgactaaaacttgctaatgtaagtggcttgaggcaacgtcaatttcctattcatgtagtctctcaagaccttaatcccaagaattgactgcacttctcctaaatcattcatttgaaactaagtacacaaccatatcttgactaataacaataaccttatatcattaccaatgagtagaatgtcatcaatgtacaagaccatgaagaccaccaagcttccctacctcttcttatatacatatggttcatcctcattttgatcaaagtcaaaagtcttgactaccttatcaaaatgtttattctataagtgagatgtttgttttaatctataaatgatttatgcaacttgcagatcatatgctcttagccatttgttatgaaactgtttggttgcatcatatagaggcactcattaagattaccattcaagaattcaatcttgatatccatttgccatatctcatagtcgagatgtgtcgcaatggataggagtattctaatggagttgagcatggctaccagcaagtaggttttctcataatcgaaagcaagtttcctcataatcgaaactaagtttcctcataatcgaaactagctttctaactataatctttcgctataagtctagccttaaagatctcaacctttccatctactcctctcttcctcttgtaagcccacttgcatcctatgggttttatccctttaggcacttctactagttcctaaacttgataagaatatatagattatgactctgccttcatagcctctttccaaagatgtgtagtcacatcacttattgcttcatcataatctatgggatcaatctcatgtttctcttgaatggccttaaaaaactctcccaaatacatgaatcattttggttgtataagaaccctcccactatgatgaggcaccagtgcactaaaaataggaatggttggtattagatccatagtattctgtgttgttatgggagtctaatctagtgctctcaaatcaacctcactccttgtcttattactcatcatatagtcatcttctagaaatatagcatttgtactcacaaacaccttttagtcaacttaactatagaagtaataaccccttgtcccttttggatagcctataaactagcaaacttcttatcttggctccaacttatgtaattttggtttcaacacgtatgttgagcaccctcatatgcgaacatggagtaaaccaagtttacgtctatccgtatctccataagagtcaaaggtgattatttaaatggaaccatattaagaaggtatcctatagtttctaaggcatatctctagaaggatgtaggaagtgttgaaaaactcatcatggatcttaccatatcttatagagttcgatttcttctttctgatactccattttgttgtggagttccaagggcaatcaattgggatgtaatctcatgctccttaaggaaataattaagctcaccagacatgtattttccaccttgatcagaaaaaagtgctttgatttgtttacctaactagttctccaattccgccttaaattccttgaacttatccaaggcatcagatttcctatgcataaggcaaacataaccatatctagagtaattatctgtggaagtgattaaatactcataccctccatgtgcttggacattgaaagctccacacacataagtatacacaaattacaaacattctttggctctaacccctttaaaaataaagtgtctcttggtgattttaccttctatacaggatttgcagaccgaaaggttttatggaactaatgaatgtaatgttccaaacttaactagtctttggatcctaattagatttatatgacctaagcatagatgttatagatatgttttactagtcataggtaccttcctcttacgtaagacatgattattttcaacaatagataatgtagaaatagaagtggtatgaaataaattatctaccaatgcacctgagcaaataaacgaatcattctttctaattaaaccatttttattgaaataaattgagtaattggatttatttaaattagaaactaaaatcatattctttttaaactcaagtactaaaggcagtcattgagtggtagatgtttcttattctctagaactaaggtaatatctcctactacttgcacaactatccttgtagcagatgctagagtcaggtgcatctctccctcattcaaccttctacttagttaaaacccttgtaaagagttatagatatggtcaatggctttaaaatctatccaccatgaattgatggaatccaccactaaacatgattcaactaaaagtgaatatgacataccttcatttttcttcaagctatcctaagtcattgattaacacaactttgtgttcaacctttagttagcacatgcaagtagaaccactttaggtgattctaccacttcatgtctcagttaagtgtataaccaagatccttcatatcaatgttaccaagtgaagagtttcatctttaagattggtcactcctactacaaatatgtatagtctttgtcctttcaggatggttcatatcccttgattccttggataaccccatatttcagatgttgataggcccaaaatcaagatgggcttgatcttataggttgtggttttgcttatggtcccctctcacttgatatcttgaataagaggctttaagataattctagtaaccttcttaaaataaattattcatcatcagattttccaaatatttatttatcagttgaattggagcttttgtgcatagtaaaaattgcatttatattctttatcctttaactttcctttcccaatcatagttcttcttctcttaagaggaaagcttgaaaaacttggtggtatcctcttcttaggtgttgttctccttctcttaaggtgggagagcctagagaatgtcccacttccaaaaataggaaagtcttaaagggaattgcaactcaaaatagcaacaactaattatttaaataaataatattggaaagaatcttcatgaatatatattcttttaagaagatccggagttaccaatattttaaatcatgcaaatatatttcctatcacatgaaatatataaataaaagcataaaagaaataaaggaaataagatcccatggcctttggaatcctattgcttatatagtaacctaaatattcgtatttttaaaatccaaatatatcaaatgtacctacaacaaaaataaggttaacatcttttacaaaagaccataatgccctttaaaaccttaactataccattagagttgctaggagcacttgaaacaacttttggtgctcttaaaacaacttttggtgtgcttgaaaagcattgagaactagaagtagcttcaagtgcttgaaagaaatgcttaacccctcgagcgataatccaactgctcaagcgcttctatagaaacccatatttcgactactagtttctacatcttcaatcattgttttttccatggaaactcctttttacaattggggactatgcatgatcacctcgtgattgtccaaattgcttccaaatcctccataggttacatagattgataaaattgcaaaccttttacattaggaaaaaaaaacctatatatgcttctttcaaattaaagcttacaacccaatctaaacatttaaataaaataaaataaaataaagaattttttacattgaataaaaatcttataccccatttataaggtttacaacccatctagagaaaaatgaataccaatccaacaacaataatcacaattataatcatcatataagattacacatttacatgcatatatattcatccctaaaaccataggatgaataacatatcctaaaaaccaaaggtaagcacaccttagaaaggttctaacatgttttttccatacctatggccctgatactagttgcagggaatctcggagccgttccctatcccaaaaccaagttaggtgcataaaatctccctagggcatctaaatcttatgcaataagagcaaaaatacaatttttaacataaaaaatatctagatcaatgcgttagaaaacattatctatgatttggatgttcccaaatcaattcctttcgatgaaaatcaatcctacaatcaccaaaagtctcatacacctatgatcttccactcaatgtctctcccttgttttttaattagcactaaaatggtgggatgttaagagggtagaggctagggctttctctctcttaatggtggaagaaaacaaaagcttgaaatcccaacccttatgggggtatttatagggttccatactaagcttaagtgacttgagcccaccaagggcttaggtcacttaatctaactcaaaataagtcaattaattaattaacccaatagggttatctaatgaatcaaatagccaatccagagatacagttcactaacccttgtacaatcttacataattaccaaaacgctcatatgcacataagtaaaccaataacttatccaaccctcataaacattactaacaaggtgtatgagctcaagcgaggaccactagacccataggatagtactagctccatcaaaattcaattgtactctagtaccctaagtaatgataacaagacactacatgctcgggtctgtgatctcttgtccactatatacagtttgcctatgaactgatgttcatactctaacgaggtgaaagctatcaacctctcaagactacctctactatctgtgagctataaatcctcctattgtgtgatcaattgacatatctaagctcaccaaaagcttatgtcaagtttcacttaaggaactaatatagtcatagtttacatggacacaactccttaggattacccaaagggacactctgtctcaatcttatgagacatcatggtgcctcaattgagaatatcaattgctactagcatccattaatagtgactcaattcatagggaatatatgatcactttaaaatctcatccataggtcacaggcactactaactttggcacaaactcaatatccttacaaggttgagagacaacataacgtagtagcttagtaaagtcatgactaacggatagcctcatttcatgaagtcatgacacacaagtgcactcactatggaaaacctatcctaatagccaagaccaatcatctctccaattaggaggaaatgcactacaacctctaatgggttgcctaagaccacgaaatggttgtgaacaagtcatccacttgcaaggaactcatgacttagatcctgtctccaactcctaatgcacctaagtcatgtacaatgcaaaagataaaagtcagaatgcttatgaagtacaatgcatgaaataagaatggataaaagtgaagttagaactttattaataaataataaattccaaattttgtcacatcaagtcatgctgttaaggactctatcctagcattttttttcccacatcaaatgtggaatatcataatcattcctcatgcaaacatgatgtcctcgtcatgtcccataggattacaaggccaaagagacaaagacttagtacgggactaaacaaactcctacaccaaggttgaagatcgactttgatacaatttgtaatgactagctcccccaattaggagttagtgtactacaacctctaatgggttgcctaggtccacgaactggttgtgaacaagtcatccacttacaaggaactcaagacttcgatcttctcttctactcctaatgcacccaagtcatgtacaatgcaagagatacaggtcaaaatgctcatgaagtgcaatgcatggaataaggatagataaaagtgaaattggaactttattaataaataataaattccaaattttgttacatcaagtcatgcttttaagggctctatcctaacactttttcccatattagacgtggaatatcataatcatacctcatgaaaacatgatgtcctcatcatgttccataggattacaaggccaaagagacaaacacctattacaggactaaacaaactcttacattagagttgaatatcaactctgatacaatttgtaatgacaagttctctctctccctttccctcccctcccctccctcctttggtgtagatatcgatagcattaaacctctcatagctttaaaatgtttctacatggtttagaagagcatcatgactttttttttcccttatctaatttgggatatcataatcacccccatgcagacataatgttttcattgtgtgctatgcgattgcaagatcaaatatatagaaaccctttgcaaagccaaacaaactcctacattagggtcaaggattcactctaataccatttgtaatgactcactcccaatcatgtaaatattatctattttgggccaaataaaccctcatggctttaaactctaatatatatatatatatatagtactatgaactttttcccctatttgatatgacatatctcacaatctattatgattagagaagttctaatgtatgtgttgtacaataagtaaaaatgaaaataaaaatattcttaacacttttccttactttaatatagaaaataattgtgtaatgtcctatactttcgatcttccaacttattctaacaaatagattctatggaaagctccaaagatagtgcaccttcaaattttctctcaatgaaagtttgaaagaaatctccatggtttagttaaaccatttcttccattatggttgattttgttacattctatatagtttagaaccaagtagttatatggaaaactcatgaaatgtttgttcaattatagcaggtgaggtaccatgtgaaattggtagccttcatactctgaatgtgttgaatattgagtacaacagcctaaccggccacattccttttcaaatcttcaatatctcgtcaatggtttcaggctcactagcagggaacaacttatcaggaaatcttccaccaaactttggctctttatcttcccaatcttgaagaccttatactggcagttaataagcttagtggtattattcctagctccattggaaatgcttctaagcttaggactctggctcttggcaataacatgttcaccggctctatacctcatgcacttgggagtttaagattccttgagagactccatctaggagctaataatt

SEQ ID NO: 11443 - DNA, 3594 bp, Vitis vinifera
  Intron number 3 from transcript GSVIVT01013189001 (locus G SVIVG01013189001) derived from phytozome v7.0 (chr-ID chr2 ; pos 6944848 to 6948441 reverse strand)
acaggcatcgtgttatagcccataaatacaaacaggtattgataacacacaccaattaagtatgagatttttctttttcccttatgggtgatgattatacctatttaataatccaatggaaatgagatcaccgttttttccatattttttcctctgttcactacaaggctttgggaggtgtttttatccactttgtcacacaatatatgatttgtactttttatggtccaattgcattatcctatatataaatagagctggctttcatccgatggatattaatggaaagtcttttactgtggcatgtattgctgtaaggtatgacacattacattctgtgggtggatattcatcttgtagttaatggagatctggttaaatgcccatgataggctattttttcccttcactttcctgtctattctcatgtagagggattattttcttcttttgttgcatgcttttatgtacatatttgtaaatacattatcatatgcctaacatgatcggtgtttcttgatacattagttctaaatcccttcccttttatttcagagtgtgtttaaaaacaaccttttctaaggacttaagcctgttagagggagttcaattctccttgacatgtttatcctgttatctagactcatttgtctcttttgttttcctatttctccttcatctaaatgaaccttgcattttctttcaaactgaaggcacagtttgaaagatagaaaagatagaaagaaaaaaaatgaaacgtcttaaactaaaaggaataatttgtatatattagtttttaagttctttctgccttttctttctccttcacctctagtgaagttttagcaatccatcagaggtgtgtaaactggcacaaactcatgcagttaaatgatgatgttttttaagtggttgattctaagttaaaattggaagaatgcgttaaaatcttaatgttgtgtttggtttcagaaaatactaaggaaaggaaaaaaaatgttaaagaaaattattttctcatgtttggttttattatgaaaaatacaaaagaaaatcaaatatataattaaaatttgttagaaatttgtaaattttcaaattttttaatcttgatataaaggagttaaagtaagtgaaaagagtttaaagtagcatataaaggtaatttattaattttaaatccattttttattttctttcactttttcttaccttttagttttcctctctattttatttcccttaaattttttgagaaccaaacatagcctaggtttttaaaagctcagaaaatatttgaaggaaaaatgagggaatgttaaacaaagattgatttaataaaaaagtaaaataagataaacacagagtggccagagtgtctgacctacctaaaagtggcttcttgttctttggatcatcaccataaggaggggaagagaatgtggttaattgaaataaagtgggcaagatagcttggagaagtgtttctgacattctgttgtcattgctgaaattagcattttttagaacaaggggtggcatcaatcgagaacaagatgagtgaaagtagtctaaattggtttggttatacaatgaacatcaatgatccaccagccagggctgaggacaagtgggtttaggcagtgaggaaaaacaggaaagtccattatttaacataaacatgatcctggatagagttaatttgtaaaagagaattcatgctgactcctcattcttgatgtatgttgtcttttgagctagagttgtgttggcaactcaaacttgctattaattgaagcatagaaatactctaaacaaaacaataacgataataataaaaaattaaaaaaataaaataaaaaatattcttggggcttagaataaagggccaaagtcaatggacatggaacgcatacacaatggaaaagaaaaaactggaaatgagaaaattaaatatccagagaatccaagaattccaagaattatgatacaactcaacaaagatcctgctaaaatcaatgatagataggctcaagaaaagttaatttcaacttcacaggaggaagctcttcatcttcaaagattttcctatttctctttccaaatgctgcaaaatacatgttgaactctatttgaaagctctcctttgcctcttttgcaccagaaaattaactaatacctacatcagtacccaccaaataccaaaacagagaaaacagaagcttaaggatctaaggtcaccagatgatgcagaagaaatgattaactgattccccatgctctttacacatgatgctcctattaagaacacacatttcctgcttgtcgaatgatccacctctgaaggttatccaaagtaaccattctcacattgaaagccactttcaaaggaatacctgagactgggtggggtttttttccccttttttgttttttctagccttgtgtagggctgttcagtatactccctgtatacgtgtggctttttagccttttctaatatatttggttgtttatctatcaaaaaaaaaaaaaaaaaggaatacctgagaccagtacctttatttgggaaattaccccttcataatgcactaaatttcagaaaataagatttactatgaaacaaataaccatttgcattgctcctctgaacaaattgttcttccatccctttaatgacatgcaaacaaagctctacttaaagaaatagagtgcttttgaattcccaatcatgaagatttatgatgaacactgttccacttcatctccttgcccacacacaccttacactgtcactaacccaagctgcacatggagccatcaatgattcccattgtcaatagcactattacagccctcttcagcagtgggaaaaggatattatacagttttgacaataaatcagcttgataatttttcccttgatacatgtttcttcatcatgtccattctaacttattgctaaggcttattcaagcatctctctggtaacaaggctctcggtggaggattttatgattcagtccctaaatcagtaacagtcaggtgtatttcctagtgccaatctccttcatactgaatttccaatagttagggcaaaaggaatgacatcaactttgagcattttccagtctcagattatctgaacaatccattcaagcaagaagttccatctacttaaattttttgcacctagaaaatgtctttacctttcctctatatataaatatcactagatttacgaggcagagttaaacatggtttaattaatacttttccctaggttttgcattttattatattttagtttcatccttccaagatgatgacagtttctggaaatttttgtaaatcaaatattgcatctgtgtatctggggttttgaacttctcctttaatgataataatttatggaagaaccgtgcttttttcatcaggatgccacattttcttttctcatttttctgcatgattaagaaagctaacttactcttccaagaatttttggacagaaatttgtagtatgaactagtggaatcaactaaattgtgttttccactattgcagggcttgcataacacttttgatcaggat

SEQ ID NO: 11444 - DNA, 8648 bp, Vitis vinifera
  Intron number 2 from transcript GSVIVT01016327001 (locus G SVIVG01016327001) derived from phytozome v7.0 (chr-ID chr1 3; pos 5035407 to 5044054 reverse strand)
aatctcagcaacagcaacaaacccacagtgcaagcgtctgggaggacataaatttaagctccgattggaaatgaagagatgtaagcagatttgaaagtaattttaatatccggtgggtgtgagaaacacttggaaaatgttaaaaaaagataacaagggatccctgaatctttgcattatgtgctgacattttgaatagattaaaaaagaaaaaaaccttttgtgtgaccaaatttataatttaggttatatttcatggttctgcagtcgatggaagctccttacttttatttggacctaagatatggttcatttgactgaggttttgattccatctagccaaaatatataataaaaaagggggtgaaaaaaaaaaaaaatctttaagggcaatttgacaatgttttttaaaacttgtttttaaaatggagaaaaacaaaaaaaagatctgggcaactatttttgaaaataattttttagtgcctagaatacaatatatatatatatatatatatatatatataaataaataaataaataaaaaaggtatttttaaagaacaaattttagttgttttcagttattttttaaagattgttttataaaaaaattatataaacataaaagaatgattaaaaataaaatactagatataaaaattattttaaaaatattaaaaacatttcaaatttgcaaataaacttctattttgcaaaacattagaaaacaatttttaaaaacattttttcacaattgatattgaaaacaattaccaaataggaccttagttcttttttattttctaaatacaagagtggctaacaagttatttttaaaaacaaaaagaaaaccttgtttggataaaaaaatttgtattgtttttaaaaattatttttgttttgtaaaatttttataaatttgatttatattaataggaaatcaaactcaagttatgtcgtattaaaaaaagaaaagaaaattaaatttacaatcatgtacgagttaaagataaataattttttaattattaaacatttatttatttatttattctagtgaaacaaaaattactataatataaattatatttttagtaatttttagcattctttttttcttttaaatataagttaaataagtgtttcaattgatttttttttttccaataggcaaaacaaacaaactagtcttggagactatgggtttgcctataatcctctctcacttaatcttttgaattaaataagagtctttttacaactttagtaattttcttgatgaaaaaattaacttttttgagaatcttcaaaaatatttatttcttaattggaaatcttgtgtaataggtgaatatttgaaaaaaaaagaaaaaaagagagatatttgatggaatgagagtttgctgtttaaagtatagatataagaagtaagaaaatatgagatattttaagcctcaataattagatttgttttttattttattttataatttctctttaatactcaacggaatgagagtttgtagttgaaagtgtaaatataaagagggagaaaatacgatatgttttaaagtttaataattgtttttgttttttctggtccttttaaattaatcaaaccatattaaaacatgcatcatgtacctatatatatgtatgcaattgatttatctttatgctttacactaacccatgatattaaaacttttgcctgttaccagaagaaaacacaaaagaactcaagaatgtttaaaatgcctgaaaatacctggaaactaaattcacaatgcctttgtaagaggaagatgatttacaactcaaaacaattactgtggcaaaggaaaataaataaggcttcatatgacctacatatcaatcatttcaaatgcttccaaaagaaaccttaaaaattagtatgttcagaatttacatttagttgtagcatatggtcctttcccaatttgcaaaaggatgctctcttcttggaattagcaagaaaaaaaaattgggtccagtcttccatatataccactatttgaagcaataaacaagatagggaaaaataatataggtgaaggcttgaacaccttggaagctaaaaaaacctggtgaccaaatgggcattaaggcatgacaggtaggcctaacgatggatcagctaggcccaaggactagcttgggttgaatctagttggcacaaaacatgaagttttgctttcacctcggccccaggggctcactgtccgacccattaaatagaattcattccttttgaagtctgcattagtacttttggcagacaattcagtaactaaattatgtaatttgatggccaggagatgaatgattttaaagtttgttttggtttcaaaaattcacatccttgtctatcttattcgctagttgacacatgatttattcatttattttattaattaattattacccacgcaacacatgcagaaaaatcgatcataaaatataaaggacaggataaaaaggctgtcttttaaaaaaagggtagctcttgcgtgaaacatacggggggtgggggggccagtttgactcacctcctcctcacttggcataattattcaattttccacaggattttttaggaatctgtaggagctcaaactaaaggtctgccattcgttttttgcactaatccaagacttagattacagtgccaagaataatgagtgaaatcctttatacatgataaaaatcttaaaagttggagtacttggcctagctggaggattgagctccaacatagggagagattagtcttcatggacggtgaacttttctaaaactagtagaaaaaatcattcagcctcaaaatcttaatttccatcggtctcatctcaaagctcattttcagttggtcataagttggccggggaggcttctccatgagcatgctgctttcacatatctttacgtttgattgaagtggttatatatgtatgtatatgtcaaccacttcaatcaaaagtaaatatatgttatcttgacgaagtcaaccaaggaaaatgacttcattgattgagaacgacattgacttttttcttccctgacctaacctctgtgattgatgccaaaatatgtgcttcaataatgcatatatgatatgatatatatatatataatataaaaatttcaaatcatccaacttagcttaaattgatgctaagactctagttatagatttaatttatattttaagcctaattctaagtttgagaaatgaaaaaaaaattataagtgcaaaagtcattatcaatcaaagaaataaaagagattaaacatgcaaaattaaaaagacttgtgaattatgaagattcgggtgtgatgagtaactcataaatatgaaatactagtaacaaatgttatggagtagtgagatagaaggcaagcaaccataatggaggagtagtgaagcaaatataatcaagttcacatggaaatttggaactcaagatttgacaatagcacatactctgattttgagataaaatatggatcactttttgaggtcaatttagggcaagctatataccgttttgaagcttgggaagtcggagtctaatattttaaatagtgcataaatcggaactaaaacaaagaagttatggtcatttgaagacaactatgtagagatgaaggaccattttgaaatgactctaattttgaaatttcaaactaggtcattttgaaatgattttgaaataactctaattttgaaattacaaactaccattttgatgtttcacgtaccacttccacatctgaaattgtattttgggcactccatctgccttaattgggccctacatgactagaaatcatgattttattatttttttagtaatttttagggaattgattctaaaataagtggccaataagaacatgccacatgctaggcttttttagggggaaaactataaaaactcaatttttaggtttttcagggggttttggatttttttaggttggagagaagaggaaagagttagatcttggtttgttatcttttctactattattaattgatatattgtttttgatttctttaatttttaagaatggttatttatctttcttcaatggattgtgcttattgaaagcacgcctatgagaagctaaagagttttcttggggtgtaaagcatgaaaacctagggttaaaacttgaaaaaaaacaatgggaaattgaactcaataatggaataaattaatgaatggttaaagacataattaatgagatttgagatgccctttaaaattggtttgaattagggggtggtacaattgttcattccttgatactagggattgttggtaattcttgatttctagttatttaacctttgttatcttcccaaagacaaatccatatgaaatggtaaaggcatacaaatcctaggccataatcaagatctcaattccattaatctaatggataattcaaaataaaataaaatgttccactaaagagacagatgcaacttaagttatttaggttgatcttgtttatcccgctttttgagtattaccaaatttatacaaataaatacttttgtttcgcttaaagccctaagcttgaagttggattgtggaaaccccattcttgaacatttgaataaaaaatcaagttatttaggttgatcttgtttatcttgctttttgaatattaccaaatttatacaaataaatacttttgttttgcttaaagccctaagcctgaagttggattgtggagaccccattcttgaacatttgaataaaaaatcaatataatcttgcatttttaatttagatttatttagcaaacccacttttattcaaatagattttcaaatattttcaatttaaagaatttgattaaagtaattatttagacctagtttgataaattccataagtcagtctctaaggacaatactcggagtactacaaaagccatcatgattttttctttgatttttcttagcttatagagttgctatgtacaagacttagtattttgggcaacaaagaataacggtcactctacccttaagcaaggctactttcacgctgttgattcattaattcgacaaacatgcatgatcttgcttggtgttcaacaacaagtacttatgctaatctcttaagcatatccatataataccttgttaagattaatagaacaatgatatcttaagtcaatcctttgccataaccaaagctttgtttgggaagtatgtttgaaaacaaatataaaaaatagtttttgaaaatggttaatccaaaatttctcacctggcttcaattgaatgatcttgaattagatttatttttctctcactcccgagatcatgagacaaataattagatatcaaacatccaatgcaacatggacaacttttaagaaaaattactcagtctcatctaaggcaagaataatatagcttaggctagcattccaaaccacccaaaaaggttccctatccatgttagggtatatcctcaagttgaagaaactgataatcttgctgccattagagaatcggtaattgaacaagatcaaatcttgcaatgtcttggtggccttgtactggattacaaccttattttagccttcttaacaacacgtgaagatgatataaacctacactcagtacacaacatcttgcttacttatgaacaaaggctccatttttagaactctatagtagaagatgaagctatttatgcaaatatagccactcaaagtcattctttgcttccaaaaaagtaccaaaatgcacgatttcagttcacaactagagtaatttccatattcctcaatattgaggacaataaggtagtcattgacaagatcattgcacacataattttagaaataaaccatgagaaaataagactaatcttaataagaaaaacacccaagattgggggggggggtgaattgggtttttgaaaaattttttcaagcacgacaattttaagcaaaataaaacacaaatgtaaagagattgagttagagagtgcatacacaaattttatagtggtttgataccctttgcctatgtccactctcctcaagctcctaaccgagtgaggattccactatctttgaagctttaaccaagtttccaatgcttcatacttagattttgactttaatgggcttttacacaatcccttcaagcattcaccaacttgaagctttctatttacataatctcacttaaaaaaatgaaggatactctagacttagctcaatgaaagctcaattacacaagaaggctaggatgaatgacaaaaggtgcaatagaggatatgcaagtgaagaattaatgcacaaaataaaagaaatgagagctttgaatgaagaataggtctgtagagaattgattgcaaatgttctcttactcataaatgaagtgaagttctcaatttataggtttctaaccttgaaatccaaaaatgttgaaagtgacctcaactggtcaagctttgattcgatcgattgattaactgttggacattaaatacattgcaggtgactattggaccttaattaggcatcgattgggaaaatctacccctcaattgagagaggtcttaccatcgatagggaatgcatatataactactagaagagaggaaagatttttatattcttcgatcgggaagacttaatcgatcaactagttcattgatcggttgagtcgattgaccaatccctttgaccgtttcacctattttggcctaaaaatctatatttttctatttgtttcacttctaacacttaggcaggatctttaagtagattaatatgtcaattttaaaatagtttgcctaaggtttgtatgaaaaaactcgggttttaaaggaaattctaactttaatgcataaatcgagttcttaaagatgcctgaattggtatgaaaatcctaagtgcacccatatattcaccttacaaataaatcctaagcttggacggtcttcgatatgcttcaaacttgcattcatttggtcctttgatgattttcttatttattcttttgattttccaaatcaaaacctgaaattcttctgattcaaaattattagcaatttaactatgatttattattatcaaaacatgattagaagaaccattggactaacagttgacatctttaccaagcatctaccaagctcccgtttccttgcacttcaagctaaactctctattgttccacgccttgtgagcttgcaggggatgataacactcacaacaaactcaagaataaaattgacttacacaagagaataactctccctttgcaattttgttataaatcaaaccatgtacctaaaagttgtttcttagttagattagttacaaaatagtgtagaaatagataataatgctaacagaaaatacaagcttcatactgaaactgaaattactccacttgtttgagaggaggaacaaaagcaaaatctcttacattaataattcataaatcttcttaagtaactaaattaattaagtacgatgaaactttaataaataattaaatcatgatgaaagctaatgcagccaaataaccgtggaagaatgcaagattttgatgtatcattaaccctcagaagatggcaatctgaacgggttccatttgcctttgacaattttgacaatttgaaatgaatgagagacagatgaattatttcctaaaattaaagacaaatgcatattaattctgggaggtgtgaaactgtggaaaggagctaagaatcgtgccaaatttattgccgcagagtcgtctgttttcttagttagtgtctaacggtcttccacgtgattataggagattccccacttcaggctccatgtgctagtaattagtaattttttgtaaaaattttaattaaataatttttttaattataataaatcatgttaaaacatatgaggtccatgatttaaaattttatcttaaaaaatgatattgcccaacacgaataacgtgtgcatggtcacatcttagaaaattcaaaaagtatgtggaaaaaaattaaatcttccttatggcgtagactagcattctactaattttttttcaaagtaataaaaaaattcctgggaatggaatctactatgtttcctaaaaatatattttagttactttcaattaatttcatttattttgtgatgtctgttttaaaaaataatggaaagaataattaaaaataaaatattatttataaaatttattttaaaaaataaataaattgaaaatatttcaagtttctagacaaatctttgtaatataaaaaataatggttcaaataaaatgtaaccaaagagaaccttcctctgctttcttccttaagtcacatgtccaccaatgatgattcccatgaggaggttagatacatattaactctagctttccaatttctaaacctcttatcaaacttcgccttaaagtcttcaatacagtggtaaagtttttaaatatttcaatttctatcggaagaaactacaaaaatagattaattaattgcttccgcaccactttcatgcccttcttcatccctatgtatatatatatatggtccgtgcttctgtattctaccacagtcacctctttctctgagg

SEQ ID NO: 11445 - DNA, 10646 bp, Vitis vinifera
  Intron number 1 from transcript GSVIVT01017999001 (locus G SVIVG01017999001) derived from phytozome v7.0 (chr-ID chr5 ; pos 5372710 to 5383355 reverse strand)
tggattctagaaattgtaagttttctctttgctccgtttggttgtcaagaaaacgcggaaaaagaaacaagttggagattttgaacctaggattggcttgttttttatttaagcttcttatgaatgggagactaaagtcgaattttgttttcttttccttggttttctcagcaaccaaacggagaataatatcttattatctatcgtgtttgctttaatattaattttctgtcattcgtcttttcttaattttgagagtttgtctaatttagttgatgcaaaccatattttggagcactgtgtttgatgattatgcactgaagagctgtgagatattaattaggttccagtgatggttaaatcaagatggcggaagagtaacagtataggtgtgaggtatcaagaagagagtgtcttagatagtccgtaatttatctcgggcttaaaactttgtgaaggaacagaagtttgttgaatgcttatcctctaagaagggtttttgtagatgacttagataacaaaagtcggcaatgagacattctaaaacatattcaaataatttctagaacaactgacgcagaatatgtggtgatacattcgtagttgctccagaccacacacaatccctgccttgtgcatgcatatccattgggtctatttggtttagtttctttgcattgcataggcctcaatccaccattaagcttgtgcctttgcaaagttctgaagtttccctcttcttctgttaattttcctgtatgatttcaaaatcataggcaattgtatcattcccacaagcaaagactaacctaaatggtcttcaccacaaacaacgcagagacatgaactatgcacatgagatttaacaggttgaatgatgatgaaagtggattcttagaccatggaactacctagtggggggaatagatagtccagactttttaatgtcaaacttcaaaatcttcatcaattcttatcatacttgactatttcaagattaaattaaatttaatgaaacaagaataattagaacaatccacataaggagacacattctatgaggataccgcctacaaagtcccaacacaaactttatagatgtgaaagccacaagtcaaatgataatagataagccactaaatatgaaaagaaggtatacagttttacctaatccggatactttcaaaggtcttatactgataagcacctctgtacttctttcatgtcctcaatgtaggaccctatgcttcttagtggatcccctcaaccttggattgagtatctgaagtcattgtacgatattgtctttccattgaaaaactttcaagattcgttcttaaaagctttatgagagtttgaagatcaaggtgaaacattgattatcctctcaattatgctcatatcaaattctaagtgttaaatctaggtatttatggaaaaactttaagacttaaaagatttagttggaactatagttaaaaacttgcaatacatgacacaatacaacgatataaacattttctacaaaaatcaatatgtattgcaatccatatcttatcttacacatatcttatgatacacgataaggcacatgatacaaggatacaatgatatatataacttcaaccaattttataatttttattatatgtattaaattgttttttttggaaggaatgatgatgaatatgaaaagttggaactttgaagatgagatatgaagacatatgtatcaacaatacatatagctacgtatgccttatttggaacaaaaaatcaaataaaatttttttaaaaatttatttttgtaaattttgagatgacctatatattaaactcatattttgttaaattaaaattttcaagactctagtatttaatgtttttatatggtatgatataatttaactttttaaatcctactatcttgcatgaaattggttatatattaccttatatgtcgtgcttttaatatatatgcacatatattcatattttatttatttatttattttttactatataaaaaaaacttaccatacacaatatgttttatgagtttatgactatgatgtataaagaaagttttatggtttgctctgttggtaaaaaacatgatacatgaaataattttttgacaggctataaaagggattgcattaaaaaagctttaaaaaggccacaaaaagtacacatgatgcatacaataagagtcaaaagacaaaaatgggaagagaaagcaagaaacaaccccttctccttacatcaagcacaaccaattaataagacttatcatggtcagagattgattcttcatatacaaagtaatccattccaaaaagctagccataaaacaacatttaatcacttgactcgaaagttcaacattctcaaaccacctcttgtttctttccattcaaagagtccaaaaaaggcataaaggggcaatcctccaaactttcttttgctttttctgatcaaaaacccatgctagcaagaagattctctttgactttggaatgcatcatccacatttaatacaatgacacatgatataatagaaagatatgatacattttttttgacacatagtgcattcatatcttatcttgagtgtatctaacaataaatatatgatacacgatacaacaataaaacgattcatatttatattcaaccatttttcacaatttttaataaaaaaaaaaaaaaaaaattttcgttaaaagaattatgatattatttgtttaaaaaaataatcctacataaaaagttatattcttgttgtcaatagccattgtgaaagtacagtaaatttatttttacagcaaacattgaagaattttcatttgaatgatttgcatgttagcattgaaaatgactgtgattggcgaatgaaaactttatttaataatttgttttggatttcttttcatggtaatttccatattttaaaactcatttcttaaaagaatcatgaatgcttgaactacctgtaggagggtatttaaaccatggtaagacccttgaattctacctcaagaaccttcaaactgtgggagaatgtttgaacatcttgtagggtctttgaactctttgctgaatgtttgaactcttcatcagacatttgaactacccttctttctgccttctgcaccaaccttccaattttcatgtttttctcctttttttaattttttttcttttcatttttaaattgtcattgttttgtcttacatctcccaacacgtacttacctcattccaaattgagatttggatagcttgaactcgatcaagaccattaagactcaaagaaagaagttatgtgaaaccagtgcatgattggaataaaattgcctacttaatccaaggcatcaattgataagaatgaagctaagagagaaaaaggtgcctatatgtagggggagaaaaacctattaaaaaaaaaaaaggtgggggtgggggggtggtgttgcggcgcagggggaagggaacagttaaggcttcattagcatagtgttttagattctgttcttaaaagggacaatcttaataatgtggaagtttcattcagcataaaacaacttcttgcattcttgaagttaaaagcagttctgttaaaaccatctaaatgcaaatagaagctcttttggatttggaaaaccatttttggcttcaaaaaagttaattctaactgcatccaagagaaaaagaagggattataagaaagaatagaagaaaaagaacatggtttctgcagttactgggggttattcgagtagcccacagttagttatgactatattaaatttttttttaatcataagtcgaagaaggaatagaagaaaaagaagatgattcctgtggttattggagattatttatgttgcctgcagtgcataattactatttaattttttttaaaaacgataagttgaaggaatcattagaaggatagccttctttgattactgggggttattttaaggtctaatgttggatgaagacacgtgaaaactattgaacattggttaggtccaataggccctctctaataccttgaagagaaaattttattgaatactagctcgattattatagttgtccctaggaatgagatttgttagaaaacttaaagtgtgaacatagaattgagatatcctctagtcatatcaaatcatacatatatcaaaatgaagagaatatcatcatgctagggatactaattttgtgtatctcacacttttataagttaaatcataattcctgagagcctttgttggaacataagtacataacatgtcaaatgaacataaattgttcttttgcctatttaagaaagaagaagaaaaagaagaagagagtatcatcaggctagggatactaattttgtgtatctcacacttttataagttaaatcataattcccgagagctttgttggaacataagtacataacatgtcaaatgaacataaattgttcttttgcctattaaagaaatgaagagagtatcatgctggggatattaattttgtgtatctcacactcaaaatgaagagaatatcatgctggggttgtgtatctcacacttaaaatgaagagaatatcatgcttaggatactaattttgtgtatctcacacctttataagtttgatcttaattcccaagagcttttgttggaacacaagtacagaacatgtcaaatgaacataaattgttcttttggttcttttgcctattaaagaagaagaagaaggaaagaattgtagtgtctagaaacattttctagaacaagaatttttttgcaaacataagttttttcaagaacaaaattctaagaagaagaagaaaaagaaaggaattgtagtgcctctttggaaacattttctaaaacaatttttgagaacaatttttaaaaacgtaagttttttcaagaacaaaattctatttgagaattgtaacatgaaaaatagttttttttttggcttattctccatgaaagtactatacatttatgcaaattattacccatgaaggtactatacatttatgcaaattattctccatgaaggtactatacatttatgtacattacagaagttctcaaatattttccaaatacacttcaaatttgttttaaaagattaacctgtctttggaacaaattctcaaaaaaggtttttatcaagtgtttgccaaatatgttttctaggttagaaaactgattcctattctaaagaatagaaaccgttttcaagaacagtttccaaataggattgtaattttgttttgtttttgtttttgtttttgttttttttttttttgtttgtaattcaacaaaggtatttggagaaattattgtatgtttattagaggaataatacacatatatatacaattgagagtcctaaattaggaagatattatccctaagaatcagcctataagaaaggaaacaacttaattatggtaagtacagatatatacagctaacactccccctcaagttggagcatagacgttgatcatgcctagcttgttacaaaagtactcaactcgagttccatttagagcttttgtaaaaatattgccaagttgctctccagtcttcacatggccagtagagactagattttcctcaatcttttcacgaatgaagtgacaatcgacctcaatgtgtttggttatttcatgatagactgggttcgtagcaatatgaagagcggcttgattgtcacaccaaagtttcgctggcattgtgcacttcattcccacttcacataagagttgatgtatccatatgatttcacaagtagcctgtgccatggccctatactcagattctacactcgaacgggatacaacactctgcttcttacttttccaagccactagattcctaccaaagaacacacaataacctgtagtggatcttctatcaaacttagaacctgcccaatccgcatcagaaaaacactcaatgcgagtgtgtccttgactactgtatagtgtacctagaccaggagccttcttcagatagcacacaatctactctaaagctgcccaatgctttactgtaggcgcagatgtgaactgactaacaacacttactgcatatgcaatatctggtcgggtcacagtgagataatttagcttcccaaccaccctccgatacctttcagggttgtagaagggatctccatcttctgacataagctgtacattaggaaccatcggggtagtacatggctttgcttctatcttaccggtctcttcaagtagatcaagcacatacttcctctgtgataagaacatccttttcatgctccttgatacttctattcccaggaaatacttcagttcacccaagtcctttttatgaaacttggaatgcatgaatgccttaagatcagagattcctgcatgatcatttcctgtaataactatatcatcgacataaaccacaagaagtatgataccagtagctgatttcttgtagaaaacggaatgatttttcttgctcttgttcatgccaaatgcttgaatctccttattgaattttccaaaccaagcacggggactctgcttcaatccatagagagcttttttcagacaacaaaccttcctatactccccctgagcaacatatccaggagattgctccacatagacttcttcttctagatcaccatcaagaaaagcattcttgatgtctaattgatgtatcatccattgttgggaagcagcaatagaaataaatagtcgaactgaattcagtttggcaactggagagaaagtatcagaatagtctactccatatgtctgagcatatcctctagctacaagcctggctttcagtcttgccatagagccatcaggattaacttttactgcaaacaggattaacttttactgcaaagacccacttgcatccaacaactttctttccttgaggcaaatcaacaagtttccatgtatgattgtcctccaatgcacggatttcttcaagcattgcattcttccaactaggatgattcagggcctctgtaacagttttaggtgctgaaatagaatctatagaggctacaaaaacactcgaggaagatgataggtgatcataagacacaaagttagcaatggaataggtagatttgcattgtcgtttaccttttcgaaggctaatgggacggtcgagatcattggaaggatcagatgacgaaggagttggtgcaggacatgtatctgttgtcactgggcaccgagagtacacctgtacaatcggtggtttgattggagcagaggaacatcatcaacagtacccaaatgagcaagagatgcatcagaatcaaccatacttgattgcccaacagttggtcttgaattaatcacttgatacacaagccattcttcattctcctcctcactcgcagaacttgtgggtgaagagaaaaaggatgtgtcttctgaaaacacaacatccgttgatactaaatacttattgagatcaatcgagaaacatctatagcccttttgcagtcttgagtaccccaagaaaacacactttaacgccttaggatcaagtttagtaacagaaggccttgtatctctaacatagcatgtacatccaaaaattcttggttcaattggaaagagtgatttctgtggatgtattactttgtacggaatatcacctttaagcactacagtgggcatatggttgatcagaaaataagctgtggaaactgcatcaacccaaaattgttttggaaccttcatctgaaacatgagtgcacgagccgtctcaagtaaatgcctgttttttctttcagcaaccctattttgagaaggagtatcaacacaagatgtttgatgaagaatcccattgtgactcatgtagttttgaaatgagttagacacatattcttttccattatcacttcttaatattttcacagacacgtcatattgggttttaatctcaacagagaatgcacaaaaatgtgaaaaatacttctgaacgattcttcataaaataaatccaagtcattcgagaaaaattatccacaaaggtaacaaaatatcgaaacctagttttagaagtaacaggacaaggaccccaaacatcagaatgtactaactcaaacaaagactcagcccgtttattaatccttgggcctaaagaactacgatgatgcttcgcaaaatgacacgactcacaatctaatgaaggtaaattatcaaactgaggacataattccttcaacaccgatagagaaggatgtcctaaccgacaatgagcttcaacacgagaggcagtattgacacacgcaactggtcgaggtacccactcatcaagaatatagagcccattagatgcatgtcctttaccaaatgtcggtttcgtcctaagatcctaaaacacacaataatcagggaaaaatgagacactacaattcagatttttggtaagtttactgacagagattaagttaaaggccaaatttggtaagtttaacacagaagataaagtaatagaagatggtttcacagtcctagaccctttaatctcataggtagaaccatcagcaacagtaataggaggagcaaaatgtgttctgaaggtagagaaagttttatgattacttgtcatatgatttgtggcacctgaatcaattatccatttgtttgaagaggagacaagacatgtttttcctgactctgtcggagtaataacaagagtagatgctttcagtgcttcctgatattgtgaatatttagcaaactcttttgctgtcattgtgacgatcttgtctgaggagtctgaagatgtagcagtattagatgtagcaacattggtagtttgatttctccgattccgattatgcaatttcttgcagttcttcttggtatggccagcctcatggcagtaaaaacacacaatggtacttgaatcattgccacgattttcaaatgccctatttccacccctgttattcatcctccttgtattctctgcatttcctccttttgcagcaagaacattggtgtgctgagaagacgggacattctcagttcgtagaactctactgaacacttcttgaagggaaccaatgtcagaaccagaaagaatctaagattttgcagtctcaaactcagatgggagatcggataagaaactcataacaaccatctgttccctttgagcctattgtactctaacattcggactgaaaggcataagtgcattcaattcctcatataccttcttgaagtccataaagtatgcagtgagggatttagctcccttctcaggacaatggaaggcattccatacatcatacatccgagatacatttccttttctagagtaaagaaaatctagataatccattagctctttaacaaattcataatgactcaacagaccaacaatatcactattaatagagtttttaatatgcagaaataaccgtgcatcatcttgcatccaaagttttctagtgttattattaggaggttcctcagtcaagtggtcatctttagcaacacttctcagataaaatttgatcgtcttgctccattcaatataattagacccatttaatttgtgttcagttatttttgacacaacaaacactatatcagcaacaaaattcttattctcttccatggcaataaaattcaatctccaaagtaatttcacacctagagaagagcagcccagacgagaaattgcaattcaccacagcaagaagaaagaaagagacaagtacctcttgtagactaaatagaaatagtaacagaaacacctgaaatcccaagaacagaatctcacaatccaagaacgagatcaccgcaccacacactggccggaaaacgggattgcgacgccaatggaactggtcggaggtaaaagaagctgccacgctcctccacgcgccgatgcatgagttgacgcgtcttgcttctcagggcgcgtgagcttcacgcgttcagcttccggtcgccagactttgggtatcggttgatcctgacaccgcgctttcccctccgtaggcagtgacactaccaggtcacttttattccgtgacccaagaagaacagagaatggcaaaatgtcactggaaatcagtgacttagaaataacaaacccagaatttgagtcaaaggctctgataccatgtaattcaacaaaggtatttggagaaattattgtatgtttattagaggaataatacatacatatatatatatacaattgagagtcctaaattaggaaggtattatccctaagaatcagcctacaagaaaggaaacaacttaattatggtaagtacagatatatagctaatattgttttttgttttttgtgggtttttttttttttttcttcttggttatgttcctttgttgcatcaaactttggttgccacaaccaaggttattattttgcatagagagttttgtaaacaggaggatgtccttccaatttggcatttagactctagtctagtagttatatgataagtgataacaattattcttggatgatagagatttcaatgcagaaggattgaacagttaatgtttgtattctctctcattgtttagtattcttgatccaggtgcagggaaaggggac

SEQ ID NO: 11446 - DNA, 18407 bp, Vitis vinifera
  Intron number 7 from transcript GSVIVT01023660001 (locus G SVIVG01023660001) derived from phytozome v7.0 (chr-ID chr1 1; pos 8657709 to 8676115)
gtggcaaccttggaggtctggttgatcgggaaaatgtgagtgctttatgaatttccactttttttccttgtgaaaaaattgcttgcgtttcactattctagaaggatgacctattcacatttgcaatatttatagtgtatgttagcatagacatcttgcccataacaacgattgttttttaattcgaaacaaaatatattcatttcattgaaaaataaatacaaaagaacgatgagaatccttcttatgcttgctaaaaaacaaaatatattcattttatctctagtgtttctaggaggcaaggtaatgcctaggggatggaatatccttgctacaaaactaaggaccctaggaattgtgccacacctcaggattttcaaggcacctctagaggatgccctttaccaaggggaggggagtaagggttcaagaatgggggaaacctttgtagatgtggtgagaaagggccatctaaaggtgagggaagttgtgtggatttagcttggggagaagaatgtcttcaataatatgggacctctttacaaggtgtgtggatgtggtcttgttgggtttggtttggtggtgctcaactatatatggcttgctgcaaatggagagataatatgtcaaaagggtgattgtaggcctaataggaagatgtgccttacccatagttttaaaaggcacaaggcgcatttaaggtgcaaaagtctcctatagcttaagtgcaaggcgcaacacaaggtgtgtgcctgagtgaagtgaaagactttggatacacatcaattttgtaaaatatgatttaaaatctaatttgatcaataaaaaatttaaggtccaaaacatttaaaagaagcattcaataaaaaattaatgaaattataattttagtatataattagaaatttcaagaataaaagtgtttaaaaaggaagagtaaagttgagaagtcgtgccttttcaataaggcgcatatcttggcaaacaaggtactataactagggagtggtggcgccttgagcctaggtgtgttttttaaaactatggccctacccaaaatgaggattataatgaagtaggcctatggatggagaagggggcttataaagtgatatgggctaggacaggcttaaagtggagagatgggctttgtcaggttaggtcttgaaagccttaaaagagaggaaggatttagtgggttgggccttgttcgtttgaggagtcctctacccttaatctgagaggtgggggagtggtttgcatgttaaggcatcttaggggagacggtccattgtggatgaggctctcttggctaaagtgtctagattcaagtatgcctcttccctctttttctttgttgagaagtgatggaaattgaaaaactaacataattgctatttaggtagactacaaccaagttactacaaatgccattagagccaagatttctttaagaagaaatctagggaaaaccctttgcataaggaaagtaaactaaaagtccttacaatgagtagattattcccttttataatgctagccctcaactaccttttgatggtattcaaaatagacttggtagcaaaaaatcacttggatggggaaaagaggagggagttgctggtttgcaatagactccaagtcttttgaaatttctgtggatgtgcttgggaagaaactaaaggggatcattgtggaaagaagcagaggattcactttgtggataaggtttggaagttccaacttgtgttggctgttggagggagtggaggttaactgtaggggggagtttgggcaaagattcgtcaaaagctgggaggatggaggtaggaggttcaaacttgaatgtcgagcaaatgaggctggcagatttttattgtgttcagtggttgactcggatgcaaagagacattgtttagtgttcccagaaggaaaatgtttcttggaaggttgggctttgttggctgataaacttcgctcacttggaatatcgacacgtgatgagcctagggaagtttctgaatcctctaagattgagagtagagatggggattcgaaggggaaggggaagaaagaaaaatcctacgttgatgcggtgaatacaagaggagtttcaagagtgagaaggctaagggaagcagcatggctacaacttggagaagaagacgtgtcaagaggaagggagttgctggaccgatgccttgttgggagatggggagaagctttggtttcagttccacacctgtgtgatctggaaagctggggaaaaagtcattggaaactcaaaggagtaaagttcgcgagaatagggggcccttttattttgattgagtttgagaataaatcagaggtagacaaagtgttattaagaggtttccgatgttttaaggattcgattctgcacttggaaaggtgggactctaaagtgggttgttctcaaagttgtgaacatcttaaggaagtttgggtgagagtgatgggattaccattgcacctttggagccgggaagtttttaagaagattggagactgctgtgggggcttcgttgcagtggatgaaagcactgttactttaaaggagctctaatgggccagattactagtgaagttggaggggatggaatggccaagttcgttgcaagtggtaatcgacactacttgttttgctattcaactgtggtgggaggtgctgccaagggtgtccgaagtgcttctggcaatcagaaataggtcggggaaagagcaagaggctagggaagaagaaggggggacttcacgcgctggctgcatggtgaagcagatgcagtcaaatggacaacctgaaaaggtggttgtgccatctgaagatggtgaaaatctctgtaggacagacatggaggctcctctttttgacttgatgtcgacaagaggggtagaggtagacaagtccaaaagatggcagtagtctggttgggggaataattcaaaaactgggcctgcagctaaagctaagggaattttgggttgggacatagagctggcagtgaagaggaggcccatcgtggagggccttcttggaagcatagatgtttgtgggccatcacacttaagcccaatatcattcaggctggagacaaatctccaaaggagggccattgaggagggctatttaggttccatggaggatggtgggctgtcccaagcaggcccattaccaaatatgcatttaaagagctgcgtggaagtgggccgacccactctggactctcataaaggcctagttgtggtgggacaacccattgttgaagactcttttgaggctaggacttatgggggttgccgagaggagatctgtgggtgtccagacgaggctgattttggactctagcagggttcgtctccttcgacgccaaagtctaaaatggtcaccgacgaagctttgatggagaaggcgtctaggtacacaggttctctttcttgacctcttttctcgtcggggaagcgggttttctcttctttttcttctctttctgggccgaatgggttgtttgacgccacagaggggggttgcagtcggggttgtggttcggaaatagttgggggaatagagttgggtcctcttagaatgatattggcggatggtagggaggcggaggtctccgggttgtcgaggttggcaaacgagaggaccgaggaggggacgaaggttgttttggatagggctcctcatgagattatggatgaagggggtgagctgagttggcagtcgagttgtttggctaagtttagctgatgcctcggaatgtcgacggagggctttgaaggagagatcctgtttctgctcagaagaatgaaagaaaggaaagttcagaaggggaagctggaaggtaggaaaaagagaaaattggaatcttcaaagttcgaaagggagttgagaaagctggaatggattgctctaagtttagatgaagatacgtcttctttcttggaatgttagaggggctaataattgtgataagaggaaggtgatcaaagccttgattaagaagaatagggtggacctggtttgcttgcaggaaacaaaaatccaggagatgtcaaggggtcttatttggagcttaggagtgggaagatttttagattggggaactgtggattcaaggggctcaacgggtggtatagtggtgttctaggataatagggtgctggatttgatagagttagaaaagggagaacattcaatttcctgccattttaaaaactgtgaggatggctttatgtggacttttacaggggtttatggtccaaccatgaggagagacagggaatgtttgtggaatgagttgggggccatctacggtctttggaatgggccgtggtgtgttgccggtgattttaatgccatcttaagccttgaagagcgcagtagaggaaggagcttgaattcaaacatgagaagattctcagatgtgatagaagatttacaactaaaggatttgcccttgatagggggtccttttacttggagtggaggggtgaataaccagtctttctcaaggatagattgatttttggtcaatgaagagtgggattatcgttttagtggttcaaggcaatgtgtcctcccgagaccagtgtctgactacttcccaattctattagaaggaggggggttgagaagaggaccatctctctttagatttgagaatatgtgactcaaagtggaggggtttaaggagctgttgaaggcttggtgggagggggacagttttaatggttctgcaagctttattctggccgaaaaactaaaggttgtaaagtctaaactgaaggagtggaacagagatgtctttggaagggtggaatataggaagaatttggctttggatcagctgcagttttatgatgcaaaggagaagactaacaaactgtccttggaagagatggatgctagaagagaagcgaggaaagaatacaaaaaatgggttttattagaagagatgacttggagacaaaaatctaggaaagtgtggctgaaagaaggtgacagaaatacgagatttttccataggatggcaaacgctcacaaaagaagaaacagtgtggaccaaattaggattaatggtgtttggtattcagaggagaatgggattagcgaaggaatagcgaatgcctttagatctttgctgtccaatccgggggactggcaccctcctttattcgggctacagtgcgaaacgttgtagaatctggatgttgatgctttggaggtgtagttcacggaggaggaggtgcatggcgcactgttgggttgtagtggggataaagccccggggcctgatggctttacaatggctttctggaagtttgcttgggactttgtgaaagaggatgtgatgagtttcttcagggagttccatgatcacaacaaatttgttaaaaacctaaacataacttttctggttttaatcccaaaaaaagtgggggctgaagatttgagggattttaggcccataagcttagtgggaagcctatacaagtggtaggctaaggttttagccaatagacttaaaaaagtggttgaaaaggtggtttctaaggctcaaggggcctttgtggagggtagacaaattctaggtgcagtgctaatagctaatgaagccattgacttgattctgaagaataatgagaatggttttatgtgcaaacttgacatagagaaggcatatgccaatgtggactggtatttcctttttacagttatgcagaaaatgggctttggggagaaatggatagggtggattaagtggtgcatatccactgtaagtttctctgtgttgattaatggaaccgtctaagggtttcttccaaagctcaaggggattgaggcaaggtgaccctttatcgccttatctttttgtgatagccatggaggtttttagctcatttcttaaaagggttgtggatggaggttttatgtcgggttgtaaagtgaagggtaggaacggagaaggggttcagatttcccacttgccgtttgctgataacaccttggtgttttgccaagcttctcaagaccaattgacttacctaagctggttgcttatgtggtttgaggccgtatcaggattgagaattagcttggagaagagtgaactcattctagtagtgagggtagagaatattgatgatcttgccttggactttggttgtagagtgggtccacttatctaggcctccccttgggtgctccgtttaagacaatatcagtgtgggatggagtggaagagcgattccgtaaaagattggccatgtggaagagacaatacttatcaaagggggggagagcaactctaatccaaagtactttgtcgaatctccctatttactttatgtccttgttgaagctaccaagttcagttagacgaagactagagcaaatccaaagagacttcctttggggtggtggcaacttggagcgaaaaccacacttagtaagatggaaggtggtgtgtttaagtaaaaagaaagggggattgaaggtcaaatgtctttccattctcaataaggctctcctttccaaatgaaattggcgattcgcaaatgagagagatgctttgtggaatcaagtgattcaaagaaagtatggggaagatagagggggttggagttctcgggaagtgagagaggcacatggtgtggggctttggaaaggaataaggatggattggaagttggtgggcactagaatctcttttagagttggcaatgggaggagggtgagcttttggagggatacatggtgtggggacttccccctatgtgagtcttttccttccctctttgccttgtctgctgaaaaggaagcttgggtggcggaagtttgggatcccttggccgatgggggttgggggggttggagcctctgtttttcaagagctctaaatgattgggaggtggaggaggcggaaagatttttggagcatcttcacgggaagagagtgcttggagatgtagaggatatggtggtttggactgaaacaaagagcggcaaattttcagcaaagtctctctaccttgctttagaagcggactgcccttttttgtttccttctagttgtatttggaatgggtgggtacaacccaaaatcagtttctttgcatgggaggcagcatggggtaaagctttaaccctagaccttgttcagaaaagaggatggtccttggcaaatagatgctttatgtgccttgagaatgaggagaccatagatcatttgcttcttcactgttcaaaaacaagggccttatgggagttactctttaccttggttggggtgtcttgggtgttgtcctcctcagttagagagactcttcttagctggcacggttcatttgtgggcaaaaagtgcaagatgtggagagttgctcctcgtcatgtattttggacggtgtggaagacgagaaatagattggcatttaaggatgacgagttgtcaatccaaagattgaaatattcctttctttcctctctttggtctgaggctaagttgtttatagttgatcgccctctaactatagttaattttattgattggttgggatcctcttaaggttgtttttgggctaggtgacattttgggtctctttctttttctttagcctttttagtggtgggtgtttaggtttgtataccttgagtcgcttatttggcgtctctttttaatgagttatctttacctatcaaaaaaaaaaaaaaaaaaaagacttggtagcttttatacatccatttatcatggttctagtaaacaaaaataaaaatgactagccttttgacttctaatttagtaacaaacttttcccatgtaaacctttgagtatttaaacttgctatcaattctctattaatgattgcatcaaggagctctttcttcttctcttcttaaggatgagcatccaattttgcgggtggatggttagccagagagagccaaaaggagcgcttaaggttgagtgcttattgttagccggagtgggccattgaatatgattttgcaagatggaactcgacagtctttctagaaaatgctttgagaagaccttcgtgtgaggaagtaaaggagatgatcctaacaaaggagactcatccttgttgctcgactctgagggacattttttctacaagttggcatgctttagcaagtttatgggaatgcaagttgatagttttgaagagaaattttagccgttatgaggaagatggagtttagaaaaaaaaagtagagttaagcttgaggaaaagaaggaagctagtctctcgatttggattgaaaagggagatttgaaagttaattataagtcttcatcatagaaaaagaggattgggaagaacaattgggagctagctaatgtttgcctatggaactacaaatcctatcttggaatgtaaggtcaataatggggaaaaatgaaacatggttaaatccctgatcaaatcacaaatgaccttatttgtttgcaagaaacaaaggtataacaaatgtcaatgtagatggtgaggagcttaggagtggaaagattctcgaaatgggtggttatttttttttttttttgatcagaaacgaaaaagattaaattaaaaaaagaacaaatacataagagaaaaaagaaacaacagaaagagaaaaaaaccaagggaaggatgagaggtccttcctacacaagaaccaaggaaaacacccaacaatagaaatctaaaaacaaaagagaacccaacaaacttcaaactcttgaaacgcaaaccccaatccaattgatttgtagaatgcttagaggaactcctctaaaagcttcagtacaagaagcccatagagaagagtaaaaccgaatcaaatcccaaaccacctcttccgttctccctttatcctcaaagattctattattcctttcttgccacaccatccaaatcaaagtaaggcaagcaatttgccaaagaatcttgcctcttactgagttccccaagcctttaaaagaaataaccaacatatcctcaatgctccttggagaaacccaaatcacacctactagattgaacaacctgtgccaaagtccaatggtgacaggacaatgaagaaaaaggtggtcaatcgactctccatttcctttgcaaagaatgcaccattgaggacagagggctttgtagggtcttctcaattgcaacttgtcattagtgtttaccttcccatgtgctactaaccaagcgagggccttaacctttgaagggacttttgagctccataaaaacttggccggaaggaacattaaaggatttgaatctcttgacaatgcatagaaaaaagatttcactgaaaacgagcctgacgaagacaaagaccacgctcttgagtctgatgaagaaggggaaagaagcacagaatgaagagaggacattaatctctgaaggagatcaatttctgaatccgttagattgcggcgaaagttaaaattccaagacaatggaaaggaattgccaaggacgtttgagacagtaaggtttctcatagaaataactctgtagagttcagcaaattgagcatacaaagtttggtttccccaccaaatatcttcccaaaaccgaattctctccccattgcccaccactaggcgaacaaaaggggagaactcttggaaaacttgagcaatagccttccaaggacatctgtgagaccatttaaccaccatgttggcgtcccatccattaggatgggtcccatatatactcgcaataaccttatgccaaagaccgctcctttctctaggaaacctccaaagccatttccctaagagggcactatttctcatagaagtcttcccaaagcccaaacctcccatctcccttggtctactgacaacctcccatctgataaggtgatctctcttcccttccccggccccagaccaaagaaaatccctttgcatcttctcaatctttgaagctatagatacaaggattttgaagagggaaaggaagtagctagggatgtgagacagacaagactgaattagagtaatcctcccttccaaagacaaataggcctttttccacccatccaacctcctcaaaattctttcaaccactggatcccaaaaacctattgtctttgggttccctcctaaaggaaggcctaaataagacaaaggccactctgacactctgcactccaaaaccaaagccaaactagacaacatttcctgcctagtgttaatacctgaaatggtgcttttttctaagttgatttttaaaccagatacttgcccaaaaaccaaaaggataatcttaaggttttgaagaagatccaaagaggctttagagaaaaatatggtatcatcagcaaactgtaacaaggacactctagtcctatccctccccacaaggaaaccctcagttatcccagtttcctcagctctaatcatcaacctacttagaacatctgctactagagtgaaaaggaaaggagaaagaggatctccctgtctcaatcctctagaggccttaacccaaccctttgcattcccattaactaggatagcaaaactagaagaagataaacagcccctcatccaagatctccatttctggctgaaccccttcctttgaagcacatgatctaaaaaaccccactccacatgatcataggccttctcaaaatcaattttgaaaactaccccttcctctcctgaccttcttttctcatccaccacttcattggctatcaatacagcatccaatatttgtctcccttccacaaaggctccttgcgagccaaagattgtttcatgaagaactttgcgtaaacgccctgataagaccttagcaattatcttatataaacttgtaaccaaactaataggtctataatctgagattttgaaagtttggcttttcttaggcaccatagcaatgaaagtcgcatttgtgctttgatttattacccctttagtgtggaactcaaaaaacaccctcatgagaccctcttttatcacatcccaacactcttgataaactgctaaggtaaagccatcagggccaggggccttttccttattcaattggaaaactgccattcgaacctcctcttccgaaaacggcctatccaaccaaattgcactctcttcagaaataggggcccaatcaatcccttcaatcttccaagaatcaccttcaggtttggaataaagattcccaaagaaatttacaatctcctcagaaataacctcaatgttatttaaagtctcccccctctcagaaatcagagactttataaacttcctgcttcttcttccagtggccactctgtgaaaaaacttagagttgcaatccccttctttaatccacttaaccctagatttttgtctccattgtacctcttccttcaataacaaatcctctaactccttccttcttaagatcctttccgagaccaactcaagatttaaattcccttcttgttcaattctatcaattctgcctaagtccgtaagaatatgctttttcctctctcttaaatctccaaagacccttgtattccactctttcaactttgatttaataaactttagtttcctcataaatttgtgaccttcccaaccctcaaccgtacactcttgccaccaatctctaaacttctctttaaactcaagatggagcaaccacatattctcaaacctaaaaggagtcggcccccacataaaaggattagtttccaagcaaattaggctatggtcagaggtccatctaggaagggcctcttgaatattttgagagaaaaaagaatcccactcagaagagaacaaaaacctatctaacctcttgcaaataggatcgacttgcatgtttgaccatgtaaaagccgcattcctaagaggggggtccaacaaaccactttcccttataaactcgtcaaagcgcctcatgttgacagttagcctagaatcacccatcttcttagatatcctcctgatcacattaaaatcccctcctacacaccaccttgggaaagtcagaccatgtagatcatgaagctccaaccaaaagtcctccctccacactgccttattcgggccatacattgaggttaaccaaaagactcttcctcattagagttcaattttacagtaacagagaaggatcctaacaccttctctgaacaattgaacttaactgaatcccacaagatcacaatcccccccgatgccccacaagcaggaagagcaacccaatccagacttctacctttccatatactactcactaacctcctatcccaaatttcacgctttgtttcctgaagcatcaccacatttgggttttgagtacttaaaaatcttctcacagtcctccttttcttcctagaacctaaacctcttgtattccagcttaaaatcttcatgagaacaatcacaacccaacacaacccgcacccaggactaatcctctcctcgaattccagaatcctttttcttctttcttctggaataaaccttgtccgcagagagaggattcctattctctccttccactcctttcccattatccctgacaattctaaccctcaaactctccagaaccgactgaaccttgaccatcttccgaggcgtaagcccctcaacctgaaaaccttccagtgggagagtggaaggttcttgcactgggaacgaagcctcacctgagacaccatgcaccttaaggttgctaagagtttccctaaggaaaggtcggtctttagatttttggttagaggtttctaggggtaccaccacaccgttcgaacaggacgcaccaccacgatggttatcatacaccacaggagagatagaaacagacccacgctgaaaagcgtggcttgactccaacggatacgaagaagaagagtgaacacaaaaaggatgaaccaaagaaaccgaggtttcgggaataggatttggctcaaaagccccagacagaggaagatctcgctcagaaacagctaagataggattacgcacctcattaatcaatttgcattgcaaaatcccctcttctccctctgtctcgccggtggaaactttggatgtttccaaaccagtggagaaatcgctctttctggagtgagatttgccccgagaaatgtctcgatttgtctccagtgagccacctccttcaaagctacgcttcggggaagaaaacgcctcgtcaaatctcggcggcccacttcttgctctgcgtctcacggagactggagatcccttcgtctttgacgacacttgaggaagaccttccgacgctttattctttgcagagagccctggtctttggagctttgaagacgaagaaacagctgggccaccatttgaagatcctttatgggctggacccgctattggcccaaaatccttcgccccaacttgggcccaaacagatcgggcttcaaggacgtctggtgttggcccgaaattacttcccgccattgggcccaacacccatcttccctttcctttctcccccttagccgattttgaatctgaagagctaaaatggagacgatgacggggcatccatctttggcagtcattggtcctgtcaatagctcgtagcccctcaaccatctgtggcttctgcaagacgcaacccccggctgacctcagctcgtccttgctacgactagactcaggctttatagagtctcctccgtcgtcttctcggtcatcttctccggtgactgtaactgcaaccgtgtatgtccgatctccatcttctacctctaatagcgctggaagcacgacctttggaagcatttccacccgcaatgttactttcgacaaatcaacaaactttaaggagtttcttgccaccttcgttaccctcccccactgctgcaaaacgtgactcaactgcacctcatcccacaggtggaaagggagacctcttagttccagccacccccgtctaaattttcccctaaccactgagttctcttctggcgaccatctccttagagcaaaaacctctcctctcactgtgaaactacctctttcttgaaaccactgagctttccttgcattttccacaaaaaaacaccctttgtaagcaaaaatgggtgttacagataccattcctttcatccccacccttctcgctatagcttttccaacctcacaccagtcacgtatttctcctttgccttcacaaaccaccgctcttgcccattttccaactggcatccctgcaccattccttgttcctttctctacaaccacctcagcgtaggtcctctcacctctgtacattcctttactctcttgaagcttgttttgcgtctcctgcgattctctcccaacttgaacagagatctcttggactgaagcaatcaccttcctgaggttttcccacccaaagccattaacacctcttggaacaactaagaccaaaggttttctctttgcactgtattctgtaattttcatataacaccctctgctattaaaacatatctccatcatatgagtcctggtcttgcccctcattttccgaatgtaacccctcaaatcctccaactccacagctttctctaactgctccactagccaacccgtctcctcctctccaaaatctaaagaaaccacaaaaccttggcttctctctgttattgaaagccattttcctccattgtaatcttcagacttcacctggaaaatctttctctccactacaaccgactgatttcgaatcatagacatttgaaacaccaatcgtgatcaagttgaaattccagatcagaatgctatttgttcagggattagtttcccacagcattcccacatccagatcagaacttttctttcattcagcatagattgttatgttacaatatatcaacaaaggatattcgcttctgcatcctttctcatttgctcgatcaatggggtaagggttcacttttgagaaaacctatttttttttttttttgatcagaaacgaaaaagattaaattaaaaaaagaacaaatacagaagagaaaaaagaaacaacagaaagagaaaaaaaccaagggaaggatgagaggtccttcctacactcgaaatgggtggttatggaagctaggggaatgatggatgatattttagtgttttgggacaacaaagttttggaattaattgaaatggtagtgagagtctttttagtttctcattggaaagtgggatattgtctatttggacaaaagaaagggcggtttgggagttagacgtctttctactctcaataaggcccttttatgtaagtggaaccggtgctttgtgaatgaaagagagactctttggaagcatgttattagtaggaagtttggggaggaagaaggggggtggtgtactagggaagtgagggaggggtttggtgtaggattttggaaggaaattaggaaggaaggggctcttttgcaaaacaaagttgtattttctatgggagatggaagaagagtgaaattttggaaagaaaaatggtgtaggaactttgctctttctgattctttcccctccttgtatgccttagcggcttctaaagaggcttggttagtggagttgtgtgactcattgggagaggaaggggtttggaaccctaggttctctaggcctttcaatgattggaaggtggaggagatggagaggtttcttgtgacaatacaaggaaggaggcttaatcataatttggaagatagggtgttgtggaaagagaccaaggatgggattttttctgtcaaatctctttatagtgctctagattctagaagtgctgttcagtttccaaagagcatcttttggagcctttgtgttactactaaagtgagttttttttgtgcttgggatgccttttagggtaaggtgttaactttggatcaacttaaaaagagggggtggactttagctaatagatgcttcctttgttgtgtggaagaagagtctcttgatcatattctaattcattgcactaaggcaagagttttatgggagttattgtttgctctttttggcgtaatgtgggtccttccttattcggttagagataaccttcttggttggcgtggtatcaacttgggcaagaagcgtagtaaggtgtggatgacaacccccttatgtcttttttgggtggtttggaaggaaagaaataaaattgcttttgaaaatgaggagctttcgattcataggatgaaaaattcttttgtatgtaatttttggttttggactaagtcgattgtagatgaaggacctcttcctttaatcaacttttttgattggttgggttctagttgagggctggtgattttttgtatcccctcttctttttgttcttgcttttggtgcctcttgtatacccctgtatgctttgggttagccttaaggctccctttattctaatttatttttctgtatgtttacctatcaaaaaaaaaaaaaatctcattggtttagaaacgacaagctggctttgtctagttgttctcagggatgtatgagctggaccaaagaggggagagaggaattctaagaggaattagggtttatatagggactttggaatgattcttggtgtgttggaggggacttaaatagtgttagatttactagggaaaggaggaattgttttgagattttcatcaacaatgaagcatttctcgaagattattaaggagctttgtttgtaagaggggcacaaaccttttagatttgaaaatatgtggcttaaagtaggattcaagaaccaagatagaaattagtgggaaggttgttttattttgggggaaaaggtgtaagggagagatggtgatggggaagagttgtcttgtttgttgtttgctgatgatactcttgtttttttttttttttttcgataagtaaacacatagatgatactcttgttttttgtgaggcttctaaatatcaaagtaggcacacttccttctacctatttaggattgcctttgggtgctccgtttagatcggtgtcagtttgggatggattggaagagaggtttcgtggaagactctttttatggaaatgactactcatctgtaaagtggggaggctaactctcatcaggaacactttatttggcattcccatttattttgtctttaaaaagtatttcgaggatagtcatatcaaggttggagaaaattcatagggatttcctatggggaggtggagggttggagaaaaagatacatcttgtgaagtggtgcactgtgtgtttggagaagagtaagggtgggttagggatttgacgtttgtctttgttaaatgaggcacttttgtggaaatggagttggaggtatgccattgagagaggtgccttttgggcatgagtgattagtagcaaatatggagaggaagagggtgggtggtggaccggtgaagttagagttgggtatggagtcaggctttggaaatccattaggaaggaatggaatacttgggtcatttttcttttgtggtgggtaatgggaggagggtgcaggataaatggtgtggggatgaactgttgaacgttttctttccctctttatatgcctttgttgttgtagaagaggcttaggtggcgaatctttgggtttagcatggggagacaagtcattggaacctttgtttctcatgacctttgaatgattgggaagtggataaagttggggatttatttttaaacttgcaaggaaatgcagttgatatagaggggaaagataagttggcctagatgaacttgtacaataataagttctttgggaagcatttgtatgccactttggaactagttttttttttttttttctccttttttgtttgtgcctttatacctgtgtatatttttgtgcatctgtttgttgggcgattttaatataatcgttgttttcctataaaaagggactataagtagacaaagcaatatacccacactacaaatgctctgcatactgaaggaggaaaaaagtgtccaataaaagaaaccaaatgttttactccttgctcagctatctagtctgtagcttgactagttgaaaaaggaacccaagagagagcattccatttgatggcttttacttctgagataccctttgctagatactatttatgctgcactgaatgttacctgataattttttttctctaaaatgtatgttatattatctaaatgcatgctataggcctggactggttcagtcgattgcctgctaggtagaattcctggggtttgtcagtctaaacttgctgttattaggctaattttgtatctggagattttaggttttgcttttgtttgtgttgcttgatgaatcatcttccttaattgattttctgatggatcgtaggttcctttaccagagaagccatccacagaggattt

SEQ ID NO: 11447 - DNA, 24453 bp, Vitis vinifera
  Intron number 2 from transcript GSVIVT01008068001 (locus G SVIVG01008068001) derived from phytozome v7.0 (chr-ID chr1 7; pos 6093499 to 6117951)
ccgtgttgtttcttgcttccgacgattctgagtttgttactggtcataacttggttgtcgacggtcattaccgccggtgagcttgtcagattacagggcaactcaattctctccggtcactatttttattttcctttttgtgttggtaaagttatgtatcttgtggtgttcttatttgtttttaagtgtgtaagatattttaaaatgttgtaaatgaagtggtgaatgaccacattgatagtcatttatgaactacatttacgagtaattgaagttcatattatgaagcatataaaagacttcttacactccatgtaagagcatcccgataaaaagaaagaaattatcttcctctcattctctcaacaattcttattgatttcttttcctcttctatacatatattattaaaataatatatagtaatccttacttttatttgagttacatttattctcattttgtaatacgtttttaacatgaattgttttgaaggtaattctcgtatcttaaatttgaagttatttatatagaataaaattttacatagttatattattgttgatttattttgttacatattgttaaaagttataaacaaattatttgattttgtttataataaaagtaataccaatgctatcaatttattataattgattctaataatattattttgtcatatatataaagttatttgacaatgtcgaatctcacaaaactcgaatttgtggcacttgacatttcgggaaagaattatatatcttggatccttgatgctgaaatacatctcgatgcaatgaaccttggagctacgatcaaagaaggaaatcaagcatccctgtaggatcgcgcaaaaacattgattttccttcgccattacctccatgaaggtttaaaaaatgagtatcttacgataaaagacccttttactctatggagtaatttgaaggaaagatatgaccaccataaaactgtgattctcccaaaagctcgatatgattggatgcttctaaggttgcaagattttaaaactgttagtggatacaacttcgcacttttcaaaatcaactctcaattaaagctgtgtggagaaaaaatcacagaagaagacatgttagaaaaaacttttactacgtttcatgcttcgaatgtgctcctgcaacatcaatatcgagagcgtagatttacacaatattctgaattaatatcatgtcttcttgttgctgaacaaaataatgagcttttgatgagaaatcaccagtcttgtccaactagatctgaaccattccctgaagtgaatgcaatatcgtcccaaattcgtggactatgacgaggacgtggtcgtggtcgtggaagaaattcccgataccatggttcttatagtaataattctcaaaaaatgaaagcctcattgtaccaccagaagtggaacaatactgagacaatacaagaaaatgggaagcgtttacaagataaacctcataagaaccatgataataattgttatagatgtggtatgaaaggacattcgtcgcgtacctgtcgtacgcccaaacatttggtcgacctttaccaaacatcaataaaagcaaaatgaaaagagatagagatgaactttaccgatgatgatggattggacctaaactactatgacattgatttctttggaagtcccaatgaaaaaacagaccatttgataaatgatgagaaaattaacattgattgatgttactttatatatgaaataatatattattatgtcttatatttacatctgatttactttgttatttacattatgccttgttttttttcgttatatctaaaatccatgtgttatttggtttgaagatgaatgaggatgatgtatgtctcgcagataatgcgaccacgcacacaattcttcgagataaaaaatatttcctcgaattgacattaataaaagctaatgtaaataccatatctggtactacaaacttagttgaagactctggaagagtaaacataacgttgtcaaatggaactagattccatataaatgacgctttatattctagcaaatccagaagaagtttgctcagttttaaagatatccgcagaaatggatatcatattgaaactatgaatgaagataatgtagaatatctttacattacttccattatatatgaccagaagcttataataaaaaaactcccagctttctcatctgggttgtatcatataactataaagcctattgaatcatatgttgtcatgaactagaagttcaatgacccaaatttttttgtcatttggcatgacaggctaggtcacccagggtcttcaatgatgcgtcaaataattgaacactcacatggacatccattaaagaactagaagattctttcacccaatgaatactcatgtgctgcatgctcacaaggtaaattgataatcagaccatcttttactaaagtcatatttgagtcaccagtctttttacaaagaatccatggggacatatgtgggcttatccatccaccatgtggaccattccgtaattttatgatcttaatagatgcttctactaggtggtcacatgtttgtctcatttctacacgtaacgttgcctttactagactcattgcacaaataatcagattacgaacacaatttccaaattatccaattaagacaatacgtcttgataatgctgacgaatttacttctcaaacattcattgactattgcatgttagtagggataaatattgagcatcctgttgctcatactcatgcccaaaatggcttagtagaatccttcatcaaacgtctccaattaatagctcgaccattactaatgaaaaccaaattacctactttcgcctgggaacatgctattatgcatgttgcagctttagtccgtattcaacctacaacttaccatgaatactccccttcacaacttgtgcttggaaaacaaccaaatatctttcacttacaaatctttggttgtgcagtatatgtaccacttgcacctacacaacgcactaaaatgggtccccaacgaagacttgggatttatgtaggttttgattatccatttatcataagatatcttgaacctttgacagacgatgtttttatagtccgctttgcggattgtcattttaatgagagtgttttcccatcattagggggagaaaattcgattcctgaagaacgacgagaaattagttggaagacatctactatgacccatcttgatcttcgtacaaatcaacgtgaactagaagttcaaaagattattcgtttgcaaaatcttgcaaatcaattaccagatgcattcattgatacaaagaaagtgacaaagtcacatatcccgactgcaaatactctagcacggattgatgtccctgtaggacagttaacaaatgaatctaagatacgcctaaagcatggtagacctgtcggctcaaaggatgtaactccccggaagaaaagaacccaagaaaaacttagcactctagaagaggccatcaaaatgcctgatcagtttaaaattaataaatctataaccctagaagaggcacaaataatgtagaaagcccttgaaaagacacatattgaacaaaaaacccatgaatggcatattgaacgagaagcccttaaagagggacaggtacctgaaagttgtgagctctcagtaagatatgtacacacaggagaaaaatggaatcgaaataatattgttcttaacaatatttttgctttccaagtggcctttgaagtcataacaaattatgaagatcccgaaccacaaaatgtggaagaatgttgacatagaaatgattagccaaaatggaaagaagctatataggcagagttaaactcattaacaaaacgagaagtttttggacctgtagtccaaacacctaaagatgtaaagcctgttgggtacaaatgggtatttgtacgaaagcgcaatgagaataatgagatcataagatataaaacgcgattagtagcgcaaggtttctcgtagagacctggtattgactacaaggaaacatattctcccgtcatggacgcaatcacattttgtttcttaattagttttacagtctcagaaggactggatatgcatctcatggatgttattacaacatatttatacgaatccatggataatgatatatacatgaaaatccctgaatgatttaaattgtctggagcaaatagtacaaagcctcgtagcatgtactcaatcaagttacaacgatcattgtatggattaaagcaattaggacgcatgtggtacaatcgccttagcgaatatttgctaaaagaagggtatgtgaataactctatatgctcatgcatcttcattaagaaatcagaaaccaaatttgcagttattgtagtgtatgttgatgacttatatcttgttggaactcctgaagagctcacaagaacaacaaattacttgaaaaaggaatttgagatgaaagatcttggaaaaacaaaattgtgtctcagcctgcagatcgagcattttccaaatagagttttagtacatcaatcaatatacattaagaaagttttgaagcgtttttatatggataaagcgtatcctttaagttctcaaatggttgtccgatcacttgatgtgaaaaaagacccgtttcatctttgcgaaaaaggtgaagagttacttggtcctaaagtaccatatcttagtgctattggtgcacttatgtatcttgccaattgtacacgtccagacattggaatggtatctgataggaatttgaggctaatccaatctatggtaatcaccttagggggggggggggggtgaataaggggatggtctatttttgaaaatttaaacaagtgaatgcaagagacaattatatgcaagtatataataatcaatatatagacaattgcatataaattaaagagtagggaagagagaatgcaaacacaagagtttatagtggttcggcgcaactcggcctacatccactctcctttagcttcaatcccgagcttgagggtccactaatccaaggcttccaaaccaagccttcaagtaatacaattggattatggttccaattcaccctcttggacttttgactccaatcaccctttacacttctcaagagatatcccactcttgaacaacccctcaagtgataccccccacacttgagaaacttcctctcaaagatttataaatgaatgatctctcaaaaatcctagcacaagaactttaaactcaaatgatacaagaaaaactaggattgaatggtgtactaaagatatgcaagttttgaaataatggtgcactcaaaaatactattccaaggctcaaatataatcaagaaagatttgggaaggttaagctattgaaacaatgaagattggagccttttttatagaagagaaaagccaaactagccgtttggggtttgaccggtcgagctaggagtcgaccgattgactagccgttagcattaaatgcttggcaagtgactgttgggcctcaaccggacctcgactgattgaggttcaaccttgaccgggaagaaaaggccactaggagaaagagaaactttttggcttccttcaacaggtcctcaaccggatgagcacaaccgatcgactagttgaaccggttgagccattttttggctcaacacccaacctttttcaacttaaaaccttttaacacaagtttgaaaattatttaacacaaggttttagttgaaaacataaaatcatccaattcttcttcatgatttctccttggcttgatttgtctttgtgattgccactttggaaatcgagatgaagtctcctatcttgaggcatttattgtggactcgatcctcaccgggagacggattcacgtgggatatctgatgatgatgcatatgatctcctgcattgagagcacgacatgagtactctcctacgacagcttccttacccgagtattcaaggatgcccgggtcgacttgagtagagagacggattttgaggcccccactagctatgacacgtatgatgagcagtctttggggcgcatgaagttcgagaaggcacccgatgactcctaggttaggagagttgagcgacaggcctggggacatggacagatgcatcccgaggcagagaaggaggccaagatcaaagagatggaggatgggttagaccatcagagggactttgagcagagatggcccgagcttgacattccgcatccacctcagtcagagggcattcatgttgaggctactttctcaaagcctatgatgactgagtcgtctttcacaataggaccatcatctcagtcatcatttaccgagctaccatctcaggcacctcatgctcttgatcatgcgccttagatggatgtctctgctcagatcagctctcttgggactcgtatggaggagcttgccttagtccatgactctcgcttctactctatggaggagcacctggatcagtatcagactggagtcacttctcggtttgatcacttccagcagtgatttgagtgcatagaggagcgtatggatcaccaacaggctacattcgagcatctccagcagcgcattgatcgtattgagagtcgttaggcgagtcaacatgaggagatgatggcttacctccgctctgtgtttcctcttccacccccttagccttgagactatctagacatcccattccgtttattttttatgttgccaaatggggagaaatttataagatctaggagaccctcctacatgtcattgtcatcatagtcatatctatcttgtttgtacatgtgaggtttcatttccatatatatatgatatgacatttttatgatccagtgttcattttcgtgttttacattgcttcctattaaaaatcgtttgattgatccatgattggtttgagggggagatttttttctctcctagataaccaaggtttgtcatcataaaaaaatgggagattgttagcccaagggttctcctaatcgggttttgatgataacaaaccatggttaagtgactaatttgtttaaatgtttaagaatcttaggtataaactcgaaaattcatcaaaggaccaaatggatacaagattaagacgcttggaagacttgtgatcataggaaactaatgtaagatgaatgcatgagtgtgcttaggattttcatacgtttcatgcatcttagaaaactcggtttattatttaaaacgtcgatttcattaaaatccgagtttttaactaatgtaccttagtcaaaatgttttataattggcttaataattaacttaaagaccttgcctaagtgttagaaaagaaaggaataaaaaaaataggttttcagggccaaaaaggctcaattagtcgaggctatgcccaaccgactcaaccaattgaggaaccgatcgaccggttgtggtcgtccggtcgaggaccggtcgaggttcggttaaggcaatggtaacctgtcatgcattaaatgttccaacggctagtgaactggtcgacccctggctcgaccggacgaggttattttttgctgtttttgactcccgagcttagaaacctataaattgagagctccacttcatttattgataagagaacacttgcattcaataacctacctacctgttcttgatcaaaaagctctcatttccttcatagtgcattaaatcaccacttgcatatcctttagtgcactcttgtgtgtcatcctagctttgtcttgtatttgagccatccttaagctaggttgagtgattatatcttgtaacaatcttagtgttaaagccttcaaaagggttgaatcttgaagagattgtgtaagagcccattggagtcagaatccaagtgtaagaagattggaagcttggttgaagcttcaagttagtggaactctcactcggttaggaggttgaggagagtggacgtaggcaaggaagtgccgaaccactataaacccgagtttgaattctctaaactctatatctttactttgcttatattgtgtttgaatttgttgtgattgaaaagattttaaaaacccaattcactcccccctccccctttgggtgtttttcttaactaagcataacctttgttttctcagtatcaaacatatattacgttatcttcgcagaactactgatatgggtttattttactcaagggaatcaaagcaacaattgcttggatatgcagatgtaggatatctttcagatccacataaaggtaggtcacaaatagggtatgtgtttaattgcaatggtactgctatttcatggagatctgtcaaacaaataatggtggtcacatcatcaaatcattcagaaatactggcaattcatgaagcaagtcgtgaatgtatatggctaaggtctatgatctagcatattcgggaatcatgtggactcttttctatcaaaggtgacctgacaatattatttgaagataatgttgcatgcatttcacaaataaaaaggggttatattaaaggagatagaactaaacacatttcaccaaaattcttttatacaaatgaactccaaaagagtggtgaaattgatgtgcaacaaatacgctcaagtgataatctagcagatttattcacaaaatcattgccaacctcaacattcaagaagttaatacataggatttgaatgcgtcaactcaaggatattgacatgatagggagtaagcttgtaaaagggtgttagtgtactgtactctttttttccttcgtccaggttttgtcctacggggttttactggcaaggtttttaacgaggcagtcctaatataccaagaaaagaatattgtactctttttcgttcgctaggtttttcctatagggttttttactagcaaggttttaatgagacatattcttttaatatggtggtcatccaagggggagtgttgtaaatgaagtggtgaatgaccacattgatggtcatttatgaactccatttactcatctttatgatgagtaatgggaattcatattatgaagcctataaaaggcttcttacaccccatgtaagagcatctcgagaaaaagaaagaaattatcttcctcttattctctctccctctttctttcattctctcaacacttctccttgatttcttcctccccttatatatatatatatatatatatattattaaagtaatacataatcatccatacttttatttgagtcacatttattctcattttacaacataaaaaacatttgctttaaaatgtttaccaaaacaaattttcttttatttttatattaatgaaaaaaattaatctcccagctttgtcataataggcaaattcaatttctttaggcaaaattaagctaaatttttttttaaatttaattaaattgctttaatcttatatattttgaatgaaaattaaatttattataaatcagtaaaattatcattcacaaaaaaaattgtttatgatttaaatatattttacttttgtcctatttttttttcaagaaattttaaattaataataataagttccagtgaatatttaaaagttataactctaaaaacttaattcacatttatttaaacatccatgtagaatcaacattttcaattaatttaaaaaataaaaaattaggatttcatgcattttcccaaattacaaattatgaaaattaataaattcgtcttatgaatggaacacatattctaatcacaaatctataaacccaaagatcactacttaaaagttttcattccctcgatacaaattgttttttaagaatactttttttaaaaagtaaaaagtaaaaacaaaatttgtttggataaattatttttaaaaataatttttatttttattttgtaaaaaaaaattgcaaattcaattcaagtttttattaaaactaattaaaaaaatagtttttaatgaatatatgaatagtagttgtacatacaaaattcttgaagttctacaaatttaacaaaactagtagaaaaataattcaaacgaaaatttgtagtaatgtgattgtggggtaccaactaaatagtaattttctttggtctttcggtttaattacgatgtaaaacactatgaagaaagatcacttgcctttttctccttgcaaaacctctttgattgttttgtcgatactctccattaaaaaaaattcatgattatttataaataaaattgagtaactaaatttagaatcccaaaatttgatttatcaattcaaaaaatttggttccgattttagcgacttgtataattctttaagaaaatttgctaataaaaaaatatttattttttaatttttctgtgacttcgattgaaatattttttcttttaaacatttgtcaacacttcaattgtttgatttgttttatttgcaaggcctgattttatagccttccaaatttcatcacctatcatccttttgaataaatgtcacatatttatatcacttgttgattcgtgcccacttggtgtctcagttgattcatgtccagctggtgctccttgattgagggagtaatcaacaaaatttataacctattacaccatgaactagggtagcaaagacaaagctactatagcatagtggctctaggatcattcactgggataggttttcactccacaattgatattaattcaaagatgaattggtgctttttcatttcaaggttagctttaaaagaaaacataaagatgtttgaataaaaaaggttggttttaaactaaccaaaaatagtaactgattttaattacaaagaaaagtgtctcttggagtttagatcactaggctcaggttccttatacaaaaaggaagtttcagtcacttgtttcttttcctcgcattggggatttaacatatagttatttcccgaaccggtgtggtacagatgtttccccttaatgggttcagacactaaatccctctcactgatgcatcttgcaatgactcatgcctctcacctagcacttgccattcaagatgatctttaaccttggattatccgtcaaaagctcgcaagagataactaatggatgtctccattgagtccaaaagcttaccaagtgttggctattctagaatatcctaccttcaaaccacctcccaaaggctcgcaagaggtaaactagtgcatctcaatggatggagatcacttgtcttaccaagtgttggcccaagtgatttaaaggcgttttaagttaactaaaaagataaaaaccattaacgggtcacactttctcttcattaaaaactaaaacaacaaaacttccaatttatgcatgaggaaacttactcggatttcttcactccaagagacaaagagcctagcctctcatcctctgaggaaacttcctcagagtttgattggctagaaaaaaaactaacgagaaaacaaaaatatatatgaaaagcagagcaagtgctctgtattttacttccttcccaaaactgtacaaagtatgtgtcgtctcctatttgatcgatgtcttgtgtaaaggaaattacaaactatatataagaggttattcaccatttttcttacttaaagactaaggaatcctatgatagatgggttacaaggagagtttggggatttagacatcaaatatctaaagcaaaatatcttaaaatgtcggtcggaaatatcgggaagcttcaggagaacaccgcggcattatgtagaaaaatatctcaaaatatcggtcggacatatcaagaagcttcagaagaacaccgtggcactgtgcaaaatggttgtgaaactctccgggtaagcgctatcagaggatccggatacttctgaccggggaagttgaaacgccctcctttcccatccggcgtcagacgccggatgtgaaatatccagatggaatgtcggcggataagaattccggatgtgagacatccaggtggaatgttggcggaacagaattccgaatgtgagacatccgggtggaatgtcgacggagcaactccatccggattctctaagaggatatatggcgcgcttccctatccagactccctcagggagaagcacacgacactcgcgatcattacacctcggacgatagcatattctatctggatatgttgtccagatcattggctaaagtgcacaagccttgctacgtcattccgacagcctgccacagcccatgttccgccgtcctccgatagtgtgtccggacgccctgttcggacatcttttgcaatggattccaaagaactctcctcaatctcggattgctttggtgataaaaaagctatcaaaacaccaaaacttaacacaatttgattagaattgattgcaagggtccttaatatgttaattgggttaaaaggtgataactactactcaaaagtgtttaaaaaagttaattacaagctatgaaataacacttttttgagtagtaatcactccccccaaccgacatattgctagtcccttaacaatggagaagagaaaaataaaaataaacagtactataatttacaacatcatgcttatcaaaaatcaattttcaagtggcatgatgatctaactctcacatggaacattaaagaaataaaacttaaacttcaacaagagttatcaaataacttatctaatcacaattcttaaagagaagacattatgcaaatttaagctttaaaagagtttccactcccaaagggccaaaccttactcttccacaaaaatctaagtattatttattagcttccgaatatagtatgttgaactaatctctccccccaacctagttatttttcaaagcttagcaaactggtcaacctccaataggctaagaacgcacctcttttttcacaatttttttcttgtaggagtacaatgcttaaaggtattttttttctaaattgtctatgtaacgggggtccatcgatgactcccaaccaattaaggtttagggcatcaagctttaaggatctttcaaccactaactcctcagattttaccccggacttttgagaatgaattttaatacccaagcacctatagtatgttaaacttcacctattcacccttgtaacgagcattgaggtcggtgactcccaaccaatgaaggcttagggcaccaagttttaaagatttttaccatatacctctcagaccttgctcgggtttcaaggcaagcaaacattttttttttctttcttttttcaaaggctcattggccttttataaggtgtcccaatgctattaaaaatgaggtcaaaggtactaagtctaaaattttcctaagtcaagagggaaatagtttttcatcttataatcggaacctattgtgcacagtgtgtgaatagcttaaagtggaagacataagcttgaattcaatagaaacttcaacaattcatcaattttaataaacataatacaaactctaagtcaagtaaaaagacaaaaattcaatttcttctttttcatttttgagaatttttccttaataaccatggagagtagaataaaaactttaaaaaattttaaaattaagaaaaaagtaactaaattaccaaaataacttagcattaataactaaacttacttcctcaactctccccccaaccaagttgaacactgtcctcaatgtgacaaaagcgattgaaaaatagggaggaagtggtacctcctgagtgacatggagtctgagtcgtataggagaaaccacatgtttcaaagaaaacaaccaagttagtgagtagaggaaatagaaaaataccaagtttaaacaaaaatgatgtctatatatgatgtatcatcagtaatacatccaatcccagaatataagacatcaaaatatggaattatttatactaatataatatgtaaagacaaaaagtaaagagatgatcaagtaatggtagagttttgtggagctgatgcatctgtggtggcctcttgagtgggttggatcaggactttgacttctattttgatagtctccttagatggaataatcttctcaactggagctctcagttggagctatgggctttgatggtttaaggaggtaagaaatggagtgagaggcttggtgtgtgtgatctcagggtgcgcgaggctctcctcttcagatgcatggacattcctcttgattttgatcatccaaaaacctatattacatcaaaacaaattaaaattaaagcattgaaatcaaaatttaaaacatgtaaaaaaaacaaaacaaaaagatatggactagctagtctttaaaaagactaagtccataaaaaaatttgatcctgatttagcttgcccggatcccatatgaagtttgcatccctcacttgagactttctctgtatgattttgccatacaaagcttgggggaaaagtggatgcatgtgtttctttatcatttcttccttgatgactatcctctgtggttcttcgtctacatttagatcatagtcatttttctttatgcttttcccctttttctttcctttgatttcctccatcttttctttctctgtttcactctctaccttatgctctagcttgcatgtgggtagatgaacctctttaccactcctcaaagtgataaccgttttaacttccttcaccattgaagattctcccttcttagcctccatttcatggatacccttggaattttgataaggttgagaaggagagttttctttctcttgcattgtgttgaggttggcaaaccttgagattgaatcttggagattatctatcttctgagatagatcattttgcacttcatccatcattttgttcaatgaactctctacactatcaattctttgactgagctgagcattgatggatttctgagctccaacaaagtctcccacgaccttgctaagattcaccatagctagtttaaggttcgaggcttgtggaagtgcttgaacaggttgcttgtactgaggtggctgcggtttccaagagaaatttggatggttcctccaattggaattgtaggtgttgcaatcaccaaacatttccctcacggttggaatggtaggacactccttcaccaagtgctcataagatagacaaatgacacaaggcataacttgcaatggtgtttgagagatggcttgcacttcttgcattttcgtcatttctagctcttccaatcttcttgccatagctgcaatatttgccttcatctctatgccgtcattcaaaatatacatctcacccttagcattaggttgagacgtcattctccctatatttctagcatttggtccatcccatcctcttgaaacttcagccacataactcatgaagttcatggcttcctctgctatctggtattcaatatggcatgcacaactagcaatttgtgaatttaaaacagagaaaacaaaagaaaataaaagaaaaacaattctaagaaaaaaaaaattaaggtaaactaaaaactaaataaaaggtatactaaaatatgaacaaagaaaaataaacaaataaaaagagttagtaaaaggaaaagaaaagtcaccaaacttgtgatgaagatcacaagtactctagaaaggtcatatcactgtaaagtggcaccatccccggcaacggcgccatttgattcgtgcccacttggtgtctcagctgattcatgtccagctggtgctccttgattgagggagtaatcaacaaaatttataacctattacaccatgaactagggtagcaaagacaaagctactatagcatagtggctctaggatcgttcactgtgatgggttttcactccacaattgatattacttcaaagatgaattggtactttttcatttcaaggttagctttaaaagaaaacataaagatgtttgaataaaaaaggttggttttaaactaaccaaaaatagtaattgattttaattacaaagaaaagtgtctcttggagtttagatcactaggctcaggttccttgtgcaaaaaggaagttccggtcacttgtttctttttctcgcattggggatttaacatatagttatttcccgaaccgatatggtacagatgcttccccttaatgggttcaaacactaaatccctctcactgatgcattttgcaatgactcatgcctctcacctagcacttgccattcaaggtgatctttaaccttggattattcgtcaaaagctcgcaagagataactaatggatgtctccttagagtccaaaagcttaccaagtgttggctattctagaaaatcctaccttcaaaccacctcccaaaggctcgcaagaggtaaactagtgtatctcaatggatggagatcacttgccttaccaagtgttagcccaggtgatttaaaggcgttttaagttaactaaaaagataaaaaccattaacgggtcacactttctcttcattaaaaactaaaacagcaaaacttccaatttatgcatgaggaaacttactcggatttcttcactccaagagacaaagagcctagcctctcatcctctaaggaaacttcctcagagtttgattggctagaaagaaaactaacgagaaaacaaaaatatatatgaaaagcagagcaagtgctctgtattttacttccttcccaaaactgtacaaaggatgtgtcgtctcctatttgatcaatgtcttgtgtaaaggaaattacaaactatatataagaggttattcaccctttttcttacttaaagactaaggaatcctatgataggtgggttacaaggagagtttggggatttagacatcaaatatctaaagcaaaatatctcaaaatgtcggtcggaaatatcgggaagcttcaggagaacaccgcggcattgtgcagaaaaatatctcaaaatgtcggtcggacatatcaggaagcttcaggagaacaccgtggcactgtgcaaaatggctgcgaaactctctaggtaagcgctatcagaggatccggatacgtttgaccggggaagttgaaacgccctcctttctcatccggcgtcaggcatcggatgcgaaatatccggatggaatgtcggcggagaagaattccggatgtgagacatccgggtggaatgtcgacggagcaactccatccggattctctaagaggatatgtggcgcactcccctatccgaactccctcaaggagaagcacacgtcactcgcgatcatcatacctcggacgataacatatcctatccagatatgttgtccagatcattggctaaagtgcacaagccttgctacatcattccgacagcctgccacagcccatgttcccccgtcctccgatagtgtatccggacgccctgttcggacatcttttgccatggattccaaagaactctcttcaatctcggattgctttggtgataaaaaagctatcaaaacaccaaaacttaacacaatttgattagaattgattgcaagggtccttaatatgttaattgggttaaaaggtgataactactactcaaaagtgtttaaaagagttaattacaagttatgaaatagcactttttgagtagtaatcacttgtcaagttcaaattttattcaaataaaaagtcacaattttgttgatcaatttagtggtcatttaatattataataaaatcattaatcatatttttttttataagttttataaaaataagtaaagtaatgtccttataatattttgttaaaaataataaataacaatttttaatattattttattttaaataaattcaaaaataaataaatttaaatttttaattataaatgagtcaaattctttattacatacatacatttaatgctaaattattgatagattatgagaattatatttcatctataattaattaaaaacattatttatatctcatttaatttaaaatttatttacctagtcataaaatatactattagttttggtatattattttttaaaattattatatatatatatgagattctgtaccattatgataacttgtaaatgatcattcataaatatcttgtataactccctataaaagggagagacccctaatgaaattcaatagatttttcctgtgcattatattctctctttcttgctttcttcttttttcactttgttttataacacgttattagcatgaatagtttttacaaaagaaatagaaatatttttctctattcaaagaaatagaaagacattattcccttcagagaaatagaaagactttctctttctgtcttctttctcacaaaaaggtatgtgataaacttatatcatgattttctactttatcaccctttaactctctattttcacttatgttattcgaatgcataaatatgtataatccttataaccagaagttatgagataaattataaattataggataaattcataaccagaagttatgaaaaatatatataatcactataaccagaagttgtgggataaattataaattatggggtaaaattcataaccaaaagttatgaaaaatatgtgcaattcctataaccagaagttatggaggaaaaattgcagaattacagatacataaccagaagttatgtatatgatccctaattatttatttttaattatatggtataactagaagttataccaaacaatattatagtcagaagttataaaataaataaataaataaatgttcatagcctgaagttatgtacaaatctacataataaaaattcatagcccgaagctatgcacaaatctacctaatgaatagttcataacttgaagctatacacaaatttatataaaaaaacagttcatagcctaaagttatgtataaatttaaatattttcttgttctaacaaaataatcatggcttgaagctatgaaagatattaatattttaatttctttaatttcttttaattattttgtgtaactagaagttatacataaataatccatagcttgaagctatgtacaaatttgaatattttattgtattatatatgctctcattgcttttatataacttattaagtcatcatcaatgactaatatttttccattgattttaactatttctctatgataatatttcttcaactctataaaggcgaggtctttgtgaaaccaaggtttgattaatcatgattttgatgataacaaaacaaggtttagaactaatgatcatatttcaagtgtgattaggcaagacaacttccaaagtggcaatccaaagacaaatcaagccaaggagaaatcatgaaaaagaagaccacctcaaagagaagagtttttcaagaccaaagcttcttaagatctctttgtaacattgttggtacactaggatttccatgcattattttccttacttatgcacctaaatcatccaagagttattttgttttaaatatttttaaaattggatgatttcatgttttcaactaaaaccttgtgtcaaatgttgtttcaaacttgtttaaaaggttttaagttgaaaaagttggtttttgacccaaaaacggctcaatcggctaaatcgggtgaaccagatgaatagtaaccggtcgaaccctagctcaaccggttgagggtatgaacagtaaccagttaaggcatgaacaatacccgatcgaccggtacaaaattttctctctcttccagaatgcttgtttaacctgtcaaggttgaacctcaaccggttgaggtccggtcgaggttcggtcgaggcccaacggtcacctaccaatattaaatgctaacggctagtcaaccggtcgacccatagctcgaccggacgaatccctaaacggctagtttagcttttttcttctataaaaaggctccaatcttcattgtttcataagctaaaccttcccaaatctttcttgattatatttgagccttggaagagtatttttgagtgcaccattattccaaaacttgcatatctttagtgcaccattcaatcctagtttctcttgtatcatttgagcttaaagttcttgtgctaggatttttgagagatctttatttgtaaacctttgaaagaaagtttcttaagtgtgtgatatcacttgaagggtttttcaagagtgggatatcactcgagaagtgtaaagggtgcttggagccaaaagtccaagaatgtgaattggaaccataatccaattgtattgattgaaggcttggtttggaagccttgaattagtggaacctcaagcttgggattgaagctagaggagagtggatgtaggccgggttgcgccgaaccactataaatcttgtgtttgcattctctcttctctactcttttaaattatatgcaattgtcattctattatttattatatacttgcatataattgtttcttactttcacttagtctaaatttttaaaaagagaccatcaccctattcacctcccctttaaggtgattaccataggttggattagccttaaatttcctaacaattggtatcagagtaagacttcttgtcaagacttaaccgtctaagaagtaatggctattccatcaacctcatcccaagttgaaagtttttcaaccacccgaactccacttttcacgggaaccgattatccctattggaaaatcaaaattaccataggttggattagccttaaatttcctaacagtctttatgacaatgttttatgacttgttactttgatgaaacttttgtctcattaattgcacaacattgatgacaaacaatgttaatactatatcaagtgatagaaacttgattaaaggctccagaaaagtttatactatgtcactagtgatatttgatttaatgtgaatggcactttatatgatgatagattcagaagaatcttgtaagaccaacttggtcccctggggtaaaatgttgtatggatgtacattataaaaccagaagtttttatttaatgactagtctagctatacacttaaaaggtagagtaacatgttgtgcagattatcattttaatgagacaatttcctcaccattagggggagaaaagccaattccagaagaacgacgtgaaattatttggaatgcattgactttgacttatcttgatcctcgtacaaatcaatgtgaactagaagttcaaaggatcattcattttcaaaatcttgcaaatcaattaccagatacattcattgatataaagaaagtgacaaagtcacatatcccaactacaaatactccaacacggattaatgtctctgtaggacagttaacaaatgaatctaagatacacctgaagcatggtagacctatcgactcaaatgatgtaactccttggaagatgagaactcaagaaaaacttggcactctagaagagaccatcaaaatgactgatcagtttaaaattgataaatctatagccttagaaaatgcacaaataatacaagaagcccttgaagaggcacatatattgaataagaagcacatattgaatgagaagccctcgaagaggcacatgtatctgaaaattttgagatcgcagtaagttatgtacataggagaaaaatggaattgaaataatattgttattaataatattttcgctttccaagtggtcttcgatatcataagaaattatgaagatcttgaaccacgaaatgtggaagaatgccgacatagaaattattagccaaaatggaaagaagctatgcaggcagagttaaactcattaacaaaatgagaaatttttggacttgtagtttatatacctgaagatgtaaagcctattgggtacaaatgggtatttgtacaaaaaaaaacaatgagaataatgagatcataagatataaaatgcgattagtagcataaggtttctcatagaaacctggtattgactacgaggaaacattctctcccgtcatggacacaatcacattttgtttcttaattagtttggtagtcccagaaggactagatatgcgtctcatgaatgttattacgtcatatttatatagatccatggataatgatatatacatgaaaattattgaatgatttaaattgcctgaagcaaattgtacaaaacctcgtagctagtactcaatcaagttacaagcaatctggacgcatgtgatacaatcgccttagcgaacacttgctaaaagaagggtatatgaataatcctatatgcctatgcatcttcattaagaaatcaaaaaccggatttgcaagtattgtagtgtatgttgatgacttaaatcttgttggaactcctgaagagctcataagaacaacaaattacttgaaaaatgaatttgagatgaaagatcttgaaaaaacaaaattttgtcgcgatttgcagatcgagtatttttcaaatggagttttaatacatcaattaacatacattaagaaatctttgaagcatttttatatggataaagtgcatcctttaagtcctccaatggttgtccaatcacttgatgtgaaaagggacccatttcgtccttgcgaaaaaggatgaagaattacttggtcctgaagtaccatatcttagtgctattggtgcacttatatatcttgccaattgtatacgtctaaacattgctttttctgtcaatttattagcaagatatagttccgctccaactcgaagacattggaatggtatcaaacatatattgcgttatctttgcggaactactagtatgagtctattttactcaaggaaatcaaagcaacaattgcttggatatgcaaatgcagaatatttttcagatccatataaaggtaagtcacaaacatggtatttgtttaattataatggtattgctatctcatgaagatctatcaaacaaacaatggtggtcacatcatcaaatcattcaaaaattcttgcaattcatgaagcaagtcgtgaatgtgtatgactaaggtaaatgatccaacatatacaagaaacatgtggactaccttccatcaaaggcaatgcaaccgtgttacatgaagataatgttgcttgtattgcacaaattaaaggaagattcataaaaggtgacagaactaagtatatttcctataaattcttctatactcatgagcttcgaaagaaaggtgagatcgatgttcaacatattcggtcatgcaataatctaacagatctattcacaaaggcgttacattcgaccacattgaaaaagttaaggtatgactttggaatacgaagattgagagatctaccatttgaaatgttgaagaaatcataatcatgtttacatgaggaggataatgataatatggatatacaacactcttttttccttcgtccaaattttgtcccactgggttttattggcaaggtttttaacgaggcagttataataatccaaaagaatattgtactctttttccttcactagggttttttcctagtaaggttttaatgaaacagattcttatgatcatccaagggggagtgttataaaatatgagattctgtactgttatgataacttgtgcatgattatccataaaatataattattttaaaaattattaaatttattaataaatttaatataaagtatttcttatcatttcttatcagcacgaggctttgaaaaagagtggcaatatgaatcattgtttttcctataaattattctgagtagtcctatactctcacctcaaccttgctgctagcctgccactgccctctatttcagtagccatcttcatagttcaaactctcagcctcaccaaaattccataacagacactacaccttttaacaacaagccacaaggcaaagtggctatcatcaccggcggcgcaagcaacatcggagaggctatgaaatgtctcttcgtcgataacggcgcacgtgccgtcgttatagctgacatccaagatgagctaggctgtatcatcgccaagtcaatcagcttacaccgatgcaagtacgttcactgtgatgtaactgatgagtagcagatcgaagcgatggtggaatcgacggtgcaaatgttcggacaacttgacatcatgttcagtaacactgggattatgagtaagggcgactagaccatactggagctagatctgtcaacttacgataaggtggttgtagtaaacgcatgcgtcatggtggcgtgtgtgaagcatgcgacacgtgcgatggtgaagttaaagagagcatagtgtgcacgacaagcatgtttgcgacgatggagagtgacaagtttattgactacacgatgtccaagcacgcggtgttggggttggtgagatcagtgagtaagcagctgggcgcgtacggaataagggtgaattgtgtgtcaccgatggtggtggcgacgacattggtttgcagctcggctaaaatgggcatggaggaggctgagaaattttttggatagtttgtggatttgaaagggggaggggcgttgaaagtgagacac

SEQ ID NO: 11448 - DNA, 10517 bp, Vitis vinifera
  Intron number 2 from transcript GSVIVT01029239001 (locus G SVIVG01029239001) derived from phytozome v7.0 (chr-ID chr1 1; pos 18154590 to 18165106 reverse strand)
gggaggagttgctctttgtcagtagcaaggtgttgtgcaatgtctatactacttgattttttagtggatcagcttatttatctatttgcctcgatgcaacaaagatcaacagatatataatcctataatgttgaatttcaccattttcaacatactaaggtttaattttgctatattttgtccatggatgacagtatggaagcaaatgcacattacagaaatagcatttttttgctaatttcttgaataaatcaagcaagcgaaaacatgatttatagtcctttaatatttggggtgtctctaaatactgtcctaaatactgactgatagagtacatggttcagagataagtggtagaaaaaggcaataggatggttttcttggtagtttgatagccctttcatatttggtgggttctctaacatggtattttgtatatgggtgggttgccaactttgcggttaggcaattacaccattgtccgtggaaagccattccccaagggttctatgattttttcaacttgttcaattcattattggtttgattgcaaaagaaggtttggaagatgtgtggcaagatgacctatcttttgtttattttaatcccatttttatatctttcccaagactgtagtctcccatatctctcatgtatagctcctttgaaaacaccccattttggagcccaaactttctaggtgatgtgacagatcatgaaattgatgatttttcttttctcttgcttcttcttcttcgtttcttttttttttgataggtaaagaagaatatctattgaaagagaggtgccaaatgagcaactcaaggtatacaatacctatacacccactgccaaaacggccaaatgaggaaaagaaaacatccgaacaaacgtgactaaaacatccttaacaagagcctaaccaatcaacaaaactaactaaagttagaggatgatcatttataaacaactttgtctttgaccaaagggaataaacaaaagaatatttagtcttatcctcttctcaatggagtcttgcttcttccgcattgattccaaatcctttgaggtgaggattgtttggtcaaagggtagaggtgaggtgcagatagtggagaaaggtaaaggcttccgaagatggatcaaagcaagtagaggggtagtggtgtggtttttgaagtcaattgaagcatgctgcaaatggagagggaagaaattattcaaggaagacgtgaatgattgaggtaggaggtttagaatagaaatgcgtcaaaatgatgctggatgttacctcttgttctcggtcctttcagaagatgataggagatatttcattattatcccagagggttttgacctcttgggttgggacctattcagaagcaagttgaaggagttagctagaattggtgatggctctaagtatgaagcagaggactctggcacctatggtggagggaatgaaacttctcttgttagacccgacttaatctatgtagatgcaatcaagaggaaggctaaaggaagaagtgaggaagtttgggttgaagtagggaatgaggcttacacttccacattgaaagatctcagacactgtttggtgggaagatggaatatcgagaatgaggcagctcatgacttaagggtggtggagatttgggcaaatacccattggagtttcagtggtcaagtgagtgtatcctccttaagtgactccttgtttctctttgaattctctaaagtgggagatgctcaaaaagtgttggaggaggggagccgctgcctcaatggtgtccgattatcactagattggtgggctccaactgtggggtgctctaggagggagttccagagggatgtatcttgagtgagaattccaaggttgccgttacagttctggagtatggagttctttaaaatggtgggggatgcttgtgggggctttgtagatgtggatgaggagaccaaaaagtctagttataggaagggggctagaatccttgttaagaacaatggaaaggaggtgcctggaagtttagaggtaatagtggggtttgcctcgttctctatcccgttgtggtgggaggacttagtgtggttcttggcccttcaggtggcgaataggttaaagattcaaagggaaggtgaaccagagagcaggacatccatccaacaagaggaaggggggtgtgagtcacgcaaggtggtgcgcgtgaaagggattcgctatggagaaggaaactctgaggcagtcgtaggtgatagagtctctggatgggggctctggattcccgaggaaaaggctagcagaataggctgtgaaggccttggttctttgcaagaggaagccgggctggtgaaagagacgcttgacatgacagggaatgggtcggctgaagtggtcaggagggatggaaagctgatttttggcggtggaaggaaacttgtggatggattgggcgggcaaatgtccaagtgggccgagctgggagggccttctggcatgagaagcccagtcgccatcggaccaaacttccttttaaaagagcgggcttgggcttatccaaaaagaaggggaaatgggcttgtgattgttaggcctaataattttaaagggcttaaaaaggggctagcccatgcctcaatcctagggctccttgcttctaagtcgggggagctcaagatggagtttcagaagccttgttttgctggggagagctcagagaaggaggcgtccccgctggaccaaggccgcaggtaatcgcctctggaaagccattcgccaggtatgttccctagatcgattgcctttgggggggtgcccgaggaatcttatggcctttcttctccttctatttcaggaatgggggtttctgtggagtatccgcttgcatggcagtctgaggagacgtgtgaagaccctttggaggctgaggtgccgctgcgtatgatcctcaaggatggacgttccttcaccctcccagagggggtaacccctaggtctcgaggtaatgaggttcagacgctacctcttcacataactgtagcaggagaaggggaaaaggtcaaatccccttaggtaaataagaaattcctgggattttgtaagtcgatgggggtcttgattgaaggctttgaagaggacatcttgagaatccttaaggagattcagaataggagaggtgtcattaggaagcctaatgagagcaagagaggaacattgtcggcttcaaggaaggatagagagctgaagaagcttgttagtactattaactatgatgagctagttggaagagaggcagaggaaggggagttgggaaggcaaattactatggtcccttatgaagcttaaattaatgtcctggaacattagagggctgcatgaccctgataaaagaatggttattaagtcgatggtgagaaaacacaagccagatttggtttgttttcaggagacaaaaatgaaggaaatgtctgataggattgtaagaagtttggggattggtaggaatttgggttgggtttccttagatgcaaggggctcggcaggtggggtgctagtgatgtgggataagagagttttggaagggttggaggctgaagtgggctctttttctatttcttgccgttttagaaattgcgaggagggttttgtttgggtcttctctaggttatatggcccgatcaatggtaaggagaggagggagttgtgggaggagctagctgctgttaaggggctttggagtgatccttggtgtatagtaggggatttcaacgtagtgcggttcccagttgaaacgagtaatggcagacagatgtcaaccacgatgagggaatttttaggctttatagaggagtttgaatttgttgatcctcctctaggaggtggaaccttcacttggagtggaggggaaagaggatccctaaatgctcggttagaccgctttctgttttcaggagattgggaggaacgggtgtcgggggcaatgcaatttcttcttccaaggcctgtttctgaccattggccgatcatgttcgactgtggtgggatgagaacaggtaaaaacccgtttaggtttgaaaatatgtggctaagggtggaaggtttcatggataagtttaaagaatggtggcagtcctacaattttaggggggaacctagctttgtacttgcgaagaagcttcaggctttgaaatatgacttgaagaggtggaataaagaggcccttggcaatgtgacagttaggaaggatgcagccttggagaagttagactattgggatagtttagaaaggattggttctctttatgaggaagatagcgcctatttgtttgttttggtgtatttggggagagcgaaatagaagaatgttccaagaagaagaaaagtcagatacgagcttaaagaatttcttcattcggtctcttcttgaatggtctcaacagttcatggacgtggactatctctcttttatgaatatgttgggtgtttgatttgttggatatctttggcatttctaggtttttggttctcctttgttgccttgggtgaggttttctttgtataccgctagtgtacatagggagcgccccctgttttggcctgttttaatttgaattcttctcttggtctataaaaaaaaaaaaaattttagtctttggatcaaaagcaattcatcatcaaaagccattctattctcctcactttccaaaccgtctaaaagatgtgtaaaagagttgctcttcaaatcttcttacattttttgaccacaaacgaaccatgccaactaagaagagtctctctgaccgatgaaggaagcactcgggacaccctgaccaaagaaaataacaactcccacaagacccttgttttagcgcaatgaataagaaggtggtctatagtctcttcactcttgtggcacataaaatatctatttgctaagacccacccttttttttgaattaaatccaaagttaaagttttaccccatattgcttcccaagcaaagaaggtaatctttggttgcacctgtgtgttccaaatgcttcttaaggggaaggcaaaagagtcactcgactcaaggcattgtagagagatttgactgaaaacttgccactctttgtttcggttcaaagcactgtgtcctccacatctccacatactctcttcccatgcaactgcactaagaaactttctagcatgtccacctcccaatcattaaagggtctagaaaagcaaggattccatcccccctccccctctgagttgaggagtcccaaatgtccactacccacacctccttagaatcaactaaagcaaacaaggacgggaaaggcatgcataaaggagaatctccacaccacttatccttccaaaatctcaccctccgctcattacccattgagaaagagatcctagtactcacaataatcccaatccttccttatccatttgaataacccaacaccatacacctttctcacctctcaagagcaacactccccattttctttcccataattccctctaatcacttgattccacaatgcccctctcttatttgcaaaccgtcaattccattttcaaaggagaaccttattgagagtggaaagacacttgacccccaaaccccctttcttcttatctaagcacacaatctcccgtcttactaaatgtggtttccgctccaaatttccaccttcccaaaggaaatccctttgaatctgctctagcctctgtttatatgtggttgcccctctctcatgcttcttttatatcacactttgtctctcttcatccattctagatgagaggtgttgcattatagaaccatcaagccctttctcaagctactaattattttatcccctttataagagtgagaatccaactatctttctgcatggtagttcgttagtctcctttctaagattgagaatccaactatttttccctagtcaaatttatttggaagcctaaacctcctttaaaagtcaaaagtgtttgttggttaatggctaataagaaggttatcaccaacaagttgctataaattaggcttttaaagccataatctcgattgaggtgtcttgtgttttgagaatgggaagactattggccatatgttcctttattatcttgctagcttggagttgcgacaaaggttgttgctattggcgaatcttgggtccccactggattgttataatgtttagggccttaagagaaatcccagggggagtgtatactgaaagggaagaggaaaaatctttttttttttttttttaattgaacatattacttcattttgatgactttattatattttatcatactaatttctaatctaccttagaagtctttgcacaagtcacttttgatcttgataaagcttctcagaatcaattgacaagaagtcaacgattaattgggacatgctaaccactatttggatgatttggattgcaaggaaccttaggatcttcaaggataggtggtgacctatttttttacatttgggtaatatttgttatcttatgtctctctaggtgtatgataatgtaaattgagatttctcgcttgtgattttagataaaatgagttttggtcaaaagagggtgagatggattaaatgatgcatttctatgacataattctctattctagtcaataggatcccgtccagtttcttttagagttctaggggtttgaggcaaggtgatcctctttctcattaccttttcatttgggcaatggaggctttaagtaggatgtgaagaagggcaaaggaaagtgccttcatcttaggctttagtgtaggtggaattggaaaaggtagggagagaatggatgtccaatttgttatttgttgatgacacccaattttttgtgatgctagagccaagagcaattggaatatctaaattggacattcatgtggttgtagacttaaaaataaatatagagagaagtgaactaataatagtaggacaagttgcacatttagaggatatttctttagcgttaggatgcaaggttggaatctttccactagttacttgggcctttactcgagagcccctaacaaatcagcaaggtttaagatctggtggaggagaaaatttagagaggcttgctttgtgaaagagataataccttcaaaagaagggggatttgctttgattaagagcacatagtcaagtcttcccatttattttatgttcctttttgtcataccaaggaggatgagtggtgcaacagaacgtttgtttcgaaatgaaatggaaaaacactcaagaacaaacacaaagatcacaataggatttgaaagttagggaataattctgaaaaattatattgaactccttctaacaattgtaataagcctttaaaggatgtttgtaatgcaaaaataaaggaaataactgaaataggaaacttaaaataggaaactaatgatgaacttaaaatagaaactaatgatggatttaaaatagaaagtaatgatgaacttaaaatagaaactaatgatgtaaaaaactaaggatgaacttaaaatagaaactagtgatgattgtgtgctgcatcattgagccttaggctggaacaaattcatagacttcctttcggaaagagggatgctagtgaaaaagtctcacttgtttagttggccgtggttcaattggacaaaaagaatgggggtcttgacattagaagtttttgcactctaaacaaagctttccttggtaaatggagctggagatttgctttagagagagaaactctttggagacatgtcatagttggaaagtttgggactaatgaagggagggtgatgttctagagctatgagggacaactacaggtggggctgtggaaggctagtagaaataggtgggagatctttaaatgtagatctcattccatagtggataatgaaatgaggataaaattttggaaaaatggtgtggagaaagttctttggaagattattttctgatgcttttctatgttaatgttgaaaaagacgtttggatagaagaaattgggagcagcttagagaagggggtcggtggaatctcagtttcatagacaactacatgatttagaattagatggagtgaaggccttttttagaggattgcaattgacctcaattagaagggatgaagaggatagattggattggaaggaaacaaagtgtgacaaattctttgttaaatcttactactattcattatcacagagaagaaatgaagttttcccttcgagcatagtgtgaagtccattggttcttgcaaatatgagtttctttgcttgggaagctatatgggaaagggtttttaatgcatgaccaacttaggaggggatcgaacaggtggtacatgtgcaaaggggaagaggagacatctgattattttcttttgccctcctccaaagcaagaattctgtggcagctagtcttttttcttttggagtgacttgggtgatgcactcttcaataagagggacccttctgggttgacacagttcttttgtgtgcaagaagcagaaagcttggagggccactcctttgtgtatattctggatgccatggacgggtttatgtgtatttttttttggattgggttagagtgtacattggtgactattccatgaccatgatagactttatggattggttgagttcaaagtaggtagagggaggttgttttttgttttcacttctctatttgcttgcctaatggtgtttcttgtatacatcctttgtactttgacgtgccttcttttaggcattgttgataaatccccccttttactcatatgttaaaaaaaaaaaaagcccattaggtggagggggattcatctatggtagtatgggtcactaaccaggtagcaggtgtttgtgttttagttttttgttttcttctactatttttttccctgctctccttttgagtgtgtgtctcttgtgggaaagggagtgggggggtaggggcaatgattgtttattcctgagatttgcttgggttttcatccttccactcaatttccttttaccatatattctattttcatgtaacaatattgtattcctgttttgaacttttaaggtgtgaggctgcatcgttaggtggaagctttttccttttccaataggcacctattcatatagagaacctaggattgctataacagacactgggccttttcttttattagatgcaaagatttgttgctcccttgtttttctatataaagggaagcactatgattttccttattgttccccatgcttcacatttccatggaatgcttctattctcctgttgaacattgtttaggatgaaataaagcttaaatcctttcagtttcatatttctgctttggattttgtggtcatatgtgcttaattgtcttttcctcaagtccttccaagctgtcatttctgaagaaagttctactccttttataaaaaatctatccagtacaccagtcatgcaaagtttaattacttggttaataaaataacatggtcaataacagagcttatgcgtgaaggttatggaaacccccttggtgactgatcatgattgtcttgtgggctacatttggtgacattctgtgttctttacttctcctctgaagcatactgtcaataattgaattaatctgtttacttggtaggggtttttgttatgtctatttaatcaatattaagatttctacacttgggttcgatttaaagtgattttctctctgtgttcttatactttgtttggctgctgagaaaattgaagaaaaaccaaggtccttttttttttttttctgttgtttcaactgtgaaaagaaatgaaataataattctatatcatgtgttgttagttcgagttgagttcattttttgctttgatactacacaggaaaatgtaacacctttatttatttatttaggatggaggaaaatgcagaactacaaaattccttttcttgtgctttctttgcaatcccgggttattctattctttcagttatttttttcttatttttgattagaaacagaaatttcattaataaagaagcaagattagttacccttctggctagagtaaaatgaattaagtaaaaacaagagaaagggaggtgcaacaaaagagatctgcatagaatccaaactcagaggggtacaaaatctcaggcaaggtactcaaatgaagaggctctagcttaattagcaagttagctacctggttagctaatctaggaatttaggtgaaagatcatcctaaaaccctaagtagatctataattttgtgagtcaacatgactgggctcctgaccctttgttggtatgaagaacaggtttatgcatatatttacaccctaagtctactttactttgtacatcaggtttatgcatctacttatatccatcaaaattgaatatagcacccaaaattaatatattttgtcttgtgcaggctatattcaagcctccaaaggcaattcgtggagg

SEQ ID NO: 11449 - DNA, 6388 bp, Vitis vinifera
  Intron number 1 from transcript GSVIVT01025596001 (locus G SVIVG01025596001) derived from phytozome v7.0 (chr-ID chr8 ; pos 13740701 to 13747088 reverse strand)
gaggattacacgagaactgcgaaaactgatattcagtttttttttgagctgctattcaaaccaggaactcagcctaatgctggtacctaatctattgggggttgtttcatacaaaaatcatgttgcggctgttagaagtttgcaggagcatctggttcgggctcccgtgctagccagatggaacagcacagaggcatccatgcaataagaaagggtttcaattggcttcgttcggaacaaacaaaaaggaaagtttatttgccgatagggtatttgacttgtttgacacaaagcataactaaatagttggctttgaggagtttgctcgtgctgcagaagttatgatgagctccgtcgtgggcaatgctcaggggctcaaccagaagtggactgttatcagcctcacgatgtgatgaaccataccccacctcatccatttctatcttatcaccctgcataacccattctcggaaggggggtcttctgttgttgtcgttacagcaggttattgtgttgggagtctcaacattgaagggttttatgctccatgggaagacccgtcatttacgtacccatctaacttggcttcatcccttcaaatcctcgttgatgctagcagcggcgcatctgactgtaggaacaaatttggagagcccttgattcagagctgtaccgggactattggaatgaaacttctaagtgaggaaagacgggaatggttaatgccaatcatgttcaatgcagggattgggcagattgatcacatccacataacgaaaggagtgcctgcaactaaagccaatttcagaactcactctttgggcccactctacaggcaagtgtgcatggccacctttttgcatcaacctttggcaatccagagtcggttaagtttgggcactgcaagctgattgaagaaattatgattggaagaggatggtagattctgagagagcaccccaatcaaacctcattggcaaaagccttgcatgatgtgcatgctcaccattaagccacgttcctttcttttattatttatttatttatttattttatttctccatctttgatttttaaaatagtttcttaaactctagtttgcaaacaatttttcaaattcctttttcttaaataatttcatctctttaatttctcatccttagtttttttcgtttaggttccaagaatccgcttttcaataaaatttggcagtcattttcttttcggtgagccactttcaaattttctttgttttttaaaatgttttaaaataagcatggatttaattccgtaattccgaataatggaatttatgggattaattcatgcaaaataaaacgggctttggtgggggccctacatcaaataaatttgctttgaaataaaaatgaattttgaatgaaatatcatgcgtgctattggtgtttctttatctggtttgatgatgtgagtgatatactttatgctcattactatgcactaatctcattttgtgatagcgcgttgccgtttgctgatcaggtacgcatccactttcacttcggttatcctctattgcatattctgatactcatacgtgcatgatcgatttgagtattcattgactttctcattggttgccatgttagcttcattttattagtagagacccgtttttagggacttagaggggtgctacggtctttaccgtaccttcccgataagtaacctgacccccgaacctaatccggtttttcacaaaccaccttttccaaaataaggagtcgcacttagggtttttctttcttattttgtttaccctttaaaaataaaacaaaaataagtggcgactccaagtcatttttcttaatcaataaaaaactaatttttctaaataaaaatcgagtttcgtcatcgagtgggaaacgcattcgagcgatcaaaatgcggggtccacagtttagtattttttaaaaattttaaaggtatttcctaaattttaaatgcactcttaatagacattattctgattgaattgaaattgagtttataccattgtcatcttattattattatttaataagaatggaaattgttgaaaaagaaaaacatattagctcaaagaacaactcttttaattttttcattattattgttatatatattaaaaaaaaaattaagatatttgtagtggaaaacgtcacatttgcatgtgttaattttttattttaaaaacaaggaataaattaattaatttaatcttatatattattttgatcttggatatatatatatatatatatatatatatatatatatatatatatatatatatatatatatatatatatatatattttaatttttctaatattaaaattttcctcaaatattaattattgatctagttaaaatattaaaaaaaaaaaaatatttttaaatgcatttttttttaaaatagagatgctcttattcattgaaatagaggttagattttaacgtgaaagtgaagttcaaaaaaccatgcacgtaattgtaccaataatttgttgtattatttgtatcaatgagattaaatgagtttcaattctatatatttgacaaatataaaaactttcttaccctttaattgtttatttattttattcttatttttcatatatttatatttttttgttttttttttaccctagttacatgcatttttcatacccatataatgacattttcgtagtgatatcataaaattcatacattagtacaattgtcacattttttttatatcggtaacatttttcacaccttgattatattttttatacctatagtgggcatatttttcatattttaatataatgcttgtatttttttgtaccttaacacttaatcacatcgtaacttggttatatattagtttacatcttagtctaagttatatttttcatacattaatattttagtcacatacttataccttactcatatttttattcatactataatcacattatttttacttctaccatatttttcttattttcacactttgaccataattttcatcatatcatagatacattactttttttgtactattatcacatactttatactcaaggcacaacttttgtatctaattagttcttttgtatttatgtcacaatttttatgactttatactttggttatatatatttttttaattatcgtaacttttatatttggttgtatttttcatattctagtgatgttttcatgaattctaacttacttttaataattcgtaatcatttatttatttatttttattttaaataaaaaaagaagaaaatattaatatgttagaaacgatatataacgtatttttcatgcatgtaataaggttgttacgtctctataatattacttatatttaaataataaatgaaagaatgtgaagcttatttctttttcgatgtatatatgttattaaacatatttaataaaaatgctcaaaagtatatgtgaaatttgcgaagatcaaaacgaaaaacctcccggtaatggaaggggaccaaattacgaacggagattccaagtgcgtctgagcccggccccgccctctttatatccaacgtggttgaatagggttggatgattaaattagaattctatataaaaaaagttaagtttcaaaattaattgaccgcatagcgcagtggattagcgcgtttgacttcggatcaaaaggtcgtgggttcgactcccactgtggtcgaatttaatgaattttttgtccgtcgatgggcctgggattttttttggtctgtttcctttcgatttgggctcgggttcagtgcgcttctactacaactacttgctttcaatttgggccgtttggagctgggccgcaatttaccttccaacgtattcaaatataacccactcccccattgtttttgttttttttgaaagaatattataagttaacagcaaacattgcataaagcatgtagctggtggttttttttttttcatttaattctaattaaaacttaatttacttaattgtaaattctattaagtattatgtcgcttatttttattattttatttatattatttattagtattaataggatgagggttatgtcgattatattttagtagttttaaaaagttatttttaatattagtaaaaaattagatgtttcattttttatttttaataaaaaataaaaaattttggtaaaaaaaatttatttaaaatctaaaagcaaattgaattcgttgtttcattaaaaaaaccaaatatcatcgtaatcttatgaccaaaataatatagtacattgatgcttacctgtcacctaagatttccatgccatgatttctcccactaaaatcacaattccccattgcctctttaaaatgaatcagttctattaaaattcaaaaccaaattgaaatgacaaaattaaggcaaatgaaaattctattttatagaatattgttaataaaataaataaataaataaataaggtctaccattgggcatgaatggaatccatgtactagggaagtaaatggagggggacaaactgtacagtgctatctcatttgtaatcttaaactaggtaaggtggggatagtgatactacttcatttcttgtcttaaactaggtggggcggggatgggaaatcacggttaggctaataaattctccttttgcaacaagaaataataatataaataataaatagggtaagataaaatcaaactctttggttctatccatttgtgtatttattctttattgtcccctataaataataataataataaattagcacatttattatctatttttacttgatttattgtcttaaactagatgaattgggaataggagatctccttttgaacaaaaaataataatataaataataatagtaataatgataataataaatagtataagataaaatcggactatttggttgtatcccatttgtatatttattttttattgtctccataaataataataaataaataaagtctccccccacacgctcacaaataataataataataataaatttgcatatttattatctatttctacttgatttattgtcttaatctaaatgggttgggaataggagatcccattaggctaataaattctctagcaccaacaaataataataataataataataataattatcatcatcatttccatctttactacttctatagtaataatagtaataataataataataatctcttacttaggttgctttgccaggcccaatctgagggcctagttatagaatcataagaattttctccatttctcattttcaatcattacatggcaggttagaatccacttgcgatttgatcagtctcaaatccaatgttggtgaggcatgtgccactccacgaatcaacaccaataagctaacaatctttgatttagtttctttgcccaacctagtttagctcaagggtgtggtcacaaaatcataaaaaatttctccatcccggaccttagacctctcatccttgtcccattgggcacagatccaatgaggacccaccctaaagagtttctctgtcatccccacgctacacggtaggttagcatcaactcttgatctgataaaagtctcaaatccaatgctggagcgacatgtgctactccatgattcaacaccaaggtaacaacctgattaggctcccttgcccgacccaactagcccagcttgagggtctagttatagaactacaaaattctctccattcttctcatcaacctctattattacttcttgtcatcaccccattagagtgggtcctcataaggacccaccttgatgggaggttaggatccacttctaatgtgatcagtctcaaattcaatgccgaaagttatacgcccactccatgaatcaacacagtgcaacctaatcggaaaggcttggtcatagaatcataagaatttctaaaatatgattgatttaattcatataaccatatgcaaagcaacatttattttataaaattttttttaaaaaaaattgggtagtggagtgtagattggatttattattttgtatggccgcagcgggaagggaactggcccagtaaatgcacagccgggcgacccacacacaggaagtgtacactgtaacacatagagcgtagcccagaggattggagtcaaatcctcccatcataactgcatttctaaaagaaaacagacctcccgtattggctgtcatggctgagactctcatacccaacacacacatacactccatttctctatatctttctccccaaccaaccttccatttctgaaatgaaatatatacctagagagctttcacagccttcggaactttgaaagccccttca

SEQ ID NO: 11450 - DNA, 19795 bp, Vitis vinifera
  Intron number 3 from transcript GSVIVT01009135001 (locus G SVIVG01009135001) derived from phytozome v7.0 (chr-ID chr1 8; pos 5418970 to 5438764 reverse strand)
acacaagggtatgatgcatatatacttgctattttattttattttatttttttggataagtattttttcttttgctgttacatggaatacccccctcccaccttaacccccttgccactttgttcaggccactgatgtagctgtattttctatttgatggtcttgtttgatatcttctcagcatacaagcttcatgcttgtgatgatcacatgccatagtttgcatgacagatactagtgtggaagaatgtaagacaacattgatggggtaggacatcacatgttaaaaaatgttttgttgaaagcaaatgacagaaatagttgtagaaaatttatatttcacattaatgaaaaacaataagacacatggaaaaaaaatctgaaatattcattagaaatttaacacaggacatgaattgtgatttatttcttgtatacaagttggcacctctttttttggcttttgctaacatactatttattttcccatgacaagaatatataatcaagttcatagttttatagagtaaaacctcgattaataaatgttcaataaattaataatcttgtttgaataataaaatcttttggtcccaactgagttagtgtactaaattaataattttgctaaatgcataagataataattttttttgaaatccttaagggcctaatgaaatataaattaataattgatgaagtccataaaaaaatagcaaacaaaattaataatacaagattgagtagctttttataacttttttttttctttattcaactattttttagaatcattgcatatttaaaacctctgtatcttctagggtgttaagttttgacattaaatctcttccttttaagagttttttttatcttatacaattaatatccatctccaattttttaaactatcttagacttctatttattaacttttgaccacatccattatttttagatttataagtcatacatgtataactactatacatgtttggacttgagaatcaacttggataaaagtgagcttattttggtggggaggatggaaaatattgatgtcttggccttagagttgtggtgtgaggtaggcgggctcccttcccgctacctgggtctccctttgggagcccctttcaaatctatggcagcgtgggatgaggttgaagagagattccaaaaaaggctagctatgtggaaaagacaatatatctcaaagggtgggggacactttaattcatgatactctttctagcatgtcaatctattttatgtctcttttttgttttccaaggtaggtgaggttgaggttggagaagatgcagaaggattttctttggggtggtggggcttttgtgtagaagccacatctaataaggtggaaaacggtctttttagagaaaaaagccgggaggattgggtgtgaggaatctttttgtgatgaataaaaccctcctttgtaagtggaactggtggtatgccaatgaaagagaagccctttgaaagcatgtcgttaatcaaaagtttgaagaagatgatggggagtggcattcttgtgagttaaatgaaaggtatggtgtggggctgtggaaagctataagaaaggagtgggatattttgagtagtagattggccttccaagttggtaatggttagagggtgagattctggagggataagtggtgtggagatgagccactttgtgagtccttctcttccttatttgccatctcttttgtgaaaagagagaaaaaggagaatccctaatttttgttattaaaaactattaataatatacattggacttggatatatatatacatgctagtgggacccacaatataataaggaaaaaaaaggaaaagtaaataactgaaataactgtacactatctaacactccccctcaaggtatagcatatatgttatatgcaccaagcttgttacaaatgtatttaattctaggaccttgagagatttagtacaaatatctgctggttgatcatttgaattgacaaaactagttgccacacatcctgatgcgatcttcgtgacagtcaacttcaatgtgtttggtcctttcatggaagattgaattggatgcaatatgcaaagcggcttggttgtcacagatgagcttcatttgttcatcttttccaaatctcaactcccgtagaagatgttttagccatatgagttcacatgttgccagagccatagctcgatactcggcttcaacactagatctggccactacatcttgtttattactcttccaggatattaggttacctccaataaaaacacaatgcccggaagtggaacgtctatttgtgggtgagctagcccaatctgcatctatgtaaccaacaacctaggtatgacctctgttctcgtacaacacaccttggcctggtgtgcttttgatatatcgaagaatgcggattacagcatcccaatggctatcacatggtgactgtaggaattgactaacaacacttacaggaaaagaaatgtctggacgagtaatggtgaggtggttcagtttacctacgagtcgccgatatctcccaggatctcataaaggctccccctgtcttggtataagtttgacatttagatccataggagtgtttatcggtttacagtctaacataccgatttcttccaagatgtttaaagcatacttcctttgggaaagaaccacaccggaaatggattgagctatctcaatccctaagaaatacttgagtttccccaagtctttagtctgaaagtgggtgaaaaggtgttgctttagtttctgaataccattatgatcattgtctataatgacgatgttgtccacataaactaccagagaaatacactgccatgaagagttatgatgatagaaaacggaatggtttgctgtactgcgaaacatgccaaactcctgaacaacagaactaaaacggctaaaccatgctcgaggagattgtttcaagccatatagagaacgatgtaacctgcacactaaaccagactccccctgagcaacaaaaccaggtggttgctccatataaacttcttcagcaagatcttcatgaaggaaaacatttttaatatctaactgataaagagaccaagaatgcatagcagccatggagagcaatagacgaatagaagctatcttggcaataggagagaaagtgtcaccataatcaaaaccataaacctgagtatagcctttagcaactaagcgggctttaaggcgatcaacctgaccatcaaggccaaccttaactgtgtagacccaatgataactaactgtagatttatcagagggtaaaagaacaagatcccaagtgccattggagtgtaaagcaaccatttcatttatcattgcttgtcgccggcctgaatggggtgctcttgggaagagaaacaaaagatatagcagaaacaaatgcagaatagagtgaagataatcgatggtaactcaaaaaattgtaaatgggatgaggattacaagtagatcgattactttttcgaagagtaatgggtaagtcaatagaaggaggcagagccggggcaggagaagccgaagggataggaagtgagttagcaggtacctcggccaaagaaggaggaacaacgacacgatgacgacgatgataaacctgaagtgggtgagaagacactgcatcaggtggggagataatgggaaggggtaagactttagaaacaggaagagactcagaggtggagaagaatggtgagtccttaaagaaggtgacatcagcgaagagaaagtagcgatgagtctcagaggaattacaatgataacccttttgaagtctggagtatcccaagaagatgcattttgtggctttggcagaaagtttgtcctgtccaggagtgagaatatgaacaaagcaagtacaacaaaaaacatgaggaggaaataaataaagtggttggtcagggaaaagaagggaatggggaatctgatcgtgtaatacagatgagggcatacgattaatcaaataacatgctgtaagaacagcgtccccccaaaaacgaaaaggatcattactatggagaaagggagtacgaactgtctcaacaagatgtcgattcttacgttcaactaccccattttgttgaggagtatgagcacaagaagactgataaaggatcccatgttgggacataaatgaagtaaatggtgcagaaaaatattccctggcattgtcactacgtaacacgcgaatagaaatattgaactgggtttggatttcagcataaaatttctggaaaatagagaataactcagctcgatttttcattaaaaataaccaagtacattgagaatagtcatcaatgaaagtgacaaaatactgaaatcgtaaagtagacgcggtttgacaaggaccccaaacatcagtgtggacaagtttaaaaggagactttgtccgattattcaaacgctttgggaatgagacacgagtatgtttcccaagctgacaggactcacatgcaagcgacaacaaagatgaaaaacgtgggaccattttcaagaacttggatagactagggtggcccagacaactgtggatgaggaggggagcatcagtggaaatgcaaactgcaggagttgaaggcgaggtgaggtgatagaggccttgagactcacgtcttatgccaattgtcttccccgtactccggtcctgcaaggttacaaatttattagaaaaagtaatagagcagttaagagtacgagtgattttgctgatggagataagattaaaggaacactcaggagtataaaagacagaagtgaaaggtagagaagggagaggatgtgccaagccaatgtctttagccacagtttgagaaccattagttaaggtaacaataggtaaagcagaggtagtagtaatagaagagaaaagatcattattaccagatatgtgattagaagcgccagaatctagaatccaaggtccaagagaagaggtgtgggtaagacaagtagaaacattatcagtctaggcaacagaagtaacagaagctgacttggtggcctgatagaggagacagtcaacatactcactgtcagtgagggaaataccttgagatgtggagagctcggaggttgaggcggctgaggattagatgactgggccacgtggacagtgtggggaggccgcccatgtaactgataacgccgatcacgagtgtgaccaaacttattgcaataggtgcaatgaggacgttggcctctacctcggttaccactgcgtcctcctcgagagttagtttgagaaactaacacagaagaatttgaagtgttatcagatgacaaagtctgagtggaggagatacggaggaggtgagcaaacacatcatccaaggatggaacggaggaactgccaagaatctgatcgcggacgatctcaagatctagacggaggccaataagcgtaagaaccatgaaaaacttgtcaatctatgttcgttgatccccaacatcagtagtaagaggcatcactgtcaagaattcctccttaagagaggcaatctggccaatataagtagataaatccatgtcttgttgtctgacattggcaatagaagaagccaccttataaagacgttggatatcattcctgtataactttttcgcctgattccaaaatttaaagcatgttttgtaggcccgaagatgaaacagaatcttaggatcaactgattgccataacacactacataattatgcatctttcttcctccattgtactctgtcaaccttagggatatccgcctactgcgtaacaaggtgatcctcataaccttgacccataaaccaaagctccacagaggcaaaccaggacaaataatcttcactgccaaccaatttctccgaagattacataggagatctagatataacacaggaaaaaatggaacttttagtagtcatatctacttatttggagaatgaaatatgtttggatcgaagagagccttaatatggcttcagattgcggctgaaagaagaaaaaccgaggatccgcagctgtgagagtccaaatagtaaagaaaaaacaaatgtggcactactggaagggtagaagaacacttcctaagacacgtgcagggctcagggtggagaggaagtcaccggaggtcgtcgtaaaaaggctgtttagagggccgacggagacaaaaacccaagaaatgcacttgcagggctcgaatggtacaagcacagatggagagtggctagacggcgtcaggtgaggctggaggtggaagcgcgttgttggaaagtgctccacgcgcctgcgcgtgaggttcaggccgccggagaagaaacatgcatggccttcacgtgactgagattctctctccggtgttttgataaaacttgaagatctcctccttgtacacctgatggtatggtcggtttcggaaaaagaactttgctggaaagagtcgtcggaaaagtcatcggctgtgagggttttctgacggcgatacggttgaccggaaaactttaggagatggggaaggtgatcggaatgaaacacggtcactaaaaggtttcccaaaattgattcacggataaaccgaaaataattaggttttttttttctccctaggctctgataccatgtgaaaagatagaaaagggagaatccctaatttttgttgttaaaaaattattgataatacacattggacttgggtatatatatacatgctagtgggagccacaatacaataaggaaaaaaagggaaaactattaatagcattttattctaagaaagcttggatgacagatatgtggaacctcgaaggtgaaggaggtgattggaccccgtggttttctagggcctttaatgattgggagctggatttcgtggagtgtttttttgtagaagattcaaacaactagggtgtacaaggatgtggatgatagagtgatttggacaacattgaggtttgagaatttcttagtcaaatctctttattctattttacaacctaaagaccctcttgtgttcccttgtagtagaatctaggtatcttgtgcgccacctaaggtggctttcttcacttgggaggcaacttgggggaaagtcttaactctggaccagatccaaaggagggagttctatttggcaaatagatgtttcctttgtcattttgaagtagaaacggtcaatcacattcttcttcattgtgcaaagttgtgggttctttagcatatgttttttcccctctttggggtgtcttgggttctctcctactcggttaaggatactcttcttgggtggtatgagtcttttgtgggtaaaacctgtaaaaaggcttgacaaacgattcctttatgtatattttggacaacatagaaggaaaagaacttgttaatgtttgacaatggggaattatcgattgaaagattgaaaaattcttttgtatgtaatttgtggtattggtctagtgtagttgtagatatgactcctatgtcttttgttagtttcattgattggttaggttcaaaataaaggcaagtcgttttttgtttctctttcttgcccgatggggtgagcctttaggcctttgctgtatacttcctgtatacttgagaatgttgtgtttgacgtatcctctttctctttatattattgctctttacttataaaaaaaataaaaatgtataagtactctacaatagaaaaataataatctctctatagtaataaatattcatttatcaataaattaataaattattcatttatcaataaatcggtaactccgttaagataataatttctcttgatcccaaaagtattattttatagggttttattgtatgtaattagaaaataattagatatttattaaaagatgagactaggcttaaaatggttgcttttttgtatagaaggaagttatataatgtgatactattccttgttttgctcactagatcatataactcttcttccaccataaggtggttgcctcaatcaagtaagagtaggttaggaatttgttgtttagaatttacgaaggggtataaagcaccaaattactatgatagtgaaaggaaaaaaaaaaaaattaaggcaggaaaagcaagatatggagaagaaacaaatagaaagagatctttatggacaagtctcacctaaaagatagaagaaagagcatagaagagttctccataagtctcaactagaagatggaaaagggggaatataaaaatcctatggcattttgttgaggcctcctaaaagttgcacttgaagagatttatggagtttcacaattaaagaattcgacagatgcaaaatttattattattcatcttttttttttttttaatggaaaaactcttaaggggttgtttttggccttttgatgcccttttaatactcctagtgtaggggtgtgccctcttttttaattggtgtttgtcaatatatactcattcttggccaatcagacaacaaggataaactcgaggggttgtatccacatcagttctccccaatttagaaggaactcaacatcaagttagctgactacaacagtctattggaatctctagctctctcttttgctctttctttctttgttcttccatgtgaatgaattgattatgcataggacagatctctttctttgaactccttagccttctaattgtttattaaatttgttttctaacaatgtaagagaggatctcaagatctctctggtttggctagtgttatgcatgacaggtatcatacttcagagagctgtctaatactgagaaataagttgataatcccccaatgatactgtgcaatctccaagcatatgttcagctgaatttgtgtttcttgtagattgtgctacttcatcaataaaaggccttaatctaagagaacaccagttttatgtcttactccgacaaatgaatccattaccgtgtaaactagtctaatcaaatcaagtctttattaaggtggtattaaatataaatgtaagaggtaaccatataaacttggtaaatactttgcattggatttactccatgttagctttgttgcttcaataaaactgaattctgtttcgctaaaacaattaattgaatgagagtgcttcctctaagccatcctaaagatgctttcacaagcctgttgaattatcaggaagcaaatgacccaacattccgagtcgcctccagtgttccctactaagtttgtctggaattctcaagtccctttcaaagtcaagtcctttgtctggttggtggcgcacaagaagcttaatactaatgacttgctacaattgagaagaccccacaaagcacttagtcccaacatatgtaagttgtgcatgaagcatggagaaacagtagatcaccttttcctccattgctcgttgaccaaggggttgtggcacagattatttcagttagcaaagatggattgggtttccccaaggagcatctctgacatgttctttactaattttaatggtttcggttcttctaagagaggggttgtgttatggcaagacgcgtgcatcgcgttaatgtgggtggtgtggcgggaaagaaatgcaaggatttttgaggataaagcaaggaattcagggtgtctttgggattctattcgttttttggcttctctatgggctttttgttctaaggtttttaaagggattcctcttaacatgttacaacttgattggttagcggtgtgtaaatagaccgtttgcttattctctagttgtatttcttttatttgatcttgtagtcttgtttttctttggtgggaggatttctcatccttctagttgtaacttctttttatcaatatatcccgttgtcgtttcctatcaaaaaaaaaaaattccccatctactttgtttgcaaagaacttctgtagaagccgtccatacaccctagtcttccagatagcaggatgctgcaaatctgcttctcttagaccatcactgattccagagtttcttagcttctctaggatgcaaccaagttttctatggtagcgatttcaatatattactgattccaaaagaactttttgctatttgaacttaatctagtcatatatatgccatctcatgcagcattgttcctgatctgtcatccaagataatcctttctggttgacttgggaattttgaaatcctttacaagctaagctttcattgcagctttctatggcttgagctattgagacttctttcttttttcttctgaccgccttattgatattttcatttttcacaacaatcaagaatgacaaaaatattccattatcagcaatatggcaaaattcctttaaaataggtatacaaaagaacacacatatatatacacacacacatatatatatatatatatatatatatatatttttttttttttttaaattttttttttgattagtaagaggttgtattaagaaaaacacaaaaagcccataagagtatacaagttgtatacaaagagtaccaagcaaaaaacagaaaagagggtgcaaaaaatactctcatgaaatcaattttatgtgtgtaaccaccacctatatgttaaaaaggtgcttggcaaaagtggggtgcaatctgtaaacagtaggtaaatggagagcaccagagaggacaagaaggaaaagtgaacactaggatcataatcacctgttatcttaaaccatcaatgaagtccaacagagtgcgaaagtccaacctcagtggagttctagagctttccactagagattaaagaagtaactctttaaatctttggtcaaaatgttccattctatgttctccataagcatcaaaactagcatataggagtgtttgaagatgaagtgttgtgcattcaaagacttaaaagttcttttgtttgttttctctcaatggttagcgactgcccgaggagtttttcttctctgattttccctttagaaaggagacaataagcccgtcaacatggaagcttccgcttttggcagctgttaggcaagtgataccgtacgcaagtccagccctatatagtgatggtgcgttaaggcgagttgatgagctaatactaatacagctggcttacttttcatatgtggaggcaacctgatgttaagtactggggccagccacaaaggaaaaggcttgaattaagatataccatctttcagctgacttttcccacaatcaagctagaaaataaacgacgaatcagtccgaatgagaatgaaatggagagacgaaattgttcataaaagatggtctttcgacattagttggtttcattgattggttagactttttgagggtggggttttttttgcacctccttgctcaaagctgtttttgttctagctgggtgggggttagtgtatcttttttgtgttctttgagtcgccgttttggcgtctctttttaatatattgttgaaatttggcattcaaagttagggttttaatttaggaaagtattttaggaataaaaaaggagagatcatttaggatgattcagtttcctaattttaggagagaatcaagctagattgatattttcttattcagttatttgtgtatatatatgtgtatggtgtgtacctaaaaaatcaataaaggaattcagaaattcttcatggtatcaaagccagttttctgaaaccctaatcccttctggctacctcttattcagaccatcattcattccggccaaatctctctggccatctctcaatccgaccatctctctctctggccatctctcattccggtcatcagtccctgttctcaaagtcaagggagaaaacgttttccggtcggtcgaatcgtcgtcagaaaacattcactgtcggcaacttttccggcgaacttttccggcgatggttttttctacaccgcaaggagcgcctggacgagatctccaatttttcccaaaccaccggagccagaaaaccatccacgcgccggccacacgcgtttttccgcccggcgactgcatctcacgcgccggcgagtgagggcgcgtgagccacttgccggcgacgcgcttcctcctccaggctcgcctgacactgaccagccacccttcttacctgtttttgccatccgagccttgcacgtgcctcttttggggtttttttgcctccgcgggccctccgattagtttttccggcgtcctccggctattttttctcaactccaatccctgcacgtgccttgggaagtgttcttctacctttctggtccatgacaaaatacggaatgtcatcatcacaagtatccaacgtcacgtcaccagaatcagggggcagatctgaaattccaaaccttggtggcagtgattcctctcctattctcatcacaggacacaaattaaatggccataactatttacagtggtcacaatctgtgttgttgttcatttgcggtaaaggaaaggatgagtacctcaccggagaagcagccatgtcagaaactatagaaccgggtttcagggagtggaagattgaaaacagcatgatcatgtcatggcttatcaattccatgaacaatgacataggtgaaaatttcttgctgtttgggactgcaaaggacatatgggatgcagccaaagaaacttactcgcattctgaaaatatttcagaactttttcaggttgaatcagccctacatgacttccgccaaggagagtagacagttactcagtattacaacacactcacaaggtattggcagcaccttgacttattcgagactcactcatggaaatgttctgatgatgcagcaacatacaggaaaattgtggaacaaaagagactattcaagtttttcctaggactaaacagggaattggatgatgttagaggccgaatcatgggcattaaaccccttccaagtctcagggaggctttttcagaggttaggcgtgaagaaagtagaaagaaagtgatgatgggatccaaagagcaacctcccccaacattggatgcctctgcccttgctgctcggtcatttaatagtagtggtggagatcgtcagaaacgggataggccttggtgtgattattgtaagaaaccaggccattataaggagacttgctggaagcttcatggcaaaccggctgattggaaaccaaagccacgggttgacagagatggcagagcacacgtggctaccaactctgagagcacatctgttcccgagccgagtacattcaacaaagagcagatggagatgctacagaaactattaagccaagttggcagtggcagtactaccggtgtagccttcactgctaatcaaggaggaatgaagccgtggatagtggacacaagtgcttctgatcacatgacaggagttgctaccattcttcaaaattacaagccaagtaatggtcattcatccgtccatattgctgatggttcaaagtaaaaagttgccgggacaggttctataaaacttactaaagacttatatcttgactctgtcctccatgttctaaacttggattgtaatcttttgtccattagaaaattggcccgtgatctccaatgtgttactaaattctatccaaactcgtgtgtttttcaggacttgaaatcggggaagatgattggcagtgctgaactgtgttccgggctctacctcctctcatgtggccaattctcaaaccaagtctctcaagcaagttgcgtgcagtctcagagtatattagagtctttcaattctgtgtcaaattctaaggtcaataaagatagtgagattataatgttacactatcgccttggtcatcctagctttgtttaccttggaaaattgtttcccaaattatttatcaataaaaatccagcatcttatcactgtgaaatttgtcagtttgcaaaacatactcgaacagtatatcctcaaatcccatacaaaccttcgactgttttctctctagtacatagtgatgtgtggggtccctcccggataaaaaatatttctggcactcgatggtttgtgacattcgttgatgatcatacacgggtaacatgagttttccttatgaaagaaaagtcagaggtcgggcacatttttcaaaccttcaatcttatggttcaaaatcaattcaattccaaaattcaagtcctcaagtcagataatgcaaaggaatactttactagtagtctcagtacttatcttcaaaatcacggcattatccacataagttcttgcgttgacaccccaaaacaaaatggggtggctgaacgcaagaatagacatctcttggaggttgcctggtgccttatgttttcctctaatgttccaaactatttctggggggaagctattctcacagctacctatttgattaaccgtatgccatccagagtgcttacctttcaatccccacgtcaacttttcttaaaacaatttcctcacacccgtgcagcctcttctgatttaccactcaaagtatttggttgcacgacattcgttcatgtgtatcctcaaaatcgtagcaaatttgctcctcgagcaaataagtgcattttcctagggtattctccaacccaaaaagggtacaaatgctattctccaaccaacaaaagattttacaccaccatggacatctctttctttgaacatgtcttcttctatcccaaatctcatgttcagggggagagcatgaatgaacatcaagtttgggagtctcttcttgagggtgtaccttcttttcactcagagtcaccaaatccttcccaattcgcgcccactgagttgtccacacctatgccgtcatcagtccagccagcccagcacacaaatgttccttctcccgtgaccatccagtctcccatgcctattcaacctatagccccacaacttgctaatgagaacttacaagtttacatcaggaggaggaaaagacaggaattagagcacggatcacagtcaacatgtggtcaatatattgactccaattcaagtcttcctgaagagaacataggtgaggatagggttggagaggtgttaattcccaacattgatgattctactctgccgattgcattgaggaagggtgttaggagatgtacagatcatccaattgggaattatgttacgtatgaagggctatcaccatcttacagaacatttgctacttctcttgatgatactcaggttcccaacacaatacaagagacattaaaaatttcagaattgaagaatgcagtacaagatgagattgatgcacttgagaagaatgggacgtggactatcacagatttgtcggttgggaagaggcccgtggggtgcaagtggattttcaccataaaatacaaagtagatggatcagtcgagagattcaaggctcgtttggtagctagagggtttacacaatcctatgggatagactatcaggagacttttgctcctgttgcaaaactgaacactatcaggattcttctctcattggctgtcaatcaagattggtgcttgcaacaactggacataaaaaatgcgtttctgaatggtgacctagaagaggaagtctacatggaaataccacctggtttcgaagaaagtatggcaaagaatcaggtttgcaaactccaaaaatccttgtacggccttaaacaatctccccgagcttagtttgatagattcacaaaagcagtcctgaagctgggctacaaacaaggtcaggctgatcatactctatttgtcaagaagtctcatgccgggaaaatgaccatattgatagtctatgtcgatgatattattctatctgggaatgatatggaggaattacagaatttgaagaagtatttgttagaagagtttgaagttaaagaccttggaaatttgaaatatttccttggtatggaagtggctagatcaaggaagggaatgtagtctctcaaagaaaatacatacttgatcttcttaaggagaccggtatgcttggatgcaaaccaattgatactcctatggatagtcagaagaaacttggtatcgagaaagaaagtacaccggtagacagggggagatatcagcggcttgtcgggcgcttgatttatctctcacacactcggctagatattggctttgcagtgagtgctgtaagtcaattcatgcacagccccactgaggaacacatggaagcagtctacaggattcttagatatttaaaaatgacaccagggaaaggtttattcttcagaaagacagagaaccgtgacactgaagtatactcagatgcggattgggcaggaaacattattgacaggcggtccacttctggatattgttcttttgtctggggaaatcttgttacctggaggagtaagaagcaatcagttgtagccagaagtagtgcagaagctgagtacagagctcttgcacagggaatctgtgaagggatttggataaaaagggttcttagtgaactgggacaaacgagtttatctccaattctgatgatgtgtgataatcaggcagctataagcatagcaaagaaccccatgcatcatgacaggaccaagcatgttgagattgacagacacttcatcacagagaaggtgactagtgagacggttaaattgaactatgttcctaccaagcaccaaaccgtagacatcctcaccaaagctttacctaggcctaacttcgaagacttaacttgcaagctgggattatatgatatatattctccagcttgagggggagtgttgaaatttggcattcaaagttagggttttaatttaggaaagtattttaggaataaaaaaggagagatcatttaggatgattcagtttcctaattttaggagagaatcaagctagattgatattttcttattcagtcatttgtttatatatatgtgtatggtgtgtacctaaaaaatcaataaaggaattcagaacttcttcatatattattacctccctttacttatcaaaaaaaaaaaacaaaaaaaaactagaatataggagttaatgttttcaccttctgctgccaggacaatagtagatccttgattgtcctcacaaggatccatttaattttcccattatggtaaataagagatcccacatcaaccaggctttacatagtggatgagaaaatggtagttgtcccttcatatttctaatagaagctgcatctgtgtacccaggggcttcacggtctcattaattgatttgtttatcatcggccgcctggccaccagtgcatgtgctagtttgtgatagcaagatacatatggtgcttattgtaactatatataaaaaaaaaaaaatcttttggatgtgctaacaagtagaactttgtcttactaaggcatcccaagagtctcacttagaacagaatgatgaagtctaatttttattttttttgataggtaaatttttatccccattgggacatgaatttggaacctctcacaagcacttgaccacttgagccaagcctcaaggaccagtcaaattaggaacagaatttttgttatcttcagaaaatgttctatgagctgtcttattggccaagagttgcaccaatttctttataaattttctgaatttgaaagttgtagttctgcttgaaagtttttttttttttttttttttttgtgctttattttgatgctgaattttttttttggggtagtcccaacagatcttaaaatcagttctgtagctatttccttgcggtgggttcagtctgagtctcagtctacctatctgtctatctataatataatattttaaaaaggtcaatggatggttgggtttggtactagtgaatgtgattatctatctatccatctatttgtctataacataatattctaaaaaggtcagagaatgggaggtaagttttttgtttcagcagtatcccttgtatatttcttgttaatttattttgccggtttgaattggcactcttaatattatttttgtttgcctataagaatgttctaaaaggtcatctgatcaaaaaaatgttctaaaaggttggatggttgggttgggttctacagaatgtaagggaagttttttgtttctttcagcgacatcccttgtatatatccccacgtgattgcttggcccttttttgattgatactattaatattatttttgtttgcctattaaaaaaaatgataattttttaggaccttcactgttttcctgaagattcttgtcattccattgaaatagtacattggttagggcaaatgttgggatgtgtgcacggtcccaggtttgaatcctgttgctggttaaataccttgatttacctgatgctggttgttgaaggagtggtcagcaccctgaggtttgggtcctcatggaaagccctaagggcttggccaaggaaggttcctcagcgataaaaaaaatagaaaaataaaataaaagcaatcttcatatgaaaatggtgttatttgaacttgaatggctttgattgtcgaacagttacataggccatgtaccattacgattagtgaatataattggtcaagttcagaaactgtcaaaacccattttgctttcccagttgttagataatatggtgggtatagagtattagattactattatttggacagttgtaaagcattcattgggggaaaaaaataaaataaaaggtaaagtgctaataagaatagctgcattgtgaagaatctgtccttattcaaaaaaggttgtaaaggtttcttttgtcatctaccaacaagaaatgtaacattagttacatagggcttacttttctattacaattcctcccttctattgcaaatatgtgttataaaagatcactaaaatttgtatatcattgtctgcacaatcaatttaagtgctgcacatctaaatcattatccttatttgtaatgtgttttgtcacaaaagtgtccacatgcaaaggcatgtcatgtgtctcagaaatagtgctgtattagtgtggaaaagtaagcttcttgtaagacatatactacacacttatgtttacgcgagtagcatatatctacattcataaaaatatgaagtattgggttgcagtattgatacaaatacatgcacatgttgctacagtatttcagatgaggacatgcctatttttatgtgtatatttattctggggaaatgaaatatgataagtatgctgtacaaagagctgtttgcatattacaactaatataaaaatgctatagcattgatatctatacacggttgtgttctatatgtgtatctatatatatatatatatatatatatatatatatatattatttattattataaatggtaataatctattatcaagttacaactggtgcatgaattcctattcttccactccaataactttttgtctgggctcagattttgtcaaatcaacctcctatgaatggagtgctaacatttgtgaaagctcagggattagttgtggcagtttagggttgcattcatgagagagttgagggagtgtgttgcagatagaaagcatggatgaagtttaaacctgaaaaaaatttgaaacctatgttggagcatctatgattccaatacagttcatgttgtgggaaagttcgaagtattctactcatattgggtattattggaaaattacatttttctggagggcgcttagaagcctccctcgtttaaatgcgtagtgcacatgtatgctttgacatttgtggcttaatattattaatgcttaaacttactgcagattaatatttggaactatccaagccgcaagctttt

SEQ ID NO: 11451 - DNA, 2470 bp, Vitis vinifera
  Intron number 7 from transcript GSVIVT01011977001 (locus G SVIVG01011977001) derived from phytozome v7.0 (chr-ID chr1 ; pos 2471194 to 2473663)
atttgaataacctggaaaggtaatggatgtacatttaatatgtgtactgctgcttcttcagatatatatgcaaatgaaagattaaaaaaaagaataaaaaattaaaacatatatatataggtgtttgacatggttacctctagaattttatcctgcaatatttctgtgtgctgcaatatcactgttggttttaagattgttgtgagtgacacagaaaagtttgacagttttattgcataaactttggcatgcttgggtgatatcatattctgaggttgaaaaaatcttaatgctcattaccatcagatccctagctcccctggtcctactgtgtttctaaatattcgatccccttattttagctctgcctgggatagggttgtgacttgttcacattacatggatgcttcagattttgtggagtaccttttcaggcatgacgagtgagcatggaatgagatgtgtgttaaaagtgcccatgcccatgttcagagatgttacccagcaggcatgcacgacaacaagttgagaaagaatcttagttcatggggaatcccctagaatactttctcatgctattcctgcatgatgtgaattttgaacaaatgagtgaaattcccttataacccatatcatatttcataggcatttcattctcctgaggaaaagaagaaaaagtgacaatttcaacaatttagccttgtcatactgttcctagatttagaaatattttccatctagacatgactgaaaatttgaatttttgggaccaccaggtagtgagaaacccactggattatacagttttgatatctccttgaaataaagcattttctttgagcttctctcttggctgttgagtataaaaagtgttcatttaaatttatgaagattataagattctatattgataatagaatatttgaataagaaatttttaaatacattattagaggaaaactacctaaacgtgtcctccacagaattccctagtcttgaaagggagggattgctattctccacttcctgcttggctgaggattctattttggccttttaatatggtgctaaaacgacgattctctatattccaatgaaggacttccttatatcagggatccttggacatgcagggttatttatttattttattttttattttttttctgataggcaaacaagataatatattataaacattaaaagaacaacccatgagagagtacacaggatttgaacgtacaaggtggttggtacctatcattgggagtatttgagttttgtatcaagagctagccttgattggcctattatactacaatcttggacatgtgtaatccttgcacattgtactactatgatgccttgtgcaatcctgattgtgatgtctttatctcctgctatattttttagtgggctgcttatgattgtgtcatgtaggttgttgacttactggattggttcttgttatgtgaacactaaagagaatagggaggcttaacttaagatggtcgagtttcccttgttgatgattgactcgggagagtgaagtggacaggtttaggcatctcttagccatcagtttccactatattctcatttttacttctctagttttcctataatatattttattgtcgtcaaaaatattttagaatctttagattttaaagtatgtcttcatatatttaacttgtaattaacctccactgtagtttcatcaactaaaactgtatcatcaccaaacaacatgccctataggatgtcttgctgaatattcccaacaatcttgtccattaccaaagggcatccacatctctttaatggaggatatctttatataaaagtcatatggttggcaactaaaggtagtgcctcatcatgttttgagagggaaatccgaaagctggagtgttcggtcaactacaatagctctccatccactgtcaggggaaaggggaggggtaggagtcgggctctggaagttttggtgtccagaaggggtttctctgttgggattgagtgggtggtttttctctagcatcccagctccttgggctggttgttgtgagggtggtgggtttttggttcttctttctcttctcctgcttgccttttggcctcaattgtatacttgatgtgtattttgttgctcctttttgcaagcgcctttaatatttcctgcttatttacctatcgaaaaaactaaaggtagtgcctctctatggaagtagaatagtatagagagcagcaagagtgaaaacttgtttgaatgagcataattgctgagtgcatcttttcttgttctgttgtctatagatttgatgaacaactttcatgtggtgttccacaattgtgttatggttcttttctccatatgtaaaccttgttttccttttactgagcaaactgtatctataaagtacattctcattcttctgtttttgttatagaggcttggaaacacttg

SEQ ID NO: 11452 - DNA, 4296 bp, Vitis vinifera
  Intron number 1 from transcript GSVIVT01000584001 (locus G SVIVG01000584001) derived from phytozome v7.0 (chr-ID chr1 ; pos 6843448 to 6847743)
atttccgttcaaccacttctcaggtctctctctatatctcttccaccgtttataattttctttacttgtcgctaatgggacatttgtaagttaaacagatgatgaattgtttagaaaattagggtttggttcaattctgtggttgggatcatgtgataaactgattattagttcagatactaaggatcttgatatgggttcgatatctattactttcccagtattcgtgataaaatctcattctgttatttacaactatttgcctttctgagtaagtattccaggaaagaatctataattgtgcagttctatactaacaaattgagctttagttccaaacggattaaacaaaatttcaggattacatccattagagcatcaatgtagtaactgtgggcagtggatattggttagtgcttagtctatagcaatgtaagtttttgttctgtttctagtcatactgcactataaagtacaaacatgttagaattagccatagaaagtaaggggtgtctgataaaatagctagctacttattactgaaaaaattaaaattataaaaacacctattttttattgagttatgttaatattgaatttcttttagcatcaaatcttttgtttctagttatttaatataataaaattagaattccgaataaactcttcctaatttttgtaagaactattttttcattaaagggttaatgaagaaactgaaaattgtgattatatttctctaaatgattttgataaaaaaataaaaattattctgaaataaagtaagtaatacattattttttatctactataaactatttatgctatataagatttttttttttggttgcaattttcatactataatttgtttttattgattttcttattgtatgtttcttaaaaaaaaaatatactatatttagttattaaaaaaaattgacaaaaaattagaaagataaaatagaaggaaaaatggtgaataaaatttcctttagttcattattcataaaaattttgagaaaaataaatttaaattgttaataaatacactaaggttgcaacttgggcgggttggtcgagttgatgactaacccgagcctaacttgaattgagaaacaatcaacctgacctttaacttgaggtactcagtccaagctcaacacaacctcatttttataaactctgattgattctctggttggttgggttaaattcaggttgatcgggttaaacttaagttgatcgagttaaacttgggttgatcgggttgcataattcaaaatccattcataatggtttttaaaaaacttttttttttctatatatttataccataaattaaaataacaaataacacaaaatttcaagataataataaaaaagtaaaaataaacttatatatcttttaaaaaaaatgaaaaaatatatgaaaaaaaataaaaataaacttataagtctttttttaaaaaaatttaaaagcatatgatataattataatttaacattttttctttgaaatctaaaaagaaaatggatattatcatataggataataaacatattaaatcgggcttgggttaggcttaggttattcgaaccttagctcgagcccaacccaaattgagctcgggttgagaaaacttaacccaagctcaacttgagtaatgaaaatgtttgtccaagcctatccaaatatcgggttgggatcaagttgggttgggccaacttgtccaagttgcaaccttaaaatgcacattcttaaactttccttattatttttttaggaaaatattttaaaattttccataatattttctttcttcttcttattattattattattttttgtatctcattttccttgaggagaatgatttttcttaatatttttcccttttcatagcatttttcaagaaccgaacacactgtaaatagtttttattaaaataaaaaaatattatgatgaagcaaattatatgattcattgtctttttattattattatttactttttatgagatatttttagggtaaagttaaattatgtttaatcataaatctacatataattcatttattctttatagtcaaattaattaagataaaaaaacatagtagcaaaatgggtggatttatgagaagtactctgaatctttttttaaattaaaattaaacttttttaaaaataaagtttttattatataaaataaaaataaaattacaaaggaaaaatttatttaattaattctattcttataatcaaaattttgaagttaatacatagttttgaatgaaggtttaatatcaattttttccctagtggaaggtaagtaccaagaaactttttaaacatttatatttcttttgaattaaatgatgattagaaaatagtcattacatttttgtagattaaaaaataacaatattttgtatagttttaattctaacatatgaaattatattattaaataagatttaatcacttaaacaatatattttttattttcatggtgtataatgcttaaatttttaaagatgtcatatgataattataaggttaaaatttgtaaaaaggaatcatttttagacttaaactattttcattatcaaatggtcaaatcacattcaacacttaaacctaagataatatcaaatacttttcacttctattaatccaacacttacaatttagcacaaaggtttttaagtatttaatttctagttttatcaaacaccaactaagacttctttccaaaacaaataaatgttattaatcatatcaatatgatttattttgctgacatttttagggatgtttaatttgtttgaggattgtctttacacgcattatgcttaatcaagtgcattgaacaagatttgggtatataaggatatacataagagacaaacatgggatccttgtgacttgataggtagttgacgaccatttatgaatttgagcaatttagtagaggtcgtaatgcatcacctttcatttgtgaaattacttgtcttggtcattagaattggattctgaggtgaatgtgcctagtgtatgtgtaatagattgaactagacctataaagatgtgtgtcataaatgctattagttggacttgtactttctctaatgtactatgttgcatgtgttttcaatcttgaaaggtcattgagctaatgttgaattaataattgttttgagtttatactggagtgagattttaaaatgatcatatattcttgttttattggatgattatttaattcaacttgtagtaaaatggatcttgaatatagaaccatgatatcttggtatttgagacaatttatcatcttaagtaatcctaagattaatgatcaagtttaatccatggtcattgtaattccattaagttggaatttgattttcatcctaacttcctaaggaatatagatatttcaattgatccatagaaataaaatggatttatgacataaagatgtaattcaaatagtgtataacaaattccaattcaaattataactattggttcatagggaacatcatgcaatggtattataggatgtggacaaaacatttattgggtaattacttcatcataattttcattgaactgcaattaatcttctttggtggggtaaagattaattacagcccttgtaaaattattctatgggagctagttattctatgggtcttagtggtccccattcaagctatttaattaagcatacaattaattaattgagcaattggagaattgggttgcgccatgtagtcttgggtgtaatataagggtcgtggctaaggctatgtcaccaagggtagtttggtttttatgtcctatcctaaggtctatataagcactcttgtgctttatggaagatacacttgaaaagaataccctatgaaacatcacccacacaaacttgcaatggttacatatgaaagaatagcattgagagggaaaatccttggtgattgaagcagcttaaccaaagcttttttcttcaaatgtaggtataatgtgcaaatactatgatcaatgggtggattgaatgaataatttttcctctgcattcatgtcttttgaatcccataaaactaagataggttgttggtttgcatctagcctttattattatgtcattattattacatcttttttttttcttttttgttgcttttgtttacaattaagattggttttggagcattgtgtccaatggttgatcaatgattttctcttaatttctagggcgtttctgagctcaaactgtgtggtgaggagtt

SEQ ID NO: 11453 - DNA, 4334 bp, Vitis vinifera
  Intron number 1 from transcript GSVIVT01033139001 (locus G SVIVG01033139001) derived from phytozome v7.0 (chr-ID chr4 ; pos 8286242 to 8290575)
gggaatcacataaaacctaaagttaaagcaaagaactaagtaaaaccagagttcttgttcttttaaaataccttgaaaggaaattccaatatcttaaaaatacatagacaaactataaagaatatgcaaaatacaaattctgtagtttctttccatcacatatggcctctcccccatgacagaaaaacactagtgaattaagtttggtagaattttcacttacagctcaagttctcaatggagcttgtgttagtatgaagctccatggtacaactcatttatgcagatttcttcttcttgaaaatcttgaatagatgtatctttccactcaactttgcagtgctgctcagattcaaaaccccagaatttaaatctctacgcaattgtctatggttatttaccttggatgaagatatgggcatagttatgttaaaccttttggtggatcttgatctagccctcgccttaagaatagttgcctctcctactacagtgcccaaatatgatatagttgtagtactattatcgaatttgaagtgaccgaaattcgtgttcttgactgtaactcgagcctttgcatgaggaaaattttaaacataaatcttataattattaataaaaaaaataatagcaaagactttttatgaacaatgttttatgtcgaaaaattcacgtttttcaactgtttttttattggattaatttattttattattcaacaaattgataactatttaagacaaattgttgattttattttccttccatttttccttgacttttttttttttttttttgtggttaaccaaacaaaagaaaatgaattctttttttttttcccttgaattttccatggataaccaaacaagtgaaaaaaattatattcctttccttagctttttctttccttctatttttcctcccaattttctttctctcacattttccgagaaccaaacatagcctaaattttcactctccattgaaaaccctaacttttggaagagaagaaagaagggagagagccaccgtttttagagagaaagaagagaagagagaaaaacgcaggtttttctcatcatgcccatatttcatcaaaggttcgatctcgcttcttctatggtccgatcgagttgaaatttggaggagagtttcatgactcatttatcttcaatatgtacagtgaagatcggatttggagttttgtaaagtcattagaaagaaagaggagaagagagaaaaacacaagtttttctcatcatgcccagatttcatcaaatgtccgatcccgctttgtccgtggtccgatcgagttgaaatttggaggagaggttcatggctcatgtatcttcaatatcaatggttgagatcggatttggagtttctaactgtcattagagagaaagaggagaagagagaaaaacgcaggttttttccatcatgcccagattttatcaaaggtccgatgtcgctttgtccatggtctgatcgagctgaaatttggaggagagattcacaactcattaatctttaatttgaacggtgaagatcggatttagagttttgtaaagtcatctttcagccaaaaatagaacctttgttttggcgggcttttctctccagattgttttgatcattagctttgatcgaggtcaattcgtggtccgattgagttgcaattttaggagcacgttcaagacgcattaatcttcattctaacaatggagattggatttagagtttggaaaaatggtatttcagttcgagaacagtggttatgtttggtgagatctctccattattctggatttaattttggatttatctagtgtttatcttgtagtgatttactatttttgatataaatcaaatttgtctacttttcatgtcacatgctttgctaactaacaaattagagcagtttagatattaattggttcaaattatagatattctcaatcagttgacaaattatagatatattgcatccaccaagtgttcgatgcttagtccatgagaaaccaagttcttaaatcaattgtttagcttattatttttattattagttttattatttctccccttaaagacttttttaaagagcttgagaagttcatgggaggtaataaagccactgaacttttgagttagtttgaagtgcttgattcaaatccatcaccaagatgacttagatccttattctattcttgtaaaaaaaaaaaaaaaaaagaaacttccttttgacacttttttaatcatatattctcaattatatgataagtaaaaatagtaattccattaatattttatattttaatattttgcataacctaccatgcatgaattacctcatgttttattgatttcacaagttggtttgagtttttgtggtttgatttcatttggttcaaggtgtaccttgttattttggagctggttttgggagtgaaaaatggtgattcgttgaagagaagagagactgggatttttcttttaggaaagtagaagtgtgaagaaagggtgggaattttctaggtaagaggaaacaagagaacaagggttgttcaattaaagatttttgatagagggagggaagaaaattgaggaaaggagttgtgagagaaggagagttgttttgggtgctaggcaaaaggcaagaagtgagggttgtttggttagatatctttgataaaaagagtgaagaaaatgagagaaggagttgtgagagaaagaaagatagagaggaagacatatgaagactgttaatttgttaatggaaagattgagggaaaggttgaaagaggaaaaaaagaaggaaagaaaatataagattgtttggttgttcatggaaagcttgagggaaatgggagaaagaggaaaaagagaaggaaaaaaaatgtaagattgcttggttgtccatgggaaaattattaaatttaagatgcatgcatatttcctacctctattcaatgaaaattgagaggaaaatatttagacattctttctacttttttccttaatatttttttcttacattttcccataatatataaaatttccctttgaaactttatttacgttttgttctttggattatatatttgattttttgttttttaggtagaagaatgatgaataaaatatattttattggagaaaatcaactaataatgctctttacagtttagttcttggtaaataactcaaaaccccatttagaaatgtatttttctattgctcttgaatcacctaaattaaaataaaataaaatgaaaaaagaactagtgttttttctattgtttaattttctcaaatttttctacttttcattttatattggttcttgtgttttttttttcctttaagatttttgtgagagttttagtttgaattgcactttttggtttttgcatttataattgatagattttttattctccttgtatttttttataggtttcaaaggaaattggttggccaaaagacaagaaatcataatgttgaaggaggtagtgatgccgaaaaccatgaagattacatcaaagtcatttagaggatgatcttatttttttatagaatatagatcttaatagttgttgcactaatatttgttcttttgtagaattagaaattgttattgaaatattttgatataattaacaaatttgtatgtaattattgtatgtaagtatgaagttacattgatggtttaaattgtacatcaatatttgaaaatatttttattagtaaaatttagtttaattttggggcatttttaatttttatttaattatataggaaatcattattttaataataggatataaaataatgtgtcattgataaaatctattaaatatgacacttctataaatgtcaagattgcttatttcataaaaatggtatcactagaaaatgtttaaagttgacgcttcttacgagtttcattgttaacattatccaaagatgatgcttctttaaacgtcattgaaagtatttatcaaagatggcgattcctaaaagcgtcattgttgcctaagacatacaatgacagagccgaagaggacgctttagagaagcgtcatcttttacctttcttgacgcttaaaaaacatcattgtttcccatttttcttgtagtgtttgtgatgatcatatagttttttatggtgttgattcttactcaaagttacacggctaacttgacttcgatgctaacagttcaacaactcaaacccactataacctgcataaacgagctcataagaacggggcaacgtgtgggccacaaaaatgcctccttcatttttgcaattttgaaatagataaaatttg

SEQ ID NO: 11454 - DNA, 8026 bp, Vitis vinifera
  Intron number 9 from transcript GSVIVT01026359001 (locus G SVIVG01026359001) derived from phytozome v7.0 (chr-ID chr4 ; pos 14948822 to 14956847)
gcttgtgagcattaattgtattatatgcttgtagtgacattacaactcattcttggcagtttaatttttttccttgagctttatgatgttcttccagatggccatgtactttgttagttattgatggcatctaaattttgatgtgtgccccctcctacccccccgcctcccccgttgtgtgcccctccctggttgtctcattcaggtataggattagtttcgctatctatgctctgatcttctatatggcaacctgatgatgctactttactaatatttttgttgccaagttgtctgacttttatgagtcctcttattcaggtctaggattagattcactatctatgctctgatcttctatatggcaacttgatgatgctgctttaccaatatttctgttgccaagttgtctgactttatgagtccaaatcagattgtaaaataatacacatgttgggagtaagcagtgcacaaaaaagcgatgtgcacgaaacttacaatcttaaactaatgaattcccacactatctacaaaatccaaaaataatttcgaggggagtccacatcccagcttgactacaaactcaaattcataagaagcagtttttcagttctgtgtaagattgctccactctctcaaatgttctgtcacaattttccattgatccgaaaaatacattgcagaatcaacctccaaacaactttgcctttgatttcaacaaaagaaccctatctactaagaaggacatctctaattgaatggggaagtccccatgacatgttcaatgaagagaacaccatggatcatgccagaaagcccatttgaaatgattgagggcatgggctgaatattcaacctcttctttgccaagataatacctattaaccaaactccagcctttcttcatgggttggctcaaagtcagaaatttttccctaagttgcttcccatgcaaaggagtcagctgtggaaggcccttcctttaggattccaaattaagtttagcttgaaaaagcaggacgatcacttgaggctagagatgaatagtatgatttgataggaaggattctcttttatccgccttacacacttgcttgagctccaaatgttagagataaaaaaagagttagtttaggatcaaacaacaaaattccaccattagtctactctaaaaagtttcttgtaaatgtaagattctaatcattctcatataaggaagctgccaccaagcattattttgtactcttggaataaaaataatgatcctaatgggagtactattcagcaagatagtttcacaattttagcatttcatagttttaataggagtttatttttcattttattcaaattgttttagtagttcatcatttagtcaatttcctttgtttgagtttctaatttgattagtgattcgcttgaattcccagccgggtcttttaatcaaaaacatttataaaacctatgaccttatactggcgtagcaaagctactatagtatagcagttctagggtcgaactcagggatgggttttcactctatcagtgacagactctaaattagaaattgattctgatgatttcctttagcacaaacttgaaatttaaaagaaaataaaattgttttgaaagtggtgatttaaactaaactcacatagaactaagtaaaaagtgtaagaaagaaagtctcccggagctgaaggttgctaggttcaagtgccagatgcaaagtggaaaattccggatttttctcctcacattggggatttaacctatagttatttctcgaaccggtataggtttgacaatgaagttttaattcataaaaagtcactagagatggtagtcaaggtccattaatggcttaagacactatgggctatcaccttgaatcactttccaatggctcgtacatgataactaatggactgatatggatctaacaataagcatccacagagaccttaagcttaccatgtattggccagtcaaagtgatcctaagggatttaaggcaaaaccttggctttaaaaaccatttatggactccaactacctgaatttaatgcacggaaacttccaccttttaatctggacttttcacctagcttcctttactccaagaaactaaatgtttagcctctcatcctctgggaaaacatcctcagagggtgtttggcttgcaagaaaatagaaaatagaagagagaaaataaacaaaagagatctctgtataacaaagttacataagttggtctcctggagaaaagctccccgaaagatccattttcaatgattacaagagaatttatataggaaggtaattttacccttccttggatacttcctagctaaggaattacatgagtggttgaatacaaggagaaaatggaaatttagatacaaaaatatcagaagaaaaagagtcggcaaaaatatccaattttcgcacgctggagttccaatttcgtaccttgatttgaggtgtgcgaaattctcgcatagtggactgaggaattcgcaccttgcacagtggtgtgcgaaattgtccctcagcttgatgcagttgtcttccgaaggccatatctttctcatttcagctccaaatcgtacatggtttgaaccgttggattcttgactttctgagctttgaaatggtatatagaatgtaaaaaatggacttcgggaagtgctccaaaagtgcgatgaaagactgcagctgtgtcccctgttttcatcccctgttttcctcttctccattgcttcttccttgtatactttgaaccactaaggcaaaggattatgaggctccatagcttgatttcttcataaatttaagtttcaaaagctttgccctgaactataaatagctctccctcattcttaaattgctttggtgagcataaagttatcaaaaagcaccaaaacttaacacaattgttagaaacgattgcaagggctcctaacatgctaattgggttaaaaggtaataattactactcaatggtgtttaaaagagctaattacaagctacaaaatagcatgttttgagtagtaatcaattaggaaaaggaattatattcctactaaatttagatgaaggttctatgcctttaattgatttttgttgattattgagatttttgctgagggagagtagttttctatgttctttcttgctggctctaccttttggtgcctgttatatgtcctatgtactttggtgtgctatttcttttggtgtttttttatataatataatctcactttatttgcgtattaaaaaaatatccggctatatctagtctttggtcttattagtaagaggaattttatgagtttatacaaatctatgtggtctttcaatcttatcatgagaatttattgagaatctagtacctatatagcttctcaaaggtgtaattgcctttctagataaatgctaggaacctattgtgattgccaaggatctatttcattcattcttttgagatggggtggaggagaggttttggaagaggcttgccatgtggaaaagacaatttattttagagggaggatcaccctcatctggagcactttgtcaagtatgcccatatacttcatgtctctattgtgtatgccacgtgtggttagattgagactagagaaattaaaaagagactttctttggggtgggggtgggggtgggatggagaacaagcctcatcttgtaaagtgggagattgtttgttcaaataaaaggaagggtttgtctaaactcaatagagcccttttgggtaaatggagttggcgctttgtggaagaaagggggactctttggaaacaagtgatcagtaggaagtatgggatagaagaaggggggtggtgtacccgagaagtaatggaggggtctggtgtggggtattggaaagaaattaggaaggaatggtctttaatgaaaaacaattttgttttctccatgggagatggtggaagagtgagattttgggaggaaaggtggtgtggtgacaatgctttaagtctttctttcccttaaatgtttgctttggcagcatcaaaagagacgtaggtggcagaggtttgggatgctttaggggagtagcggggttggaatccatgtttttctaggccatttaatgattgggagatggagatggtggagagattccttttctccttacaagggaagaaggtggacactaacatggaggatagggttggtggaaagaggctaaggatgatattttttctgttaaatccttttatagtgctttggagggcagcagttcaatcccgtttccgaacagcccttgtgctccttctaaggttagttttttgcttgggagccttcatgggataaagttttaactttggatcaactaaagaagaggggctggtcactcccaaatagatgtttcctttgttgtgctgctgaagagtctattgatcaccttctaattcactgcaccaaggctaaggttttgtgggacttcttgtttaccttttttagtgtgctgtgggttcttccttcgtcagttaaagaggtccttcttgggtggcatggctcatttgtggacaagaagcgaagaaaggtttggagagcagcccccttatgtcacttttggatggtttggaaggaaagaaataggattgcttttgaaaatgaggagtttttgattcaaaggttgaaatattcttttgtttgtaattttttggtcttgggctaagtcgtgtatagatgaagggcctaattctttaatcaacattttttgattggttggcctttagatgagggcgggtgggtttttttgttcccctctctcttttgtttttgcctataggcgcctgttgtataccccttgtatgctttggattggccgttgggcgccttgttcatattaatatatccttcttatgtgcctttgcctaccaaaaaaataaaaataaaaatttcattcattcttttttttttttttttttcatttcattgtgattgcttaggtgttgttacctacgaccatgttgtgattgtcaagggctatctttcttctcttttgtttccattgcttttgttttctttgatctttcatcccctagtgttgttacctagtctttgtgtttttgtcctttttagcctttggtgggcatgaaatgcatgcaccatgtgtaaatggttgtgccttttgcttaggcctcattaatatatattctctatttgcctatcaaaaaatatatataaaagcaaaaaaagaaaccttgctataaatctaaagattgtgaatcagatcctttaaggaatcctctttatgccaaggcccatgccacagttgactattaggctatcaccagatttgcaatagcaaattcagtagggtaccactcttcatttcccaatacttctgtaatttcaaatttctacaaaaattatcattcttggaagtgaatcttcaaagccacttccaaaaaagttatagtgacaggcccataacttctaatccctaaacgtctagaatccttatcagcaaaagcaattggtcacataagtagatgagtttttcttctcaagaaaacctgtccctctgaaaatttctttgaactccttccaacctatctccacctttgtagggatcacaaatgctataggaaataaaccagaaggctatatattgtgcttatcaacaaagttagccttcctcttggaaagatactaaaagttccacgaagccaaccttctcaaggaaaacaattgacagttccttgaagccaaccatcccttcaatttttccttatgtgaatcccccattcatgctgacttgaactaagcacctaacagcatacccaaatagttggtaaggaggctgtgtgatgcaatcacactttgaactcacataagggttcctaggcaatcatacctagagtttcttaaacacttaccgttaggaagaagacaatcacacctttgttctccattggaagaccacatatacgactctttttcctagtaggacaacttttttaattccttttttttttttcttacaaaaatatgaatgggtgtaggaaatatatcttttggaatttaaaagaaatagaaacttttctaatacaagaagaagactaaaagagagataaacttggctaaaagttggtcacagaattaagtagaatcttaccaaactataataggatctttaccaaattaaaatagaaacttaacaaagagagaatagcactcgatatcattcaacttgattggtttccaatatgtagataaagaagaggatcattgccaatgtatttttggagaaggattctcttcctctgttttgatcagattttgtaattgtgggaaggatttctcatccttcttttgtacttttaatcctctttaatgaaaatgttgtgtttctgattaaaagaaaaaaactccttaacaagccaaaatagaagcttattgaattaaccatggtaagttccaagaggatcttaagtactcatcattagtctcctgaattaaggttgggcattggatccaacctttccccttctctctcataggtctttaaaggatatctccaacattgttctttatttcctctaacttggaagaaacttaaccttgagttttgttgactttcctcaatctaatgaaattcaaagcaagtttttccagcctttctttcttcattgcctggtgcaaatgaattgattatggatgaggtttatttgcttggtatggatcttgtctgtgacttgcaaagattttgactcttatcacttgatcttgtgcgcttgtagtgacccttctttctgataaaagttggcttccactcatatttgtagcctacttcgtccaaattcaggcaaccacaaatgcaccaaaaccaacctcaaaagtaggttaacctttttgtttaggtgacttgcatgttccactcctcattcaacttagctattgtactagtggctgctggaatttcctcaacttcacagctttgagcaacacacttcatattcttataaccatgttgctcatttgaaactgctctcggctttgttagtgtcttgttacatactatagtgtgttgatcattctatgttagtgagaacttctagaaatgcttctatgcctatccaaaaaaggcctgaatccttgttttcttttgctaggtaaacataatcattgtccttattctccctttcaagctcctcaatacggaaaaacaaaggtttctctagtttcaatagtattccttgcatctcttcttgatgcttcttcatttgttccatattcatagttttcaaagcaatgccctcttcattaaatgtgtaaagaaaatgtattagcttacccatgctgacacacatcttgattctaaagtcaaagttgaccaattggaagatgtgcaatagttataagaatcatattgcaccatatgaaatcattatagtaacgccgatgagaagtagaaatgaaacattgctttgaatagtagtaccgttgacccatgattccttgtatggttgaggatgtggctatgttggaacttcctttcaacaattgcttcggaggctatattcatgttgctctctccatcaatgattacattagagctttactctcacaacgtaggatagtttgaaatatagaagtatacttccaatcttcactgtctttttatttatttatttattttggtttttttccctgtaaaaatacattttatgattgatagaaaagaaaaagcttcacttgcttcttgaagattatcaacatttaatatccaatgtcactctatattgacatttttaggttggccggccactttatggtcataccttgtcatttacatatgaagttgtaaatttgtttcatattctactaaactaattccttctttctgttgttatctttattgtgttattatttttgatttttattgagcccaactattcatagactatggtattgcaccatgtttttatataatgtcatatgaagcaggtaatatggctgcaggtaat

SEQ ID NO: 11455 - DNA, 7585 bp, Vitis vinifera
  Intron number 6 from transcript GSVIVT01036886001 (locus G SVIVG01036886001) derived from phytozome v7.0 (chr-ID chr2 ; pos 18237283 to 18244867)
gaagaacaaagtcttgaccctttgttttcagagaagtaggtatccactaatttctaaatgttggctgtgctgtatatggtttttcaagttgtttgtcactcaattacattgccaaagaacaattaagatggttgtatcagggaatggtcggagttatcccctgttttttgatataatagaaaacatattaatagcacctaagaaaggatgcatagaaaatatattaatagcgcctaataaatgatgcaccaaggtacacaccatatatgcaatatgcccctaatggctagccaaagaaagagaaaacaagaaacaagctccctctccttaaattagatagcccatagatttttttaatagacagataataagattttatcaataagtgccaaataaacagcacaccaaaatacacaaggcaaatacaacaggcgccaagaaggcacatcaaaaaagagagggagatagcttatagattttaaatatagcataggtttctacaagtgctctaagatctttttggaaatagtcatcaatccatcaagaagaagccaagacatcaaaatgcggtatccttttctctctggtctctttgggaaatgagaaattggaggcctttggaggggttatagttggaggtttgtggcatggatgtggatttttatagagtttgatacttcttgatcttctggtcttctctttctcttttgtcttgagtttgccttgtttcaatttacctttttatattttgtgctagcaaatacaataatctattatttttgtatctagtccatgacatcttcatctcgactactttcaattattcaatctttgcattaatagataacttaagttggtctattattcttaaaggaaaattgttgagagtgcaaatataacaaggccactataatagataagtagacaccattcgatcctcacccttaagctactgtgataatgcagtttggaaaagctcgtagtttgtaccatgaggaaagttaagagagcatatgggcttgttgggtaattcgtcttgaaaacagttattttttttttttgataaccgatgaaccttccatggccaagcccttagaactctccataaggacccaaacctcggggtattgaccatcccatgacaaccaacactaggtaaattcagggtattttcaatgacaggattcgaacctaggaccatgtaccatttactagaaccacactaactagtgttcttcttaaccaattgggctaccttgatgggctcttttgaaaacaattttttgttctttaaaataagccggtttttgaattagaaaaaatgtttgacaaacttttgatagaaaacagttttttttagaatttgttatgaaaataggttgtttttttagaattgtttcgagttgttttcaattgtttcttataaagttttttgagaaacaatttaaaaagtgaagaacactttggaaacctttgcattgtgcacaagtgtacaatacctttatggaaaataagccgaaaaacttgtttttcatatttcagtttttaagcggagttttgttcacaaaataattgaaaactattttttagaattgctctcaaaaactattttttgagaactatgtttgaaaatgttgcgaaatagccccaatgtttgtttcacttttttttactgtttgtttattctaataaattaataatagatttacacttactgcttgtagattttttttaggagtgtgttgatgtgtgagaatacaaagtttgtcaatttcccttttttttttccctaaaaaagtatcaaacatctacaagtcaggttcctaagcgcaagaaccacaattgcaatatagttgggaagagatccgagtatcgttttttcacaggaatagcgagttgttttcagcggcttagattactacttttgactgttgagaaagaagagtgaaaccatggtgtgttaaagaaaatcaaaggagaaggttctctgaattttagtaatgaagataagcaatcaattgactgaaaattaatcaaagagaaaattagagaaggagagagtcactgccttcattaccttgtctctttgcagtgcaaatgttgtgagtcttgtgacccatgtctataatcggcgtcactaaaagggttttcatgcctttggttaatctaaatagttctaaagaagacttggttatagctatctaaatgctcattaccctggatattacttcaccatctaccatccactcaggacattctcaagcagtgatgccttgtggtgacaacaatggagcaattttcctcgccttggaaaaacctaaaattaacctaaaaaatcgtggctgtatcttagactcggtgaagagaaaaatcactcctcacttatttcccttatttactcaattggctacaaacttaagtgaaaaaatattctagacatgatgagaaatacaattatgcatcaactaaaaatataaatccaagtactcccaacattgattgaaaatgaaaatgacttttcattgaattggaaaaataaatttaaaacacgatagttgcattttaatagaaaagagctaagtggccatctcagtcaatgagatgattgtgccttattgctcaagaaaaagtcctaagtgatgggggaaagccttttaaagtttattcaaggaagaaagggaagacctaagtaaactttaagtaggattaatattaattagaattgaattgggattggtatttgttggagtctaattaggattagctagttgagttataatataattagaatttgagtcatactaggttattagagtcctagtagactttggatcttataattagaattagaatcataataggttattagaatcctagtagactttggatttcttagagaaacctaaaaataggctaatcaatgtcaatcaaagggatgaattgatgaataatattatattttctttcattgcaaggttgcaaccctcaatggtgagactccattgattttcttctagttgagactcctagaaggccttagtgagactcttaaggtttttcatcttttcttcattgtttcttcttttctctctatttcttatcttataattttctctaccataaaatttattccttgttcctttccttacaccctaaaaataaaaccctagcccacctacccttgagtgtaggcaaccatcctagggttgtcctacatcactaagcttccttacttcctcttcactagttgctgtctccgtgtgccttgctctcttcatgcttgctatttatagaagaaaaggctattatgggaaggtagtcatttgagagtgcaaatgaaatgtcccttcaccttgccaatcttgaatagttgggcaatgaggtgactttccatgcttgttaggagctatgcttgccatggcaattggagcttgtgtgatagctctgattcaccccctaaggtattgacaatggtcttagccagctttacttgaagaggaatgagagatgaagggtgagaataggaagaaatgagtgagatttggtgatttgaagttcaaatcttcgctaaggagaagagatggagagtgagaaaatgaagaaagagggatttagaagggttgcagggctggtcgggcttgaaaaagcatgaaaaaagcttaaaattgcaaaagggatcgtccaatcctagtgttttctaggctagcctagcaggcaacctagtgggtagcctagtggacaagcatttcttatattttctcaatgtttcttgaaggggaatcaaggggttattaatctatcttccctttaggttattaaccttgccaaagtgcctcattttagtcaccttttgcctttgtttttcttgcaaaactcacaaaatggtcaagacaccttttattgataaaacagggtaaatgtggtacttttatgcatgaaatgttgcatgtatgttttactatactaattagtgaacaattttatgtttatcacctaccaaaaaagacaatgtgtttattaaatagttaatcatattcaacactcccccattcaaacaggagataagacactgcatgagagctcaataattctttggtctagtcttcacttactgtctacaaattagactgacattcaaccttcctttgatgaaatgtttattcatctttggtttattttgttctgaaaaaagaaatggtgtgttctgtcatgttgcactggtttatgagcaattctggtagtagcactgtcaccatcagcttccattttattaaatgcctatttgtctttgtatgttttatcatcttgcaattgtttatgcgcatgttgatatctgatatcagagagaaaaacctgtgggctcttaggaatcaaaacccatctttatcccccccctttttttcacttcctgacaaaacccataactatctatgtggtcaagatatctgagcattgtaactctaatttcactttagcatgtaatctggtggatagtgattgatttttcacttctttgatgtacaagattttctcaagcaaatattcaatctttttttttgatagataaagtgaattatattaaacggaaagaggaagcaccaaaatagtgccctctaagtatacagggagtatactaaagcagcccaaaggctcgaaaccaagggaggaggaaataaacaacaaaatccctacccttacttagagcctagtcacttaaaaaagctaacaagagaagaagggctcaaaactataaacaccctaacccaagaccaaagattacatacaaaagaatatttcagtctttgaagcgaaaactcctcattcctaaaagctaacaaattcctttccttccagactgaccaaaatatacgtaagggggccatttgtcaagcctttttatgggtttcccccacaaatgctccatgccacccaaggagaatttcattcactgaaccagagagaacccaagccacaccaaatagggagaaaagaagattccacaatgcccgcgtctttacacaatgaagtaaaaggtgatccaccgtttctacttcaaaaaggcataggaaacacctatttgccaaagagtaccccctcccctggttgctccaaagttaagattttaccttaggaagcctcccaagcaaagaaagctaccttgggaggcacattccccctccaaatactaccacaagggaacaaagaagaacctccgaactccagaatagaataaagcgacttgactgagaaagctccactcttagatgttgtccacaccactttatccccgtcctccctttgcactctaaatgcttggatcttaagcataaaagctccaccatctcaatctcccaatcattaaacgcccttgagaaaagaggggtccaaccatcctcaacattgtttgggctccaaacatccgatacccaagcatctttagccaaggaaatggaaaataaagaagggaatgactcgcagagaggctcatctccacaccacttgtccttccagaatctcactctcctaccacaacccatacggtaggctaaactgctattcacacacaaccactcctttctaattgctttccaaagcccgacaccatacctcttgcttatggccttagtgcaccatcctccctcctctacatcacatttgtgactgatgacttgcttccacaaagcctcactttcaatggcaaagcgccaattccacttactcaagagagctttattcatcaaagctaaatttctcacacccaaaccacctttctttctttccaagcaaaccaagttccacctaacaagatgtggcttctgcacaagagctcctccaccccacagaaaatccctctgaatcttctccaatctcaaccttacttttctaggcaaataaaagagagacatgaagtaaataggcatgctagagaaagtgctccagattagagtgagtctttctccttttgatatatactgtctcttccacattgcaagcctttttcgaaacctctcttcaactccatcccaaaccacctctgatttgaagggtgccaccaaaggcagacccaaataacaggatgacaaaccacccactttacaacccaactccaaggccaaatcctctatatcatgcaccctccccatcgagataagctcgctcttctccaaattaactcttaaccctgagcaaccctcaaaccacataagaagccagcttagatacgtcaactgatcatgaaactcctcacaaaacaccaaagtgtcatccgcaaatagcaagtgtgagattagtatcccctcacctcttcgacctctcaccctccaccttgataaaaagcccccactaatagcccttctcaataagcaactaaacacctccatggctatcacaaacagataaggggagagagggtctccttgtctcaaacccctctaactttggaaaaaaccggaaggagagccatttataagaacagaaaatctcacagtagagatgcaccactctatccacttaatccatctctccccaaagcccatttttttaagcactgccaacaaaaacttccagctgacatgatcataggcattctctatatccaacttgcacaacacacccccttgattgcttttcaacctagaatccacagcttcatttgcaataaaaaatgcatctagaatttgtctaccctccacaaaggcattttggggttccgaaatcactttccccataaccttcttgattctatttgccaacaccttggccaacaacttgtaaaggtaccgtcttttacagtttcagtctgtttgccttgaatggagtagctgtgacaaaaatgtactgtctcatttctcagaaaaggaatgatgaatgtaaagtttcttgattttcacatttaagttacacttgataacaagagaatgatggtgatcaacaaggtgacttctaccatgaatttaatggtggtgatttggaatgtaggattgccattctgggtaataaattttctgacagtgttcataatagtttatcttacttccaaacttggttcagttaagtctcacaagacacatacggaaaacggcttcaactcaatgttagaaataacaaaaagggctccattatacacttttcttagcattttactaaataagtgggagtttattttgctgctgccactagatgggtttaaaaccatgttaaatgacccttgactgaaggattgaattatgcttggacagagcggggagaattatacccaccagtgatgtttagtgattgttgagatttgcgattgattgaaattgctgttgtaccaataccaatttgatttatggcttttctgagatattcgagtaattgttgatagggcataatgttctctttctctgtgctactatttgttctgaatgatggaaatataatggccatgtaacagaatatgaaaacaatcaatattaatgtgtcatgcatctttagttggtttctgtagccttgtgaacccctttcctgatgttgaattatttgtaatgaataatggaatcactgaaatggccttgattgcacaaatgcaggacccctgcaggtg

SEQ ID NO: 11456 - DNA, 3228 bp, Vitis vinifera
  Intron number 3 from transcript GSVIVT01018773001 (locus G SVIVG01018773001) derived from phytozome v7.0 (chr-ID chr4 ; pos 20054212 to 20057439)
aaacagtggagtcattgctggatgaggccaaaaaaggattgaagctctaccaatccaaagcttaaaggggattctattgtttgctaatgaaaaaagttctcattcttttcacttaatttttttgtttatgtttttactgttctcatggagtgtatatacatttagttgtttgaaattgttcacagggatgcccaaaaatgctttttcttctctaatttccgcctctctttttttgtccatgttgagttgctttgctgataccaaggccaggaagtgggtgagggtagctttgtgtatgagacagcgaaatcatggttgtcccttgtccctttctgttctgtgtatgcatgtgttcctagtaaacaaattccagtttgatgagcctagcagttctagatgtgttctttttgcttggggtatcctgctgtttgaattattgagggtgtttgggttaaactatacttagatggtacgggtggaaaaaagatgagatgggggaaaggatatctgagttcttatctcaactatagaaaacttctcttggttacataatgagccaacttataaaatgggtctgtttctcaacctcaaatctcggctatgatttgtaagcaacaggtgggagaggtgcgagttgccccccatgacttttgaaccttttccaactaaattatacaaccaaaggttgcttctgacaaacctctctaatgaaatctatgcattttcctgagtttccactgaagtagctgattttttcagaggaaatagagagcagaaaagaagagtttgattttggttgtgatctatgtagaactgtacattgaaggacggttttctatgtggaactgtacttaggagaatggttttcaacttcaactagaacagcatttccaaaatgttgtagtcaatcatgttatccctgactctagctttaagcatttggagttcccaagttgtcccaagtgcaagggtcgaatatttcaggcatggtgaattttccagtaccagggaccacgacacttgatgctttgttcttctacaaacaggatatccatgcatgatggaagaatgtttcttgtacattccagagaacaaagaccgaaattgccagaataatgatggaagttcatttttcattcatttttcctacaatttttcagcaatcaagaatgaagaatggaggtttccttcattcttcatttgtatcaggagaaatttatagatgaattctcctgtctctatttcctgcaaacagttcctaccggcagttcaaatttgtcccatcaatgcctcctaaccagttcaatggcctcagtttcacttcttcctgcgaactacttatggccaaaaccattttctcaggcttgtctcacccaaattgtccaattactccaaagacagcaacacccttacatgcatctctaacatgttctatgaaatgtcatattttcaatgaacttgacgtatttcctctatttttcttttatcagaaatcaggtactctgatatataactttctttgtcattcaccatcccataagaatgactcgtgtaagtagggctttggcgaattttgatagaaacaaacgagaggaaaaatcaagttaggtgagaaaagactgcggggcaaattgaaggagttggatctgcaatgtggtttactggtttctatatcgaccgaagtcaaccaatccatccccatcaattatctaacttgtattgctttgataagtaaacactaaacagattaggacaagcttaaaatatatacctttagtaaatatagaaaccttctccaaggtttaagagaattctatattcttttctcaacaatgatgatcaactaatccagtaattaagaaaaccatcaatatatacaaattggccaagaacccactgtttggaatctactgatacggacaaactgattgtaagtttacccatgagtacctccttgagtgaatctccttttgtttttggattgcaactattaaagtacgaggggaaatcctcaattgcagaaccaaatgctgccgtgccatatatggcacccacctaaagcagccacatatattcagtcatatcgtgtgtgaatactttcaaacaacaggaaaatacgatgcaggtatttaaccatataaatatgtgaatgagcttaagctgccgcattgatgcatttcctattccaacaatttttcatctttgttctctactataataccaagaagttgattactgcccttggaaacaaaagagcaatttaataactaatcaagaactaaaagattaaaaactcgaaaactaccccataattatggattaaataaaaaaagaatgaatttgtttgttagacgcatggctcatgataaaagagatgcaggggattttatttttttttccctttttttattttaattttcttatctatgtgcacttaaagtgtaacttccagaataggagatgctcctgtactcgactggaaatgacagatcaacaactctgaaggttggagattgctagaaatctgtgaaccacaagcccttctcaaaggaaaaaaaacaagaaacatttgtactgagataaaagttgaatataccacatatccacctcagggttatagattcccactaaggaagaacaaaactagacaagacattgggacgtatgacacatacctaacatgctttccattatggaagcaatagccagaatttctaagaaagtgaaatactgataatgcttcagtatatgctccattgaagagtgataaattggaaaaacaaaccaagataaaacattgtgatccacattgctgcgtgccacatagtagtaagcagttcatgcccctgaaattatacatgtttgaccagtacacagataatttttttcttttaatttttttttccccttttttgcttgttatttattgttattaacttcctgtatgtttttctattgttggtggtgttgttactttcataaatttcatttatttattattttgcaggtagagggaagaatttaagaatatatagattggaggcaactaggtgaccagatcaaggctctaaaatgaggccagaaccaaaaggacataaaggaaacaagggttagtcaaaatccaatgcgccacctgaatatctgaacaagaaacaaaaaattgtgatagataattaaaatcaacatataaaagcacaccagggtctggggaacatctagggcccaaca

SEQ ID NO: 11457 - DNA, 4175 bp, Vitis vinifera
  Intron number 15 from transcript GSVIVT01030062001 (locus GSVIVG01030062001) derived from phytozome v7.0 (chr-ID chr 12; pos 9355819 to 9359993 reverse strand)
tattcaagctccaagagcttgacctaagaaatctagtgcagaaccttttttttttttttttggataagtgcaaattgtataaaaacaccaaaaggggcgcaccaaagtacacacggtgtatacaacggccgcctaacaacgctaaaaaggatagggaaaacaaaaatactccatccctcaatccctccccaccaatcaataaaatcaactaaaaacataaaagtatgttttataaacaagtttgtccaagataataaactacacattcaacctttgaacagaaaactccaaattgtccagaagaggcacaaaggcactgctctccacactttcttcccatgaacgagccctaccaccctaaaagggtctctctaatagaagcatgaatcacccaacacaccttgaacaaagagaacaagagctcccacaacagccttgccttcccacaatgagagagtatatggtcaattgactcctcatgagcataacaaatggagaatctattggctaaagactaccctctcctttgcaattggtctatagtcaaaaatttcccccatgttgcctcccaagcaaaaaaactaaccttagaagggacccaagaattctacacaattctagtaaggaaagggcttacccttacttcctcaaggatgaaatagagggacttaacacaaaaggatccactctttgtaatagcaccattctccctcttctcaaccaccaccttgtcttgaatccttgacaagaagcattccaccgtctcaactcccagtcattgagagatctagagaagcttgggttccatccaccccccctcagaatagtgcacccacaaatccgccacccaaacctcttttaagcaagctagagcgaacaaggagggaaaggacacacataaaggctcatccccgcaccatctatctctccaaaacttgacccttctcccattacccactacgaagagagttctagaagagactaactcccacaaaagccttatagccttccatagaccaacaccatagctgcccctcacttccttagagcaccaatccccttccaattccctaaatttaccacaaataacttctctctccaaaaggcatccctttccttagcaaagcgccaaatccatttgcaaaggagagccttactaagagagttaagacgtctaactccaatacctcattttcttttatctaaacaaacaatatcccacttcactaaatgaggcttattctctagagccccacctccccacaaaaagtccctttgaatcttctccaaccttaaacaaactctcctcggcatccagaaaagagacataaaatagattggcaggatagctagcatctaaacctttcttcaaccctgtcccaagccaccaccaagttatgggcagttcctagagggagccccaaataagtggttgggagcgcacccactttacaaccagatatagcaaccaactccattacattcgacaccccctcaaccagaataagttcacttttatctaaattgattttcaaatttgaaatggcctcaaaccacatgaataaccaactcaaataagtcatttggaaagaggtggcgtcacaaaaaaccaaagtatcatctgcaaacaacaaataggaaatctccaagccctccccatttctccctaacactttgaagccaaacaagtagccaccctctcttactcttccaagaaggcaactgagcacctccatagctagaacaaacaagtacgaggataatggatccccttgccttaagtccctagcgctctgaaaaaacctcgagggagtaccattcactaacaccaagaaccttggagttgagatgcaccaactaatctaattgatccacctttgtccaaaacccatttttcctaacacctcaaataaaaaatttcagcttacatgatcacaagctttttcaatatcaagtttacaaagcacccctgctctattacttctcaacattgagtcaattgtctcattagctataagaaccacatcaagaatttatcttccttccacaaacgcattatgatattttgataccacttttcccatcattttctttagcctattagttaacaccttagccaatagcttatataggttgcccaccaaacttatcggcataaaatctttcaactcttcagcttctcctctctttggaaccaacactagaaacgttgcattgaggtttttcgcaaagcactcatgttcgtgaaattccttaaagaaactcaagaccttaaccttgactatatcctagcggtgttgccaaaaagctagagaaaagtcatccggccccaaagctttatccccatttaactctgacaaggcaatgaacaactcctcctcacaaaatggttcctccaattttgctgcatcttgacagtgaagaacaatatacctcatgtccattacactccactcccatggcagtcttgactgaagtgactaaaaagcctgaacaatcccttcccttatatcagcctcctctgtgaaagaaaccccgttaatcttcacctaagtcatagtattcctcttcctatgagcatttgtcattttgtggaagaaaccggtctttctatccccttccttcagtcagacctccctagatttctgccttcaacttgtttcttccattagagcccatttcttaagttctgcccttgagctctccctggcaaactcctcctcaaaggataaggtaccctacgcctctttagaattccagaattccacttgagatagggcctctaaatttttaacagccatattccaaaaaacttcaatgttccacctcttcaagaaacctgtaaggcttttcaatttttctaccaaatcaaagctgagggaccccctaaaattaagggtcatccaccaagacttcactaactccttaaaatcttcctccttaagccacatattctcaaacttgaaaggagaatggcctctacacacacaccccccatccaacagaattggagcatggtctaaaacgggtctaggcaacaagtactgtaacactccatggaaattaccttcccaatcatcagacaccaagcagcaatctaactatgcaaggacttgattgttcaaacccaccccccacccccccttcccctcctccacgtgaaaaggccccctatcaagtgaagatctctagttgaagctcatctatgacctttgaaaatcttctcattgttgtagacaacctctggttgccaccaaaacgctcctaagggaatcttacaacattgaagtcgcccccaatacaccatgggtcattccatagtccccttataacccccaattccacccaaaaatcctctttaacacctctctatgtagggtcatacaccccagtaaaaaaccaaacaaaaccatcatcacaattcttaaaccagcaagaaattgagtaaaccgcaacctccatacccaccaactcaagaactttactatcccagaacactacaatccccccagaacactacaatccccccagaagcccccctcacattgaccgcaccccattcaatgaatttccctatccctagacttcgcaccacacctaaggacatatcttggattttggtctcctgaatacaaaccaaatctaacttctgcattttgatgaaagacttcaacaccattcttttgttacggtcattggcccctcttacattccaagacaaaattcttaacttcatgagtcccctccagaaattgccccccaaacattaaccctaccactctctgagtttgtgcccttatagctcaccaaccactccagtttcttcagctccctttcagactgagaagatgcagatttgtctttctttctatcacacttctgcccattaagacccttgcgagcctttattcgcttcagcatcgccagaatctcctcctcatggccttcagttggcattcccagaaacctactaaaggcagccaacctgtcaaaatctagtgcagaacttaacccgcctaaagaaacttcatctcagccaggtgaatatttcttcaaaattacctgatatctagacaaatttatcttcaatgacatatctatatcttgaaaattgtggattccatggtgaattctttacaggcatcttccacctgcaaagcctacaatttctaggc

SEQ ID NO: 11458 - DNA, 7525 bp, Vitis vinifera
  Intron number 2 from transcript GSVIVT01024229001 (locus G SVIVG01024229001) derived from phytozome v7.0 (chr-ID chr1 6; pos 36428 to 43952)
gctgtttcagctacagacttaccttcaaaaaagtaatgtggccttctcgatagattcttaatttggttttattgccttcagaattattgtttgatgataaatgatcctaggttattcttgttgagagagagagaaagaagaaagaccttaattctcattcatatgatatctacttacaattgagaaatatatatatatacaacgttaggagtcctaactaccatacatgtgacctatattaacaaggaaagattatacactataaatacattatattcaacactccccctcaagctggagcatatacgtcatatgcaccaagcttgttacaaatatatttaatcctaggacctctgagagatttagtgaagatgtctgctagttgatcatttgaattaacaaaacttgtagcaacacatcctgatgcgatcttctctttaatgaaatgacagtcaacttcaatatgtttggtcctttcatgaaagactggattggatgcaatatgtaatgcggcctggttatcacagatgagtttcatctgttcatcctttccaaatctcaactctcgaagaagatgtctcaaccatatgagttcacatgttgccaaagtcatagctcgatactcggcttcagcgctagatctggccactacatcttgtttcttactcttccaagatattagattacctccaataaaaacacagtaccctgaagtggaacgtctatctgtgggtgagccagtccaatctgcatctgtgtaaccaacaacctgagtatgacctctgttatcgtacaacacaccttggtctggtgtacttttgatatatcgaagaatgcggattacgacatcccaatgactatcacatggtgattgtaggaattgactaacaacactcacaggaaaaaaaatgtctggacgagtaatggtgagatagttcaatttacctacgagccgtcgatatctcccggggtctcctaaaggctccccctgtcctggtacaagtttgacattcggatccataggtgtgtctaccagtttacagtctaacatatcggtttcttctaggatgtctaaagcatacttcctttgggaagggaccacactagaactggattgagctatctcaattcccaagaaatacttgagtttccctaagtctttggtctgaaagtaggtaaaaagatgttgttttagtttctgaatatcatcctgatcactgcctgtaatgacgatgtcgtccacataaacaaccagataaatacactgccccatagagttatgatgatagaaaactgaatggtctgctgtactgcgaagcatgccaaattcttgaacaacaaaactaaaacggtcaaaccatgctcgaggagattgtttcaagccatatagagaacggcgtaacctgcacactaaaccagactccccctgagcaacaaaaccaggaggttgctccatataaacttcctcggcaagatcaccatgaaggaagacatttttaatatccaactgataaagaggccaagaacacatagcagccatggagagaagcagacggacagaagcaatcttggcaataggagagaatgtgtcaccataatcagaaccataaacctgagtatagcctttagcaactaagcgggccttaaggcgatcaacctgaccatcaggaccaaccttaactgcgtagacccaacgacagccaacggtagatttaccagagggtaaaacaacaagatcccaagtaccattagagtgtagagcagccatttcatccaccattgcttgtcgccaacccggatgggaaagagcttcatgggtgctctttggaaaagaaacggaggatatagcagaaacaaaagcagaatagggtgaagataatcgatgataactcaaaaaattgtaaataggatgaggattacgagtagagcgagtacctttccgaacaacaatgggtaagtcattaggagaaggcagagccggggcaggtgaagccgaagggataggaagtgagtcagcaggtgcctcagcaaaagggagaggagcaacgacacgagggcgacgatgataaacctgaagtggtcgaggaggcatagcatcaggtggggaaacaatgggaataggcaagacttcagaaacaggaagagactcagaagtggtggaaaagaatggtgagtcctcaaagaaggtgacatcagcggagataaagtatcgatgagtctcaagggaataacaacgataacccttctgaagtctggagtatcccaagaagaggcacttcatggctttggtggaaagcttgtcttgtccagaagtgagaatatgaacaaagcaagtacaaccaaagacacgaggaggaaggaaataaagtggttggtcagggaagagaagggaatgaggaatctgatcgtgtaagacagaggagggcatacgattaatcaaataacaagcggtaagaacaacgtccccccaaaaatgaaaaagaacattactatggaggaggatagtacgagctgtctcaacaagatgtcgattcttgcgttcagctaccccattttgttgaggagtatgagcacaagaagattgacgaagaatcccataatgagacataaacgaagtaaatggggctgaaaaatattctctggcattgtcactgcgtaacacacgaatagaaatattgaactgggtttggatttcagtataaaatttctggaaaatagagaataactcagctcgagttttcattaaaaataaccaagtacatcgagaatagtcatcaatgaaagtgacaaaatactgaaatcctaaagtagacgcagtccgacaaggaccccaaacatcagtgtggacaagctcaaaaggagactttgcccgattattcaaacgctttgagaacgagacatgagtatgtttcccaagctgacatgactcacacggaagcgacgacaaagtggaaaaacgagggaccatcttctggaacttggagagactaaggtggcccagacgattgtgaatgaggagaggagcatcagtggaaatgcaaactgcaggagatgaatccgaggtgaggtgatagaggccttgagactcacgtcctatgccaatcgtcttccccgtactccggtcctgcaaggtcacaaatttatcagaaaaggtaatagagcaattaagagtacgagtgattttgctgatggaaataagattaaaaggacattcaggagtataaatgatagaagtgagaggtagagaaggcagaggaagggccaaaccaatacctttagccatagtttgaaaaccattagctaaggtaacagtaggtaaaacagatgtagtagtaatagaggagaaaagatccttattaccagataagtgatcagaagctccagaatctagaatccagggtccaagagaagatgtgtggataaggcaggcagaggcattactaggctgggcaacagaggcaatagaagcctgagatgtggaagagctcggaggctgaggcagcggagaatcagaggactgggccacatgggtagtgcgaggaggtcgtccatgtaactgattgcaacgattgcgagtgtggccaagtttattgcaataggtgcaatgaggacgttgacctctacctcgggtaccactgcggcctcctcgagagctagtttgagaaactaacacagaagaatctgaagtgctatcaaatggcaaagtctgagtggaggagatacggaggaggcgagcaaacacatcatccaaggacggaactgatgaactaccaagaatctgatcgcagacaggctcaagatccggatgaaggccaataagagtaagaaccatgaagaacttgtcaagctgtatttgttgagccccaacatcaggagtaagaggcatcacaatcaagaactcctccttaagataggcaatctgaccaatataagtagatagatgcaagtcctgttggctgatatggacaatagcagaagccaccttataaagacgctggatatcattcgtatattatcctttggcctgagtccaaaatttaaaacaagttttgtaggccggaaaatgaagaagaatcttgggatcaacccattgccataatacactacataactgtgcatctatctttctccattgtacgcggttaacctcagggatatctacctcctgtgtaatcaagtgatcctcatatccttgacccataaaccaaagttcaacagaggcagaccaagaaagataattgtcactgccaaccaatttctccgaagtaatcataggagatccagatataacagaggaaaaaatggaagttttagtagtcatatctacttatttggagaatgaagtatatttggatcgaagagagccctaatacggctgcagatcgcggcgtggcaccactggaaagggagacggcttcagatcgcggcgtggcaccaccggaaaggtagaagaacacttccttaggcacgtgcagggattaggatggagaaaaagtagccgaagcttgccggaaaaactgtttagagggtcggcggaggcaaaaaaacccaaaagaggtacgtgcagggctcggatggcagaaccagggatgaaggaaggctagtcggcgtcaggcaaggctggaggaggaggcgcgtgagatgcagtcgtcggacggaaaattgcgcgtggccggcgcgtgaatgatcttttggttccggtgccttcacaaaagttggagatctcctccaggcgctccttctggtatggtcggtttcggaaaaagacgtcgccagaaagttcaccggaaaagttcgccggaaaattttgccggcggtgagtgttttctgacgacgatccgactgaccggaaagtattgggagatggagaaggtgaccggaatgaaacacggtcaccgaaaggtttcccggagttgatgacacgggaaactggaaagaattaggttttctcccttggctctgataccatgttgagagagagagaaagaagaaagaccttaattctcattcatataatatctacttacaattgagaaatatatatatatatacaaggctaggagtcctaactaccatacatgtgacctatattaacaaggaaagattatacactataaatacattatattcaacaattctagtagggttggaaatgattacttacctggactgaaaaaaaataaaataataagtacaaggtgagagttggttgtcttatcctatgatatggctaaaggtgagggttgcctctagcactatcgatgagtatacaaaaccaaatttattattattagtcaattccctaatttgaagatgatggtccatgcccagtttatagaggatccttaatttccattgcaaccatgacacacaagacaatcaatggaaatgagatatatttctccaaaaattgactgagaagaaaaccctgaaacctttattgaatacaacagagttgaacctcaaattatatatggactttctttttgaagatatcaacctaccctgttgaatggatttggctaaattaccctttaaatttctgtttttatataatttcattcctttataaatgatccttgctcttccatcttcttagagcaatattaaagtaggcagagtcaaaattcatgttgcctttgaaatgacacagcattactatggcttaatcccagatattgtctatttctcttttctgttttaacttctaataccccgagattgtttcactggacaaagcaataacattttttaaatcttgcatatagtttttgagtgcttaagaattttgaactttcaatggttagattatgcatagcagactttgttttttcagatttagaaaatgagctgtttccctcaattgccatctaacttgcttaataatataacctatcaacccgagtttgttatcaaaatgttatctacttatattgaactacaccacttgaaaaataaaagagattctaactagtctatgtacccaaaaccaatattcctcttagctcattaactaattactcaagtctttgtgtttagcttctaccatcctgtagccactctccttgtgatcccagtttgtatttcttagactggatccaaatacgagcatcattaactgaatgaataatgtaaggaaaaggagaccagggcaggttcaaagaagaagcaacttgctaagacatccaacattctgtggcaagtttgttgtacaaggagcaaaacctaatttccaatagatccttgaatcaatataatgttgtcaaaaagtcagatgagaatgtgcaaagattgtgatcaagttattttaatatgaaaaatcaagcttcagtcctaccaataaaaaatatgcagatcatatttaatgttctgctcatgtttgctttaaatagagttaactttgacagctcaaagagtgatttaagttatagaggtatgatagctattactaggatgaaaatggtaaaccaacaactactattttagcttggtgtcagaaggattgccacatacctatttggaaactgtagcattcgagaatggtcttgttctagttgctcaacaaggaactaatacactttaaataagagatgcaggaggatacttcagagtttgagggtattgcaaaatgacttttgacaataattagtttattagtggattttaagaatattgaaattagtcagcttagatattgagatgtcaaatgtcattgcaaaactttgtttgaaacacattgaacagttgctccatgaaaatattcccctctgaaggcttttgtagggacatgctccacggattgtacctttttaggttcctttgttgagcctttttggcttgttgcattatggttttctttccatatattacactggttctgtacactttactagaaggatggcacattcttattatgcctttgattcatttttatttaactgtttgtttcgatgtatgtctctgtgtgtgatacaacaaggaaatccatttattcactctgccaacaagggaaaaaggtaaatttagttgacataccaataaagtcttgccttctgaggtgttgatccttcttagaaaagttcaatgccagggcatgaagtagacaaatgcattgggttgattaagcactggttagaggatcttcttggtgagattcaacatttcacatggaggcctgtcatgtgtgtaagagacatgtcatggaagacagctctttctctctctctctctctctctctctctctctctctcacacacacacacacacacacacactgttgcatcattaataatttccttactgtgtcaaattatcctttttcagtgtgtggtgccattatgggtttcacagaataatgacattggacacttatgtcttttgcccttatccaaactatttgtacagctgtttaaataaagacatgaattcttttagagaaaatcgtgaaatctcggagtcattattattcattttctgatggtaactacagggcaaaaaaatatcccattaaagtggaaagcaaga

SEQ ID NO: 11459 - DNA, 10486 bp, Vitis vinifera
  Intron number 1 from transcript GSVIVT01016024001 (locus G SVIVG01016024001) derived from phytozome v7.0 (chr-ID chr9 ; pos 17503426 to 17513911 reverse strand)
catctatcatctcaattaggtaatttcgatagcattctttcttgcatttgtcatttatgaattttctcattcttatctatgtaggctgatggcataattttaatagcatgatttgttatttgtgttgggaagcatcttcaaggatgaatggcttcatcatctaaactacaagctgtaaaacttgttcagaacccaaagtataaatccagagtataaatttcctagcttgatcaaaatggaaatgaataggatccgaatcatgaacccctaactgttgttacatgatccaaatgggtggttttgtctagctgcaaagagccgaataaatggtacaaccaatgattccatctaactcgctcgagatgcaaacaactatgatatctgcataaaaagctatccgaacaatttgtccaggcatgcctctccaatgctaaagtcaataagtggcttaagcaagtaagagaatttgttagaaagaaagcgtataccattagtagagtctacatggttatttatacttattgtagtgtaacacctttccaagtgtcttaatagcaccttaactgcacttgattgcatgatattatggcattgtctatcgatgcataacagtagtcttaccatgatgagtcattgaggataaaatgttttccagtaatggttgtatttaatatggagcatgcctggtgagcaatctatgcattaatggtaagtaaatgtgtgaaggacagttagtcgttagccttgttgtacctgtgtaggatttgtctgttcaacctactttgggataaatcaatcacttgtccttagggccattaagccatacagctgaaggtggtcctccacacaacttgcctacccaaacgatcgtgagagagtggaagactacaagacaaccttgtagaggaagtcccacaatgcccaccaagtcttgtaattgggcccaaataaacatcagatgaccaaatgcaagagctgtgacttttggagaatttgaaatcatggcaccaaaatccacatgttctacactcacttgttgtggggtcacgtcaaccaaggcattgtgtcaagtggcgcaccccttcaaacgccttgatttctacaaccataccttatataagctggttgcttttaggtagatggttcatttctttgttactattacttttggttgtctttttctctcgatcgacaacgcttcaagccttcacagtttctatcgtcgatggtctattctcaatgatactactctacttccaccataacacaatctactgggtacgtagttattcttcgatctctatttttacggcattttttccactattgaatgcattccaaccactgtttccacttatgcttcccataaatctttgtcaaaatctattcttgttttagtttggttgtggcattggagtctctttttgccttctattggcattctgtcaagttctatattgtttctaggctcaggcgagactatggcttgaggccatgacgctatttggatatgacttgctcagcaagttttgtgctaggctgtttagggtaggagatgccactttccgtgtgatgaacatagcttttggttaagtgtctttgtagggcgtccccgtgctgactagttagcacttctatcgctcaagtgtttatccaaccttttgttctattttcaaatatggatagaaatggggtcgcatccacaagtggcagaactcaacacagcggggctaagtcatccccgtctagttgttccctgatggaatgttcgataggcgagttgtttgagcaggaattccatgttcgctgctacatcccaaactcaatttccatttagctgtcagatggagaggcttcatctacaaatggaattcttaacaaaatggtttactttaccaaagaacaatttatagtgggactctgactgctcatcccatccttagtgaggcaattcttacatttttctcggattccacccgctttcattcatcccaatttcattcgaattttaatgggatgcaatgtctaagacaccttatataaattaaacctatctttgttggaggtgtcattcgtctacaccataaagataagccctaaagagcgctttagtctatcggctcacatcccctccttgcagttcgtaaccagactaccaaactctagtaagagctaggccaaaggacatgtactagtgtccgacccatggaatagatcaactgagggttcgcacaggctatttaagcccacacgatccttggagataccaagaattgaatacttttatgacttgtatacttgttatttttattttcgtgtgaattccactaataggtgttatgtccatgcaagcaaagataaacaaggccacttggtcaagtgggtaaagaagtcgtcattctcttgcctcaacaaattgttcaagattgaccaaattgaatggaatcacaatgtgctgcttatagagaagaatttaagggccgttctcactcaagctaagccattcgtaatccctcttcttccatggctagcaccatcgacgcttgtgttgagcgagcactttgtgttgaaggacctgcctttctataaggtcactcatcttgctgacaccaaggctagacaagctcatttaaacgctcaagagaaaaaactctaagaaaggactttgcaccaagcccctagttcaatttcctaagcaacttcaagcattgccttcccaccaaaaaagaagaagattgttatccagcctcaggctcaagaggttgtgatggagtcggatgagacattcggagcaaagcagactgaggagtatgagatcgtcaagtcagtcacgccatctatcatcgaaaaagtgaaagaagaagaaacgattgccaatctacgagccgacttctgtgaacaacaacagaaaagactaaacgaggccattgaagtcgggccttcagcaaaaaaacaaaagatggatggcgaaaaaggctcatcctctaagcttgttgtcacacctctatcggtatcaattcctccatctttgtccattcctaaggcataagacgtggaaagtattgtttttcatgaactaaggaaacgatcaccatatcaagtgatgacttcatgcccaacgcacaaattctgtcgactactcatgtttgactagcctagaagagttggatgtttttttggagcacttccccacattcaccaatatggagcctctagcgtcccatatgaatgagctcttcccaatgttggagaggattccagtggatgtgactactaacccccatcaaaacttcatggctcgtgtcccacataggaccatagacaaaaccattgaagcaatcatgtgcttaaaggactacatgactatgtagatggcggaagtggtacaatacctattacacataatgtatgtgctttacatatcattttccttacttattctccttggatctttgtgaaaaattgtagtcaaggtccaaaatttgatgagacatcattatcatattttcaaacaactgaaagcaaccaaaaaaattatggcgtactcggcccatgacacggattaccagaaggagctgtcgaccaagctagagacgtccaaagcaagtgaagccattgcacggaaagcaatgattgagggtacgggcctatagagaaagacagagttgaagtatgatgtgctgcaggctaagatctgctagttgaaattggatatggctgtcttagaatcatccaaggccagaactaaagaaaaatatgctcagttgaagttgaaagtcgagcaaactgtgttcgactttaccaaagaaaagaatgagctagaggcaacttatcaacaacaagtagattacatgttcttttatggctatcgcttttgtatgaagaaacatggcatcaccaatgatgtccctagaattccatcggataaggaagatgaagttgttttgagagggggtgtcgggcaaggagatggctcaagagtgagagacgagcttgcaacaattggccatgaagatttggatactgcttgagattgctgctatcgtttttctttattttggtcatttaagccttttattgcatagacatgggccctttgggcctttttggatgctacaaatgaacacaacatttaaggaaattgcctatttatggaatttgtctgtgcatttggtttgcaccatcaaactcactacttagcacaagttattctcttagccttgagtggcattaactatctcaaaccttttggccttgctctcacaaaagcttatgtcactttggctatgcctttaatttatggcttgtgccatattggccatgcctttaacctctagactatttaagatgtgaggttctataagatatcgtttgatatcatcaaaaacacttttacattcctcaatccagccaaacgtttgtgatccatatagagtagtcaagaaaatatggagcttattggtgaatcaggttataaatcagcccaaggctgtgagacgacccatatgtcgccgcatttccttcttagtggatggaatgggcatttcaaggacacaattcacttggtcagggtttattttgattccttattgagtcaccaaaaaaccaagaaacttacctgcgttgacgccaaatgcacatttaagcgagttaagtttcatattatacttcagcattaggccgaacgcttttttcaaatattgaacattttctgcgcgggttttacttttgatgactatgtcattaatgtacatctccattgtccatcccatcaatggtttgaagatttttgtcattaacctctgatatgttgcgcctgcattttttagcctaaatgacatgacattataacaatataatctatgaagtgtgctgaagaccgttttttctttatcaaaacggaacataaagatttggtggtattcgaagaaattatctaagaaagagaacattccattcccaaacgtagaataaaaaatctgatcaattcggggcaaagagaagcgatcatttgggcaagcatcgtttaagtttgtataatctgcacacattcgccaagttccttctttcattgggaccaccatgatgttggccaaccaatctagataggagacttcttgaataaagccagtggccaacaacttattgatttatgtctggattactttctagggatccaggcggaagttttggactttctgtctcataggacacatgtttaggagaatattcaatttatgagtggccatagaaaggttgattcctagcatatctaactgggtctaggcgaagatatccatattttgatggagcaaggcttctagttggctacgctccttcgtcgttagcaaagagctggcatttgtcatatgaccttcttcatttgataagggcatgcgctgatcgattgatttttccgatttatcacatcaaaacacaatttataatctaattcactattctagagtaacttgtacctgatcaaaaagtggttttagtacaaactaatgtaatatagtggtttttaggtgtcatccactatgatggattgttctcaataattaaggcttgaattagaggagaagaaatgattgtgatcaagtgaaattgatttgaaaattcatggtgaaaaatcaatttaacaatggtttctaattgagaagaacaatgaaatgtgaaatgtaagaaaattaataaaaaatgaaattatcggagttagaattttctagaaaacaaactccatgatgaatagatgttgagatctaattttcatcaagtttgattgaaaacctaaatttttatctaaattgattttttatttagctttagatctagatctaatttctcttcaaattaggtcatttaatccaagagatcaattcaaatcatatatttaattcatcttaaattatcttccaatgattaacacaatgcaactattcaatctcatcaaatctagctttaataatttaatgaatctacctaatttgcattgtagtagtcatccaagacaatttgaagagaaaaatccccaaaattcaattaatcaatcaattggatcaaattacctttgtaattcaagctcatttatctaattcaccatggatcttacttctagatctgctttcctctaagaaaaatgagatttagacactcatgcttggagaattggtcttacaaggcatgtttggatagtgagaaaatcagataaaatcagagaaaatgaaaaaaaaaataaagaattctattagagagaaaatctagaaaattctacaattaaaaatgtctaaaacggtatccttatgagaaaatcaagtttctatttataggtcaaggtcaagtagacacttgacatcatttaagaggtcttttggaagctttttcatcaagcaatttggagtttaataacaaaacaatcatttcgcacaagcttagccaatttcgcatggttgtgcaaaatcaagaattcagcaacaatagttacaactttcgagagcattttgtatgactgtgcgaaatttttgcatgatcatgcgaaatcaacttgacaattctccttagtttgcaacacaatttcactttctggtccatttcgcatagttatacaaaatttcgcatgatcatgcaaaatggaaatatttgatttttaagctttcttttttcatttattccattttcttcttccttttccacttcagctacctccaaatcagctcaaatcctagtccaaaccaattgcattacttctttcattatgcatttggatcatcattaacattatttattcttcatatcttttgtcactaatttatcaaatttataccttaaaatgactccaaaacttcataaaacttgttagtaactcttgcaagggcaacaacatgttaattgagtgttttaggcataattactactaaaaagatgtgaaactcatgagaatcattatctaaaatatgttctttttgagtggtaatcatgggcagcagaggatcaacgacaagtggatctctctctgccttctgttgtaattgctattggccctttgcacttgacaacttgggttcgtctccagctgggtctgtctgcccgacttctatagtcacctggtaacattgttgggcagccaattggctatcgagtaagtctacttgcctagcccaaaaaaggtaactcaacatttgatgatacgtagatggggtgattttcattttgtgcagtcatacctgtctcatagtagcgttatacaatgacaaatcttagactactgagaagtagacttttaaggtgatgggatcgacctggatgagaaaaaagacatcgcccatagagaatgttaatgctccgtttaatccggatataatgcaactaggattttctaagcggatgggaagtactccatttgcctataagctaacatttgtaggaggtcggcagagcttcccagatcgattagaattttgcgcaggtcaaaactatcgactctaagtgttaagaccaaggcatcctcgtgtggcaagatcacccgattggagtcaattgaagggaaggtaatgggcttgtctattgaccgaacaccttcattagtggatatgcactgaacaacatgtattctttcccttatagaagttgcacgaactaacatttgcctctactttttggagtggtatttatcatctacaggttctctgtgtatataattgataaccactctaggtgttgtaggagacagaggggcttgttcggttgcctctgcttcatctcgtctgtcggggccactgacatattgcttaaggtgtctagccttaatgagttcttttaccaggtagtgcaaattcttgcattgctctgtgatatgtccatgttccttatggcaggagcatcgtcgctttcggtctcgcctggttggttcagtcgtgatcagatttggtcgtctgagcttgggcagcttttaaattagcggaaaaaattgctcataagagaaggtcaacggggtgagctttaggggttgctgttgttgtccatcctacttttgtccccattgtctggattgattgttcgggggctttgagcttccaacttaattatttttttgttggccaattcatgatcagaacttgttgggaagctgcttgaacatcatcttcaagcatagcataattatccgttcgcctaaacaagtcgtccattaaggcgagtgactttttggcgagggattcaaagaatagagtgtgagggcttatgctctatttaaatatctggagaatggcatccatgttgtaggactcaactttgagtaccgcctggctaaaccgcttcataaagtccctcagtaattaattctcttgcatcttaatgttctgcaaggtgcttatattctgcttttggcgtgcaaaacataagtagtagccaaaaaatgccttagaaacattgtgaaatgaattgatggagttctaagggaaccggtgaaaccatgataaggtcgaaccatggaggctgacaagaaagactttgcagaacagtacattgtttctaatgtccaatatcatcaactaccgataatgcagtagatgatcgaatgggtcactcgtcccaacgtacatagtgaacttgggcactaagaaccccctgggagactcatagctaattatatgaaagtcaaacagcgtggagagatcttatagtcgttggctgatgaagccaaagggggcctttcctatgggcttgaggactattggtagctccacctatgatggttgaaagcttgatgatgcctcctattttggttagcctaaccgggccttcaaggcatcagatatgcacagtggtgcctgtgctctttggtcttagggccccaagctggccctcatgacatcggataggcgggagacctgtcgtagtagtcttcctcatgcatatgatgagacgactcaacgtgctgttaggatgagcatgtcgtctaactatgactcctgttagggttggtctactgaggaagggcgtgaaagctctacgagtgacgccccctaaccatctgagcatgtcgtctgactatgactcctgttaggctaggtttgttggagcagtgacaacatacgacaactcattttcttcttgttttctttccattctatcttgccaagcctaacattggtcagccacactggttgactgggatgcattagacatattgaccattgtgctagtatgctttttgtgtcgttcccacagatggtgccaatgttgttacacgatccaaatggatggttttgtctaacttccaagagctagataaatagtactgccaatgattccatctaagtcgcttgagatgcaaacaactatggtgtctacacaaaaagttgtttagaaagtttgtccatgcaccctcccccccctccgatgctaaagtcaataagtggcttaagcaagtaagggaatttgtcaaaaagaaagtgcataccatttgtaaagtctgcatggttatttatacttattacagtgtaacatctttccaggtgtcttaatagcacgataattacgcttgattgcatgatattatggctttgactgccgatgcataatgactatcttgacatgatgagccggttgaggatgaaatgttttctagtaacgctgtatttaatatggagtgtgtctggcacttaatctgcgcattaatgggtgagtaaataagtgaaggatagtagggcatcagtcttactttacccgtgtaggatttgtccatctgacctattttaggacatatcaattacttagccttagggccgttgggccatacgactgaaggcggtcctccatacgacttgcccatccaaatggttgtgaaagagtggaggactacaagatggccttgtagagggggtcccacactaaccatggctcttgaattatatatatatatatagtcattacatcatgacaactacattttcctatcttgggccaaagttatattttgattcatggcatcctttggaccattttcttggttcatgactttgtatggataaaataggctctcttgaacaaaaatttgctcagaaaaatcaaatttgccctaatactaatactcacatgtactttttcattttcaaccttaaacgaagaagcaagtagtatatgatctcttcctaaatgacttcaattattcaaattgtgtggtattaccgtattagtaataagaggtcatcaaggacttgtctggaccgctctaagcaaacccctatattagcatgcctatttttgggtagcaggctagttgggcacatcccattcatcacacaccaaatattaaactcattcaatgtggttatgacatttccatggcttcattcagcatatgttgaaacaaatagagtcttattgcccaagtcgatattgcttgatttaaacacaagcaattttcttactgtattttctttctttctcaatttctaggcactcgttaaaagagaaggggaatttg

SEQ ID NO: 11460 - DNA, 4214 bp, Vitis vinifera
  Intron number 4 from transcript GSVIVT01028605001 (locus G SVIVG01028605001) derived from phytozome v7.0 (chr-ID chr7 ; pos 10534962 to 10539175)
tcaactggtaatgcactgttgttgacttgtgattcaatctttgaatttttggccatttagatatggttttatgtgaatctcttatctttagttgtattgtattatttgaagtacccatctgccattttctcataaaaaaaaggtacctatctgcgatgcatcaaattccactggaatacacttttctgttaatgattctatgaacttgagtcctgtctccattatgaacttttgtttcacacttagcatgctatgcatcttgctactgaacatagagaaagttgaagctctcatcaaatgtttgagtgtctttattggatcatgtcagattgattggtttaaatttctgttaatgattctatgaacttgagtcctgtctccattatgaacttgagaccttcatgtgggattgtggaaagatattataggagaatgaggagaattctaccttagaatttctattctggtcaagaataggctcgggactaggttcgggttagacagatgagtgtagtgctctttataaaaggctttccctttgcttttaagtatagcctctgctagatatgctagaatgatagtttatgggaggatgggggccattgttcccctcattttggaagatatttttagaattgagagatatgggaggtggatctattaatggagctcatttatgttatgagttcgcaagcagtagagcaaatttgaactcaaaaggccactctccatacgcctcatgcgtgttatagatgcttgtttttagatttaatttaaagatcacatcaagcctatttgttttcgatgtgggatgggatagagaattttttaccaaaaagggtggagtagctttgagctaaaatggaaattgcactgaaacaagattaagaccaaggtccactaaccaactatctaatcaattcttcactgtggctcacatgtgctgtaacctcatctttcaagaattaatttaaagcccttatcaactctattagtttccggtgtgggacactggggtgacccgtttcaaacctaaagcccattaggtcactctctagtttccattatgcaaaaatggatggcattaggccactccccattatgcccacatgagtccaattctatgtttctcgatttaatttatgcaaaaggatgttattgcaggccaagggttggccagtgagccacttttgtaaaataatgttgtatatatatatatatatataattggatgttttaaatttttgctcaaataaacatgaatatttaattccacatttatttttgtaatgataagtatgaaaataatataagttaaacaatgtaataatttttaaaattataaaataataggatgtataactttgatatgtagataaaattaaataatggaaattttcatctatcttgaatatatgttcaagcttacatactatacattgttttatttaataaaattaaactattaatacatttatatttatttgttcatgatttaatttaatactaaagatgaaacaataaaatattactaagcttttaaattgtttatgtatttgcatatattcttaatttattatagttattattagttttaataacagtataaattatatatttatgaagtcatgtggatatcatggtttgactgtggttgaaccaccgatttgactaatgaactgtggtcaataacttttttgattcaatgactagttcagttttgaaaacattgtttgtcccttggcccaaaagtttgaggtacctatgctccattgacaacatgttttgttgtctaggaatgacatggaggaagatctcaaccattgaactccttatgaggtgtggatgatgatgaacggatgtagtctaatgttaaactaatgaagaatcagaaaatcgcattctaattggcaattttggattgcaatggatgtttctagattcagttaaagatctcctgatgggatagaaggttcaaggtttggataagtagcagaaagtgtaacatatggcttccttttgcttgttttgatgcttttagagacagcataatgatcaaatattgaatgacaaagtttcttgattaaaaattaggagagctttgttagaaccttgttggagtggtctagagctttattggggattgagaattttagattgttgaatttcttagataatctcaagtaggaatagttagctttatgtcacgggcctaaagttccaatgcagtagcacgacccttgtggtgacccctgtgggcatgaatcaaggggcttagtctgcacgtcatgcattccaattgccctatgttgattggttttgtcttgccatggactcattaatggaacgactccagctcctgaccaatttgtgtaggagtggccaaactcctctccattatcaagtccttgactagtaacaagctctccaaacttaacctgtcggcgtgcttgaactttgaagaagcttccaacaccacttacacgccctttccttgaagcaattcccatttcattacgctcaaatcagtcaacatactagtcttgattagcaccttcgctacggtcatggacaccaaacaaacagttcgtgacactctcccccacccaatctcttgcacgccctcgtgcaggggtttatgtctttgccaaatgatgccctcaaacgttgctgcttcccatgagccatcaatcaccaaaggtccgctgtttataccaaatgggccgaaggggacatccactcacccaggatgcgacatccactcgttgtattaacccagtaacaccccgaaagtgttaacctagtaacacctcggaactgttaacccagtaactccccggaagtgtgcacctagacacgaacttccacccttagtaggcgacacccctatgtgttactagaataaccagcgacaccttgcaatctagaggcacccatattccctcataggtcctcataagtgtagcttcgctacacgccacaatgccaatctttccactgttgaaacatgaggcttcataggctacttgtattgccatcagggagataactctttggccaaagattgttagaagggaacactgctatgcttgaccttctgtctcgttctgatagcggcacggcccatgtagcaacccttgtgggcatgaatcaaggggcttagtctgcatgccatccatttcaaatgctctatgctgattggttttgtcctgccatggactcatcaggggaacgactctagctctcgatcaatttatgtaggagtggccaagctcctctttattgtcaagtccttgactagcgacaagctccccaaacttaaccaggttggcctgcctgaactttgaaaaagcttccaacaccactttcatgccctttccctggagcaattcccattttattatgctcaaatcagtcaacatactagtcttgatcaatactttcgctatagtcatgaacaccagacaaacagtctatgacatttagcttgctgttttttggctagcatgtttgttcttgtttgtttgtttttatttttatttatattttattttttatttttccccctctagtgcctcttgcgtacttcctgtgtatagagggtgcgctgtcttttgttggcacttttattatctgttgtttgcctataaaaagattatcctcttactttggattgtacaataataatgtgaaatccattatcacacaacaggaacctactagttatttcagctatttttcctttgatagtttgtaggtcattcatgataagagaaactgtaaaattcgtggttttcacttatgtacgagatattttatttccaattattgtctcagtggcactttatatggggattgcgatttgaattgcaactggtggaaaacatgcagtttactgttttagaggattttgatcccacaattctggcctaatttagtaaagtgctaaccggggggaaggatttcctgttgagtggttctttttgctatttgtttcactcttttttctttcttggggtatttgaagtgttagtagtcacgcccatccaaagaaaagtgtacacctatattagctatacatttactttctaatgcatctttttttgaggaagttaaaacaggggcacattgaataacatcttccattctatgatatgtttgatatattgttttatggatttttttttccatcagttttatttgttatgtaggca

SEQ ID NO: 11461 - DNA, 521 bp, Vitis vinifera
  Intron number 10 from transcript GSVIVT01013237001 (locus GSVIVG01013237001) derived from phytozome v7.0 (chr-ID chr 2; pos 6407168 to 6407688 reverse strand)
aatagcagataataggtaatcattttcatatttcattgatcatataatccatgttatgtgccttgatcatgttttataatcataatcatgaagctctgcactaaaaggtagtgagatgacaaagaggaaatcactaagcaatgcctatgaatgctataccccaatgacctgaaactgaaatttctgcatcattggccatatatttgcaaatccccattaaagaatgcaggagttatgaatacaatcctcactccattcttctcttttctgctcgtatttttaaattttttactgtttctctatgtgattctcctcatataacccatgtctgaagagactgctgagcagtgaggataaaatcagtttccaaagcataaatttaagtttgtagatggtgctgaagtttttaacaccttgatgttcttatattttgaagaatatcaagtcataaatactgaccatcatatggatttgccattgaatcagggattatttcaaacaggatcgagggtgctaaccat

SEQ ID NO: 11462 - DNA, 2730 bp, Vitis vinifera
  Intron number 1 from transcript GSVIVT01021512001 (locus G SVIVG01021512001) derived from phytozome v7.0 (chr-ID chr1 0; pos 6430942 to 6433671 reverse strand)
gccgacggcgatatctccgatagtcttgtttataggtgaataaatgtcgctcctttcctatgtcactccgtctatttttgctttgtttgaagattgggtatgtttgtgttgtgtgttggggtcacgcttcctctctccagcagcaggatccttccctgccgcggtaacccggataggagtcgatggcgacctagcttcctctccggcagcgggatccttcccttcctatggcttcaaaaacagtttatttatttatttatttattctggaaatgacccatttttggaaggtggaaaaaaatgttgatccattggactaagctcgtatttcttcaattttttttttttttttcttttagaaccttaagcattggtttatgacctgttgtggagttatcttttgttgattagatgagtcaacattaaagtccatgacatttctcttcttctgttggggttttcaattgaattttccattgcttgtttatttcctcgttttagttccttactatttgaggttcttattaattgtaggagatttatccatagtttgctaccatatagagtccagaaagtatcacttccacacaaaaatgcattttaacccttctgtctgtgcttagtggtaatgctcactttgcatctcctcactcttagagagactaattcatctctgcaattgaccaatattgccttgagtaagttgtgaatataaaagcccttagtttccattccttaaacactttacatttgttgccttttttcacattgcatacttgcgaaagtattttaaagttatttattttctatatagttaacttgatttattttcttatttatttttttttgtaattagggactaatctaggagttggtttttagagtattttaggcttagaatggaataattttctttttttctttttcttaatgtaaacattataaataggctttgactatgcaaaaaatatgtttgtaacataaaacttaactaatcttgtctagattaaatcaaatatgaccaataaatggaaacttaattggattgaaaaagtgaatttttaattgagaaaagagtgacaattaaatctggagatttttacaaatctagttttagacctagaatcgaaggataacaagtactgattaaagaatattgatctttccaagaatgaattattgatatagattatttaaatccgaaaccatgtttaaaactcaaaatttattctttaagagtcatccaaaattaatttcacaaaaagttttaatctttaagatatttaaaactcgatatccatttggtagattctcttccattatcaatcacatagaatcacaccaagttagtcattgatcacaattttttatgcatcaatggacccctagcatgcattctatatatctttaatgggaacaaattaactaacaaagaatttaacttacaaaatttaaatgtccgaaacttattatattatggaaagatatcatattttattaatctccctctctcttggatcatccgccttcattgttatatctctagcaacagaaattagctactagtgcttagattaacttcatgcattgaattaaattaaatcatgaatgatatattgtaaaccaatgattacaaaaattgtctctttattctttttttttttttgtgttctggtatttatacaattatagaaaacaaacctaaaaacataataacaattcctaaaatgttgaaaaatatacaaaggagccgaatgggaaaagtcctagagtgaaattttgggaattccaacctgtatagaaaattttgatacctcatagtgatattaaaataaatttcaacaaatgtccaaaccttttagacctcttacgtgcttatagtgtggtgttgaaatggtatcaccttgtagtggatttatattgctatgtatcaaatgtattgagttacattttgatatgctaggttgagaactttcactttacagttgtattgaaattcatttcgataaccctctaaactttctatatatttgaaatgcttctactcaataattttgatggctcaactagattgaattggtattgaaatgcaactcttgtcttgaaatgatatcaaaatccatttaaataatcccctaaacccattggatctttaagtaatttcaatgggtgatttcgatatatctacaatggtatcaaaatgcattttgatacaggaattgagtatctgcactttatagtggtattggattggtgtcgcttggtatcaaaaggattttgataaaagcccaaactctctatgtctattaaaattggtgatttcaatactttgaggagtcaaattggatttcatagaaaaactaagaacctccactttacaatggtatgtgcctttttttcccctggaaactgaaaggtgtgacattgtacctaagaggggcttagaatggagtgtgttacctgttggaaccacctttcaacatcaagtctcataagtaatgcaatattttctatccactaatgttttgattttaaacctcttgcactggagggaaggtaactgagtattatggtgaacctgaagacctgacattcttatgctggtgagctgttaaaagaggggtctcaattaaatcgccgaaagcaaagcaagcattgtctctctcactggttgtctcctctcattacataaataaattcacatcacttcctctcctttccagaggaagca

SEQ ID NO: 11463 - DNA, 2045 bp, Vitis vinifera
  Intron number 7 from transcript GSVIVT01029853001 (locus G SVIVG01029853001) derived from phytozome v7.0 (chr-ID chr8 ; pos 448248 to 450292)
cttttcttcttcactgacagcctcattattcttgggtatgctccattgcccaaatgcttttctttggttggtaatttgcttttgttctgtgttagcctgtttatttgatcttcttgcaagaactaggatcctcttttttctttttattggcaaagggaaaatagatatgtttcacaagaaaccaaaagtgggttttacatccatacaaaaaagggaaaagaaaagatgaaagggtaaactacagaaatcaggttaatcctctaagcaggtgcctctaaactatcctgaaaatccagagaggtacttctttgtctaacagcgtccgctgtccactgtccacagcttcaatactgtgacctgtatgctgcaaaagatcttcctattcctctttccgaaagcaccatgtcacactcagtggctctcctctatccttttgctgtatcttctttagcagatctgccatgccaaggcccaagtctctcatcatttctgggaaaaccccacatcatgacaaaaaggccaaagatagttgccaaatctgtagggctacaaggcagtgaatcagcaagtagtttaatgactcctcatcagatttgtgtggagagaacaagtttgtgagtacttgtcctcctcctgagccggtgtatcatcaaaatccttccccaaactgccatccatgtaaacaaagcgacctttcaaggagccagtgtcctgtgtatttctctctctggaaacctagccctgcattgctgtttgtgggctgtgagataagaattaacagaagcaaggtttaggaataaatccaccaaattttaataccttgttagccttggattccaacagccctgacttaataccaattccaatagttagcaacagaagcttctttgttaacaatcttctcagtaatgtctcctcatcagaagtcaatccagaaactcactctaacctcttgccattttaccatacctctacaccacaatcctcttccatgagctccctcttcatcccaaatctctactgcccttttctaggaagcctctgtccagcaacattagacttacagcacgtcatctcccttctcttaagacatgcccagcccgtttaagcaacaatgtttttctaggaagcatccttaatctatcttcatggaaatgggctgagagaaagcagacatagaaaccagaagctccacaatgtgctttatggtaggcccccaaactatagtccagatatacggcaggcaaattcccaaatgcaccaccttgcaacctaaagtgtccctgcaaacatgtcagtctctccactgggccaattgaaatgagcttgctcttttttagatttgtgtttaccctcaataccactttaaaccacaagaagaaacacttaaggtgttatgttgagtcagcagtttgatctgtttgaaccatgacctggttaggctctgatttgataaatggattggatttcaaaacactgctccacagactaaagttcgaacaaatgaggctaagtttgaaatattgctgtacaaaataaagataatgattttatacccacaaaaattcgtgctagttcccggtactacgactcctgtatcatatcaatggacatcacctgatttatgtaaatcagtccatttacaatattctgttgtatcatattttgcgtgtaacatggctgtatacgagttgttattggatcaaggctctagtcttgttttaagcatctaaaaccatggcgatcacaatcaaaccaaggtaccgctgctttgaaaatgttattaatactagaactttttgtatgagaagtggtctgttattaattctagaatttttgtgtccattggagcatgattctcaatggctacatcttactccgtatacctctgtttaggattgaactagacttctttcctgattgggagaatttatgttttggagatgcctctatactgcatgatgggaatgtcagtggtgcttaactagatattaacctaaaatttttgtggttgtctaatgatgttcttgtccatcagggaggcc

SEQ ID NO: 11464 - DNA, 3357 bp, Vitis vinifera
  Intron number 4 from transcript GSVIVT01020466001 (locus G SVIVG01020466001) derived from phytozome v7.0 (chr-ID chr1 9; pos 18994640 to 18997996 reverse strand)
attggtaggaccttgttttttcaaacacaaatggtttgcacagtttttcctaatgcagtttattttcttctgcttttatatttttgcatcatctacattctgtcctctgtggatcatgatgctggactgagtgggttctctatgaggatttgataaataaatatattaataaacaaaagctcaaaagcgaccatgtttacccatgttggaaaaagagaatttgaaaatcaacatgtaagagaaatttaaaaaatccatgaaaaacaataatcattcctaacacattgttctttatctaaagaagaatctttcagagtcaacatgtttcggcttcaaaatggagaagtcattttgttcagaaagtttattgttcttgaactgagctggtttctcagaaattcaaaattgattacaaagctggacggcacagctatttaaatagatagctagagaatagctaataattctgccgcctagaaatttggagacttaatcaaactcagctaacaacctaacgcctaaaaaacaggagaaaggatttaaatttaaactctaaacaataatttaaaagaatagtagctaactcctagaatctgatataatcagatttattatttaaacaaaacagaaatatttgaataacagaaagtatctcctagatttcctacagttcctctctttgcatgcaaaacatgcgtgcacctctcctagtccttttgttctcagatttcatccaccgccccaccacaaaatcattagatgtgtgaggtacaattcatcaatctccataaatgaagaacaaaaaattccaaaacttcaaagcttctctactatgtagaaattagtgatatacttattccaccacttctttagatgtcacaatgtacctatttagaacatctaaataaccattgaatgacgattctaagtccttgccaccagccatgtaagaaagtcaccttcagtgaaaataaggcatctttgaactttatgcataccaattatttgaaaatacctttaattcctatcctgaactaaattatttaattttagagtttggtgtcgtctttggttttcattaaacaaataaaaataattgttcacttttcttttatccaatcctcaattatcagttactaaaactctttgattttcacctataatgcacttaacattcctgaggtctctatttttccctttttccatatcctagccaaagtgtgtttctctcagtctgctgtgcctaagtcgcaatagagattatttcatgccttaatgttgcctcactaactacccctttggactattgttgctcccctcataagcacattttctcctcttcaaagtattggctgcataggctataaatgaattcattaatgtggtggcttagttggcattttagtggatgtttgcatggcacccatctggtgcattttctgtggtttgatttaatttgttgtgatttgagaagcaattatagttttttcttgagagttattattaaatatgtttaatttaataataactctccagaaaaactattattaaacatgtttagttacccatcaaaaaaaaaataaaaataaataaatatgtttagttgttaatttatatggagttacacctcttctgctgtttctagaaaatttgtttgtctacctagaaagctgttgctgcataggaaagactcagtatcctatgtcattggatttgtaacttaatatctattacttctagtatggccatttccaaagagccatgttagtgcctgacatgaatctctctctgaactcctggatgtgtcagatgctcttcaaatttgttcaaaattttattttatttatttatttttgtatgaatgggcctgcatgtgttaagaatgcaatcaaagcgtcaaagtatatacctgtcttaaacaaagtaatattgttctaatatatgaaactctaatgagactatgtagttgtgtatacgatcactatatttgctaccttcttccaagtatgccattgttattctaaaaatttaaatgaactagccaccaaccaactcatatgttattgcacatgtgtgcacattgttgtgctcttgctgtatctgtgtgctgctacacaaggatttgtcttgttgacatatacatatggcatgtttgtctccaagctatctagtttttgctacattataatctctgtaaatatcacattactctttgttaggatatctagcaacttgtgagccttgcttgcatcatttattcattatattcattaattttaaaattttcagttcgaggaagaacacaaatcttgactttttattttttaaaattaatttaatttgttgattctagtgaatattcagatgagtgtgagttatgttttagagttttaattgcagaaagtgaataattaagtgactgtgagttatgttttgcatttttcattgtagaaatttcatttaaatgatgatagttaatttctttcaatttcgttatattttaaagaaatgaactttgaaaaaatataataaattcatttatgatccaaacttcatgattttagtattgttttcgtttttgaatgaggaacatacagaaatttaaggagtttaattttattgcgaattggatgagctattagacaaaaatagtgactgcatgtagttgattctttgttttggtgttagaactttgtggatttattttaaattctttcttatccaaattaagtgattctgatattggtttcattattaagtattctgtcaaaaaaaattagatctaaaaatttgcttgagaaataagagagaaaatggtcaatatgcctattatattcaggttttcttgatgataactttgccaatttattataaatttacttctcagtcaaattacataaaattttgatagtttgatttatttttaggtcaggaattaatataatttttcaaaaatgattttggcaattgcaaaagttaaagtttgaaaagataaaagagaaaaaaaatcaacatgactttattgtcagtggtaacactccaatggagttttcattgctcaacagcatgcatgagtggagtaaagagtctaaagaccacagctttgttgtataaactaaactattaaatctttttcatgcttgaaaagtttcagttaaagctacagtggttgaatgattgcagcacctcttatcttttatgcatgcagatgtatgtgtgcacttataattttttcagtaagaatatatatagtctttacacatatgtgagcacatgtaagttaaatctaaacccttctcacagcgcaagtttgctttcaccaaaaaagtttcgttgctatttacaggtactggttat

SEQ ID NO: 11465 - DNA, 4793 bp, Vitis vinifera
  Intron number 2 from transcript GSVIVT01029751001 (locus G SVIVG01029751001) derived from phytozome v7.0 (chr-ID chr1 2; pos 14166149 to 14170941 reverse strand)
atcgtattcaggggctgacttatattcctttcaaggttttgttcttcttttgtggtctttttttggaactataagatggtctgaagaatttttcatcacattgtgcttttgctatgatttatatgcacttgtgcttttgggtaggagattctaagctgaaggagctctttcctttgctgttcagaattgcaacccataattctgctgtagtggctgatctttgggggagacaaggaggtggtggcaggggttgggaggtgcactttagaagaccctttcaagattgggaattggaggaggtgaatcgttttctagttcacatttctgcagtaaaggtccaagaagaggaggattctctagtttggaagattgagaggaaaggaaagtttagtgttaaatcttattataggtctttaaaggtggagaacaaccccttatttccagcaaaggaggtttggggttcgtatgcccctttaagaactcgtttttttgcttgggaagctgtttggggtaaaatttctactattgatatgttaatgaggaggggttggtccatggttaatagatgcaatctttgtaaagagaatgaggaatcggcggatcatattctaattcattgcggtaagacaagggagctttggactttggttctttcttcttttggggtggtgtgggtgttcccaaactcagtgagaaatttgcttcttgaatggaaaattaaggacctaggaaagaagaggagtgtagtttggaaaatgacgcctatttgtttgttttggtgtatttggggagagcgaaatcgaagaatgttccaagaggaagagatgttagatacgagcttgaggaacctcttcctacagtctctttttgagtggtctcaacagtttatggacatggactatctctattttctgaatttgttgggtgtttggattgttggttaactttgtcatttctaggtttttttcctcctttgttgccttgggtttggctttctttgtatactgccggtgtacatagggagcgccccctgttttggcatacttttatttgatttcttctctttgtctatcaaaaaaaaaaaaaaaaaaaaacattgataaactatattgaattctagcaccagaaattgtgtcactagtttttgcacttgctatgcttggtagtgtaggtttatatgatacactgttagaccttatttacaagaagcatccttttgctagccttgttagtagaagtgcgaataaccttgtttatcaattgaactcctcagtaagttcttacagttattagttgctgaaaaagttgaatttcatatatgtgtatatatatgacctattcttatatatagtgagaatatacacattatccagcttattttgtatatgacctattcttatgtcttacttgagctcattatctagcttgcccatttattttatgttattgttttccattccgaaagtagtcagaatgaggtttgggaagattaaaatagacttcctctagggaggtggtggggcattggagaaaaaaattcatctagtgaagtggtcaaatatttgcacggagaaaagaaagggggtttggatgttagaagtctttcttttcttaataagattccattaggcaagtgaagttggtgatatgcatctgaaatgggaaccctttagagacaggttataagtggaaaatattgggggaagaaggagggggtggtggtattgtgatgtaaatggcttgatataaagaaagagaagagggggtggggttattccagtgggcaagtgaagttggcgatatgcatctgagatgagaaccctttagagacaggttataagtggaaaatattgtgttgggggtggtcttgtgatgtaagagataggtatgatattggtttatggctagatatcaagaagtgttgggacatccttaatagtataatttcttctttttttgtgcagggaatgggaggagagtgaaattttggaaggatagatggtggagggatgagcccttacatgtttcttttccatctttgtacattctagccttatcaaaagatgcttgggtggaagagttgcaggactagataggtgagaagggttattggaaccctttctagaagtctaaatgattgggagttggatgaaatagagcaactcttctcaagattgcaaggtaaggtggtgaatagagaggacaaggatagggcaccatggatggattcgaggaatgagaccaccttctcaatgaagtctctttatgcttccttggagtttgggagttcaatcttttttctgatgagggttatttggagtttgtaggatctaaggtaagtttctttgcatgagacatttgttggtgaaaggtattgttttttattagcttcaaagaagagggtgggtgttagttaatcgatgcttcctatgtaaattcaaaaaagaatcaattgatcatatttttctgcactgtcccaagacaagggttctttggttgttactcttctccttggttggttttacttggatattgccaactacagtcagagagactttttaggatggcatggatccttcttgagaagaagacatagaaagatttggagagctgttccattatgcatttttttacagtttggaaggagaggaattgaaggtcgcttgagaacaaggagcagtgattacatgttttgaagaaccttttccttaataaccttttttgggggatgaagttgtacatacatgatgcctttcatagattttgttgattggttgagttctagcaaagggagagtatttgttgatcttttaatgctcaatcttttaacgcacattgtttttgccctgtgtgccttggtgcactgattttttggaagtccatcccgttgtacattttttggacggtttggaaggagagaaatagactagcctttagggggtgtgttagcaattctgaaacttaaaaattcttttgtttgtaatttatggtgttgggctatattgtatattggagaggagtttctctcccttataggcttcttggagtggttagcttccagttaagggttggtgaggttttttgttttatctttttggttgtgaggtcctagctgccttgtataccccctgtatgctttgtggcttttttgcctcttgttaatacaatccgtgcttatttatcaaaaaaaaaaaaaaaatattattgttgcccactaaaaatattaagaatataacattttagtttttatgtcattgtttttatttatttatttttttaacaatcttgcacattgagtggttaacagcacaagaaatgcagaaaaagaaatcattcttaatatttaaaaaggttgaaatgctggaaaacccattcttgatatcgaaaaagttgtctaaaaattcccccattaatcaacatatgactgcattttctctacttactataagtcttcaacgctgctagtttttgcttcctgtaggtcaacattgctctatgactagatgtttttttttttttttgataggcaaagctctatgactagatgttgctagtgatttaggtttgtccttctcttggtctcctcttttagctaatcatgtcttccatcaattagcaaaatgagaaggcaaatattgcacttcttttgttgggtatttcttaccccccttgaggactgtagagtttctctaacttgaataagttcatgctatattcttgagatgtatatgtcctatcatttctacctgagaagttcactccctttcttcctttgatgagcttttatatatttttctaaggattgttcatccttcatttgtacttaaaaatttatattaatgaattaatttgtttctgataaagaaaaaaaatgctgcattacatgatactggaccaagaagaaaaagatgctgtcacaaacctttttggtgccccataatagataggtgatggcattatttccatgttcttaaatcatagcatcattaaatcaatttgaccactccgtttgggtgcccttttttcttcatttataaaatttatttgtgcttttacctatcaaaacaaaaaatcaatttgaccacttcatgttctatacaagcaagagaaatgagaatctctataacttgtgttttgttttctcatgctgtgagtctagaggcacttctttttttctttactacttggtggtctagacactttcctacttttttgtttactgcttggtgcttagtaccctagcatggtattgtgctcatgtgtggttcctcaatatatgctactggattttgatatctccatgtcctaaacagaacagtctgctagttgcacttggccctgttgacccttttttctggtggtataatagtttttagctagtagaacaatttttttaggcaagaaagcttagatttcaactaattcacttgagactatttgcattgtcgctctgttccttggagaattgacattaatggctattataggtaaatgtattataattataattaataatacttactattattatttttatcacaataattaagttttctgactgaaacttgttagaacctgggattttgttggccatctactataaccaacactctagctatgattcattaaacacacacgcacacacacacaaacggagaaaagtaaagaaaaccaatgctccagttatttgttctgctttttctatctatggtgcacaaatgaagttcgttcatgtaaatttggatgaatttgtttcagggtcgagtgaacttaaaaaatccagaacacaagtt

SEQ ID NO: 11466 - DNA, 11427 bp, Vitis vinifera
  Intron number 1 from transcript GSVIVT01034626001 (locus G SVIVG01034626001) derived from phytozome v7.0 (chr-ID chr1 3; pos 13756188 to 13767614)
aacctcctccttctgttcaagacgccaccgatagggtcaatccctctccacctttcactcctttttctccctttggatgccgggaaaacgttacagatttttttttcatcactagattttcttttttcctttcccgtttctcggcagccaaacggagggttgttcaattcaattgtttgtgttgtttaatggttcatgtttgccttgattttaaattagggcttactgttgcatattgaagtagtgcttctaatgcatgattttttcatttttaggctttgtatgattcggattggatccgaatctgaccttacctccgcttagaattaaaaatagaataaaattgtatatgaaactgagatcgccagctccatctactgtgctcgttgctcaggaaagtgtggaaaaaaagtatatggaagacaaatgcgtgagcacagaaattagagattctggacattacaagaataatagagatcttccaagatcaataggaagttgcaaatcaatgcctaaacttgtgactttgaaaactgatttgatgcctaaatttagccagttgaaagttgaatctgtgttgaaaactatgatattctaaatgttgctttacctttatttcctaagtcaggtcagggtgaggttttgggaagaatcatggcttctttcaagtactgtgtctaatctccttttacttattctaaaatatccaataaaaaatttagtacttattgaatacatcattaaatttgtatgaaatgatgttgaaatggctccgaatggactgatgtgaatgatggaataggatgttctgatgtatagttttccttctgaaactgaacatttctctccacacacagtgaatcatttattctttgtttttttccctattctttcccaaagaagaatttatcttatctgaatggggtgaaacattttggttgaaattgattttttcaaggcaaaatttgtagctttttgtaagatagcaatttggtgattatgattggaaaaactagaaaaatagttgcaaacaacatgaaactagaattttaatgtgtgtgggcaatctttcccttgaaatccttgagaaacttgttaactacttaaaaagcttgttaactgcaaaactaaaggacgataaaaggcactttgagtgttagccaaaaaaataagccttctggtcaggaatgttgacatggtgctggcaaagaatttttgattgattaagcttggctaaaggaggaagaaatgaattgcatgggacttggtctttgtcttgttccccaacaaagcaactttgagagtgatttcgctttttatagtgtttgccaagttttataacaataggtgatgtgatgtgatgtgatgtgatgtgttctttcttttgaagttatagtaattactcttaggtgttcttttacatcttggcaactgggagataaggcaatgcttgcaacaagtgttaggctaataatattaaatgttatgtaaagtcttgtgtgaaggtaaaagtaaaaaaaaaatgaaggcacttctttttgtccaacttggagagattttattgccagttgggggagcttaacgaagttttggaagttgcaaatgacaatggggcgaatatttcggagacctactttgtcctatcccttccatggtagagtgaatttggaatagacatgaatgggttaaaggctgatttgagaaccgaattgggttcacacatgagtttaggtatttttctgcacaaattgcatatataagactaagtaaattaaaaatacttcaatttattattattttttcattttccctttcttgacacattaaataaaaactaaatttacttataaaaataacatataaaatttataatatttatttatttataaattatatttatttttgatatgattataatttttaaaagaataaaaattaaacaagtggggtggataggggaaattcccttacttgctttgatccaccttgccttgtttaaaatttttttgagacgagaatgggaagaggttttaataatcgggacaaggttgggatatgggtgacttgccttgagaacctacactattaacattcctaggaagacatgcaatggatggaacaaggaccttctgaattatcaaagcattttaatgctgaagaaaagttttttagaagaggcaaatccttttggtacctaatttccttctaaaaggattttgagagggcttgaactcccttttaataaaccttattgcctctagataggcctctaggtaggtgttttatgtaaagggaaattttgaacacaaaggttgattgccctaccacaaatcttcccagaaatgaattttggtcccatcatttactataaagcaaatgtatgtagaaaaaatgtggagaataagtgcaatggcttttaaagggtaatggtgtgatcatctgactatattattagcgtcccattgattaggacatgtcctatgatatttaagataacttgatgctaaagagcaaaactttccttaggataccttcaaagccactttcctaataaagcttgattcctcatagcaattttcccaaaccctgatccactaaactctttaggcctacacactagatcctaactaaccaaatgatcccttttaccctctccaaaacccaaccataaaaattctttttgcatcttttcaatccttgaagctattgatgctaaaatcttggaaagggataagaaatagcttaggatgtgcatcaaacaagactggattagggttattctacttcctaggaatagagaagctttttccacccattcaacctcctagagactctaccaatcattggatcctaaaaagagattaatttcggattctcccttaaaggaagacccaaatacgttaaaggtctattagagattgcacaatcaaagcattgaagcgatcctagtagtttgctcttgactatttttaatcctagaaagagtgctcttatttagattgatccttagccttgaaagtcgcctaaaaaccaacaaaatttggttaagataatgtagctcttccaaggaaggtctggaaaaaaagatagtgtcattaacaaattgtaaataagacactttagtcctatttctacctactagaaacccctaaataaacctctctcctttgctctcaccatcagcctacttaaaacattagccacaatggtgaaaagaaaaggggaaagaggatctccttttcttaagcttccacgcgccttaatccaaccttggcatttccattcactaagattgcaaaagttgttatagacaaacgtcccctcatctagggctttcatcttaaactaaacccttttctttcaagtatgtggtccaaaaaccccccaattaacatgatcataggccttttcaaaatcgattttaaagactaccctttcctctcttgatcttctttgctcatccaccaacttattagcaatcaaaacaacatccaaaatctgcctcccctcaatgaaagcaccttgagacatgaaaaatggtatcttggaggacttatacacaaccgccttgaaagtaacttagctatgctcttgtataaactggtaaccaaattgattggtctaaaatatgggattctactggtttaactcttttttagcactggagcaatgaaggtcacattaatgctttgattaattattccattattgtgaaactctaagaacgcccttaaagatagttcttaatcgtctcctaacactccttatataacgcaatggtgaagccatctaggcagggggccttttacttgtttaaatgcaacataacattgtgaatctcctcttctgaaaaaggtgaccagccaatcaacattctctgttgaaatgggagaccaatccaagccttttatcctccatgaaccacttaaaggcttggagaataacttcccaaagtgatgtttgatctcctttgaaatgctttcaatgttatccaaaactacgttatcttcaaacaccaaggacttgatgaacttccaattttgcctaccattggtcacactctgaaaaaatttagaattacaatccctttattttatgtatttcaccttttttttttgcctctagaactgatcttcctttaacaatgcctcttccatttccgttttccttaaggcccttcttactgcaagttcaggagttagaatccttttctgttccttcgcatccaaaccaacaatgtccgtgagaatatttttctttttctcctttaagtctccaaaagacaccctattccactctttcgattttgacttcacaaattgtaactttttcatgaattagtgaccttcccattcttcaaactgacactcattgcaccaaccattgaaattttccttgaaatttgagtgaagcaaccacatgttttcaaatctaaaaggcgttggcccctagttaaaaggattgatgtataaaacaattggacaataatttgatgtcaatctgaggagtgctttttggatgcttttgaggcaatccttgcttccactcgcttgaaaacaaaaatctatccaacctcttgcaaatagggttttcttgcagatttgaccaagtgaaagaagcatttttgagaggaccaattaactcactttcccttatcaaatcatcaaaatccctcatgcttagggttaacctggaacctcctaacttttatgaaattcttcttataagattaaaatccgcacaaacacaccatttcagtaaagttatacaaaaaaaatcttgaagctttacccaaaagtcctttctaatatgggaagtaataagaccatgaaccaaagtgagccagaaaaatgcttctttctctaattccaacttgattgttactgagaaattgggacaacctttaaggatttaaacttcaaaggattactacccctcccaaagccccattagttgggagaacaacccactctttgtttctgaccttccatacactacccacaaacctcctatcgcatgactttctctttatttcctgcaacagaacaacatctggattttcatggcaaagaaaatccttcactacccttttctttctaaaaccaagacctttagtattccaactgatgattttcataattacaaaaaaaacctagtaaacactaaagaaactagaatctaaagaggcctaaagacaacataagaggttttgttctttcttttagaatagatctttttccacagaacgggcattgctattgtcctagagaattcctatctcactatatttgacaatcttgattttcaaagatcctaaaactgattgaattgaagccatttttgaaggagagatgccttcaatatggaaatcttccaactaagcggaacatgattctaagggtaaacaattccctggggaaaagaacttactagggttgttttgaggtaacttgagaaaagagacgccctctaactcatggctaggcttagctactagggatgccacacctttaggaaaatgacaaccaacatttaagctagaagaggagttgtttttttttttttttttgataagtaagccagaattgtattaaactagaggcaaaaagccacattgtatacagggggtatacaaggcagctaaggcctcacaagcaagaaagaaagccaaaagaacctcaccaccccttaagtggaagctaaccactccaaaaagcctataagggagagagactcctctccaatatacaatctagcccagctccataaattacaaacaaaaaaattcttgagtttttgaatatctaacaccccccttcccccttaaaggctaatctattcctttccttccaaaccgtccaaaaaatacacaatgggatggattttcatatccttttccttttcttctccacaaaagggcctctccagcaagttaagacctcttttacagtttctggaaagacccactgaacacctaataacctaaggacgatatcccacaggactctgaccactgtacagtgtataagaatatgatttacaatttcttcttcacacccacacaaaaaacaacaattagggagctgccactcttttttctggagcctgtcaagagtaagcatctttccccacgtagcctcctaagcaaagaacgcaactttggttggaactctatacatccaaatacaacttgtcggaaaagcggtgtcattggggttggccaacaagctgtacgcttcctcaaccctaaactatctgtttcttcctcccttccaaaaaactgagtcttcctctaaacaaggcatgtgacccctcaaaacatggagcaagtcccctaccatatccaacttctaatcattaaaatccctaaaaattcttaggttccaacctccttgtccaaaattctggtcccacatctcctccactgtagcattcctatgaacaaccatggcaaagagatgagggaagttttgggacagcactgcaccaatgcaccatacatcagtccagaatttgattttggtgcccttcttagctatgagcaccatattatctcaacaccaatcagtttccttcaagatttccttccaaacccctactccgaacgccccattagccttctttgtcctccaaccaagacccttttgcccatattttgccatgatcacttgtttccaaagattgtctttatcataagcaaacctccatatccatttaccaagcaaggctttgttcaaaagggctatagcttccttaagcctaacccacccttatccttatccgcacaaatcacctcccaattaactagatgagctttcctctccaagtttccctttccccaaagaaagctagaagaggagttgttgagccttgaaggactgactgacgaaggaaagggataacaaatagatcttaaaggaaggattgaaaaaggcacataataaccaggtgaacaaggagaagtggcaatggttaagggagaagcagacaaattgacagtcccatctaaagactggtccttaatagtggagagagaattagaagtctatacctaggcttgacacccatcgtggagaacattgcctttgcccttatcccctcttgaagcttcccttagtaaaaacgatttaaggttcaaaactccttcggcctcagtcacatctagttcttttgacgattttgttgtacccaaacaggtgatactctggacctcctttcccaaggatatctcaccctttaacatgaaccatctctcttaatgaagaaaatctttgttcccttctgcacacccaaccattgaaagtagtgttgtcatcataggaaggtagaggcaaacttctcacttgcattcaagccaaactcttgcctgggcttgggaagagtcgcactggcttgactatggaaggctgggccatcaatgcacaaagagtgaagctatgagtcattggggtagtatcccttgacccgtcggcccctggtagtaacatgtccaaattgcaacaagagcccttatttgtagggcctttcaagcggtcttgcctctttgaagaaaaggaaaggggcccaaagccttttccataatgtgggcctcctctagaaacgaccttgcttgcattaggtggattaggcttgctttcactttacttatttcttttatctggttggactttggagaagcttgggctttctttcacaattgggcttgacttcccctagtctagacctccttccctttaaatccacaaactgctttatggttacatttgaatttgaaatgatgtttgaaacaagagaaagtggatgacaatcgttttccatcctctccctagccctaccatgtgtccccaaaacctacaaaggacctttttgcatgccaccacccaccgcagccaacttgcctttgcaacaagttgacttaagcctcctttgcagacctctttcctcttcgataactgaaattgacaccgtgaaaatccactctccatctttgatctccaataatgaaggtagcatgacagttagattcttctccactctcaatatagcttttgataaatctaccagctttaaagtgtgtctatctatatctgtaacccttccccatgccttcatcacttgtttgaaatggatctttgaccataaatggagaggtagatcccttagttcaatccatccccatttgaacttcctgtagatttcggagttttctcttggtgaccatcttctcaagataatactaagaccaccccttcatagtaatcctcccttgctcatgaagccaaatggccctttaagaggaatccacaaagaacaaccctttgaaggacaaaaacggggttattgaccccatacccttgcataccaatcttttggcgatccctctacctacttcctcccaatcttgtatcccaaccttgctttcacaaatgactctctagcccactttcccattagaattgtagcacctttcctagtaccccttaggacaacaacactcacgaaggattgcttacccccactagaaacctccaacaaaaccttctcatcaagcttgggctcatcatgtctccctttagaattatcatcgacttggttttttgatgtgtaacaaatttcgacaccttcatgaatctacctctattattgaaacaaatctttaggagatgggtcatagtttttcctttgaacttccattgaaattcatatgcctttccaactctgatgcctacttcaactattccaaaaatgaaaccatttcttctctttcaaaacccaaagaaacaataaagcttccacttctctttgtaatagaaaaccacctccccccatgagaaccttcaaacctcacctcaaaaatcttcttttccatcactgctaactccatcatcctttgattgaatctcattttttgaaaactggcataggcaaagttgcggctaactgctttccattgtacatggaaaactatttgtagatagacttggataatttgtgtcctatttatgatgacaagccatgaacacaatagatgttctcacaaaaaatttcctttgcaaatagaattcatcaagccaaaattttgttcttttatcattgccaaccctaaaacttgttctgaccctaaagggttcctaacctcctcttattgccttccacaagtcgacaccataaccctccctctcatcaagagagcaccaacctttacgttcttccccaaactttcccactataacccgtgtctagaggaagtccctttccaaagcaaatttccaacaccattttccaagcaaggctttattaagagaggacaagaccctaataccaagccctcccaatttcttgtctttgtagacgtaagaccacttaactaagtgaggtcttctcttgagggctcctccctcccacaagaagttcctatgcattttttccaatctaaaagccaccattttaggaatgacaagaagagacataaaatagatgggcactttgtccaattgcagtagcactttgtcaaagattgtttcgctgaaccaatcttgactgggtttcttctagagatatataaaaaatgatgggaatctcctttaagggctttggaagcctttccaaaagggaagattctttggcaggtggtcttattatccttgactgagtttatatggttggagaggaatgcaaggatttttctaggatagatggagatctatggatgccatttgggacttgattttctttttgtctttccttcagacctaagtcaccaagccttttgtagatattcatttgttttctttttttaatgttggattggaaaagtgtttgcttttcaaactggttgaggaagaaagttatgtttggttggtcactacctccaataggttcaataagcttaaactttgatgaatgttccttggataaccctagttatattggtattggagataggattagagatcactctagtacagtgttgagaaccttctctaagtagtcaggtgtagagttgtctattaaagcaaagattttagcattgttggagggtttgctataggtgaaaattttaggcctctccaccctaactataaagggaaattctgctactgttatatcttaggtcattaataaggaaactggttcatggaagtttgacaattggatgtacaaaatcatagatgttgatgagttgggttgttccctctcttggttccccatttgtccaatcaagttgtagaccaattagctgaacaaggagctaagcatgtggcctcctttctcagaagactttcttcccccttgagcatgctgtatttctcttctttgtaccttagattttttacttggaaggtcagactagttttagtgcggctttacacttggttactttataacctttttgttcttccttaaaggattgcttgtccttcttgtatttatccctttttagataaatgaaggtgtttgtttctgttcaaaaagaaaaaggaaaagtatacaaatctggttcctaaagggaaagcaagatttttaacaagtaaaagaccaaatgacaagacaggttgttaagacctaggaagaaatagtcagtggtctatgtatgaatttaatggaggggcttctttcttggctaaaagccccatctttgagtaactggatctagaaattcagtgaaggaatccattgaggataaagatggaagtggccatgtctcttaaatgacaaaagtgcaggagccagtagacccattattaaaaaatttgatagcatcattgccatcacattatgcagttgaagagttcaccccatgccaataggtccagattgcagaaaggtgatgctacattctgccttattgatctctacagactatattcaatcccaattttcctcagccttcctagacaatatctgttaagttccctagaaatacttcagatctggaaaatgaggttacattaatgtcaaattcatgtgctacaaatgtcagtgcaagatgaacttccttttgctgcaatgatagtgcagttatcctgttctcgatttagattattaaattcatcgtacattagaaggctagttgaaatgataattgtttgtaccttttggttgaggtagttctttaattttcatttccttacatttgacacattttgttgaaatgatttaattgggcactaaacatatgatgactataagcttgtaagatttatttatgtttattttctgtggttggctgcctaaaagattttctatcgcttaaaattatctctaaatgattttttttctgctctatagctctgtactaaaatcatgtttgattattatgttgtggcctatattgctaggttatttatttatctatttattttcctgaactgatgcttaaataatttatatctttacagattaataaaagaggtgaaacagtgg

SEQ ID NO: 11467 - DNA, 2966 bp, Vitis vinifera
  Intron number 3 from transcript GSVIVT01009601001 (locus G SVIVG01009601001) derived from phytozome v7.0 (chr-ID chr1 8; pos 9791034 to 9793999)
ttagaggtaaacaatttgagttgacaccatttggaggtggaagaagaatttgccctggagcagtttttgcccttcaagtgctacacttaacattagccaacttcctgcatagatttcaactttcaactccatcagatgcaccggttgatatgagcgagagttttggattaacaaacatcaaatccactccacttgaagttcttatctccccacgcttggcttcttatgatctttatgagtagaacttgaggtcgctaagagacttatttcaaaaaacctagtgctatgaaatgtgaaataaaaataaatttcacacatgtagcataagtttagtattattttcaagcagttactcatgtgtgtcctttaatattgtcttagcttgaatttaatgaaaaatattttcgacacctttttcgtgtggacaagtaatgacccaatttcttgttatgtttcttcattctttcatgaaagagaatttagaagaacaagtgacatatagcattacaattgaaaaattaataagtatgtgctccaccatatgcatatatatatgcatagtagacttgatgagtttccaagttgattaattggtatctccttttgatagatttcagccacctttttgtacatgattaaagtagtaatggaaactaaaattacaactcccatttcattgtaaaaagttgggatgtgcaaggtgggtcagttcaattttgggcattaaaatcaaatcgaattgaacccaaaagaggaaaatgattagtttgacttgattaacaataatctaagttggttcattttgcttctatttataacatcaatttttttttataatttgaacaaaaataatattattgaagcaagtcatctttggacggttgaaatgatattattaccactaatttcaaatcatattattataacttaatgacgtgaataggtattattgtaacccatgtcaatcatatcaaatagtccaagtcagataaaagttataaaggtgtgattgggagttccatccaatgtgaaaaatgtataccaaattaatgatgtaaccaattgttatactgtatattattactgtgtgtataactttcaattcaattcagtttggttcattaatttttttaataggtaattgaattggtataactgagttatatattttaaaaaccaaatttattaaaaaaataaaatcttaaaaaattaatagatttgggtcaattccattgattttgccaattgtacaccctaaaagaagggatgtccacttatcattcataaactttgtgtactcctaagttacaattttgtcccatgtgattcacatttgtacttattattctcaattttttgtacaaatgatttattattttacagaattttactccatgagattcacatttgtacttattattatcaactttgtctgctcttaagttacaatttctcctaattagattcacatgcgttattgccataattgaatttccacatttatgcatgaattattatgttaatagatacattatcattttgtcaagttaatctgactcaggttaatcaccaaagacaaggtgaattaattgactcaattttaataaattttaatttaaatgagtgcaagtaataataatacaaaaaaaattaaataaaaagaagagataacaggtacaaactccaatttatatattttgctcaatcctatactctcctcaagctctcaaatgcaaattgagggttccactagcttttaagacttcaatcaaaccttaatcctttacacttggattctcaatttcaatgacctttttacactttaattcaagaaattcctcactcttgaacatactcaaaggtaacacttaaacaacattgatctcacaaaatttatttacagataatataaatgaaaacttaaatggtttttcttggctaggatttctaagttaataaggatttttacattaaaaagaaagagttaagatcaactgggttttgtaagattttgatatatatcttagtttgtgagttttttgggattctattgtaatcttattgttttatcctaaaattgtcaaaaaaagaaatcagtaatttagtatggcaattttactccaaagattattgattaaaaattattttactaataccaacgtgtaagagttaaaggcataaaattgaaattaaagtaagtttattattttggatttggttaagtaatgacaagattaataattgaacttaatgtaaaaagaagtgtaaaaactttaaaagtttaaaatatcatttcattattagtttccacttgccaacatagatttctcattctattctaacaagttttttgtacttttatatatatatttcataaacttaacaaaggatacaaacagcaaaagaaaaaaaaataattgagctactaaacctcaatataaatttggggtgaattgtcaaggagcagggggaagtactgtatcacagatcaatgtgaagatgtatatatatttatagtatagaacctaagaggtgaacgtttctttctaagttaggtaaacatttctgtcaaagttgatgaaattttactataatttatatacacatgctttcagtgtgcatataggttgaaataatatgtggagatgatttttatatgtgatttaatattgttttggattattgattatgactataaattatcatgcatggaactaatcaaaatgatataattaaattatattaatgaatttgagatagacatggcaattattaatttgaaatatcttatatgaacataaaattttaaatatagactcataatttatattaaaataataaaattaaaaaagtacgtttatctcaaatttatgcctagggcccaaattttgctgagagccagccggatgtcatcacatgcaagaaagctaggaaacaaagctgaagtttgcttcttgtgtgggaag

SEQ ID NO: 11468 - DNA, 6950 bp, Vitis vinifera
  Intron number 1 from transcript GSVIVT01037889001 (locus G SVIVG01037889001) derived from phytozome v7.0 (chr-ID chr3 ; pos 6668437 to 6675386)
tcagctctgaacgctccgccaattcgagatcgaaggtttgctttttgtttgtgaatttgttagtgtctgttgtttgttttttgatgtacagttaggaaatgcctaccaattcctatctatcactaggattggaacggcgcatgacatttttggtaagtttgtggttggttcaatttttatactgtatcaatgtattatatccgtcaatgcatttttgagaaccaaacctggaatgttttgtttgattggttgatttaaggatgctatcttggagcggatctccagtttgtgttggattttcataactttagatgtgagagttggttgcttttctgaattgtgtggatggattatgtatttattctacaatatttatatagaaaagtttgaaaacctggaaatgaggcattaccaatacagtccgatggttactgttgctgccactacaccatgacaaatataccgctacaccaccaccaccatcttgatggcaaacgttgctaccgctgccagcatcaccacctctttgtaataataagcaagatactagtttataacctgtcacactgtcatcaccatcggcaccctacctggcattcacgatacttactgacttgccattgtcacaccaccattaccatcttcagtgcacccaccattgcattgctgtgaccacttctacgatgaccaagcaatacactagtttaccaatgtgttcccttaatcactatcattatcgtgcccactttactatctttgtcactatttccatccccaccaagtgagataactgttggaatttgcttcgaaacattggaccgatgctgatatgaagactgcaactgaggaaggatgaattagcacagtaagacaaagcttggtgtactggaacagtctttctaatggttacgccagtagttgaaggataatgagaagcaaaagaagaagaaaaatatagatggaatatccaatttggtagagtgacaacacttgggaatgaattcttactgaccttttttggctgccacaattaatctttacatgattctgtgcaactatggttagatcaaggtaaccatagttaagttgaatctattgttttacacatggttaacgtgaggttgtgatagacaattggactgggaatattcctcactctgccaaccagttgtggctctaaaagggcttcccatatgatggttcgaccggtagatgagcttgagggcatgtcctcagttttggtcttgcctctggttggagttgctctctgtgatgtgccatgtggcattcattaggagggcttgaccctttatgtcccctttcatcagttattgataggctcaaccaaaaggatgagctcgagagaacaagtgggaaaatttcaaattcaatgagatatgtgtcatttgttgactaatttgtcttcttagtggttatttggtttcactgtataacaacattggatcagttgtagtcacatgtagttctcctggaagcctttttaaccaaatcaattcacaaatccctagagccatcgctctaaactcaactttagcactacttctagccaccactaattgcttcttatttctccatgtcacaagatttcgctaagcaaaggtgtagtaaattgaagttgatcgcctatcttctattgatcttgcccaatttgcgtcagtaaaggcttataattttctctcttttgatttcttgaagaaaagtccctttcctagtgttattttgagatatctaaagatttgaaacatcgcttttagatgttcttcacaaggggcatgcatgtattgactaaccacgctcactgcaaaggcaatattcagtcgagtgtgtgagagataaataaacttacctactagtcattgatatctgcctctatccacatgagtcccaactttatttttcttgttttgatccattggtgtatcaacaggtttgcagctgagcatactttctttgagagaccatgataccctctttactcattgttactttcattccaagtaagtaccttaggggtctaagatccttaatttcaaattctctagccatagtgcctttaagcctttccatttccttaagatcattatttgtgagaattatatcatcaacatacactataaggaggatagcttccacttaaggggaggtagttctttttggtcctttttctctttttgaggctgtagccgtcttgtatactccctgtatgctttgtggcgtttagccttttctaatgcatatcttgtttacttatcaaaaaaaaaaaaaaaaaacatacactataaggatgatgatcttactatttgacgagtgcctaaagaatagggtatgattagtctgcctttgtgtaaagctgtgaccttttatagttctagtgagtctttcgaaccatgccgtaggagattgtttcaaaccataaagggattgtttcaacttacaaacaagattatttattccattgtctccaaatcttggtggcaagtccatataaacttcttaatctagttcttcgtttaggaatgccttcttaacatccaactgttgaagagaccaatctaggttggttgccaatgacaagaggactcgtatggtgtttaatttagcaacaagtgcaaatgtctgtaagtaatctatcccgtatgtctaagtgaaacctttagcaaccaaatgcgctttatacctctcaactatcccatttgatttgtgtttgatagtgaacacccatttacaaccaactatagttttcccttttggcaattgaacaagttcctagttattatctttttcaatgccttcatttcctctagtactgcatctttctactctgggatagtcagagcctacagtatagaactcagaatctcaacacaagaaatgttagtagtaaaggttcgaaaagaagaagataaacctttatacaatacaaagtgggatatggggtgcatggtgcaggatcttgcacctttcctaagggctataggcaaatctagatttttagagacaacttgacttggatttttctgggtagaatctaaaatacctggatcgttttgcaaagctttcacattcagttcaggctcttaatagtgtggttccataatatgtagttccccttgaggtttaatctttctactatagacatggagttcttgtctctttggatctctccctgtttccaaaatgtgttgagttggtgacacagtaggttcaactggattgagatgagtggaattgggtaggtctatggatttggattaaaacaaatttctagattcaggttgcttaggggcggatgggaggttaaagagtatcataggagcacgcacttgatggctcttggatcgagtttgcttttgttttggtaatggacatggacaaaggcaaaaaaccaaacgttttcaaaggttaaggaattgagtgatcgaaatgtgggataaggcttaataaggatagacataggtgtacgatactgaaggacatgacttgggagtcggttaattagatagcatgccgtgaggactacttctcttcataggtatttgggtacacccatggtaaacataaaggcttaggcaacttctaagaggtgatggttttttctcttggcaaggccattttgctaaggtgaagtgacacaagaactttggttaattatgccattttgttctaggtaacctcccaaaatagaatggaaatatgcttgaccattgtcagtcttaaggagttggatttgttgaaattaggttttaatcattgaatgaaaggtttgaaatattttgcaagtttcaaaattttcttttagaaggtatacccaacacaaccttgtgtggtcatcaataaaagttatgaatcatttactgcctgaaacattagttaccctagatagtccctaaatatcactatggataatggaacaaggtctcgatgatttgtatggttgcgggaagaaaggaactcgagtatgtttggcaatttgacaatttcacattgaaaggaataagggtctttatttttgaataaatatggaaacaagattttcaagtaaggaaaactactagggtggcttaatttatgatgtcacaacattatttcatcatcagaaacagaaatagatttgaatccaaaagcaagaggttgtctagtcctagaatcctcatccccaaagaaatacaacccttcatgtactttagcattgtcaatcgccttccttgagtgtaactcttgaaattcacaagaagaggaaaatttagctatgtcactgaaatctttggtaagcttacttatagacataaggttacatgatatatttggaatataaaggactgaagttagagtaatattttcagagattttaattgagccttttcctgcaacaattgacaaggacccattagctatctaaacccttagattattagaacaaggagtgcgtgaagaaaacaattgaaaagtacctatcgtatgatccgaagcacctaaatctaattttttttttttttttttataggaaaccacacatgaatatattgatagaaaaagaagtacaataggaggatgaggaatcctcccaccaaaggtgaaactaaacaacacaaaaagataacaaaacactacactatgtcaactacgcacaagcacccttgactataccgtcctattggaactacacactgctagccaatctagttgtaatacgttaaggggaatgcccttaaaaaccgtggaacaaaaagcccaaagagaagcaaggaaatgaatggagtcccaaagattctctgaattcctagctttgtcctcaaatatcctagcatttctttcccgaagcacctaaatctatgattcaaggtgcttttgaatttttttgtgacactaagggctgctattaaattacttgtttgagcaagattacaagatctgacattggtattgggttgttgtgattgattcagaagtttatacgacatgtccatttgttcctttgctaagtgatatttgagtggttgcggattcttcccttttagaggttgttcctgcatctgctgcaatttgaaagccccttccatcactctgtctaagcctccaattggtaggttttccgtgcagaagccagcacttgtctttggtgtggccgagtttgttacaatgatcacaacacactcttcttctagttctctgctccccacggtatccattctcacccccttttgaagccagggcagaaccttccactggggtattgttcgaatccttctcatctcccagcatcacctttctctagctctcttcccttctaacttcagcaaacacttcatcaagaggcagcaatggttcctttccaagaatctttcctcacacctcatctaggtccttgttgagacttgccaaaaaatcaaacatcctttccttcactattgaccttctctgtttttcagtgcactcagggcaataatcggcctctataaataaatttaactcttgccgtaaagcttgaagatcagtgtaatattgagttacacaatgattaccttgtttggtctccttcagtttgcacctgatttcaaaaacctgggctgagtttttgaggtctggacaagttctctttaccgcatcctacacttcctttgctgtaggtagaaataggtacatctgaccaatcttgagctccattgaattaatcaaccacgcaataacaatggaatcttctaagtcccaattttgaaaggttggatcatcttcaggtggcttctttgtggctcccgtcaagtgctctaattttcctatttcacagcctgggaccattgaaaccaatgttttccgttcaatttccatccagtaaattgtagagaggtattatctcttccgtataatagggaagcagacgtagtttgaaccatttgctgtataggacctgaagtggttgctgaagacttgtttccacgatgttgtccaagcatagcagtctttgccatgagattgaatccgacagtctttgccatgagattgaatcaagcctaaatgtgctgcggctccgataccatgaaatcagagaggaaaaatgcaactctcttttctattttataggcttaaatatataggcaatctatttaggaagataattacaaaaaataaaatattcctaagaactaggaaactaagaaacagaaagctaaaaacctagggggttttacacatccttatttgaaagttaaaaaacagataaatactctaataaaataactggataattagctagaatttatccaaagttatctctaactgctaacaaggacctacctgcactatctctacatatgagaatcattgagtgagcttgaaattggcagcatgcccatttaatgtgaaagatccttataacatggctcagtaagatgcatgaggcctaaatatatctgaaataaaagttgcatgagattgaagggatggttgcagttaggtttttttgttctgttgtagattggttggctgttcgctaagagagggagttgtttttttgtgttctctttattttggttgtgccttctgctgatatgagttaaaatcaactcattagttattaataatccaggttttcacatgacaaaacaataaataatgagttggtttttactcattactgatagtccatgtaattatgtgaggaaacaagcattaatgattgtaaattttactttctagcttgtaaaattatggaagttgaacttctaatttctcattatagtagataatgattattttcagttagtagatccagtttcttttcatgaaaatctgtacttcataataatgattttatctttctgattttgatgttgaaattggagtaatataataagtgttgagtttctacctcttgctaatagcagtttgttctttcagaaatcagttctttcaaatctgatacaagagataga

SEQ ID NO: 11469 - DNA, 1289 bp, Vitis vinifera
  Intron number 4 from transcript GSVIVT01007785001 (locus G SVIVG01007785001) derived from phytozome v7.0 (chr-ID chr1 7; pos 9035998 to 9037286)
caggtactacttgcgctttatatatctatatatatgtgtgtgtgtaatatgtatggatatgtaagttttttattttttctatttccaacatatttcaatgtactcaaaatgataaaaattgatttcaaaagaagagggaatttgaaattccttaccactgtagtaaaatacttagatttttgtggtgcttttatgccctttttttttttattgtggtatcaacttgattgatgcttgattattatgtgctcctccacagagagttccctgtttgtatgtgtatacatgcatgacaattttatataatagttacccatgattggaacacctctagtacttcaatttaacattcattgagtttcataaattgtgaaaaaatgtttgtgatattgtctagaaaaatgttgattcatgacatgaaaagaattagcctttattttaatgaaaatcaagccttgtatattctagagattttaagatgatcaaacacaccttgggaggatatattgattgattttaagaattaagacaactcctataaagatgagaagaaaaaaaaaagatactccttttctctgacacaagaagacaatggatattattaccatgatcaaactagcaagaaggattttagttccagaacatgcattgtgaaagtaacctaatatgtggttgtcacctgcctttatattcatgtactatcatgccagacctagaaacatttttttctgtttctctcaaggatattactgttaaattgtcttgttccagagttgtcgagagtagagctttttgctccatgtcaacttttgaggccacctataaaggagcaagaaagttttttattattgtttatatcatgttatgtacttatgttagcttcagaatgaccttaatgaaagactgtattttacttcacagcattccacttaccagaatcaaatcaattagcttaatctgcagtaaaattttaatattaatgtaaattgcttaaaatgaaccttctgagctttgtaagcttgcattctgctagctggaaatcagtatatttcaaaataaattcttgttcgatgttccatgatttgtgtattacatataggtgcaactctagaatttgagcatggtttactgagattgagaaacaattttccagtctgtgactctgatagtgatttttatatcattattattactactactactacttctcttattatttataataatatctatttttatttgtgtgtattattttgacaaaattttgtttgaagacctatctacaaaac

SEQ ID NO: 11470 - DNA, 5663 bp, Vitis vinifera
  Intron number 4 from transcript GSVIVT01036788001 (locus G SVIVG01036788001) derived from phytozome v7.0 (chr-ID chr1 9; pos 22532721 to 22538383)
gctgtttcactatataagaaaatggaaagcaaagggtttaaaccaaatgatgttacatttttgtcccttctttttgcttgcagccatactggattaactgctgaaggatgtgaatgcttcaataatatggttaacaaatacaatatcaagcccagagctgagcattattcttgcatggtagatctctttgcacgtcaagggctgttagaagaagcctataatttgttatgcaagatagatattaagcataatgcctctctttggggtgcaattctaggggcatctagcatctatggctatatgtctcttggcaaagaagcagccagtaatctttttaatatgcaacccgagaattctgtcaactatgttgttctagcaagtatatattctgctgctggcctgtgggatgatgcttggaagataagaaaattgatggaagagagaagtacaaaaaagaatgcaggctatagttttttccaagcaacaaagaagagcataccgctactgcaggctagttgaaatacagaagtctgctgtcattttaattctttgaggaattaatgatattgacaacaaaattgtgcaaaacacctgaatcattgtgaatgctgccatggaagttggagctgcctttacaaatatcatatgtgacaaggacttcagaatagtccgtcagtgcacttcaatacctgctttacgttctcatattccatcaagtgtttcaaaagactcaggtatttacccatcctatgaacttttgctagtcatttcttaattggttacttatattctcggctgaaataatgtgaaaaacaaaattgaagctttttgaatgtgtattttccagatgtttgcttcataggagcataaaatcatccactgaattacttacacaagatttcttgctacatgctctacacaatgtgatttagtttggacaataaaaaccaagccatctgtaaaattagggatgatatagttaattgcctttatcctagtgcttgtttgtttctttttttttctttttttttatatgtcagtttccagtgtgtccatggaacatgaagtaagcaacttgaccactttaatttctccacaactatccctgtgcttcattgctcttaaagttgccttattgtagctcaactattctctgttctgaacttatttttgcttatacttttaaggttaatagataactaaattgtctgtctgcatccaaagttctgaggctgacctggaggagagatgctccagaagaaacccaatcagaaggagactgatgcaatgattgttcaagaggcaaagcagatgtgcagcagcaatgtaactttcttttatcataatcattttatttgattttaccaataaattttaagattttttgagaatagttaatttcaagtggtcctccagtttcacttctagataagaaattgaaaatcaaaattataggtgagcactctgcaggtgctcactgaagtcaaatacgattaaactgattgatttgggtggtattacatttgataatcagaattgcagccctattgtcttctcaaggcattagagcacctgagaacattctatgtaagtagttttcatgttgacaaaacacaaatgatagcttatgtttatatattgctcaattgaattccataagtaacctaagtttggcagcaaacatgcctaattaatatctttttgagtatatcatctaaacaccaactccaaccaaggcttaatttaatggttgaacaggactggggttgagcaattttgatcttattggtttgtatttttaatctacaagatatttttctttaatattatttctttcagtgttcttacataggtacttcaccaaatgatcacaatgtcaaaaattaaaataaacacatttctatgacacaccatgtatgccatggataaaacaacaccccacatatgttgttaacaagaggacacaccagtgtcctgttaattcaaataggataattaagtcttttgtatattatattcagatccctgctgaaaccttgcagcacaacacttccctcttgctcttatttagctctctcccatatctcaattccttattgtggaattcaaaatgcaaaccctcctacactgtcatttctctgtttcttctctcagtttggtggccagattctcactttggtacatcaatccaaagcaagtccagaaacatatggagaaatcaagctcggtttctgaaccttcatttcatctctgctctgattttcacagtagggtttggcagcttcacatccaaaacttgaggcactgagaatattatagtgttcttttttgagctgagaatattcattcttcagcacctaagtctgcctatatctgtttgatgcattgtttccaatgagtgaataatagaaaagctctctgctagttttttgcccctaatttgcacatgaggcaattgggattttcgatactcccaccactgtcactgaccatgataacttccttgcaggtacagcatggagttagcagaagagattttaatattctggacttcggtgcaatcttcttgtcaaacagaactccacaagaagagtgtcttagaaggaactctctggccttcccactttcctagagccatctcagtataaaatgttaagaatggaatgtttttatttcttcttgaatatgtgatgaaggatgagatattttagacatagatggtgcagttactatggatcaggttcatggaatctgatatatagcactcccatttttcagctgtcttctttcattcaagattgtgcttaaaatcaagctttcccaagttgagaaatctactcaaagacatctgtgtgacttgttaagtgagaaaaggctccatccatctacatgggaattcctggtattccttggaagctgtagttgctttaatccatcaactacttttcttagatacccctgtaagaatttctgttcttggtcctggtttctagtctccttccatgttgctggttttctttatgcacttctttttaccagaacaaaggtttgtaatctgctctgtcatgtaatgcagatgcttcccagacacctttgtgctggaaccatctttcctgcccccttctgctgtctggaaatcgtctgatcaccgatcggtgcagctaaatggtaatctcacagtgtctgtagtactgggttgaggagtgtctccaagttaaaccagatcccatcatcgaatttggcatgaaatcatcagtcaaagacgagcagtagctcttggatccttcacaaatccactagctttcctccagaagattttctggtttttccagttaatttttatggaaaattagtgtgcttctcatgtcttctgattaaattttcatactttagacctgggttttaatgatataggatgaagttggatctgccttgggcatgaggcaggttgaaaagccaaaaacagtggggagccacacagggcaaaagttttcccaaagaaagggaaggagtctgcactgattgcagcgaaggatgggaatcaaaaaggtgattcaaattctctactgcaaattgacatgggcaagtttgaatgggttagggtagagtttaaattcgaacaatactaactcgaaaaatattggattgataggagttgaaatttatttgttattgattttaattatattatttattattatcggaaaaatatcttattttctatttttaataacaaaaaattatttttgaattgtaaaatatgttttttgtttcttttattttattttgaacaatagataattattttgagaaatagttgccagacataaccttatataggttttttaactcaaaaaaaaaacataataaaaaattactaaatttaaacttctttatttttatacatttttttctagttgatttatataaatatgcactaattataaaatatagatgaaaaaataaactaaaaaaaattattttaacattgaggaaaataattcttatttcatgcactaaaaaaagtgtatacctcacattgcttgaaaatatcattatggctatgtttggttcccggaaagtacaaaggaaagaaaaaaaatgctaaggaaaatgattttctcatgtttggttgtcttatgaaaaatatcaaagaaaatcaaatataattaaaactaattaaaaatttatgtatttttaaattatttaatctttatgttgatgagttaaaataaataaaatgagtttaaagtaacaaaaaaaataatttatcaacttttaatctatttttttattttccttcactttttccttccttctactttttctttgtattttctttccctcacattttccctcaaatttttcgggaaccaaacatagcctatgtgtatatgtgttatcactcataccaacccaactcacataagaatggtacatcattcaaccaataaaggtattttaagtctaaaataatattattttaagactaaaataatattactttaagaccaaaacacgtgtaagcatatttttaggtactttgaggtaaatatcattctaatgcatgaaatgagaattattttcctcgaaatgcacttcacataaaaatggtttttttgagttatcttttcattcatattttataaataatgaatgtttaaataattttcccatctttgtttcctacaaaatttctagaatgttgaaactaacccttcaattcgctatcgaaattggggaccaaagcatcaattaacgcttagatgttggctttaaaatttatttttaacataattttaaattaccattggttttctccaatggtataaaaaaaatgtttcaaaagatttttttgagggatccattttagagaactgttttataaaagaatattatttaattaaaataatgattttaatttttgtagatatgacaaaattttctacaagtattttccatgataggaataaaaacaaacaaatgaattctgaacaaacaaactaaaaacatctgtttttttacaaaaaaaaaaaaaaaaattgattatttttccaaatgaatttattaacgttcttgccaaaaccgcagcgttttagccccttgcctcggattactcttctcttcaaccccataaatattggaggtttttgaattgatttcttgtaagccgaatcaatgctcaattttcttctattttccatactgattactcacatatgacatgaaaaccaaaacccacttcctattctcggtttcaagaagtgttttcaacacaattcccaaaaccccagttggaaaaactaggcaatgggcaccggttagtacaattaccaccgcttctgctttgatcaatgaaacaccagttgaaaattttgcggaacaagttaaggatgatgacctcaaaacctctaatgctggttcgaggagatggggctgtttggatggtgatatagctaaggtattcttgcaacaacaacacacagactatggcattcgatgccttaatgcggtgaattttcctctgaagggtttctcagagatcaccagccagatggctggaaaagcattgcatgcattttgcatagtgggttcagtcaatctcggcatttttcaaactaatacattgattaatatgtactcaaagttcggtaatattgagc

SEQ ID NO: 11471 - DNA, 10708 bp, Vitis vinifera
  Intron number 20 from transcript GSVIVT01020583001 (locus GSVIVG01020583001) derived from phytozome v7.0 (chr-ID chr 12; pos 4054140 to 4064847)
ttgtcgtgtgacaccatctcaaaaagcacaggtgctccttgtctgctctaagtttgttgtctcttttattctttaatattttttttgatttatctgatatggtttgtgaagtcagatatggtttgtcaatctgattcttttctccatttcattgtttttttttagatgactatcatttgctggtgtctttatttgtttctgttattgaggcttgatattgtacaaatgtaaacataagatgcaagaggtgtacatcactaattaaggggaaaagggcaaactgagaagaaatagaaatgaggcagatgatgtggttctgatgttcaagtcaaattgggaaaccctatagtattttaaaattgaaactaggatacacacccctactgcaacaacacccatagttggctttagatattcaaaactttatgaaatgtgccaaaaaaaaaaaaaaaaagaaggaaaaaaaaaacactaccataggtagtggaccccgtttatttctgagcaatgcaaccaaaacccagaaggaaaaataaacttacacattgctatcttaagcaatgaaacaaggttgatgttttctatggattaaatggtgcaccaagagtaagaaccagggatttcaactttgagtgcagaaaaggcaccaaaaggatgaagatttaaaagaatgtgtcatatatctgaaacaaacatccaaggcatagatagcatatgatgccaacaggctgcaagctggaaaaagcaatataaaatagagaggagcaggtataatcctgatccttgttaggaatcagtcatttgataactgattttttttcttattggactatgaaactgttgaaaatatgcaggctgtatgtaggctgaaaatatgcagactgatatttctttcctaattatattattgctgtaaatatgcaggttgatatgtaggctataaattctcctaggatagtggctagattgattcaatagtttcctaaaatagtttcacagagctgtatacgcatccctgttgtaatctttacattcgtataagtaaaatttcaatttttccacatggaattagagcagattagagttctgctctaggtttgttcttttggtctattcttttttggaatctgatggccttcattgccctcttgcccggccttcattgtgaagactttcttttcttctctttgctctgtcttatctatattttctctttgaaaaacttggcttcaattgcctagcatcatcctcagatttctgttttttgctacccataatttttttctacaccaacctgtggcattaattgccagactcaccttgctttggtccttattgttgtttatcaccttgtccataatcatggctgattcatcttctttccaaaccacaatcacggcctcatcaaatacccagcctataaacactgcctttacttttcctactgagaatgctaattcccaaatcacaacctgcaaactcaatggccacaatttgccaagttattcatcaaaagcaagagaaagatggactatttgttagggaaagcttccattcctaaggatgatgatcctaagtttgagacatgggaagctgaaaattccatgatcatgtcttgactgcttcattctgtgcaaccagaatcagcaaaccacttctcttccttggaatggctaagaagatttgggatagtgtgacttggtcatatttcaagatgggataaaggatcatgtttatgacttaaagaatcatattcgctctatgaagtaaggattgttatctgtgatggagacaatatgttagaaggattatgattagaattggaccactatcaacagttcaaatggaatcaactgccaatgctgttcaactgcagaaaataattgaagaagacatgatttttgccttcctaactagtttaaatcctgaattagatcaagtaagggttcaagttctaggcaaacatccttttccctcattgaaagaggtgtttgcctatgtatgtgcagaagagagttcttggattgtgatgttggaaaaaccatcatggaaaattcagtcttgcaattcccaaatccaataattattccgcagcagagaagcaagaaggaaggagaccaaatgaaaaggacacaaggcagtatgatttttgcaacaaaccttgacacacacaaggggcctgttgaaatcctcatggaaaaccctcttccatccggaaaactggtggaaaatgagagaagtctggccagaaacaaaatcaggttttttcagtggagtgtaagaagaaagaaacttctatgggcagaagagtttggaggattcaataagaactgttgaatataatgtatatatagtgtacagtctttccttttttaatataggttacatgtatggtagttagttcttctaggcttgtatatatatatatatacttctcaattgtaagtagttaatcacatgaatgagaattaaggtttttcttttttctctctctctcaacgtggtattagagccaagggagaaaacctaattctttccagtttcccgtgtcatcaactccgggaaaccttccggtgaccgtgtttcattccggtcaccttccccatctcccaatattttacggttagtcggattgtcgtcagaaaacactcaccgccagcaaaattttccggtgaacttttccggcgacgtctttttccgacaccgaccataccagaaaagagcgcctggaggagatctccaacttttgtgaaggcaccggaaccaaaagctcatccacgcgtcggccacgctcaattttccggttggcgactgcatctcacacgccggcgcatgagggcgcgtgaggccttttccggcgacacgcctcttcctccagcttcacctgacgccgaccaacctccctacatccctgattctcccatccgagccctgcacgtacctcttttggggatttttgtctccgtcagccctccaaacagtcttttcggcgaagctccggctactttttctccaccccaatccctgcacgtgccttgggaagtgttcttctaccttcctggtggtaccacgccgcgatctgaggccgtctccctttttcggtggtgccacgccgcaatctgaagccgtattagggctctcttcaatccaaacatacttcattctccagataagtggatatggctactaaaacttccattttttcctctatcatatctggatctcctatgattacttcggagaaattggttggcagtgaaaattatctttcctggtctgcctctgttgaactttggtttatgggtcaaggatatgaggaccacttggttacccaggaggcagatatccttgaggttgaccgtgtacagtggaggaagatagatgcacagttatgtagtgtattatggcaatcggttgatcccaggattcttcttcatcttcgggcctacaaaacttgttttaaattttggactcaggccaaaggattatacacgaatgatatccagtgtctttataggtggcttctgctattgtccatatcagccaataggacttggatctatctacttatattggtcagattgcctctcttaaggaggagtttttgactgtgatgcctcttactcctgatgttggggctcaacaaacacagcttgacaagttcttcatggtccttactcttattggcctccgtccggatctttagcctatccgtgattagattcttggtagttcattagttctgtccttggatgatgtgtttgctcgcctcctccgtatcttgtccactcagactttgccatctgatagcacttcagattcttttgtgttagtttctcaaactacctcttgagaaggacgcagtggtacccgaggtagaggccaacgtcctcatcgcacctattgcaataaacttggccacactcacgatcgttgctatcagttacatggacggcctcctcgcactacccatatggcccagtcctctgattctccgctgcctcagcctccgagctcctccgcatctcaaatatctcaggcttctattgcctctgttgcccagcctggtaatgcctctgcctgccttacccacacatcttctcttggaccctgaattctagattctgaagcttctgatcacctatctggtaataaggatcttttctcctctattactactacctctgctttacctactgttaccttagctaatggttctcaaactgtggctaaaggtattggtttggcccttcctctgccttttctacctctcacttctgtcctttatactcctgaatgtcgttttaatcttatttccatcagcaaactcactcgtactcttaattgctctattaccttttctgataaatttgtgaccttgcacgaccggagtacggggaagacgattgacataggacgtgagtctcaaaggcctctatcacctcacctcggattcatctcttgcagtttgcatttccactgatgctcctctcctcattcacaatcgtctgggtcatcctagtctctccaagttccagaagatggtccctcgtttttccactttgtcgtcgcttccgtgtgagtcatgtcagcttgggaaacatactcgtatctcgttcccaaagcgtttgaataatcgggcaaagtcttcttttgagcttatccacactgatgtttggggtccttgtcaaactgcgtctactttaggatttcagtattttgtcactttcattgatgactattctcgatgtacttggttatttttaatgaaaaatcgagctgagttattttctattttccagaaattttatgctgaaatccaaacccagttcaatatttctattcgtgtgttacgcagtgacaatgccagggaatattttcagccccatttacttcgtttatgtctcatcatgggattcttcatcagtcttcttgtgctcatactcctcaacaaaatggggtagttgaacgcaagaatcgacatcttgttgagacagctcgtactatcctcctccatagtaatgttcctttttcgtttttggggggatgctgttcttaccgcttgttatttgattaatcgtataccctcctttgtcttacacgatcagattcctcactcccttctcttccctgaccaaccactttatttccttcctcctcgtgtctttggttgtacttgctttgttcatattctcactcctggacaggacaagctttctaccaaagccatgaagtgcctcttcttgggatattccagacttcaaaagggttatcgttgttattcccttgagacacatcgatactttatctctgctgatgtcaccttctttgaggactcaccattcttttccaccacttctgagtctcttcctgtttctgaagtcttgctccttcccattgtctccccagctgatgtcgtgcctcctcgaccacttcaggtttatcatcgtcgccctcgtgtcgctgctcctctcctttttgctgaggcacctattgactcacttcctaccccttcggcttctcctgtcccggctctgccttctcttgatgatttacccattgctattcggaaaggtactcgctctactcataatcctcatcctatttacaattttttgagttatcatcgattatcttcaccctattctgcttttgtttctgctatatcctctgtttctcttccaaagagcacccatgaagctctttcctatccaggctggcgacaggcaatggtggatgaaatggctgctctgcactctaatggcacttgggatcttgttgttttaccctctggtaaatctacaattggttgtcgttgggtctacgcagttaaggttggtcctgatggtcaggttgatcgctttaaggcccgcttagttgctaaaggctatactcaggtttatggttctgattatggtgacacattctcccttgttgccaagattgcttctgtccgtctgcttctctccatggctgctatgtgttcttggcctctttatcagttggatattaaaaatgccttccttcatggtgatcttgtcgaggaagtttatatggagcaacctcctggttttgttgctcagggggagtctggtttagtgtgcaggttacgccgttctctatatggcttgaaacaatctccttgagcatggtttggccgttttagctctgttgttcaagagtttggcatgcttcgcagtacagcaaaccatttagttttctatcatcataactccttggggcagtgtatttatctggttgtttatgtgaacgacatcgtcaatacaagtagtgatcagaatggtattcagaaactaaagcaacatctttttacccactttcagactaaagacttggggaaactcaagtatttcttgggaattgagatagctcaatccagttccggtgtggtcctttcccaaaggaagtatgctttagacatcctggaagaaaccggtatgttagactgtaaaccggtagacacacctatggatccgaatgtcaaacttgtaccaggacagggggagcctttaggagaccctaggagatatcgacgactcgtaggtaaattgaactacctcaccattactcgtccagacatttcttttcctgtgagtgttgttagtcaattcctacagtcaccatgtgatagccattgggatgccgtaatccgcattcttcgatatatcaaaagcacaccaggccaaggtgtgttgtacgagaacagaggtcatactcaggttgttggttacacagatgcagattgggctggctcacccacagatagatgttccacttcagggtactgtgtttttattggaggtaatctaatatcttggaagagtaagaaacaagatgtagtggccagatctagcgctgaagccgagtatcgagctatggctctggcaacatgtgaactcatatggttgagacatcttcttcaggagttgagatttggaaaggatgaacagatgaaactcatctgtgataaccaggccgcattacatattgcatccaatccagtttttcatgaaaggactaagcatattgaagttgactgtcatttcattagagagaagatcgcatcaggatgtgttgctacaagttttgttaattcaaatgatcaactagcagacatcttcactaaatctctcagaggtcctaggattaaatacatttgtaacaaacttggtgcatatgacatatatgctccagcttgagggggagtgttgaatataatgtatatatagtgtatagtctttccttttttaatataggttacatgtatggtagttagttctcctaggcttgtatatatatatatacttctcaattgtaagtagttaatcacatgaatgagaattaaggtttttcttctttctctctctcaacaagaacaaccagaaaaattaaaggccttcctagacacgcctatgtgctcctatgctcagcaaggagatatctctaaaggcttaattgctttttcagattgttgtcctgacccttagaccattgattcaggggcctcaaacaatatgactggatcttcccatttttttcccaactatctaccttgtgcaggaaataaaaaagtttcctactggtacgagtgttctattgctggacaagtattgattcccttgaccagaaccatatccttaatctgccctacatgtttctaaattgacatggaatctggtttcaataacaaagcttaccaaagacctaaattgctcatcaacttttttccctcatcctgtccataagaattaggaaatggggaagatgattgggcatgctaaggaaagtggtaggctctatcattttgaaaccaatggtggaaatttcaatatctcaagcatggcttgttcattgaaagaatcgaatatcttgctctagcaccaaaggctaggtcattcttcattgtctattatgcaaaagatgtcttcctcttttgatttcaataaattatcctttcattgtaaagtttgtgaaatagctaaacatcatcgaattacttttctatcaataaatgaaagatctttggtgcctttcagtctcatttatattgatgtgaggaaaatctagaattcctaatatctttggtgcaagatggtttgtcatttattgatgattgtagggtaataggggtttatcttctcaaacacgattctgaggttaataaaattttccccatttttcaaaagatgatttataatcagtttggaaaaaaattccacattcttcatatagataatggaaaggaatatttcaataatgagttgatttcttattgccaaaaagaggacatcattgtacagtcctcatgtatactcactaacaagatggagtcagggagaggaaaaacagacatttgcttgaagtggctaaaaccctagttttccaaatgagagtgccaaaaacatattggggggaagctattttgacagccactcaattaatgaataggataccctcaagagttctcgattttcaaactccattggcatatttgagtcatttcttcccttcatttagaaactttgggaatcttcctcctaaagcattcgattgtgtctcttttattcattttcatagccaacacacacacacaaaatcaatcttgattctagagctcaattgtgttttccttgccgattcacctacataaaaagggtacaaatgctatcatcctaataggaaaaaggtttatctcaccatggatgtcaattttgttgaaaatcaaccatatttctcacacttatcttgagggggaaaatatatatatgaagataaggatactaaatatgttctgccttcataaatagtctctaccaaatccagattctgatttttcctcttaagtctctcattacatttgaatcattgttcatacaagaatctctcatttcaaaaaccaaactcgatcctattgttccaagggtggacttgccatataaaggccgataagttgtctgcactcaaggtttactcttaaggaagaaaaaccccatcatggacctgatgcgtactcaaccattagaatgggactagataatgttgatcctacttcagtggacttatgtgcttccaataatgatttgtttctccctattgcacttaggaaagggaaagaacatgtacttagtaccccatatccaattttttgtcaaatcataaaatatcctctccttttaaatcttttgtctcttaattgttcaccatagaaattcttaaaagtgtcaaagaggcccttagtaatccaaattggaaagaagctatgttggattaaatgaaagccttaaagaagaatgaaacatgggagatagtagatttgcttgaaaggaagaagcctgtaagctgtaaacggatcttcacaatcatgcttaaaattgatggatctttaaagagatataaagctaggttggtggcctgagtgttcactcaaacctttgggatagattactaagaaactctttctcaagtaattaaaatgaatatcattataattttaatttctcttactactaatctaaattaaaccttgtagcaatttgatgtaaaaaattattttttccatggaaatctagaccagtaggtctgcatggagattccatatggtttcattgatggattcaaaaggaaagtgtgctgactcaaaaggtcattatatgaccttaaacaatcctctagagcttagtttgacagattttccatgatgaggtttggatacagacaaagtcaaggtgatcatacacttcttattaaccaaaaggtctccaaataaagttgctgctctaattgtctatgcgataagaagtgaccaagatgaaattgaaaatttaaagcaatacttagctagtaaatttgggatcaaggatttaggagggatatttccttggaatagagatgacatatgaataaaattcaaatttctccacacacggaggagaaaaaggattatcattgttgattaagcatgactgtgcggagctttgttcttccaaaagctataacatttggactaatatattaaaatatgtctgttttcctttacaaactgatgatgcctctcaatatgtttttctccttgttggtctagaaaattgatgcttataacgggtgcaaagtatagtggatatggtgaaacaatgtatattgttgctgaagatctttaaaactaagccagtccctagattttctttctttggatatagcatcttctatataggttgtttagcagaccttggtaggattttgattcttactggttcctctatttttatactgaggagagaagttgacctgagattggtttctttctttcttcctttctttctctctctctctctctctctctctctttcttcttcttcttttacttattgttttgtattttttaaaaaaaaaaattttgattggtaaatagtatgatatgtataaaaggctcccaacagaaaatggggcacaatcctcagtaactgagagaggattctatagatgtgctgttcttgtttaccaactgccaaacctagcattccattacagagcagttgacaatacaatggttctattgctttattaatgcagaataacactttatacttgcttctttcatttttagggtgcagatgataattatgacaatgatttttattactttgttaatatagaataacattttgcagcttgtggagatcttaaaatc

SEQ ID NO: 11472 - DNA, 2801 bp, Vitis vinifera
  Intron number 3 from transcript GSVIVT01022400001 (locus G SVIVG01022400001) derived from phytozome v7.0 (chr-ID chr7 ; pos 19682720 to 19685520)
ctagatcattaaggtcacagggggcggttgcaaaggtaggtgcatctgaggctgatattctcttgtattgaatggaatatctaagctggaaagaatggaaaaatcaattgtgagtgggaagttgcaaacgaatgcacttgtgttcataatgctttaaagttccttaaccaatagaatatcaggaagggccacccatgtcaataaaaaaaattatattgtccaaggcaggaaaatagttttcagatgctatgctgacaatgaaacagattttgttaggtttccaatagggcctatgtgcctctcttcgatttagattttcttttgattttatttcatcatctagttagatcagcttttacatttgttaggttggaggtaggccttgtgtctagagggaaaccatatgcacttgggcagttgcatcaatgtcttttttgtagcatgagttgttagcacttcagctagcatgtggtgtattggcagtggtggattgccatcctctccaaagagtttgtgtatgctgtgaatcaatgtgataagaaaattctagatcatctgatttgtggagtttgccaacaaaggtaagagacaattggtaccatctaacatggtagaccacagtcttaattcatcattgagtgtccgcattagtaaccaaaagctaatggaagacaagaaaaaaagtcatttctgacccttttgtttcaaatatagcatctgttgctgatagatatctttgaagacaagggccctatttggcaattgttatttaaaaattaaaacaattttctgttttccaaaaaagaaaaaaaaaaaaaaaggaaaacatgtttgacaataaaaaaaacaaaaaaaactgagtgtttttagagaacattttttagttaattttagttgtttcacttgttttatgagggctattttaaaaaataattatacaaatatgaagaatgattaaatataaagcactactaataaaagttatttttaaaacatatttaaaaacatagaacataggctaagaacatttcaggttcccaaacttttgttctacagaatatcaaacaacagttttcaaaagttgttatgaaaaactgttttcgaaaatatttcccaaacaaagcttaggttgtttctgaattggttggtcaattacacatatgttggttgttaatataagggatcaactttaaggtcattgtcatgaaggtttagttcaaaaagatttatgtggtaagggcagaaaattagggaaaattagagtaattgaagtagatgaatgctaattggggcttaataaggcttaccattaggataaagttttaacactgctcttatgatagggattaaggctttctaaggactttatttaaggctaaaggtcatagtggtgggtctggatgaaggtttaattgattagacaaatggttggcttatactttaaatttggacgtgatggcaactaggattgggagtagacttaatatcctgccaaggaaggaattaattgaagggtgcatgggaattgaaagtatgtctggatgctatgtaaagtagggatacctaaatgtgacaacagctaggggtagtaacgactatagctggatgagagcagaaagaaaaataggtgcaatggctgctggacaagatccaagtttgacgtaaaatgttgaagatcaaaggtaaataacagccacgttccaatcagaagaagcctgtcagggtgtggcctagaggtaagggtgagtgctgggatgtgtggatgaggcgcacggtcttgggatcaattcctgccactgggaatcgttgattaccctgtgttggctatggcagacaaggttagccctacggtttggtaagcatgggttgacccaaaggacctttgccatggtgaggttcctgttatttaaaagaaaaaaaaaattccaattgaacagaaaataatagggaagtaaaagaaagaatatatacctattatgaccacagtactaggacctaggcataacctctataagggtgtagatttttctgtcgcatggaccccagcagagaatctgtaatgatcattctactgatcaaaaaagaggtttacaagcctatgcataagcctaactttaatccaaccgtaatttctgaatgatcttaagttaccagatgggttaaccaatcaaaatagagggaagaaaaactcttaacataaatatctaggggctggctaccaaatcagatcccacattgggctggttcctcctgggtccgcaaaattgatgtattatgatgggtgataagccctctcttggtctgcttatacaccttaatggcactctattggtattaattctgcaacaacaatacatataccatttaatctgaaatgcaaatgtagatcagcagatatggccttgtcataattgaggttgcagaaaacaagggaagtttgtttcatgttgttgtcctacagtaaataaaagaagatatgcaaatattgcacttcttcatagttcaagggaccttctatttcatccttcatttcttagatgcattatattgacaaactgttgatgatcttttttcatgcatcatgctttttcatgctgttaaggtacacttagtatgcctactgcaattatacttgcaaattcttggtgtcttaacttttatactcttgtcattctgcttagtacagtcagcttaatatggaacttcactgctcagtgtaagttttattatttaacagtcttactaagaagtgatataatattgcaggtttcagaagttagcacacgtttaggtaaagctgg

SEQ ID NO: 11473 - DNA, 4932 bp, Vitis vinifera
  Intron number 1 from transcript GSVIVT01035488001 (locus G SVIVG01035488001) derived from phytozome v7.0 (chr-ID chr4 ; pos 1703300 to 1708231 reverse strand)
gtcatcatcggaaagctgtttatcgtctctgggttcgacaatggagccattatcggattgttgagattcggaaaatccaataattggagtagaaggtagcacaaactaatatctcttcattcctcaattatctatctttagtgattattagcctggtttaatgctaattgctctctcatggacattgactgactgaatgaaaggtaaggaacatcttcctgtctgtgacttcaatccaaatattttctgccacttctacttaattttcttctcgtttatggttatgtgtttgtatgtggcctaagctctatcacatgcacattagtgtttgcttgttcttttactttctgccttaacatatttttttggaatacttcaaattattgcaaaaatttgttcgaaagtatcttaagaactgaccattaattgtgtttcagaacataatctcttattatatatcttctttgaaaatgtaaatatgaaaagatccgtagcaagtgattagttgtgtttcagaacataacctcttgtttaacttatttggaaatgttaatatggataattttgtggcaagtggcagtggcagtggctaatacttcaaattattgcataaatttgttcaaagttctcttaagaattggccattgattgtgtttcggaaaataatatctaattctttagaaatgtaaatgtggcaatgtttggatggttttgtagcaagtgttagtattgaattctttattagatgcttcaaactacaaaataacagtaagccccaaaagaaaaaagaaacaaaaatcttgtgctatattctgaggattccaatcaaaggccttttcagccgctgcttcctcttgttctttcgatcaggcatagatgctgaaaagttaggttaaaagacttatacttaaaagaaaaggcaaattgcttgttgttatctgagcatttgatttaggagtattagataaatctgaaagagaaactgcagacgagtgcctcttctgctttgtaccaagcttctgaaagagacccagtatgttttagaaaatatcttgtcgcatagtggcccagcctctaattgttggaccccgtttgggtaggatgctgacttgtacctagcagtggttggctaaagataagggtttgattcaccctcatccacctgaaaacacatttatatattcacatgtttttagcatgtcagaaaaaggaaacacagtatatattcttcccaagtggtaatatctgctttacatgaaaggaaaccacttgtaaaagttgaaaatgcaactgaatctatccaaatgatccaagaatttatcaaattgtataggggaaatgattgtatgtgattgatctggttggttggttgtctggctgaaagggaatataattagagggaattatgaatgtcttcatgccggtcattctttattagcattaaaatagtagttaaaaccaccccatctcccgaagctccaggtccccatcttttgttatgagttcaatcattcatgatatggtcccatgctagttctagtctctctcttcaagtgttaggagtttgttaacttggttaagatttgatttctttcaacttaaaagattttgggaataagaagttgaatttcatttcttgtatgcaataatatttttcactttttttttttgatttctttaaatgtttttttttattattattagagaattttatattattttagaggtcagatgcttaatgttttaccccagaagagtttttaagaaagattttaggattcaaaactactttttatagagcttaaatatggcttaatgtgagagctatacccatcatagaatttttctgtgttattatgtcatatacaagtttgaatttagaggactcgagaatgagtagaaattaagaattgcaagttgcaaaagaaaaatgatcatcacatgcttttttcctggtggtttcaatttgtcgcctctttgataaacttctataaagaaaataatgacattaatgctgcaggatcgttttcatcttcggttcaagatataagcttcgattctaagatgaaattagtcattggaatcagctaacatatcagagccaataatttctatgccagcctgcgactatgggattcagataaggcggccttcagtattaatcgtttgtctttctgtcaaccctttctatataacagtatgtcgtcatctgcaatcgaacgacttactttcaaacattcttccattggtttgcgtcatggctgatgagaaagggaagccaatctggttgaggcttctcccagtataaacttgaaaagaacgtagccaatcgaacatccttgacttgctttaagtcatggaccattcaggactaccttgtcagaggattgaaaactacaataacttttttttttaaaaaaaaaaaaaaaaacgagcttctttgagataattcttcagcctttgaaaattgttatagaaaccatttttttttttgtaatatttttagaacatttttttagagcacaaaagaattttataactcataagaaaagattgataaatttttaataaagaaccgttatatatatttaaatggtattttcataaaataaaataaaaattgtaacttgtaagtaacaattaaaaacatggtttgtattctcgtatattttcccaatgataagttgagaaatatttttttggatattgaattctcaaataaaatcttataagcatagaaaactgttttttgatatttaaattccaaaataaaaatctattctccgtaacaactggagctccatttttatgaagtgttggaattcttaaaaattgttattttaataattgtttttaaaaatatttccaaaaacagccttaacatgttttatttatttatttattttttatcaatgaatgaatggagtataacataattttaaattaaatataaatttgattttgcattattattttttcaaacgtaaataaattcagatgaaaaatatagagatcaagttcatagagttttatataaagattcttaaaatttgccttctaacgattgagttagagggtgttttttttttagcttcttgttaaaattaatttactttcagattttaggttttttattttttttattttttcataacttattataaattttttattgaatattaaaaatcaaaatatttggttttttattaaataaaaaagtatttgtattggtttttcttactttttaatgtttaatataaaaaaaacaaacaatctcgtacttaaacattattaaatattaaagttttatttaaaattaaataaatgaaaaaaaacaaacaccgcctcatacttaaacaaaaaaaaatgcttaaaaattttttaaataaaaaagagactttcctatttcaaaacacaaataagttatattaaaaggtatgagcaggggtgataaaatttgatataatttgtcaacatgactcaaaaccaacatgttttttactgggttaaatattgtataactcatttaatgaataaataattttctagttaacttgtaaattaaaccatcctacatattaatataattataattttaaattgtttaacccgactcattttaaatttatttttaaatgaatagatcaattaaattataaacatatttaattaagatattaattatataaacttatataagacctaactcaatttaattattaaagatgatgtatcatctatttaataatttaataatatttaagtttatattttttttacaggataatcattttttataaggtttttattgacttgtgtgataaaatacttaaactttgacgtagcaaaagtacacgacccatcgacaaagatcatcacccttaaatataaaattcacgactaagaagatttcaaagttgtattaaaaaattcttataaactatatttaaacatttaatatcacatttcgcaatacaaaatctctttcagcagagattataagcaccatttttaacattgaagaagtttgactaaatagggattaaataaccatcgtttgctgcttctggtcttatagaacattattatacaatcaatttatagaagaataatttttaaaaactaacaaaattttccttttttacatcctttataacatcttatagtcatatagggctcctaaaccaaagttgctgtggactactatccaaacggagaatgttggcgggcttggcatgaattccagaagaatttggaaaaggtagccgaggtccttccttatttgtcttcatgtttcattacatgtagtacaattttgaccttgtactgcatctcccacattgaaaaatgcacctccatgtttcaacatttacataattgccattgtccctatacactcgaaattcaagtcctaacgttctaaatcagacaaatcagtatcattataggtaaatacattatatcaatatatcatcattgatttcaaatttaactgattaagacgtttataactattttcagtaattgcttacaacactttattaaaaatttatcaaatatattttctaaatttaaaaaattattttttattctgataaaaaaaagataattattttcaggaataatattcaaggactaaataattatttttattatgtgagtcatcctatctaaataaattatattaattgttgggtccaaattttatcttaccatttaaaaaggcttttagtctaatcaacccaatggcaatttcgtaaaaagaatatatcctgagggggactgcacaaataaatacaaattctcgcacgcacgtaccagtactacacacgcgagcttccgtcgggaggatattattatcagcgtccccaaagacgccattacagagctcagaagatcaagcttttttcatctctctaaaactcagcgaag

SEQ ID NO: 11474 - DNA, 22178 bp, Vitis vinifera
  Intron number 2 from transcript GSVIVT01028389001 (locus G SVIVG01028389001) derived from phytozome v7.0 (chr-ID chr7 ; pos 6971675 to 6993852 reverse strand)
atcttgagcagcagccagcctttcatatctttgcagtttcatcacttattgctctttgcttttcggtcacctccactgtcatgtttcttgccattctcacatctaggcatcaagaaagcgattttgggcaagacttgcccataaagcttttgataggactaacctcccttttcatatccatattgtctatcttggttactttctgcgcaggccacttctttctgctcaaagatgaactcagtgttgctgcactcccagtgtatgcggtaacatgcctgccagctacattttttgctctagcccagctaccattatacattgatctcatatgggctacttttagaaaggtggcacagcgctggaaggaggaagctgactagggtttcatgattttacattctatttttgagcttggtggtgatttttttttttaccttggttgattcctagaatagccacgcttttgatggccaggggtttggtttggctcctgtttttcttattttacgtggaaacgtctgatcaaaaagaaaagaaaagaaaatcttctgttgtcatagtaatgttccttctacttttttttatatccattttcaatgggataaactttatctttatgaccggtcaagaaacaaaacaaaatagaaaagtgagcacaggaccttctttttcttttcatttttgtacatcatagagaataatagttttgccttttttatcatgttggagaagacaacacacactagattttagccacaaagcaaatcgaaactcgaagtatattaactcaagcaggtatgtgtgagcaggaaatcaaaaaggctatagaggaagtaattaagtagggcgaaccctcttgaggaaatagcatgaaaaactttactaaggtacaaggatcttaaaagatggttgtgggcaacccatgttgaaatgactaggaattgtgttctcgttgttatactgcaacactggctccatacaagagaatgagttgttaggaaacttcaagttaattaaggaagagaagaaggttgtaactctattccgaaaggagtagtgaccttcaagggagcaagagtaaagccctcactctattcaatggtagactttagagagtgatgataaaaaaattgctaaaacgaaataaataataaaacaaaaattaagattcgaagaagagttatgtcacatcttattattttctcaaaaaccttaataattagtaaaggagcactttgttgagacattctttttattttggacataaaaaggagactgataaatatctctctttctattttgttcttttttctttaaatttttgttgtctatataatattttccttttattaatgaaattcactaaatacaaataggaaacaatgacatagagttattctgtgaactcatacgtccacgtacttaaaaaatatttgtacttatggtgttccatataatttcttacatgttttaaatgtgtatgcatcatgcttaattggatgcacaatttcgcaaagctatgcatccatgacatccatgggagtcattccatggaacttttccatagtggccgagctagatacttgtgtcgggttgggggcaagaagaaacatattatattattgttataataattaatgatatttattattattgttattattgttattaaaatattaaataattttaaatattaattatgaaaatgtaccgaattaaacaatcatagtactatgaacattaaaaaaaaaattagattctatacaaaataaaaaataaaaaattgttaagaacatttagaggaagatatcaaaagaaataaaattagaaagaaaaaacactagaaattttcaataattttaatcattttgtagcaaaaacccttaaaattattttaaagaattcaatcatttttattataaattttgatatttttcaaatggaagaagtgtgtgcctttaggtctcattttcttataacccggtttcatttatctataccttaatatctatctttgtatccacgtcaaaagatctagatttttctatatattttcaaaagtgaagattaagattaacatgtaagggacattccattttcttttttcctttttttatctttttgttttttttggttgaatgagatttgagaaattttcactaagtcttgattcaaaactactttagctggtccaagagttctaatttattttttaggggtcatcggattttgagttgatatgcatactcaaatggtgatgttattttcaattttgagtatctatatcacatctgaaaaaatatcatcttctaaaacattttatactcaaaaactccacaaaaatgttattattctataacccacaaaaaaaaaaaaaaaaaaaccttcaataaaatggtcatgtctttttagttcatatttcctttatgacactaatgtctttttagtttttacttatctaaaaagccctcaatgaataagatttttttccctttatccacttatatatagactcatgttatcaacatgtatgcatatattcatggttataaaaaataaaaaaataaaaaacatttttctcctatttctaaatatctgtttcctcacttgtctttctcatcatgagattttatttggttttgtaggagttcatcatttacgaatgatgcaaggtagcatcgtaatgggatcgactacccgcacctctcgcatgctaagttagcactctatcatctgagctacatccccatgacatgagtagtgccttgaattagaacttaggaattgcctaattgaaacaaatatacaatattgtttacatctatattacatttaaaagtaaagacaagggcattctctaattaaaatttaaaaaaatatcataactatcttttatctttaataaaaatatgatttcaaaacataaaattaatttccatgatattagtaactacttgaactttttctattaacaagtagaacttccttctaaattgaacttaacctctcaatttgaatatcttgagttggatgcaaattcagtttgaatgtttattaattgagttgaatacaaatctaacacatccaattcgagttgtagtcatatttccattattaaatgtagaagtttaacactattgcaaatagagttgtaaaatatttattataatattactatattttaaataatgctacatactattcctaaaacaatatcgtgtcactctattcataattatgttattcattggaattacatatcttatttttattttatcattttgcttttaatattaaatattgataataagaaaaccatgcactcattgtatttaaatctttctaaattttcaaaatttttgttagttttatttctctcttaattttcaagagacccatgcaaattttcaatttaaattagatatttttttacaaaaaaaaaataaatcaaactttagaaggaagttttaattactacattatggtatttagattcaagaaacttatttctttgaactctctaagttatttctaagtcaaatttaatcccgaagtggggaaattatttttaatcactacgtcatagtgtttagattcaataaacctttttttttcaattagattttcttttccaacaataagttccttaatattacaattcatgtcaattttctaagacccataaaaatgaaattattcattcaaatcatgtttcttaaacatacattcaataagagagttctttttattaagggttttctttaatgttacattcttaacctttaattcataactctcatgatacaaggtattatatgcctcttaaagaatattatactctcctttttcttcatcacttgattcaatgggactttttattttagaagatgagagaagactggtagtgttgacaacaaaattattattatctttacttttagttggattatggaattattatcatcaaacttacagtcactctaagtcacatggctttcttatcttttcaagtgtaaagcaagtgtcctttctctccacaattaaagtttgcttccttttccattttcataaaaatttcgaaatttttagcaaactttgaaattttagattgattgagaacttgttcactctcattttcaaactcaattttttcttttgaagaagcctttagggctatccttttaggtctctttaagggttggtagagtaatctcataggtgtatatagagcctacaagttcatatgctctcattaagcccacattttttactttcctttatagtagtcactttaggtctaaatctcttaaagagagaacacaatattttttttaccactttagagttgaggattttttttttcttctagattgaataagaattaacaatacaattgagtttagtatataactcaaacaatgaatgtctcatcatctttcatctttgtgctttcaaactttgtagttaacatttgcaattatgataactttacaatagaagtgtcctcatgtgttactacaataaatccaaactcatatttcactatagtccaaactctttcatcttgtattttaagaaaaaatttcatttggactttcaagttaggccaattactcctatcaaagaatggagtgcaatttatagaaatcccaacactctatggttccatttatcaagactagcataaattgataaaaattttgaaaataactttttcaactatgataccacatgaaaaaaatttaatgttcaatcttaatataatgaaactacctttattacctactttaggttgatcccttgatattaattctttagtaagaacaaaaatcgcatgcatagataaatagaattgattccacacaatacatagggtataacttagaaaatctacctagcaacctattaggagtaaacaaccctgggtgatctcttgaccgctatataatctactaattataagaaaaaggtacatagctttacctaatcagatgtcctatactcccttggatcttatacccatgctccttagtgaattccacaaaactcttatcaaagttttacaatgagatcactaacttttattgaagtcggaagttatttttaaaaaagatcttaaaagtttgagagttggaagatcaaaacttttttttatgaatggttgtgctctctcaaggttcataaaaggtttttacttttcaataaaccatatctctatttatatttgtaaaaccctttttaaaataatggagaatttcctaattataaaacattctaaaaatcctttccagaatcaaatatcaatttaaaggtaaacataattttaaaacttatcaaaaaaaatttccaaaaatcctttctagaatcaaacaccaatttagaaataaacacgatttcaaaacttacaaaaaataattttagaattaaaaacattatgtataaaaattgaataattaaggaaatacaaagtattcccttccattctaaaagctttattacttgtcttaaattttatgaccctgcacaaccggaatccaaatatgatgtgaagttgtcttgagacaaataagatctaagtaagttacatataaataaaataagaaatatttggttaaaatggatgaaataatcctcaaaattggaaatctaacactttttatgttttttctagaaaagtaatcaatttttgacataaatgacattttcaattttaagtatttacatgtaggttttaaaagaaatggttatttttacaagaaaataatgagaatatttttgtccaaatgatgccaaaaaaggatgggaggttaaatttcaaaaattgggttttgagaggctcttttaatcaaataaccctataaataataagaatggaacaaaattgccaactaaataaaatatacttacaaagaaatcatgtgtttgagcccaaaggaagttgtggtttgtttcgcctaccaaccaaaattgattgtcacacaaataatttatcttaaattccaaaattgttaccatagttgtgcctttttttttacggaactctttgtgctactgatgaagtgattcaaatctatatctaatgcaaaaactacggtttcctttcactgcacttaaaatgtcaaggattatcatcatggaaggttgtagcaactaagccagttataatggattgaatgccaactctagaactggtttaggtgtcatgcaaccacctccaccaactacactgggttcaaaatggtggtcctgcagcctctttgtccaactacgtacactgatgccagcccctgtctcctgtaattaaccagattcttaatttattcacaaaaccaacatagcaagacaaattcgcactgctgcattataggaaaaagtccagaattgacagagaattaggacaagtgaatgagtccagatcaagatttagtagacggttcatatcttttgaatcaaaacaagaagatcaagttacaaagaagcacataaactcttatgctggtgtcagccatggagttagatcaagatctagacttaggtggtgtttgttttttttgttttttgcttaaagcaatttgttttcataatttaggttgtttgtttttctactttttttttacttattataaactttttattaaatgaaaaaaaccaaaatatgtagccttttttaaatagaaaaaataacatattggtttttttatactttttaatacttaatataaataaaatactacaaaaacaaataacttaatatttaacactattaagcattaaggttctatttagaattaagtaaaaaaacaaacatcaacttactaagagagaatcaaattataccgaagattgtgattatttacacttttcacatgattattagttgctcctaccctaataattatggatgtgaatcttcaaatgtaaattattaaatagaaagattgtatgaagaaaaaattccagagaaagatctacaaaatctgattatggtggacaaaatgaactcagtcaggaaataatatcgtatggtggacaaaatttggttaaactagcaagtaagaatttattattcaatacaaattcagccttgcaagttgttcaagtatggctagaccctacttcatgtagttgttctattccacctcataagttccatgaacaactgtgaattcacatggatgaagtcatatgatgcacttcaatcccaaagacaatcttctttaaaacattaaatcaaggtaaaagtattaggtttcaaaaccctaaaaataattaaatcaatacaatgagttaagcgtagaagttaccttatttgatctttcgcgtattttggagaagagcattatctctgctccacaatccaatcattgggcaattaatagacggatgttggatctaatccaatggtaatggagatttttggtggtgacaaatttttcgtctagaggtgtaatgacattaccatttgtgattgtaagcagataggaattttggattcatatctttcatcccattcctggtatgtaaagagaaacaagtgatcaaaggtactagaggcaaaagaaaaggaaataaaaatattatgtatagattgaaaacaaattttactcaaagaaatagaggcacataccttctcttattctatttcaagagattgaataattctagaaattagggtaaattaaacctaatccggtaatgttagtgaaaatatacccctctcaactacaaaggtaatacaaacaatgaaaccttaaatcaaaaaattaaagaaaaaaaaattcatttgtggagaaaaattagatagtaaatttattactaatattagtttagcttcggtgtagcaagataaaccggtttgcctagatttcaaggcctacaacaaaattaatttcatggaattggcttaaaatcacgttacataaaaataaataaaaaataaaaaataataataatattactaattaaaataaggtaaaaaatttgtaaattaatttgtgtgaggtatttgcctaatctacaaaccaattatcaaagtaagtctataaaaccattttcataacaaaagcaatcaaataaaagaataaacaaaacgcatgatcataatctcacccaaatcaagattgccactaacaaatatgatatatcaattaacattaatatttggaacatgaattcaaatgaatttatttaatattttgattctaaattaaaataaataaataaataaataaaaataaataataataataataaaaaagaagtgaaggccgacacaaacttcaatcaaacttagtaaagaatgaaaatctaaaagatcctaactatcaattgtaatcttctcaatattatgggttgctctaataataaacaattataaatgaaatttgatattgtaattattgagtagaatcatcaatgaggagaattttgaagagaattaacaagttaaaaattcaaaaacaaatttaggagatgctagttttacctttgctaaatcattgatttgatcgtcattgtcatctcttaatttttcatgcttctcatcttcttcttcatcattgtcgccttcttttagcacccacaagttactcatcgtagcaagatggctattgtacgtttttctaaggcatgttacatctctatatatacccttacactaggttaaaaatcttatcacatgtcaatgtgggtttgaactcttacctagctaatcataagccaatgacatgtggatgatacacaaaactacgggttcaaacttaatcaagcataatgtcacaatttaacataaatcatcaaattgaaatgaaaatttttctctatcagttttttctttcttctttctcttcaaaccatattttctcttgctctctcttaccccatctattctcaaatctatcttacctatttaaacaataatcctcaaattttattagtatattgttttataattagtttgataatcaataattcaattttatagataaacttattttgtagggtaaagtataagaaatattttcttgccgacaaatcctaatagatggatattgattaataaggttatagttttcagtgtaaagcataagatatgttcttctagaagacaaatcttatgttattgggtcatatgaaacaatttattagaggcatttttcatgttgacgcgcataatacactagctagaactagttttgaaaagttatcacatcaatcatggttttaaatataagaattatgttcaatgtatttttaatgtattctagattcatgagttattaaatgcagatagtaaaatcatttttaaatatgaatgtagtgtctcacagctcttggagagtgagacgtgaagagtcatacatggagggctttcacaatacatcatcgaggccttttcttgatggcggaggcccaataaagaaaaaaaaaacagggctggctgctggcccatgtgtgcgtcacaacaaccctgaactagacaatatcaagtagagaatggggtcatgatagaaaatctaaatcacagaattactaattgaattccaacaataatattacctacatggatcccaaagcaaacctttacctacacacaactcattcaaaaaatcaaaatgccaaatgtttttccctttttttataattaacaatgtaattgatgaataaagtatgctttaagtttaataaaaaaaaatacaatatcctcattttgtagtaagtactaaacattctcattgtaaagtactcctatattaatcagaaaattaaagctcaatcagaaagctcatgcaatgaccaacgacatggaatccaatctcatcaactaagatcttggcttctcatttcctcaacatatcatgaaatcttctatcatttacctgaggaagataaaagtccttaccaatcaatattgttgaaggttattaggcatatgacatagagcgggatagattccaaaatcagtgtactctatatagaaaattgccaccatcaattaaaattggtgacataattcccgacatctaacttggaaactcatgcctatttttttcaagttctagagcctaaataatcatggcaaaatctaagaaatgaaaattccaatatttcttattttttatcatataagcaacccgggtaggaatggttttttgttgcatctagatcatttagttgcaattggttcatacaatatataagttatttattaaattttgaactatgccaaaagtgacaagcccaatcctatgtatattagaggtccacataaatgggtatttaagatgaccaaactgatcacattacctaatcacttaagtctgtctgcttgttgggcaattaagatagcctaatttcctcaaactatagcactaaaaacaaaatcaaactacttaagttttcccttctccaaattaattattttgtgaataacaccttttctttgtctttctataagaaaacctagacttctcgtaggccaaagaagaaagttcatattatatgattcaacaaaaatttattccctcacattgatatcatatggatcatttgtatcaatatttataagaacacttttctcttatatttctaaaatgattagtagtatttatataccatgacaaaataaaagtaatcatatttgaaagagtttgtgataatatccctctcacttcctgttattgaagagagaattatcatctcacatgtttttccccattttatgttctcttttagaatcataccaagcatatcatttctacaagcacataattgtcatacatgcatgccatgtgtactatcaattaaattaatattggttaaagttccaaatttatcaatttctagtccgattatcacaaaagtatttagactcttattaaggaaaattagtaaaaaaaatatttgtatttaaactatatattatgttaatgccttaattcactaatgacatttgatctcaagtatgtaaactcatccatcttatgttcatgttgtacatgttcatatctttagaattagttttattatattttttttttctctttggtgccttttatattctatattaattttcttaatgttaagtatattatgtacttagtatagaaaagagccaaatattacctctctatcagcaagatcaaatatgactctacaatttaattaagataaagataagccatgagtattccaagttggtcatgagtactccttagtaatcttcgatgagtgaaacaaattggcaacaataggaagcttgtcccttaactttaaaaatcattgtgaaggactactcttgatgaagattcaataggtagaataaaaggaacatcaagggtgttgatgaatctaattgaagatagtagaaaattaactctccaacttgcaagatttgattgaaaaataccagaaatttaattcctttatttctaagattgtgtagttgttgtatatttttaattttatttcttcatttataggatagaggatttctaggaattagtcaaccttctaattttgtgtaattttgagtttgctagttttataggatttcaccatacaaagcaatgtccatacaaaacaatgcaacaaccttccatattactttgaaacaatttattacattgataatattttttttgacagagtgcttagtatagtctaaattttctgagatagcatgttttctaagaggaaaaaaattaaatgcttttgagatatgaactaaataatagttattttaaatataacgaaaagaatcgatacaaatggcatagtgagcgattgaaaacagtgttataaagacaaatgtttcccttttttagtcattgataatgtaaaaaatgactaatgattgtttaagcaaacaaaccaataacttactttgtagcaaagcttgaactccattttgtattctttaactgcaaatcattgtaggaattaagtcaaagtccaccgtactaattagctgatagggtcataaaatgataaaatgtttttatgcttttcttaatcagttccttattttcttaataatccctcttgtagaagctaaaaagttttcctaacaataaaatcaatatctatacctatactacatctaagaaaatagtcatcctctaaaacattttatactaaaaaatattatttccctattagccaaaaaaaaaccttcaataaaatggtgatgtcttttcaattcacatcttctttatgacactaatgtctttttaaaaccttatctaaaaagccctcaatgagtaataattctttcttttcaaccacatatatatagactcatgttctcaacatgtatacatgtattcatggttatagaaaacattttcctcatacttctgaagctatgtttcttcacttttctttctcattgtgagattttatttggttttattggagtttatcatctacaagtgacacaagttaagatcatcaagggatttgtgctcgtctttgtagttaagatcttctctacgacaaatagcattacgaatcttacggtgattggaaccaaactcaaaaaagtttacaaaaaaataacaatactattaaaaaatcacttcaactaattcaaatagcctcagattcaaaatttataaaagaaaaaaaaatcgattgattttctcaccaacaaaaaaagtgcaaaaatccataaaaatagcaacaatcaaacaaacctaatacaacatccaaatcacacaacacatgtatacaacacaaagttagggttagggttgggtttcgtttttatgttatgcttctattttaaggttagagttttgttttgatgttttagaaaattgaggaaaattttggaggaaatttggggaaaaaatcaagctttttgaaaaaaaaaaaaaacaaagcaccaacccatgcttttataatgtggaattttcaatggaaaatgggataaaagagaaagagtgaaaagagaagaaaaaaaagaaaacgaaaatttagaaaaatgttgcatcatcaccattttcttgtaattttcaccccacaatatgcttccacttctactgcaatttggggatcaatagcatcaattggggagaaagaatgaaggagaaagaggagggttaggttcggattttgggtgttttgaaatgaaataatcgtttcgtcatctgtcatgtgaaaaacacatgcacctttcgtccaaaaatgtaaaactgttactcaaaaaatataaattgcatataattatataacataaggtacattactcgattttgaactcaagagtgcaatgtgcaaaacacaatataggttggggagggggttaaattgtaataaacccgaaataataaaataaaatattcataatcactaatttccttataaaccattatctcttcgatgctagtgggctccaactatatgacctgctaacttaatttttcaatccaagaataagtatcgataataaataaaatgatactttaatattcatattgaaaagagatatgaaacaaatcactactaattattaaaaattgttataaatgagaaacagactaacaaaatgtgagttataaaagaaaattgagatgagagaatgaaagaaagagcttaagaatgctttcttgctcgggatggtcttttgtacaagatataggaggccttttatagacctcataaaagttttatattaatgcctttatttactcatattaatggagagtattaatgaaagacttatatttatgttgttttaatacagaggggctttaagtggggaaatctacccttgcatttataacactcctccttggatgtccaccacactaaagaatatgcctcattaaaaccttgctaataaaaaaacgtagtgaaggaaaaaaaaaacggacaatattcttttaattctttaaactactcttggtctgttaggaatgtctcattaaaaaccttatcaataaaacccaatgggacaaaacctactagatcatcacttgagcatatttgttaaacatcaatttcactattgttctaaagttcaagtgtttaaaaaaaatttggtgaaatgcgtttagttatatctcctttaatataacccttttttatttatgcaatgcatgcaacattatcttcaaatgatattattaggttaccttgggtagaggagagtccacatgcttcccgaatatgttggatcaaagatcttagtcatatacattcatgacttgcttcatgaattgcaagtatttcttaatgagttaaagatgtgaccaccattgtttgtttaccaaatctttatgaaatagcagtactgttacaattaaacaaatatattatttgtaacctagctttatgtggatctaaaaggtatcatggatttgcatatccaagcaattgtagctttaattctcttgagtaaaataaactcataccagtagttctgcaaagatagcgtaataaatgtttgatacaatttcaatgtctttgggttggagaaaaattgtatcttgataataaattaacaaaaaaaaaaacatctaggcatgtacaattggcaagatatataagtgcaccaataacactaagatatggtgcttcaagactacataattcttcacctttttgtgagaacaaaataggtcatttttcacatcaagttatcagatggccattaaagaacttaaaagatgttctttatccatataataacactttaaaattttcttaatatatattgattgatgtactaaaactctatttggaaaatgctcaatccacaagtcaacacaaaaatttgttttttcaagatctttcatctcaaattcctttttcaaaaaatttgttcttcttatgagctattcaggagtcccaacaaatggcaaatccaaattttgatttcttaataaaaatgcatggacatatagggtttattcacatacccttattttggcaagtattcactaaagtgactgtatcacatgcatccagattactttaatccatacaaggattgttgtaacttgattaagtatatgctacgaggctttatactattttcttcaagtaatttaaatatttcaaggattttcatgtatatttcattttttgtagatccatataaatatgttgtaataacatccatgatatgcatatttagtcattctgagattgtcaaactaattaaaaagcaaaatgcaattgtgtccatgttaggagactatgcattctcataattaataccaagtctttgtgggaaaccttgtactactaatcgtgatttatatcttatgatttcattattctcattgtgctttcatacaaatactcatttgtacccaacaatctttacatcttcaggaaattggactataggtccaaaaacgtcttgttttattaatgagtttaactctgtctatataacttctttcgttatttaaaatttaatgaaaagaatcaatacaagtggcatagtgagcaattgaaaacaatattaaaaagagaaatgtttccctttgttagtcattgataatgtcaaaaatgagtgatgatgttttaggcaaacaaaccaatacacttactttgtaccaaggcttgaacttcattttgtattctataattgcaaatcattgtggaagttaagtcaaagtccacttgtattctcttcaaaccatattttctcttattctctcttaccctacctattctcttaatctatcttacctatctaaaccaatccttaattttattacaatatattatttttacaattggtttactagaaagatgaataattcacttaatagataaacttatcttttagtgtaaagtataagaaatgttttctagaagacaaattttatttaatggatcttgattgataaggttttagtttttagtgtaaatcataagatgttttttctataagacaaatcttaaattgttgggtcatatgaaatgatatattagagtcttttatcatgttgggatgcataatacataagttcatactagttttgaaaactttttcacattcatcatatatagtttttaaacataagaatatgttaaatgtacttttaatttgttctagatacatgtgtcattaagtaaagataataaaatcattttcaaatatgaacaaaatagtacttattttaaaacaaaaaaaaaatctaaattacacaattacttattaatttccaataataatatcacctttttggatccaatggaaaatctttacctaaacacaactctcatacaaagttgaatgagctttaatttttataattaatgcaagagcactctacaatgggaatgttcaatacttaccacaaagggaggatattgattttttttttttatacttaaaacttactttgttcatcaattacatcatcaatggtaaaaataaataaataaataaaataaaaggaaaaacgtatgacaattttgattgtctacaatgggaataaattagcaattatgtaatatgagaaatgaagagaagaacaaaccatgtaaaccagctaagaggggaatcaatgatcatatccaaaatgtggaacatagtgtaacccaaaatcaatggattgtgtatgttggtgaccaaaacaaaggaagtctgagaggcagtaaaacaaacctattctaaagtttaagatgttgctcaagtttacaagataaagataaagattcgctatgtaaaacaatgtatttaaattgtaacttgagtactttaatgttgtaaaatatcgaggtttgaactagaatattatcaaaatcttgaaataaaaaatagtgaagatattgctatgtttcttaagtttattgaaagatagtaaaaatttaaattaatttttagtcagacttaacgtggaattgatcatgtacgtgttcaagtacttgggaaggaatcattggcatccttgaatgaggtattctcaatcatatgggctcaaggtatatcataaaggctaaagaagggagtaagagcataatgctagacacctcaacaagtgaaaggcctacccttgaggtttcaagctctcaaagtagcctaatccttagcataaattctagtagagaggtatccaagcagctgagtaacaaaggtaaccaatggtgtactcattgcaaaaaaaatccaaggcatataaaggagacacattaaagttacataagaaaccatagtctctcaacaaaaatggtagacaccaaaaccaacacaatcttgatagtgaagatgctaaataagcataacacttttgaaggagaaacctaaccatgagattcaaacaattcaaagattaagggatttaaaaagtaagagattgaaaaactatggagatttctcacttcataaaagctcaatgagcccaacatatcatgctccttggctagatcaaataagtactttaggagtagttcttttagtacctcaaaaaatcattagcatgaaaattaggttataaacatagatgatactaaccacatgacctataactttcatcatttctcatcttacatcccatgtcctataaaccaaaaaatcaaagtagtcgatggtagtttagctattgtggctaaacaagggacgattacctttaatccatctctgtccttaaaattcatactacatatttgtaaactctcaataaatcttatgtcaatttatcaagttaccaaatatctaaactgcaaagtaacctttttctcatcccattatgttgttgatgacttagatataggaaaattaattggtcatgctagggaacaagaggaatgttaggatagagtctttaaaagcatgacatgaagtaacaaatttggaattcattatgtaatgatattataatttcacttttatctatctttgtcccatgcatcacactttatgagcattctcgcctagcatctcttacattatatatgactttggtgtattaggagttgaatggaagatccaagtcataggttccttgcaaatagatgatttttttacaaccagtccatgaacttaagcaatccattcgaggcttaacgcactacctcctaattggagggatggttggtcttggctatcaagataggttttctatggtaagtgcactagtgtgtatagttacataataaacaggacttacagtaagttgtgacttaaggttatcaaatagtcatgacttcatcaagttgcttcattgtgttgtctctcaaccttaagagaatattgaacttgtgctaaagttagtagtggttttaacccataggtaaaatcataagctaatcatatattctctatggattaggtcactactgatggaagttaataacaataggtattctcaatataggtaccatgatatcgcatgggattgagacaaagtgtcctcttgggtgatcttaaggaggtgtgttcatgaaaactatggtcatggtagttccttgagtggaacttaacatgaactctttgtgagctaagatatggcagttgaacacacaataggagaatctgtaactcaaggatagtagaggtagtcttgaaaggctgatattttttaccttattaaaccacaaacactagttcatggggaaacttaacacaatgggtagcaagtcacaaacccaagcatatggcatctcgttgttatttacataggatattagagctcaattgattttttgtaatgggatgttgaagtaactttagaattggattatgagaaagtcaatactcctataggtcccaatggtcctcgcttaagcccatataccttattagcactgtttatgaggatcagattggctctaggttcacttttgtgcataagggcattttggtaattatgtaaggttgggtaagttaacaaaatctctagattgggctaattgattaattagtaggtcttattaggttgattaatcaattagaacccattttgggttaaattaagtgactcaagcccttaataagctcaagtcacttaaaacactaggaagccctataaatacccctttagggcggggttagggttttcataactttttccatacaattgtcttccacctctaaagagaaagagagtcatagcctccactctcttttccctcccagaagtgcgtcaacatcaagaaaaagccataaagtagaagatcttgggtctactagacttccaacgacatcaatttgattcttcaacacttggattcaaggtttggaaacatccaaacttaaaggttaatactttaaccctaaagatcaattttttgaaaaattggtattgattctattgcttagatctaagatgccaacaaagggctttgttatctagatgttaaatgataatggtagtagtcacatacctttcttagtgattatttttgtgtcacttggttgttacttaattttaaaagcaaatttcatgataggcttttttctttacttttcataggatgatcagtaactagtttagcattcaaataaataatatcaaatttgaaaatagagaagtgtactataaccaagccttatcttattccttagagaaagaataaaaaaacaaatcattatgtaaatatactaaaaaattagagttgctaaaagaaaattttgtcaccttctaaaagtaccctatgcctttttatttgagaaaatatgtgcataaatcatattaggagaggcaatattaaccattgcttacttaatcaatcgattgccttctaaagtgttaggaaacaaagcccaatgaatgttctcgctgaattctttcttaattttcatgggtttagaaatattacacctaaaatattgtttggatgtgcctcctttgtccatattcatgcttatagttgtggtaaacttgatccttgagatttatcatgtgtctttattggttatacataaaaaaagaaatgatacaaatgttatcacctcaattctaagaaattttcatttctatggatatcacttttattgaaaattagtctttttttcactggtcctcgtgttcagagggaatccctatcattaaatgaagatgaggttgagttaagcttactcaatttgtcaaacaaatctcttacaacatatattccaaatattattccttcattagtaatcaaatctgctcctataagggttgacacttctaaactcgaggatgatgatgcaagaaatggtagcattactactatgccactacaggtgtacttaagaaaaagatcatcaaatcatgctttagtaaaaacctaagaattcaaaactatgagaggtaatgaatctatacctagccatcctcctttatcacccatgtttgaaaacctaaatttgtaaatagctaattaagaaaggagttaaaaactatatttaacaccctatgtctaattttatatcttttgatagattgttgtcacaacactaaaccttcattacctaaataaatttattaaaattccaccaattgtccaagaagcatttatgaacaagaattggaggaaagctataggtaaggagatgagtgctcttgaaaaaatacataagacatgggagatgattgaattattcaaaagtaagaaatcagtaagatgtaagtgggtgtttatggtaaaatataaagcaaatggaacttaggatagatacaaagctagacttgtaactaaaggctatactcaaatatatggaatgaactatcaagaaacctttactttagtagtaaagatggtcaagactatatgagtattatctccttaacaactaatcttgattttgattggtccttgcaatagttttacattaagaacaacttattacatggtgaagatgtaggcaagctcaagtatttgttgggaattgaagtggcttatccaagaaattaatggtattttatttcctattaaaaatttatatataattaatcttcaaaaataaaccaagatgctcatatataagcttgttgacacatgacctattgaacgaaattataagcttggagaaacattaaagctgtgtttggttcctgaaaagtagtgaagacaaaaaaatgttaaggaaaattattttctcatgtttgattttactatgaaaaatacaaaagaaagtcaaatataattaattagtaagaaacttatttagtctttatataaaagagttaaataagtgaaatgagtttgaaatagaatatgaaataatttattaattttaaatttatttttttattttccttccattttatttctctcacatttttcctcaaactttttgagaaccaaacataacctaaaagatacaattttaaataggtgaagttacgaaaggctagttgagaggctcatttatttgtctcacatgtgacctgatataacctgcatgtgtacgtagtaagttggttcatgtactcccttacaaaggatcacttataggctacagagaattttgcaatacctaaaatccactccatggaagggaatactcttaaaaataaaatgaagacttaagattgaaagtctatactaatgcaaattgagtcaaatgaatagtagatagtagatcaacctcttggtattgtactattccgagataaaatttagtgacatcaaaaaataagaaacaagttgtagttgccaagttcagtatagaagaaaagcttaattagagtcgtggcataaggaacttgtgaactactttagctaaaaataatttttggtaatctagaagtagaagaggattatgaatatagaaatatttgttataataaatttcaccttttactacaactgttttaatgaagcataattgcatgataaattatgtgaaatagaataataaagcctatttgggaatggttccaaaaaacagtctcaaaagacaacttttgagaacatttctcaattgtttttaggaacaaaaatccaatagaggaactcaaatatgaaaagtagttttcttatcttattctccatgaaagtagacaaatatttaaattttgttctcaaacacatattttcataatgaattctcaaaaaaaaaaaaaaaaaaactattttatctaagaagtttgtcgaatatgttttctattctaaagaaaaaaatattttcaagaacaacatccaaacaaaacaaaataatttttaaaatctaaagtataaagttgataaaatagaatgatgcattgataatgtgtttggcatgcaggaac

SEQ ID NO: 11475 - DNA, 3879 bp, Vitis vinifera
  Intron number 2 from transcript GSVIVT01036911001 (locus G SVIVG01036911001) derived from phytozome v7.0 (chr-ID chr2 ; pos 17760605 to 17764483)
caacgtatcggcagtctccgcctccctcacaggtttgatttctatttaagtttggatgatttggtgaatttgttgtttggttgctgggaaaatgttggtaaagttttagttggtaaatttgtactgttgctctgtttgttttgctcatttgtaagagtttttgttgtggcttttgtccacccccaaaaatgaagaattcaaactcatcgttcaaaaaaatggtttcaatttgacctgggtgatataaaaactgagattcagaacttgcacttcttatattttcctacattttctcataatccaaacaaagcaataattttttctttttcgttttcttttttctgtgtcattaggttggagattttttgctatctttttcgttttagataattcgtatttggtttgcgaatttttaattgagttgcgtttgggtgctgagaaaattaaggaaagaggagagactttaacttgggaaattgtttttactgtagtctttttttttgaataatgtttttgataacattttgttcacaaaaagtgaaaaattgaacttagctttgtgaaatttagccccatttggatctgaataatgaaaaaaaactaagattcaaatttgatttcttcttcctagaagattaaaagttgaagtcatctgtaccaaatttatttcatttggatctgaataatgaaagttttaaccaagtgattcctttttgttaaaggatcttttacctgtgcactgtttggttgttaagaaaagggaggaaaaaaaaaggagctttgaaatttagtcaacttatttaccatttggttgctgagataccagacaagatgaaaaagaagccaattttgatactgataatgttttatgaactttataatttctatgtcttgcaatgaatccatttgtgtggcattgtggactgttgtgtggtctatcacttgataaggattctagctagtcttttgtggatgccgggatttccttagggatagcttccaagagtcttcaggttcttgccattctttccaagtgttccttgtggtgttatgtttcagttcaatatttttcaaaaaaattggacatattttaattgaactttattattattatgagaatcaatcatactacttgctgttctggggtttcccttgctcctgtgttattaatactgaagaatgttactgagttttatgcagttgaattggctctattaaggtggaaggattttagagatcttctgtccaagtataggtatctctggtttttctattttgaattgggttaaagggaaggttgtttagctaataaaaagctcatttgctagcaagctgtattattagttacatgatgatttgctacagtgaattcgttaatgaaggtgtaatataatcacatggacatacaatgtgaaggtctttaattagttgtacagaagcttgaaagattagtgaaagagcacaagtgtttagcataagcactacttggtggagtagatgcaatccactaggtctgccactcccctaacccctaatctgctgattgcctccatagtaggtagaagacaacaatagatcattcatataggttcagactttcaagtctaaagaataccacattgggtgttttgagtaccatctagctttgtaatggccttctgtgctttctctagcatgagatggagtagattgaaggaggttgcataatagtgctaggttttcatgaagattccccaagaaaggattgtgtcaaccgggcctagaatttgaaggaaaaatttcccctctatgacctccacagtaggtagtgaaagaaataccagggtaccaacctctaccctatccatttggttttggagatttaaccctagaaaataattgaaggtatgaaaaagggaagaggagagagataaagaagagtgagataaacgagttaatagtgtccccatcatccctttcttatatactgtgaatgcgagcataaatttgggaagatataatttctagcccaaagtagtatttgtttcctttcattctattctattcaatattccctttcaagttgagatgtactcaataataattcccatcttgtctgccacatcagtaggtctactaattggtttctagtgctcacagaaggaagtacaaataggcccaattttttctcccttagattgcttctactctaatttgttttgtcctgttttgttgaaaaagatcgtctacaaaagtaatttcagctttattgtcacaacacagtcttggtctaccaagtaatatatgtagattttattcaaaaagcaatgaaagagttacggccaaggaaaaaatagaatagaattacagccaggtacactatcctgaaggtagcactttgttttactctagtcttgctaagcatgcattggtaaatgcctctattgtcacataaccatgttttctgaagaaaatacttctcccatgtgtcaccatcaagttcctatgagtgctataagaagcatccaagtggacctcctggaggcttgaacatgcataataattgactaactctactaattgtatgctccatcaagacatgttgggactgataaatgaaccttcctcaaatatcttaaagtttcccatatcagcgagagagcttttagtgtcatcacctaactgatggttttgattaataacagtatctgctgattgagaaaaataataactcttaaggaggtccatggcaaatgtctccaccataggggctccttgcattgcctgccaatctgctacatcaataactgatttacaagtacaagggaaaggacaactcaaatgcactaagaaatcaatgaatcttgaacatccaaacgtccaattttcaagaccttctctttccctcagacatataagagagaacaagagccagaatcccttccacttcctaacatccacagaagttgtcttcaccaaactttgcaaagctaggatctccacatcaataaaccaaatgtgaaacaattggcttggagaaagtagtaactgaattatgatcatatatgtgaagatgcctccaattcctatctcccttgggttatccagcaaacattcatcaatattaacttaatacatgataaaggaagaggtatccacctggccctaagctcaacgtctatcctcttaacgcaacaatctctatttgatcagtctctcctattagaggatttttgacatttttctttcagagaatttcatacagattggagatttattttcattttataatggaggattggttcttgcctttagatgatgttatttgttcaattttgattgaattccctatgggtaatgtggctgaagagaaaaaaaaaacaaaacaaaaagggaggttctttgaatgcgcaatagcaaagtcaccctagctgatttgccttgctggaatattgatccatgaaaaggctccttgcatcattagcaaatcaatattcaggattgaaatggttgctactattgatattaactcatttgaatcaggaaaattctcttctagtgtttgacatatgcagttgatgaggaatttcattgttgactttttgaaggcattgttctttatttttaaggtgcttgtatatcctgaaacatgccaaagaagctgcaagagtgcaagttcactttgtttttttgctgcttaaagctgtttaacattgtgttgcttaagatatttatctatcataaatcaaaggaactgggttacttatgtgtgcatgcatattatgcaaacttgtttgttgtcatataatataatgaattaaatttatagtaattatcatcatttgacctcctgatatgcatacaggcaacatttcctgttaggtcagttgaaagcccact

SEQ ID NO: 11476 - DNA, 5526 bp, Vitis vinifera
  Intron number 1 from transcript GSVIVT01029088001 (locus G SVIVG01029088001) derived from phytozome v7.0 (chr-ID chr5 ; pos 12315948 to 12321473)
tcagaggaatccgttgtggtttttttacgaatccggtaaatctcctctcctctttatctttctgttccagattccaaacgaagtaattgtatggttgatgaggaagcatttgcttgttggtttttttttttgctggtcactcaaagccctagtttcgggttttgggtttcttcggattgaggttttatttatttgttttttcaaaactttcctttttgtggtggcgaaatataggtgcgtgatgccagaaattgtgtttttctgtttccgatttatttgacttgagggagggaaaatgttggatggaagcaatgtaaatcaattttttaggtatggtaatgtgaatttaaaattttaaacagtttaaacgacttataatcatgccaaattgataaatatattgatgaattacgccaacccaaattggttgacgagttatggatgtcaacttgaacatgattcaacccaaaactgttggaagattgcatgattgaaaagttggtgttttcacatgggaaatggatgaggagtggaacgttatttataattgaacccttttgctaagcatcacgaagcttgaggagagaaattgaaggtccacatgtccgcacaaggcataagcccattccttaggatttcaggggcttggtttgaaaaccatttaagtaggtgcattgcgcctgcaagacgaatctaccttagtttgggtcctcatggggatctcccttagtttggttttaaagtgaaggccacatggtctaagggcacaaggtctaagcgcattcccttggaattcaagggttttgttggaacaccatttaactaggtgcattccacatgcaagaggaatctccccttagtttgggccctcatgggtggacccaaataaggccgctttttgcatcggttatttcaagttttgaacctttgttttttatcaaatcaggcctttttgcctagtccatttttattcttgtttaagtttttattgttgctaatttctatccttcaaaatcaacaatttcaccaaaatgaaaatcatttttcactttttggggaaaaaccagacaaaaaagaacctagccattttatggagaagaagagcatactactttttctattttataatttctttccaagtgtttcttttctagagaaacactcgtgctatttgtagctggagtgtctaagaggtggtttgtggttgaaatgctccatctaagatggtcagctattgtaccctagtggtagaccgttgttaatcctattgcatttagatattatatcagacagttcgagatctactttaaaggcaatggctggactttgcatccttctttgatgagtgtttttgttctcttcagattctctacagtataattgagtttctgtagtttttttattacaatgttctgcatccttgtttcacgcttcatacatattacaccaacgacttaaaagtatatctaaatggaaggttccttgctctagtcaaacttgatatctctaaaattgatttgtgcaatcaaaagatgacaagaatgtgggtttttttgccatagatgtagtaaacctaggtaacattctgacttgacctaaactacaactaggttttgcaaaatttgttgcttggaagaggggaaacaagcaagtctgccatgtgatcttgagcacgttttctaatgaagtttttgatgctaactgctcattgaaaactgcaaaaatatatggaaaaaccaaagaaaaagtgtaggagggaaccaatgtctttgggagacataataatccaaattaggaatgaacagaaacagagacaaggtcaagaagggcaaggaactcgctttgaaggctaatttggtagtagataagcttaagaaaaataaaaacaacaagaacaactagataaaaaaaaatacacttttatttaatacactcttatttatcaaaaaaaggaaaaaaagaaaaaaagaaactagaaatcataaatgtaaccccaattttgtgaacaagtcacattcaatttaagaggagaaatcactttgtttatggaaagcatggttatcatgcaacacaatttggacataggaagatgaatgaggaaccaaaacccaaggcaaatttggctgataccgatgtttaactatagtggtttcctttgaggtgaacatagtccccgttgtgaaggattgtgtggtagattttatggtgttgggcacatctatgacaacaagagtacatttacctcctctattgtagtaggagaaggtgaggaataggtattcatgggtcacttaggtcttatcttgtgattgacaaagggaaggtgcttctcaaactaactttaggcaaatacgttaaaatatatagacaaaagccattggaagagaaattataaattttgattactcatataattaaccgttttgatattatttatttatttatttttgataaccaatgaatcttccatggccaaacgcttaggactcttcatggggacccaaaccttgggatgttgattgtttcacaacaaccaatactaagtaaattcagggtattatcagtatcaaaattcaaccaatactgggaccacactttccagtgtttgccctaaccaattgggctaaactgcgggtaactgttgtgatgttatatgaaaaaggtttttatcttaaaccagagaagaggtcattgatacacttaccattggtgcccttcctattcccatgagcccttaatgatggaaacaaattctaatcataaaactttggatcctaacaaatttgttaacactataataacaaaaatttcatatcctttcaaagtttagcaaaaatttcaaattatttccaaatttaatgtcttcttgtgggtaaacgaaattcaatagaagcacttaacaaagaggaggatgcttgcaatgtgtacaagacaagacacatagaaagggtgctgagcagctggaaaagacaataaaatcctgaacaaagcgaacatgttcttgcataatcaatcaaatatgagggagagaaatttgaagaccctaaagaatctgttgtgcacccatagaaaggatctaggaaaagagtctttcatagattgaactaaactctcattctctccaaaagttgtcctattccttcttccttatccaaatgattcaaaacaagcactgtggaaccttctccatgcctttttacatttttagtctacgaaactctcatgccatctaagtaaaacctcttttaccaaccaaggaagcacctacaagagactaaattgagaaagctcagaagctccataaaatccatgtgccaaactgcaattgtccagaatgtgattagccacttttcatgaaacttgtgcagtcaatgaagattaactaaattccaacctcttttcatatgattccatcctccttcataggagaccaattggccagtccaaggatgcatagaaggatataacaaagaatttcatgttcctggtgcaaccagcttcaaacaatccttttagcctgtatacaccttcattgactgaatcctttgtaggaaaagatccacactctccaattcttaattatgaaagttgtcatggaacaaggacttcaaattgccctgttcacagcttgcaaagcccaagttgacctctaacatcttgccaactacaaattgacattgaccaccttgcaaactccaaattgatctttaccgccctgcaacactggtcatggcattgccaaacacggggaaaggaatctctcaatgcctaatcattgtagcaaatatccgaccacaatttcattgtgaagctgtcattgacagttaaaactagccttagagagaaaatcttctcctcttcgatgttttccctggctaactcctaatccctttttcccctttgtagacaatcacccttgggctcttcccaaatttaccaaaattaatccatcttaaataatctacttccccacaaacctccacaatcattaacctagaagagatttgccaggaatgagcatgttatgaatacccaactacacttccatgtccatataagttgaactgctataggaaccatgaacaaagcaaaagttggacaaatgaactagataaagtgcttttaatcagagtcacacccactccgatccaccaccactcaccaatcattttgacatgcatatggtccttctgcaacatttggagactaaaggaaaatctgaaagaagcaattgaaacagtttagtacaaaatagaaactcccataaacaatctccagccttgtttggaatagctttaagctacatacttttttttttttttttgaagcaaaagctctcctaattgaattattccaacacatgaaaactttcatctacacattttttttaagcagaagctctcttaattgaattaatccaaagacatgaaaactttcattggacttaaaaggaggttttgacttccaaaaagccaatccatacagggccttcattgtatcctggatatgcatgaaatgtataagaattttgaaagactctagttaaatctctagagaaagtagtaaataaggtagcaaatattttggctaatttaaatacaatgtagattccagagctatattaatgatgcataatccattgatctcaatgtgaactggggcttggacaaacttattgggtaacttaaccctgcttgaatatgatataaattctaaacttatattaatgacataaatccaaccaatcttaactagataagtttgagtttaactagttaatttggaattcatccaaatttaaaaaattcaacttgaaagatgtattgtattaaaaaaacagttaaattagaattacattgcccttcaatctgaccaacctatgggtgcaatcacccttaagcagaacaagtggagtagccgtcctccatatctgcatccatcataaacaaaagtgaactggaaattgacggttgaattgatatcacacctaatctccaaacaggttaaaattattacgatttcactgggacccaccgattatcgttttgcccaaaatggatcactcactttgtataaatcctagctttctattgccacagctctctatctgttttggcgattctcaactttcctccaaaggtaacaactttctctccactttccttttctttcttcattttcccacactttcttgcagatctgaatatttcacattatccttttcatttattagattgaattaacatatattttggagcaatttctctactgattttcttgtgaatgaaccctgcaatttgaactatataaaacagttccaaattttatttgtaaatttgttgaattttattttttttcatcagcaatttcccccctttttctttcatgatttgttgttgaagtttctttgttggatcatgctcatgacttattttgactcattgaatggaaattgtgtgtagaagcacttataacactgtgattactacaggaataagcagagaaggagaatccgtgatctcataa

SEQ ID NO: 11477 - DNA, 4189 bp, Vitis vinifera
  Intron number 4 from transcript GSVIVT01029368001 (locus G SVIVG01029368001) derived from phytozome v7.0 (chr-ID chr1 7; pos 15573647 to 15577835)
gtgggagagggtgaagaacttggacttgtttatatgtggaccaaaccccggctccatttgatcattatatatgtgtatagagagagagatggatattagccaaatgcccttccaaaagacaatatatgttgggattttgggtttttaggtaacgttggtagctcagttgtaatgacttctttatatgatggaaaatgaatcatgatgccattttgataaaaaggctggaaggtctcatttggtaaatttttatgagtggctttgtgttataaagggctgattttgtcgggaagcaaacgtaatcaggaggcagatttttatttttatttttccttttattcaaaaattcaaattttatccttcatcaaaggttacaattgagtttgaaaatttggtatggttcatttcatatcttagaatagcctctgttgcttgtattatgtttagttcaaaagaatttcagaaaaaaaaaaatgaaaaaataattaattaaaaatggatatatttttaaattatttaatatagaggaggtaaatgagataaatgaatttaaaattaatataaaaatgatttattggttttaaatattttttattttcattctcaaattgttagaaacatgaatgtaaataattattatactatttagacaagtaaggactcaaaaattttagtgtaaaatgtaagcatgctttcttcaattcaggcaaaagagagatgccaaatagacacttgaagatcaataaatgttagaatggaattcttatgcgtgggctacacgctccctcattttctaaaaaccttttaggaaagcaaagagatgcatatttctaattatatttatatttaattaaatttttttagaactttcaagttatcccgttttttaataaaattcctttttcaaacataaaatttaaccaaataataatatacacaactcctattaaatatgaaagttaaagttattcaaataattttaagtttatatttggttttgaaaaatactataaaaaaaattaaaaatatttttttatatttaattttattataaaaaataaaatataaaatataattaaaatcaattaaaaaatttatataaaaattaaaataaatataatatataaaactagtttattgattttaactattttttattttccttaaatcctgggggagaaaagtcccatggaacacaactaatattcaggttggtcagcattggaagcataacaggtaaatataaaaaatcattcacatatttgaatttaatttaacatctttctttttcttagcaacgtcacccctatatcgaaatttgataaaatgaactcatatgatatttttctggtgtgcttgatatatctatatgttcgtcaccgtaagtttttttttttttttttttatggaagaatttaacaaaatgacttatttaacatttgtacatagtaaagggataacagtatttataaataaaaaaaaccagcttatgaacaaaatataaaggtgtagatccaaaatttgtcaaaatttctttttatttattatttattatttattttattattattattactattaccccttaccccttaccttcttctacatggctccccacaactccctccaacgtcttttttttttccttttttttttttaattattatttggcttcttatgctcttttacttccttttcctccaatacactaccattgccacacccaacttgctgagactgcatctccacccacacgaccactcacaggggacacccacacaacccttttttttttttctttttctcttccatcttcttcctctttctcacttccacaacatttccagcacacaccacacaacacccacaccatctttgttgggctcaaaccaattggagtcaggtctgtctaacttcactaaagtcagacagacttcttccctacttcgtgactctcaaagagttcctccaactatactagacccagacatgcttcttttctgcatgaaaagatgtccggacgggtggtccgggcatacccctccgaagtttaagtcagacaatagtagctctaactattttgtgggagagagtgagcctatatgtgcacgtaccttgttcatgctttttgaatggtttatatagagctaatgacaccatcactatagtgctaactatgcactctaacattttttgtaatgatgattatccttagggtggctagtaagtgtcatctgctgatgtgctaagatctcggaccgtgtagttatctgtccatttagcatgtcaacgtctgggattatgtgcagcaattatttgacatagacttgtgggctaaatggagtcctgtcggccacttaaatgtcaggcgtgattgatcacgcatgccagaagtcttaaaaacttgactggacagatcttcccacctaagagtccaagttgccgattccgtctggccttatggaagaatggaaccctttcacttctggtgtcagacataacttatcttggcctgaacagaatgatcctaaatgggttacatacttgttctagacgaccaaggggtcttgagcttgaaagggacacgtggaggggaaccccccataatctctccttcccttcatttttctccatttttctttcttttccttttattttgttttatttttctttttcttttctttctctccacccaaaccctctacactgctctacttgtcggttaattatcgatcgatcgtcaatgacgccacattattattattattattttcttactttgattttaataataatagtttgtgaaagttgggttgctgatttaatttggaattttggttcattttttattgttgaattaatatgaaatttgggttaatttattgttagtcaattaatatgaaatatgggctcatttgtggttaatgaaatttgttggatggatttatggttggtatggattttgatttggcatgagacaattttgatatattatggatgtgagttttcatattaaagtgggcttgattttgattatggatttgagtttgtatattaaattaagtttagattatggaaaattaagtttagacttaatgaaatttattttagtatatcaaattttaggtttggttgattgtgtttatattttggttattaatttgaaaattttggatcaaggcttataacatgtgagatatttgtgttgaattatatttactaattcaaactcatttttaattaatgaaatttactggaataatttgaaatttaaatttgagtttgaatattcattttgaactttgcaatgcaaatttctaaatatttacattttggctatttttgtttttttatgggtcaattctacaattttattggttgaatacaaatttatgacacatcgtgcatagaatttcatggaaaaaagtgagaattgaaaaactgtaaaaagacattaaacttattgtaagcttgttttggtacatattttatttcccactactatttaatttgattgtattggtttttgtaaatatttgtgtgtatgtttacttgttgggtacaaaattgaccatcaaacaaatgagaaattttgtttaaataagaggaacaattcaataaatatgttttaataaaataatttttttaaaatattcttcttaataaaataaagttttttattaataaaaattcataaaaatgctttttaaaaaatccaaaaaaaattgtttttaatagaatttgaaaaattgtttataataataattatccaaaaatttctttgctttaataaaaattgttcaaaattttgtttttttaaataaaattgtctcaaaggttaatttttaataaaattgttcaaaaaaatgttttttttaaaataaattctctatttaagtagaaaggaattaaaaataaattttatagataaaggccttaaataatttttttaataagaatggaatttgttttactttattttttaaagcatagttctaaaaggtgcaaggcacacctaagttgcaaaagtatcctgtagcttaggcacaaggcacaacataaagtgtgcacctgagtgaagtaaaacttgacctattatgcatatcaattttataaaatattatccaaaactcaatccaatcaataagtttaagatttcaaacattatatatatatacaattaaaaatt

SEQ ID NO: 11478 - DNA, 6347 bp, Vitis vinifera
  Intron number 3 from transcript GSVIVT01011753001 (locus G SVIVG01011753001) derived from phytozome v7.0 (chr-ID chr1 ; pos 4537802 to 4544148 reverse strand)
cattggcagtctcagttgtgcgatcttgtggcgtatgaaaaatttctatgtagtcctcttgatccttataattaaatcattctcatcagttatgggttgtcatttttgctaatcacccaagagagattcaactgtcatccgaaatttattcttggaagtgtaatatttttatggaaaaaattctaacatagacaagttcatttttttcagtggattcatttttttatcatggatgaacagttatatatatatatatatatatatataagatgaaaatgatgtttggagaattctttgcatatgatttattaagctataatgattagttccaaaggagctgctatagaagtggtattgatgggcttaagagtttcagacatggttgaaagagaatggaatatatgacagtaggaactgaaagaacagaagatttgggagaaagtggcaacaaaaataagagtaatgaaggctgtgagttgacaatcaaatgacaagggtaacaatgatgaaggccatgaagtaggataaaatcatgacaatcaactccacctaaaacagaacagcaatgaagactgctcgtgaactcaagagcctaaatggatttgataccatgtcaatttgtaaaagaaacatgaaaaactgattcatttcttagaaaaaaaacagataacaatataatgagatatatagagtacaccggttgacctatggggcgctaaattaggaaaatatcctaaccttctatatgcagaagatataaatcaatggtaataatacaaccagaaacatacaaccaatttactgaaaacaattgcccattctaacaaataattgcctattctaataggtcttctcacaaaaagcaagtcattggtgttcaccttttatttggccaccagccatgcaaaggctttgacctttgtctgattaaaaaaaaagggccttgacctttgataaggcttttgatttccatatgaattttgccagagttaatgaaaattaaagtttgaagaaaagtacactcttttggcctttttctccagaaacatggtcaaatgactctcttattgatggtatgggctccttatccaaaatctgactgcaaacttggtcatacttttgattgaggtcaaccaagaagtcaaaaatttgttccctctcaatcatatctttcagtttctatgtatcagctgctgattctgcctccacgtctcagcaattctggccaaagccctttaagaataatgtaatactcaatgatagtcttggaaccttgcttggtggagataatttttttgcttcagttcatataattgggctgctacatctttctttgagtatgcttgagtgactgcttctcaaacatccttagcagtgtaagagatgagtcttactgatttgttgttgcattgggtgaattaaccaggacatcaccattaagttttttgcctcccatgccttgaacttgggatcctctatattcagggatgattcagtgcccaatgcacatttcattttccccttgcttttcagaaatagctgcagattgagatcactccatgaagtttgagccattcaatttcggaggtagtgctttggagtgtaggattttttattaaaaattgaacctaggtttggcatgggattgggagaagtaatggcttcaaatgcttttcacattttaggtgagagactgaataaaaaaaatggtaggaaaaaggatggaactagcccagatgataacagttaaagctggaaagaatatcattatttctaagggattattgacaacaaaatagcaatttctggcaatgaaggccagacaagaagaagcttttcttggcaatctaggccaaggatgaaaagatctgacatccacttgctctgataccataaggaaaaggatgacaaatgatcttgattacttttctaaatctgtagaaggccataaatcatatacagtaattgacctagtcacaaccaaataaggaaatacaactatcctattctaattacaagaaaatttacaactatcatattctaattacatgcaaatttctgggaatacaactaatttacaagtgtgatggttatatgaggttatatttactgaaatgatgagaatttactcaaatcttcccaacataatccatctcacttgtgaaattgcaagcatcattttctggatagaggtgaacttttattagattgctagtgccgtcaacaagaagataaactctcttgtacgattgaacgaaacagaactagggtatctcatttgcaatttgccgatgataccattttcttttctaacactagggagcaagatttgcagactctcaagagtcttttgttagcgtttgggcatatttttgggcttaaggtcaaccttgacaagagtaatatttatggtatcaatttggatcaagctcatctttcaagattggctgagacgcttgactgcaaggcttctggctggcctatactctatctgggtcttcctttgggtgggaaccccagggcgggtggattttgggatctagtgattgagagaatttcaagaagattagatggatgacaaaaggcatacttatccttcggggggaggataactcttatccaatcttgccttacccatatgccctgttgctttctttctttatttaagttacccgcttcagtcgctgtaaaaatcgagaggttgcaaaggaatttttatggtcagggattgggaaggcaaaagagatcatttagtgaggtgggatgttgtgtgtaaaccgaaggaaatagggggtttgggttttaggaatatttctctgaggaatctcgctcttttagggaaatggctgtggaggtaccctagagagggttcagctctatggcattagatcatactaagcatttatggttcacactccaatgattgggatgctaacactttagttagatggtcacatcgctgtccttggaaggctattgcacaagtctttcaagagttttcctcgtttactatgtttgtggtaggaaatgggaaaagaattcggttctgggaagatttgtggtggggggaccaacctttgggaacccaatatccaagactatttagagtagtcttggataaaaacatacctatttcttcaattttcggtcctactcgtccttttctcttggaatttaaatttccattgtaacttgtcagattctaagatagaggacttagaaggcctcatgcggtctctcaatggattgcatttatctccttcggttccagatgccagattttggccattatcttcttcagggcttttttcatttaaatccttctttctagcattatctcaattttttagatctcctcaggttttcccttctaagttcgtttggaattctcaagttcctttcaaagtgaagtcctttgtctggttagtggcacacaagaaggtgaataccaatgacatgctacaagtgagaaaaccctacaaaacttttagtcctgatatttgtattctgtgcatgaagtatggggaatcagcagatcatatttttcttcatttctccttgacgattgggttgtggcacaagttattttagttagctaagatggattgggtccccccgaggagcatctttgacatgatgtccatcaaatttaatggttttggttcttctgagagggggatagccttgtggcaagttgcaagcatcactcttattcgggttgtgtggtgggaaggaaatgcgagaattttttaggataaagtaaggaattcagagtatctttgggactctattgttttctttgcttctctttgggctttttgttccaaggtttttatggggactccccttaatgtgatacaacttgattggatagcggtgtgtactccataaggaatggtccttttagagtgttcgcttgtttttcagtgtaatttactgtaatttagctttctttggcgggaggattcctcatccttctattttgtacttttttttatctatcaataaatctatgtgtcgttcccaataaaaaaaaaataaaaatagaatgacaaatgctcttgaggagtttgagggtctttgtcatcttatctataaaaaaaaaaaagggtctttgtcatcttgcttgaggttggtttgactggtgacgttgtgttagcttgtacatattcttttgttttctgttttctctgaaggactcaatgtttgtccttgtctagcttttcttacattccccagtgatttcttttattgtcttataacaaaaagtgtcaccttcagaagtggatctttagaaacaaaatgaagggttttgtaggttctataaaatataaataattctacaataatatctatttatttttaaaattataaaaatatggaaaatccataagttgagcaaaatatgagaaaatgtggagagcaatcagggggtgatgaagtttaatctgcagcctttttctaataacaaagctctagatacttctaagctccacagccatctccctagagcctacaaggaaaacaattgtcagggagagagagagagatgaatccgtttccctacagatccatgctttgagcaggatcctaggaatatgttcccaatcctgtaatagatagatgtggctctgaacaacctactgccttgatcatgagccactgagcacagagggctccactctttactacaagagagtattgagagactctttactacaagagattatttctatttcctctgctcgatctcccagccataacctcttggaatccaaacttgctgtttgtgtttgaagaggtatgaggtgagcaaaaacctcaacattcatgccactgctgcaactggctacctctgtcacccccgtctaaactttctcacagaccatgcagttgggctttggaaattgattaggaaagagtgggcttcctttcattctagggcttgtagttctttagaggacaggcagaggatgaggttttgggatgatgtttggtatgggtaacccttttttgagaagcttttgctcagtttttgagtagtgcttctcatacaaaaattgggtggcagatctttggttggggggagggtgtccagggtcattggaacccttggtttttcaggtgatttcatgtctgggggttagaggctgtgatgttgtttcctaatttcattcagtcaaggtgtagtaggttggcatggaggacgctcttgtatgtaaggctataaagaactgttgctttttgtcaatcgttttatatctctcagtttgatgcttgtgattctttccctgaaaatattttgtgctcattggccccttcaagagtagtttccttgtttgagaggcatttgagagaagatcttcactaccaatcagctgatgaggtagggtttctccttggttaatagctgctgtttttgtaagaaggaagaggacacagttaaatcttattccattattagatggctagcttttcgtggttattggtggtctctttgtttgagtgctcccttataaagttgaagaggtggtgttagggtggcatggagttttatggttaagagactatagaatgtattggaaatagtctctctttgcttgtttttaatagtgaaggatattttcttaaatctcctttcgtgtggtctcttaaagtggcaggagttgacaatgttgctttcttgtatttcctggatattgtgtagtgcttaggtttttatgttctttttttgttttgctgccttttgatgctttttgtatactgtttgataggatctttttaatagatttataatttattttgtgcaatttaaaaaaaatctctctctcaaaactcagcattgtaggagctttgctgcttttctatgtgatggacagttgtagttctcatggagcctctttatcatggaggtcaaatgtcttgctctccactgtgcagaaagttttgtttcaaccattttcaaattcgagaacatatgaccttttattcactcatggaatatttaatttatgataatccatctcttctaacctgttggcattcttttgtcatgtccaaactatgtctatcggattgaccaagtgttcttgtatgcaattattgcaaatgctactattagtgaaatcttattcctagttgttttactaatccatcacaaaacctctcatttatcatattaatctcacaaaatattgtgaatttcatttcttcataataaataaaggcattatgtcttttggtaatttattgcatgtgttcaacattatacatgactcatggtacctaaattgaaagaggtctgtgtctcagtgttgcagtgagaaacccttgagaattgcaatagc

SEQ ID NO: 11479 - DNA, 8491 bp, Vitis vinifera
  Intron number 5 from transcript GSVIVT01004109001 (locus G SVIVG01004109001) derived from phytozome v7.0 (chr-ID chrU n; pos 14890358 to 14898848 reverse strand)
gccacaatttatcaaggaaaaccaaagatagaaaggtatgtgactgttattttgttctatttttttttattaaatgccattttctttattaatcgtgttaataaactatttattttccttggctgtgtgaatgtgtgtgttgaaagagagagagagaagaccttaattctcatttgtctaattaacttcttacaatagagaaatatatatacaagactaggttgaactaactaccatatatgtgacctatattaagaaaggaaagaaagattgtacactataaatacattatattcaacactccccctcaagttggagcatatatgtcatatgcaccaagcttgttacaaatgtatttaatcctaggacatctgtgagatttagtgaagatgtctgctagttgatcatttgaattaacaaaacttgtagcaacacaccctaatgtgatcttctctctaatgaagtgacagtcaacttcaatatgcttggtcctttcatgaaagattggattggatgcaatatgtaatgcggcctgattgtcatagactagctttatctgttcatcttttccaaatctcaattcctgaaagagttgcctcaaccatatgagttcacatgttgctaaagccatagctcgatactcagcttcggcgtttgatctgaccactacatcttgtttcttacttttccaggatattaagttacctccaataaaaacacaataccctgaggtggaatgcctatctgagggtgaactagcctagtctgcatttgtgtaaccaacaatttgggtatgactcctgtcttcatacaacataccttggcctggtgttcctttaatatatcgaagaatgcggatcacagtatcccaatggttgtcacatggtgactgtagaaattgactaaccacacttacaggaaaagagatgtttggccgagtgatggcgaggtagttcaatttgcctacaagtcgtcgatatctcccaggatctcttagaggctccccctgtcctggtacaagtttgacatttggatccataggagtgtcaacaggtttacattctaacatacctgtttcttccaaaatgtctaaggcatacttcctttgtgacataaccacacctgaactggattgagctatttcaagtcccagaaagtacttgagtttgcccaagtctttggtttgaaagtggttgaaaaggtgttgctttagtctttggataccctcctgatcactgcctgtaatgacaatgtcatccacataaactaccaaatagatgcactggctcgaagagttatgatgatagaaaactgaatgatctgcttcactccgaagcattccaaactcttgaacaactgaactaaaacgcccaaaccatgcccgaggagactgtttcaagccatatagagagcggcgtaacttgcacattaaaccagactccccctgagcaacaaaaccaggtggttgctccatatacacttcctcgagaagttcaccatgaaggaaaacattcttaatatccaactgataaagaggctaatgacacatagctcccatggagagaaataagcgaacagaagcaatcttggcaacatgagagaaagtgtcaccatagtcacaaccataaatctgagtataacctttagcaaccaagcgggccttaaggcgatcaacctgaccatcaggaccaactttaacagtgtagacccaacgacatccaactgtagatttaccaggaggtaaagaaacaagatcccatgtgccattggagtgtagagcatccatttcatcaaccattgcctgtcgccacccaggatgagaaagtgcctcactagtgctcttaggaagagaaatagaggataaagtagagataaaggcagaataggatgaagataatcgatggtagttcaaaaaattataaatcggatgaggattacgagtagatcaattacctttccgaagagcaatagacaaatggtcagtagatgacagggtcggggtaggagaaatcggtggggtaggagatgagtcattaggtacttcagctgaagagagaggaagagtaacaacacgatgtcaacgatgataaacctgaagaggacgagagagcgcatctgaagggggggatatatagggaagtggcaatactttagaaatgggaagagattcagaggatgagaagaatggagagtcctcaaagaaggtgacatcagcggagaaaaaataacgatgagtgtcaggggaataacaacgatagcccttctaaagttgagagtatcccaagaagatgcatttcgtagccttggtggagagcttgtcctgtccagatgtgagagtatgaacaaaacaagtacaaccaaagacacgaggaggaaggaaataaagaggttgggtaggaaaaaagagggaatgagggatttggtcatgtaatatagatgagggcatacgattaatcaagtaacaggctgtaagaacagcatccccccaaaaacgaaaaggaacatgactatggagaaggagggtacgagttgtctcaacaagatgtcgatttttacgttcagcaacctcattttgttgaggagtatgagcacaagatgactgatggaggatcccatgttgggacataaaagaagtaaagagtgtagaaaaatattcccgagcattgtcaccgcgtaacactcgaatagaaacattgaattgtgtttgggtttcagcataaaatttctggaaaatagagaataactcagctcgatttttcataaaaaataaccaagtacatcttgaatagtcatcaatgaaagtgacaaaataccgaaatcctaaagtagacgcggtttgacacggaccccaaacatcagtgtggacaagttcaaaaggagactttgcccgattattcaaacgctttgagaacaagacatgagtaggtttcccaagctaacacgactcacacacaagcgatgacaaagtggaaaaacgagggaccatcttctggaacttggagagactaggatgacccagacgactgtgaatgagaagaggagcataggtggaaatgcaagttgcaggagatgaaggtgatgtgaggtgatagaggccttgagactcacgccttatgccaatcgtcttctccgtactccggtcctacaagatcacagatttattagaaaaagtgatagaacagttaagagtgcgagttattttgctgatggaaataagattaaaaggacactcagaggcataaaggacagaatggagaggtagggaagggagaggatgagccaaaccaatacctttagccatagtttgggaaccattagctaaagtaacagtaggtaaggcagaggtagtagtaatagaagagaaaaggcgtttattaccagagatatgatcaaatgctctagaatctagaatccatgggctaagagaaggagactgagtaaagtagacagagacattaccggtctgggcaacagaagctgatgtggctgcctgatatcggagataggcatcataatcactaccagtaagggtgatactctgagatgtggagctcgcagcagagtcaggtcgagatagcagaggatcagatgactgagcaatgtgggcagtgcgaggacgtcgtccatgtaactgatagcaacgatctcgagtgtgaccaagcttattacaataggtgcattgtggacatcgtcctcgaccccgattgccactacatcctcctcgagagttagtctgagaggctaacacagatgaatctgaaggaccatcaatcgacaaggtctgagtagaggagaggcgtaagagacaagcgaacacatcatccaatgatggtactgatgaactagcaagaatctaatctcggacagactcaagatcggacggaggctaatgagggttaacaccataaagaacttgtcagtctgtatttgttgagcttcagcaccattagtgaagtgcatcaaagttaagaactcctccttaagagacgcaatccggccaatataagtagacagatccatgtcctgctgtctcacatgaacaatatcagaaaccaccttataaaattgttgaatatcattcgtgtataatcctttagcttgagtccaaaatttaaagtaggttttgtaggcacgaagatcttgtaaaattttgggatcaatagattgccataatacgttgcataattgtgtgttgattttcttccattgcactttgtcaacatcaggtatagcatcctcaggtgtaacaagatgatcctcataaccttgtcccataaaccaaagttccacagacgctgaccaggagagataattctcactaccaatcaatttttccaatgtgatagttggagatctagagatgacgaatgtaaaaataggatttttagtcgccatatccactttacctgatattgaatcacgtttggatcgaagagagccctaaagagaggtcggatcatagctgtggaagaagaacctggtatgtcgggacccaaacaaaggagaaaagtaactggagatgaagaagaggccttcccaaggcacacataggtctcggccaaggaagggagctgccgttggaggccgtcggaggttgaaagaagacccgcggaggctgaaatgccaaaaaaatggagaagcaaggtttgcagaggactaacggaggcttagaagtgcaagacggcgccgaacgagcctgctggtagaagctcggcaccagaagtgggccacgcgccctcacgcgccagtgtgtggaattcaggccgtcagagaaaaacggctcgtgggaggctcgtggatcggtttttggctccggtgctttgagaaaagttgcagatctcctctttgcactcctgatgatgtggtcggtgttggaaaatatcgccaaaaaaaaagtcgctgaaaaaatgttgacggtgatgagggttttctgaccacgatatggctgaccggaaagctttgggagatggaaaaggtgaccggaatgaaacacggtcactagatggattctcggaattaattacacgggtaaaccagaaagaataaagttttctcccttggctctaataccatgttgaaagagagagagagaaaactttaattcttatttatctgattaacttcttacaatagagaaatatatatagaaggctaggttgaactaactaccatatatgtgacctatattaagaaagaaaagaaagattgtacgctataaatacaatatattcaacagtgtgtttgatttattctcattgatcccctcaatcaattcattcatttgatattgcattcaataaaccactcagtacatgttgaaaataagcagaacaaataattactctttgtaatccatcccttaaattctgagtattgtagcattttctttttactatttttgtgtattaatccaaactgtaacattctaaaatatacaacgctggtggaaatggaatgttgtaccacaacaatttagcattttattgtgtaaacaattttctatgaaaccaacatagtattgtgatgccttatgctgtaactttattagtggtactgccacacccttggtggcgacatcagtgttctgtcatggtttagagcatgattcaaagtattggccgataccgatatgtattggctgagtcatatccatcttaatcatgggcacaacgaatctgataccctagttgatatcgtttgattcaacaataacttaatttcaattcaaacatgaatcagttgatcaactcacaatacaactcagaattataaaacaaaaaattcaaactgattcattttttaaaataattatttttaccaatcaccctttatcatttttattttttatttttaagatatacattattaaaaattagtacttggtgtaaaaaagaatacaatgatgttttaaatttttataattcttaacattatcataaactaattacaagatatgcttttataattacttatatcatgttaaatgtgaagttaattttttgagttcatctgattatgattatttttctaaaattttcattagtcttttagagtttttatctaatagattgtgcatatcacccaatattgatttgagatactgatgcaccttgggacttgccgagtcaacatccaatatcgcgactttgaaccatgatttagagttttagtcttcggtaacacttggaaggaaaaaaatttgtttagatgcattgcaagtccaagtgattatgtaatgtaagggatgctattgcattgatccacattgtcataaaataacatggatgaatgtctatttgatgtaaagttccaatctgtgtttttttttccaaaatatctttagacatatgcataagtggctgcaaagttggtgaatgtcgtaaaaaatctttcttatattaggaaataaaaaacaccattatgtttattgataggataatgaccatctttattgtttttcccttttttttttaatagataacgtttttctcttgttacatggaatcgaacctctagcctaccctatccctaccctaactccttgccactagagcaggcctcaagtgtgattattccttttccttctataaacaccattatcatgaagtaactgcaaacattatatttatgaaaaatattaacccatttaagaaaaatctccttctattttttttcaaattaattagtggatagtttctttaatgactgagcgtttctagacatttttaattacaaaattgttactggaaccttcctttgaaggttataaattcttaatttgcagtgtgcgttgttcttactctgtagaccatcttgttatctctttgcaggcagattgtaacattctgaccttgttgatggtatcattctcgcagaaatgttcttttttagtgttcttatttttgagttgactgccatgtcttgtttcagattgaggttgtttttttcatagttttagggattgctacatattgaaatgtatcactcactttgcagatcatatcattcttattttgcagatggtggcattcttgcaaaactgtacttttttcattattctgattccttgagttgaaatccatgaatgcttcagattgaggttgcagagttaatggcttgagggattgtcttggggaagggagtttgttctctagatttcattgatatgttggggggttggcctaaggtctctcattgtagccttggttttgggatctttgttttttttctatctctgatggttttgagaccttcattcaatctctccaataaggctagtaattcagcttcaattgacaacccatttccagttgtgcttagagcaagtgtaaatcagcttatttatgatctccaaaatccccccaatagccatttaacccagatctcccaacaagttaaaattcggctcaggacccctccagagggaggacggatctaccgaatactggatggagttttctcaaattaccagaaccaatcactccctgatctatgtggatagtgggaatgatgaaagaaaggctcgctttgagaactcctaggatgtcatttcttcaatggaaatccattaactttgatattggttcctttttagtttcttgtgttaagttaatttctacatacacttgatctgattttctgatgcataaagttctattattgctttatttactcttgagatcgaatcttaaagttaatcttcattagtttttatctgaatgattaaccatcatcaacatctggaaatttagtcctgtttggtagtgggaaagaatatggttttttcataaacatttcattttccaaaaatgaattaaacagtgctttgtttcatctttaattttttttaaataaaaaaaaatcttttttattttttctgaaagtgaccaattttcagctagtattgttgaaaaatggtttctgaaaccatgtcactaaacatgtttcctatgtcatttttggccatttccaaaaagggaaaacaattctcactcactacccaacagtttcttaatgttataccatccaatggttattgataacgtttctagctagtttcattgtggtaacatatttttactgttatttaaatgggataccaagctttacatagggaaaactgcaatgaaggtccacttctagcatcatgatgggttgaaaattgtgatggtttagcaaataggaaatacatgttctgtgaggattgaatgaagatctacctcttgagaagactaatccttgataagttgatattcaagggttgggtagttttatgactatggttatcattttgaagaattatgattgtgaattccttctaatatgcaatttgttgtactctgttttctattctgaaattagtctgaaaaatattatgcaacaatctcaattcccttttatacagctatttctcaaacccagatgctaagggaatatcttttacatttgttcttcaggaaaaaggcactgaaccttctgcaaaatcatctca

SEQ ID NO: 11480 - DNA, 5918 bp, Vitis vinifera
  Intron number 3 from transcript GSVIVT01021973001 (locus G SVIVG01021973001) derived from phytozome v7.0 (chr-ID chr1 4; pos 4855444 to 4861361 reverse strand)
tgcagtttctgctgatatatccaaccttcctgcatgtgagtaactgacctttgatggatttagcattctcaaataaaaaatgatactttgttgatgaaagatctgatacagagaggccatccttatgatctgaatcacctacttagtgcgtgcttatttaagtcggtttgctgaaaatcatcccacttagcttcatatgactattttctacttctatcaattgaacatcaaatatccaagctataatttcatagttaatatctttatatttattatattttgttgatctttgaattaatttttagggataatctcactcacctcccctgaggtttgggctaaataaacttagcgaccattaatttgaaatttcatcaaatatctctcttactttgagtcaaggaaaggttaattacatcaacccttaatttttattatgatccctcatagtttgctccaatgccattggaaattgtaatgtgcttggcacaacttagtagctgaacctgctgtcctaatctattaaactgcttctttttggaattgttgtatccaattttaacagattgggttggattagttgttgaacccaacatctgagaccaatccaatgaggggattccaattactgttttattttatttaaaatacaaacacatgcacattgagcatttatacagtttttaatctagccctgtttctgctaaaagctctgctgcatccacaattttttccatgcttcattgccatcttgtcccacatgttggatgataatgacacacaatggttcagtgataatagttgtcccctgtctttattatgattagattgatgagttgagcaggcatgagctcttatgaataggttatgtttagattgggtcttctaggtcaataatataaagctaggtttaaggttgggtagttttaaacttcatcctcttccagaaccatagaaccaacaccatcttcccttggttcttgatcttagaatgcaactacttcgaagatcatgccagtagttagtagagttaccagtataataatgtaataagaatgttttagaacaaaaaatgtcttgcatttgtttcaacctcattgatattacatttgttgcatgtttatagaattcatgcatccaggtcagtgatggtgatcattgtcaattggcacaagtttctcaatatttgtagccaaatcatcaaactcaatacaagcaagggtttgcatggtttccaatctaatgattttttgataggtggtctctaatcttatgttattccatgttttattatctctctctaaatctactttgcacatatattttttgataggcaaatagaataatgcattaaaagatgtgaaaaaagggaggctcaccctagtataatatacaaggaacatgcaaatagcaaaagaaaaagcaaagcagaggctaggacataagggccttagaccatccttgctatattggtgaaatctcaaaaaagataatgaaagtttatgatcttgtatcacagaactacttagagagagagagagagagagagagagagagagagagagagaaagagggagggagggagggttgaataggtagcccttttcatttttgccaaaatttgatgaggatgtaattaataaataaaaataaagaacatttgatcgtacaatggatatgagatttacatgaaaaaccacccataaagccttctagagacttaacgaaaataaaaaccacatggtcaattgaccatagagctaatatactaaatatgaaagatcaagtacacagatttacttgattagacactactttccctaagacgtatactacctatacctacacttctgatttgtcttgaggtttgcaacggagcactttcataatccttagtaggcttcctgtcaccttgaggggatgtgatcaattatcatgttctcaacgaataacatatatatctgtgagagtgttgattagcacaaaaataatggcattatattttggggtgcaagaagaacaaattgcacaactaataggatttgtaagggaaaaccctagtggactaggtggattttagaaatcaccggttactaaaattgaaaatcgatctaggaaacttgaagaaatttggaagacctttgacatttagcaattttggcaatgagcacttgaacgatgatgacatcgcttgagcagtcttattgaaattccctttataagtttaattttctcgcctaattaaaactctacatttattttattccttgctaagtcattacacttcaaacaactcaataaaacttacctgaaagtatgttgtagggaaacatgtagagtcaaaaccaagaatgtaaggaacaaaattgtcaacttaaactaagttcactaataggtagattgagcatgtgtttcaaattaaacatgtccaacctttcaatgatttcatattccagtaaacacaaatttctctttaagaaaaattttatggttaaattgaaatttattgacttaaagcatgatgcgagtacaatccttattctatcgtttggttcttcatttcctagttggtagttgaggcttgaagaagcttgatcccaaatgaagagtttgctaaagatttgatgttgtaaccttaagctttatttaagccttgacttgagttaggtctggggccttgttatgatttgagggttgttgtggcttgattcttgacttgaataacgttgattgagcgcttgaacaatttgattttagattggaaaggtttttttgtagacttggatatgaaagtttgaaacttagaagttttaaagaccttgacttgacaattcaaagacattttgaaaaaaattgaaatttctttgaagaggctttgaagattcaaagacgatttgaagagctttgaattccccttgaaaagctcttttgcacttatgtatttggattgtcttttaaagtatgatgtaaatcatcttttgaattgtgccttgaaatttggaatgagccttatttatggggcatcatatttgggggtagtttatgattctttaggaatattattccttattaaagttaatatttagggagatttggaatgttacatttggctagttttgaccctttgaaatattattctttaattgaaaataacatttaaggagatttagaagactatatttggtagtgtttgatttattttttaatgaaaatcaataattaatttatttcaattatcaaaattcataatattttatttattctaataattatattttaattgttaggatatatatttcttttatttaaatggaagacaatttgtattcttcttgtgttgggccacgcaacacatgaaattattttattagtagaaaaattatgtcatatgaggacttttaattgatcacaatttaagtaaattatgaatatttgaccttttttaggtccataattaacttaatctaagtatgtgttaaattgtataaggttaaattttgcctgtctacaattccactctttccaatgcaccaaaataaattgaaggggggtggttctccactctttccacctcctccatcctgcaagacagtcttgccagcaaggcacaagttactattgtcatacctagtacaattctagccataaaaattttgtaactgtattggacattgataagaaaaacatagtttaaaaaaggatcaactccttgaccacaaaataggtttcagggttggagcagcatccgatgtaataagaggttttgaaccctgtgtgaaccatgcaagctccttactgcatttttttatttttaataagcaaacagattctctattgaaagagcgtcaataaaagggggcacacccatgtaaattccttactgctttgagctgtgctgttgtccgttcctgtttggttgatatttatagcagtcagtatggtgtcattagtgggcagcaaattctagcttggagaacattgatgatttcagtgaattcggagtagtgtggtaggagaatcttttaaagtgcaaagctccaagtccataagtaggagactctcctctctgatctttatgttacttagggttcagatgcaacatatttaagagaatgtctttttaaaccattgcagattctttgtctgctttctggtactgacagcttcttgaattgaaaactttacataattataggatttgcttctaggttttaggggctaatccttttagataccttgagcttcccatatatcgttataggatcttctttggacatgactctggaaccatctttgtcctctgattttactagtgattgggtgtctctctttgttctctctggcatgatttattttatttattctgtcttgtctctcatcaagtaggatgacatcctatcttgggttagcttagtttttggtgtgcctgcaggccatcaatcacaagatgcaatctctctgtgctattaccatgctgctgccatgacatcaattattggtgtcaatgtcaggttcatatgctgatcagtcaaaatcaggactcatttgatacatgagtctgtatggattcatttattcagaattgggaagttgtaatatagtaggttgggtagattgtaggtttatgcataaatcgaaacttttgaaaggatgttatatttagttggcatggcagcttttggtaagggcaaaatgaaggtgtgccagatggctttgttgtacctacttcgacatgttacttgtatatggaaagagtggtaccttaggatctttgaaggcttggagtgcttgaagatgagtttgaactacttgattcttaattctatatttgcttggtttgagggtgctggggggtttatagcttgtcatttttagatttctaaaattgtattctatttccatgatctcaaagaaaggagtccttatggtctagggtttataggcctgcttgagtgttagtaagattattactgaggccttatatggcacagagatattcttgctcattctatatcctgatgctatggagcctttattcaattcccaatgaaaaagtaattgtgaagggaaagagtaattggtgaagaaggacgtgcttagtttttctactacattttttagtgaagaaggaagtttgtctttttttttttttttgtgagagaaggaagtttgtcttaggatgtagaaatgggttctcatctgcttttctatccagctagggtgtttgtcaaggtgattcacttgttatctatcacttttgttgcaaaatttcttaccatggtttggtgatgagttaccatcatgttaagagataagagtgacgacttcccatttccaaactgcagggaataggatatatttttttctaatgatttgtgtagaggcaatagagcgcataaggtattaaggttgccaatttcacgatctcaggtagcttagggttgagtggttgatgattaaagacacttaacaagctacgcatgctgacttaattatttggatgatttcctctatattcagaggctctattcatgtgtataacacttgagttttttttttgatgtgtgtgcaagtattttaccttggttgatcatatttcgcttgaccctagttaaaatactatccacttcactctgcgtcgcttattaggaaatatcttccaccaatcttgtgtaaaggatgcaagtgatcaatgccaagacacccagtgagaatggatgattggaatttttttttctttgcatactgttgtgacaattttaccttcaatgatatgttcaaaaggtgcagattgtggtgatttgaactttatttagctatcttttatcctgattgaccacatatagtgtactttctcatgatttcatttgttttctctattgacaaccaggttcctttgtggttcgtataaaggcctg

SEQ ID NO: 11481 - DNA, 1639 bp, Vitis vinifera
  Intron number 4 from transcript GSVIVT01023121001 (locus G SVIVG01023121001) derived from phytozome v7.0 (chr-ID chr1 2; pos 22354689 to 22356327 reverse strand)
aactggtaaccttcagtctgctaagaggtttgtcttttgcttcttgacgtaactatgtaagaaggcttcgacatacaatatgttagaatgaggtaatggactttattttaaatataaattgatgcagctgtgcttggaatgtagaagatgctagcaaccaaaggtgaataggtcatatatgatatgtccaagctaaagcagactgcatattttggcttctgtgtttctcaaggcccattgacttcttgtttttctgttattgtgttgtattattttctgaagattagaaattaccctcctgtgataaaattccccttctttatttgtttttattttgcaatctattcgtttttattttgcaaactagaaaaatcaattccttccaagttagctgatataaatgcattgagatagatgcaacacaatgaggagagaatgagaaatgagcatctgtaagagaactagaattagataaaagggagtttatttggtctggtcatttgtatagaagacctatggaaagagtacttggaaagtacactccctactagttgacctatgacatcagatgtgagaaagtgtgcatacttcgctaggggctcttgaagggcaaggattaagtgaaatgacactttgaagctaatgggatcggagttttcagtatcacaatcgaacaaaacatagggctttaaatagggtgagattttttaatatattctgtgcagatgatcatataatgattgagataaagtttaaaataatacactaaatggccaaattttattttaagaaatagaagaaagcttagggaaaacattttgtgaacacgtgccataaattctttacaatgttactttctcattcaatgctgttggtccttattgcttcatgctggatattcagatatgcatttttgtgctttttcctgtttgttttcagattacttgttaaaaattttcactgaaattggtatttttctcatcacttcctttcctttatggaaatatgaaaatctaaagttcagccacctaactagaaatatatatcaaatataaatctattgctttgtacttttgatggtttgtttgacaatgccacttaacctttttatcgatgggaattcagcacctaccaaaaataaccagagttaaactcctctctatcaaagggaaaggaccatacagctcttgctgtttaggtctcctttagtttgagatggttagctatagttggtagagattccatattctgtgagattttttcatgtgatcctgtttcttctttgtttagttctaacaggagtctttaagtttttattttattttatcttgttattatattttattttacgtttacttgttcattcagacgcatgcttcttttgtcaagtaatgaacgatggtaaggcaacataaatttgtaggtccatgcatttgtgagatctatattaacaagtttctgccttcatttgagaaactttcacaataagatgctatagactgtttgaaagttgtttcaagttggataattcaaaatggaatggctcacttcttgaatttttttgtccatgtattgatgtcaccacttcactctgttaattctgaaaattttacagaggtgaaagtggttgttgtatttg

SEQ ID NO: 11482 - DNA, 4525 bp, Vitis vinifera
  Intron number 2 from transcript GSVIVT01031575001 (locus G SVIVG01031575001) derived from phytozome v7.0 (chr-ID chr5 ; pos 18370999 to 18375523)
cacttagagtgagtaatttgccaaaataatttttttgttgcttcccagttcattggatgtggagtggattaagcacccaatatttaatcctatgcaaatcaaataaaattttaaaccaatacacccttgagtcttttaaaggttttggagaaaattttccagggaaaatatgttcccaagttgaaattttctgttggttgtgaagggtttttatttaattaatgatacttggtaaaatttgatccaagtgtcatgctgtaatgtctaatctactaagcttattgaaggcttttattcatactgcttttcattagctatgtgaattattattattattattattattattttttatttttttattttttgtccatcaagcttgttttagagtcatatctttggcagctctaattccctttggtcattccttttctggcttagatcatatccttttggtactttccacatgaattggattacttctctgtgctgttacatttgtttatctttgttgcatatgtctaaaccatcttaaacagtttgcttgacatgtagttcaactggttagcttcttgccaatagcctcatttcttattctatctattccggattcatgtttatgcagagtgatgattgattgtatattttatgttggcaaagtacctaccccaaccattgcctttgtcaggattgggagtggctgtgttgaaagatgctttaaatatgatattggcaaaattcttcattgtggaatattcgtgcagataaattgagaagaaaaaaagtcattttgccataaaaattttctctaatcttttttgttgaatcagagttggaaatggtgtaaacttgttgtctcaagaactttgtttccaaatctaaaccatatatatttttttatgccttcaaatattatacatccggaacaaatattgttttctaactctctttggttcaaatgtggaaacgattaggatctttgaacaaaccctttactgttttaattcctatgtctcataaatatgagggggccaatgtggttcatatgagttgattcagattaatactgtttctgtttctgtaaagatgttacattagccaagattgctatgtttgagacttgtgtataactaatgccatcacttcttggattatgtgatctatcatccagtatttagaaccatggtcacaaaagtgtaacaaaaattatagaaaaacttgttcaattgaaaattaaaaactatgttcatcagtggtcattatcatttaacaaacaacattttataaactagggtagtggataggcaaggatttgtcttcaatgtttaaacttctaatatctggcaccttaagatatttaaacccatttgtttgcgctccatgtaactgaccgttggaaaaaccaccctattctttgatgcaaaacagttacaaatagctgcagtttgattcaatttgttgaactagttgctgacttcctaaaaacaagtttcaatttccttcctactaagaaatgaggagttttattaacataattttttttttttgataagtgaggggttttgttaacataataaagatgaatgataattatttcaaggtgtaataaaagcagcgcgatcaaaaccagcataatcattttattaaaaaggcgcacagaacatgtgaggtgatggacttaatagttataagatcttgcatgcatggaagtttgggagtttattctaattgggacttttgattcacaaatgagggatctttgaattttgatgagtagtataaaatgtaattgatatcaaataattaatgatggaatcaattttttctttgatgagataaaaaccccaaaaacatactggaggattactatgcattatgaacaaaccataaattaaagtggtgtgcttcgggtactgattcattgtagtgggattctggcttctggcacttggccttttctttgtttgggatgtttgggtccttccttgaattggctaaagatgcgttgcttagtaggcgtagtggtgctatgtggaatcttgtgctcatatattcccatgattacttctgcaaaagtactttgtctatatgggcttcttccatatatccattccttggaattccaggcaagtttctaacccttttgcttgtggggttagtcctcaggtttgcagctgaaaagagtgtttttgtttttgtttgttgttatcgttagttttttcaacttgtttaatttgtatatgatagccacaattttatactgaagtttaggtgttagtcttgttgaatattgatcttttgggatctctactaagatttgaacctggaacctccaaatttcacactaacccattaccacgctagctagtgatgtaatagacagatttcagctgccaatataacattaacattttcggttttaggaggaattagtatttttattgactcatggtgttgaatggcataaatgtctctttcatttatattcttggaattagatcctctttttttttttttttttactgtgagacccataatcttctttggtcttctcagttgttctttttctttttggtttcttgcatttgaagaagctcatactagaacctctaaagcaattttagcatcgagacatgtaaaggcattgccttttggatacttcattttgccacatcatttttaactcatctaaaagtgttgtctgaaatgtcactagcccttattttttacatgcattttatttgactttgatttagtatgactgttgaccctgttatcgagtttttaattgtaacatgatttaaatgtatatagggaggtaagcgcctctctacttgaggtttttacctatagtatgatttaaatgtacatataaagagttaaggatccctcatttaaggtttttacttgtagcatgatttaaatccatttaaggaggcaacctgattttaatacttttggaagatgaagtattgaccttaccaacctgtagttgctcagttggtatcaagtgctgtgcttgcattttttttttttttaatcagagctgtgcttgcttatttgccaacaaaggcttctcttggtagtggcttaagaagacaccttgggatagatccattctctttagcataaggcgtgggatatggacctttgcttgctaatgtaaactgaatctattccctagaagacttcaatttatttattatttttgtcatcaactgcaaaaaggttgagactccaaaatccaactgggttaagattcgatcatgctaaagaatgagggtggttgtagaattatgcaatcctctatgaactctctttaacttgaggagtagttattgtcagctgggtgagaatgatgtcgatggtcactgcaaagattgactaaatttgatactctttgatattgcactaaagaacagcctttaggtagcttgtcttgtctatgcctatattatacctgatgattccttcttctttgtgaaggaatgggtatttaaaaggagaaagaagaaaccatgaaaaagggaaaatacttgtatatttttctttattgtataatttttatttttaattattaggaaaagggctggcaagttttaattagtgcaatatgtgcgatatctgacttttgttaccgttgactttcgtattttaagacttgtaatgctatatctttagtagtttcagtttgtgggtcttaatatatctgggctgtaaaaaggactagctgcaatgtgatgtaaatttggatgttgaatgatatttattcactaagagaactttcccttgtccccatttgtattatgttatattttgcaatataatgtaataacttggtttttgaataatatttactagcataactttcccttgtttcccacctttttgtatgaattattttagtttgaacataaatatatagtgcttatgacctgtctgttgttgaaggttgattcccacctatatatatatatatacacacacatatgatgactttttaattttaattctaattttttttatgcccatatcttcttttaaatgttccttttcatgcaggagtgcattcaattgggagaaattagaaaatacatgaaaaggaaataattttctttatattatctggtatgagtcaatttcatttttcaaaacaaataaataggcatatctatttctggtaacactttactaaagcaagactaatttggatttagtgataactatatgacttaatttgacatgacctaatttttttgagtttgctctgtctattttttcggattggaatgaaggtatattgcaagtttcttagaagatttgaacagcttattgaatggtgaaaattgtaatatgatacttctctttatgttatttctatgattgttctcttctgtgaagcatagttacgtttcatactctggacatttgcggatcttgtgtaacttattgtgcttgtgatcttttattttgttcatccaacattttttttgaagaatgatttttatgcctcttattttaggtg

SEQ ID NO: 11483 - DNA, 2942 bp, Vitis vinifera
  Intron number 4 from transcript GSVIVT01018794001 (locus G SVIVG01018794001) derived from phytozome v7.0 (chr-ID chr4 ; pos 19796685 to 19799626 reverse strand)
aagcaatttcaaactattgagaggctttttgaacggtcagtataaatagttttgctttctatagttgaaatgaagatatgctattttttttattatcaggtgtttttttgtgtattgtttgcatggttgtgttacatctttggttcatatgctaataaatcttgctgaatttgtatgcttcactagcatatctgttgtttactcatgctctgtgttctgtatatgttacatattgcgttctttattgtgtgaaatcatattatggtgtgaattaacttggtgaggcatccattggggactgtagatttagcaatgagagaaaactcattgcatggtcatttgacttttctccttgcttgtttatcatgaatcatatttttatttttcattctgataaaaaaatgtttttattttttattctgataatttatttcttttgtatttttcgtttttattatatttctttctggaaatagcacatctgcagctagtctcccagtctaagagacaaaattttccgattggtttctttcgatctttcagataactcacaatgagaattccttaggaaaccaattgattatttcctcttttcgatgatttctttcatatgacctgataaatgttttaatagaactagtacacttctctccaagctcaaatttcatctatttgtaaaactgaaattactgttgaactactaattttcctaaaagcttaaacttataggatttgggcctgcaatgtatatcatgtcctttaactccctccttcacctgataaatgtttcaacagaactagtacacttctctccaagctcaaatttcatccctttgtaaaaatgaaattaccattgaactactaattttcctaaaatcttaaacttgtaggatttgggcccacaatgtatattatgccctctaacaccttgctttacttgtagcctattttttttttttttgggcttacatgggagcttaataaattgggaaataaacatacggtggtgagcttgaacacatgacctcttaccaagctaagctttgatattgtgttgaactatcaatttttctaatagtttaagcttgtagaatttgggctcacaatatatatcatgccctctagcaattactcctctcaccgtttgcttgtatttgcatcactttgttgcctctaaaaaaaattgtggcttataagtgaatgttctttttgtgttgctttcctgtgtaaacaagctcatgattgagagcacatgcttgttctacttttctcatgttgccactgtggagctgtctgcttgattccatattgatacagtcttgcagttaggaccctttttgcttgtttgtggggtgttttgggattttgagtctcacatggaggattattatccttcttcgtacttggtcttctgttgttataaagtttctctgtttcctgtggggaaaaaatgttgctattgtatatgaacacagttctattcataaccagctagccctgttctccatatgccttctattagtagttatttcatggcaggtaatcaaatttgtaattatctttctttacttaaatgtttttgttaatatgtggcagaatatctgagtatgcattgagtcttccaacccttttaaatcataatgccttagtttgaaactttgcaggaatctctgatccacaatttctatgttttttattgaaatttaatcatttcatttcattgatcttgttatattgaagataaattaattatgttgctgagttatgttatcaaataactgattattgtatcaaggctgttttgagtagcgtatctgatgttgctttgttgaaggtagtaaaatgaataattcttttaagacacgagtgtaataaaatgaataattattatgtctctatggcaaagcctttttgtacccattgcagacatcctgtgtaccttggtatatagtctttttgctgattatctataaatttcttgcttatcaaaagaaaaacaaagaaggaataattcaggtaatgtcaaatatttgctctttagtatttttagatttaattttgcttggataaataaagcaattttcctgacttatagttgctgttcaaattggtgttacaatgctgacccaggtcacatctcaataaccattgatatgtaccttttgaagtgacttcctattttcaaactgctccactcccccctatgcagccccaagctgcagaagctccttgtgaatttgtctcgctattttaggccttggtataaccatacccagcctaaaattgggattagagttgattcatagatttgtcgtggtgaactgggatcttttccaaatggcatcctgtgtttctgagattggctgaggcttgaacatttagggtggatttattcttggcccagctgtgtattttggcatcctttctttatgatatcccttacatcttttttttcacctgccagattgtggcttggtgataagccacacaattaagaggctcaaagtttcaaagatcatctcaattacagatcatatcacactttagagcctgaactttattcttggtcttgtctggcaccatgaaaaccatgttctggttaggtttcggctctgccagatttgacctggctttttgtattgctagtttgctggtgttatgttccagcagtaaccacaccttgctccaagattgttatattgaggccagcattacctcaggcagagtgtcattccaaggccatctggggtggttgactggatatcttgcaagaatgcaaaaaatagacctctccatgattgtagtgatttgtaaacctctttctctgtggtggtttctatttttagccttcctctttgcaagctactttcctgactgattttattatttaattttgtttggaagcaggctagttgcaaagacaacacagctggagggtgaaa

SEQ ID NO: 11484 - DNA, 1217 bp, Vitis vinifera
  Intron number 1 from transcript GSVIVT01007999001 (locus G SVIVG01007999001) derived from phytozome v7.0 (chr-ID chr1 7; pos 6795999 to 6797215)
tcaataaggtatatacacgggcatgttttagatcctgccatgtttgattgcttagaaattggaggaaaataaaacagaacaggaaaaagattcaaactttgtgttttatacagttttggctgtgctaatttggattgaaccagatatttggagattgtgaggttgtagtttatattctttttttatcccgttagttttctaggcaaccaaatagatggtaatgggttatttaattatgtttttaatgcgagtttgatactcattagtgtgataaattgatgaaatactctgttataacataggacatttgaatcaactgttgattgttaattattttgtcggtaacatgaaaatgcagtatttatatatgaactctgcattttgattgataccatacatcttcattatcctgaagaacatccgttgtttaaagctcaagatgctcaatatgattcagagttcttactctatgatttatggtatatttttcaacatgggttttggtcatcatggtgcaatgatgcttaatactaaccagctgattagaagttttattaattttcttctacaaatagttgtgcaggagtttgttgctattattgatactgattttttcctcagtgcagagttgggtgtttgtttttggggttaggatgttcaattgatgaatttgtgattaatagtttatctgtcatgaggggccaagccatcaaatcttcttttatgtgtgattttttggaatgagttaggtgtacatattccttgtttccaatttacctctcacgctcgccaactcaaagatacatgcatctgtatatgaatgaatgatgctgcaggatgcaattggattgcagaacacagctggtactggtttgtggttgcatgatgtgtttacctttgcagatgtattctgcagaataccatattttaattgcttatcttttttatggttgtttttgagatagtttttccatgtttccatgggcaaataacatattacattcagagtggtcttttaaaagaaatttatgaatataagtaggagtggattaattaatagccacacactagatttggtaatgtgcatttggatttgcatgggatccatgaaatttagaaggtgtgatcatgtgttttaatgtgtttaattagggctgtattggcctgttttacatgaggggttaattgcttcagcctgtttgtttgtgttctgcagt

SEQ ID NO: 11485 - DNA, 10358 bp, Vitis vinifera
  Intron number 2 from transcript GSVIVT01021587001 (locus G SVIVG01021587001) derived from phytozome v7.0 (chr-ID chr1 0; pos 7493882 to 7504239)
ttgagattcatttgcttacacctcagggtttacaggtactctctctctctctttctcttaaattaagtttcattttggttgctattaactaagggttgtagggggaggttctggcagaggttgattctcttccatctcagaaggtgtggggttctagcccttcttctgtgtggagttcttttctaggatggtggtgagaaataaatttagtacagtttaacatcttgccaatgaagttgtcttttaccaagttgccaaattgttgctgcatgtgcaaaatgagtgcagagtttgtggctcacctcttcctcaattttatgattgcttgggatattttaagacttcatttattcttgtttggcctttgatgggtcatgccttgattgttgtttatggacgtttttggggcttggtggatcaaggcctggaatgctgaggtgacgatcatagttgcaagtcataggttgtgatccaatgcattttgttctataaaaacattgtatattgtcaatatgcatgggtgtgtattttgtcttagttgtttcttaaggttcatatatgacaaatgattctatgatacaagcatcctgaccatttttagtagtttctagggaaaaataaacttgattttttttttcttaaaatggccattatattaattttttaaaatgtacaaaatgatgttaaaagtggggaaataaagagacaatgatcctacatgaaaatactatacatgtgtttgcatgttaagtattggaatttgattgtaattatcgttgtaataaatgttcaggagatgttatttaaatgatttaaatgttaatgttgaggatgatgacgaatggagagggtaccaaaaggtacaaccccaaagggagaggaccaccaaccttccctcaccaagaacccacccaatctacaaatagagacttttgtttaatatattactctttcttttttatttttaaataaattttttagaagagattgatgataagcttggaaagttgcatgtgatcatattttcttttttaactataattagggaattttaggaacttagaacttatgatgtgatagtatttactagcaaattgtttggaatttggaaatgaaaattatagtaaaaagtttgagaagctcattttgtggatttttagatggatctatatatttaaatgttatatttcattaagttgatttcgtcaaaagtctaatgttttcaaatgtatgattttttttatttttaatttgcacttttttttataggtaactcttttgtatgtttgtatgtatgtattgcaaaactaaagtacaaagcaataacacttaaattttagcttaagtggtaaggagttaggacatgaaagcgggtatacctattttttctttttatttgtcaatatgttaaaaaaaattgtatttgatgatacacaatgtaagatgaaaaaaaatcataaaatcatacgcgatgttatttataggttgataaccatagcgaagaccaattagaaaataatgccaataccaaattgagaactttgcctcctatgaagggaaaagagatattgaatattccaaaaaaaggaaatgacatttctagacttgagcatattgttggtagcattctttttttggttgatttccttattatctaataggctattccttttggatattgtagattatgcttgttattagtattttggcctttagtagtcttgtgtacatcctatatccctcattttggtcctttttttttttaatgcattgcaatttcgtacttcattggagggatcattctaatcgatagatttcttttgttttatgtaacaaggatagtctagtgttagcatttatacattgcatgttcttaggtgtatagatgtgtatgcttgttggctatcaatgaccacattgaaattttgtgttttaaggtttttttataggcaaaaaacaaatatttattaataatgcgtaatcgaagggtgcaccaaagaacacatgttgtacgtaataagcaccaatttggaagagttggattgtgaaattgggtgcaaggtgggaaagttgccttcttcatacctagggcttcccttaggggcctctcacaaatctatggcagtttgggatgaggtagaagaatggtttcataagtggttttcgttatggaagagacaaacctttccaaaaggggaagactcattttactttgtagtattctagccagtttaccaatctattttatgtctatgttcaccatcccaagaattataaagttgggattagagaaggttcaaagggattttttgtggggaggtccttagagaagaaaatacacttagtcaagtggtctattgttagtaaaacaaagtcgaaaggagggctaggtattcgttctcttttgttgcttaataacgcctttctttgcaagtggtgttggcgcttctctagtgaaaaagacttgttgtggaagaaaatcataaggggaaagtttaaggaggaggaagggggatgaaggtcgggagtggtgagagattcctatatagttggggtatgggaagagattaagaagcaatgggaactttttaattcaatgatttcttttacggtgggtaatggaaggagggtgaagttttggaaagataggtggtgtagctaggagccattatgtgagactttcctgtccttgtttgccttatttgattctaaagaagcatgggtagctgatttgtgggagcatcaaggagaaggtggaaactagaatttccgttttgttaggaatctgaatgattaggagtggggtgtcatggagcgctttctttctttacttcaaggacattcagtgaagagggaacaagaggataggatggtttggaagggtgagagcaaaggggtcttctctgtaaaggtgttttattctttgctagagactggtggttctatcattttccctttaaagatagtttggaatccttggatcccttctaaggtgagtttattcacttaggaggtttgttggggaaaggttttgactttggatgagcttcaaagaagagggtgcattttggcttgtgctttgtgtaaagaggagttagagtccgtagatcatatccttcttcattgtgacaaggcaagactattatggcagttggtgttcttcgtttttggtgtacaatgggttatttctgagtcagttagggaaactctcctaaggtggcatgggtcttttatagagagaaggcatattaaggcttggggagctgctccttgcattttttggacgacttggaaagaaagaaacgagagatgctttgatggtgaggaattgtccgatcaaaggctaaaaagtttattcctaaatagtttctctatgtgggttagggtgtatataggtggtggctatacgcatttgattaattgcatagagtggttgggtattgggtgagggagggagttttttgtaccctttttgcttggtttacttgtatacgacttgtatacttttgcgtactttttgtgtttttattaatacaatctcttacttatccaaaaaaaaggtgtattaaggcttgaagtgctgctctttcttgtattttcttgatgatcgggaaggaaagaaatacaagatactttgattgtgaggaattgtctattcaaaggctaaaaaatattttcctaaacaatttctttgtgtgggtgaggatgtatataggcggaggatatgtgtatttggttgatttcatagattggtcgggtcttggttgagggagggagcatttttttgtaccattttttctgttttttgcttggtgctctttgtatatgacctgtgtgctcgtgtgctttttgcgtttattaatacactctcttacctatcaaaaaaaataaatatttacactcttataaaaaaaaagcactaataggcaagtaaacaaaagagagaaaaaccttactaggagctaagccaatcaaaatataataaaaaacaagggaatggataccattacatggttccatatggctcaacaaacaagagaaattaaatactattttcatttcttgataaaataaataaaaagaaattacaaaaagtggaacattaatcaaagcaattgaaaaaaaattacattagacttaaggaggcaccaaatcttcaataaaagataccatgatgaggatgaatcttcaagatatatatcaagaaagggaattagtattagttgtaattaaagtaggattaatattacttagaattaaattatgattaatatttgttggagtctaattaggattagctagttgagttataatataattagaatttgagtcatataggttattagagtcctagtaaactttgaatgttataattagaattagaattgtaacttcggtgttgagcacattctgggaatgaaaaagaccaaggatgcctaatatattgtagcatgtggtctcctagtttttaggtttaataggaatttaaatagttaaagagatgaaatgcatttcaggttaatgaagatatggatcagagtatttgctgtcttttgttaattcatgtttggaattgtctatcccatatcctctaggtgatgcaagaaatgggagagagagagagagagggcgagagagagagagggggcgtgagggagagtgaaagcgcgtgcgacggcgacgacgatgagaccggcgaggcgagtcgaaagcgaagcttcacggtggaatccaagactttcgagcttgccctggatggaaggaaaggtagatgtcagttcctcatcgtggaaaagaagcggggggtctcgacatggattcgtttagggctggagagcttagggcttttcaaggaggggctaatccattgtatacgagatgaaaaagaagggagatgggaaatggagtggagagatagaggcaagcggttcactctggcgcggggttccaatagagcgggtggctttttaaggttgggggttgtggatctggaacgaaaaaacttctgcattttcttaccgagaggtaggagggacaaaagaggatggacggctatggcggagatgattcgccaaatggaagagctggcgggcagaagaatggagttgcaggaagtaagggccggcggtaaaactactatggcaaaatcatacgcagaagcagttatgggttcaaatcggaaaggcacaactgcaatcaagttgaaggtctcgagggaggagatggctggaaacttacagaagttggaacactgtctcgtcgtgagctggaagcccaacaaaaaggaagatgaagatttggagaggctgggaaatctttgggcgagttcttggggcttaaaaggcaaactagggctggccaagttggaacgaggtagggctttgttggagtttgaagatataagagaggctcaccgtgtggtctcatcggggagcagagagatgggaggagtccacttagggttggatttctagaatccaaagacgggctgttgggtagaggaggagatggtacaggaagcatgggttaaaattttcggtctgccagtctcgttatggagcccggtgattctgaagaaaataggggaggaatgtgggggatttgttgaaattgacgagcggacaaggtcgatgggggagattcaatgggctaggatactggtcaaaataagaggcgaatttagaccgagtatgctagaaattgaggtagaggaggaggtttactctttggcgttatggtgggagattaggccggtggtgagacggattttctctgcggcggaaatcagaaggagaaccgaggacaggggtgacacgtactcacgcgcgtggggaaggaactgatagaagcgggaaccgagggactgctcctgccagatgatgggaggttgctgcaggaaaaagggcctggcttagaacccgggaaccagatccatggctcgatgccccgggaatgggcctattcggatggaaaaatggttgggtcgtcctcatatggtccaactatgggccttaaagagcaggagaaggatggtgggctggctaagatagacaggtttttgggtcgaaagttaaaggataaaacaaaggtggctggtgagtcagaggctggcccatcgtctagtaattgggctgctgaactgggctgccactcttttgttgtgatggaaggcctggaaagggatggcccaaatgctacccaggagaaggctggtttcttgggccgttttatctccagaaaaagacccactccagaggatcctttgacgtgctgggtgccagaggagatcagaagggaacagagggatgatggcttctccatgactgatcgagcgcttgaagaagaagctaagaggtatgccctgcattcctatcctaaaggaaatcgggttatggggacatttctttctctctcttctaattctgatcgggctccggagggggagtctttcgatcgcccagggggtcgagtgaagatatggtttggcagacggatattggtaatattcaggtgggttgtatcagccagcaagaagcagagagtctagaaatcccatttgcagagattgagattcactcggcgttgatggagatgaatggggataaagcccctggcccggatggttttactatagccttctggcaaaacgcatgggactttaccaaagaggagatcatggaaatgtttaaagaatttcatgagcataattcctttgttaggagcctcaacaatacttttttggtgttgatacctaagaaaagcggggcggaggatctgggagactttagacctatcagtctgttggggggtctctataaacttttggctaaagtcttagctaataggctcaaaaaagtgattggtaaggtggtctctattgctcaaaatgcctttgtaatgggaagacaaattctggatgcgtccttaattgctaatgaggtgatagattcgtggcagaagagaaaagaaaagggccttatttgcaaattggatatagaaaagcttatgacagcatcaattggaatttcttaatgaaggtccttcaaaaaatgggctttgggaccaagtgggtgggatggatgtggagctgtgtgtcttctgctaaattctctattcttgttaatggagtgccagctgggtttttccctagcactagagggcttcgtcaaggggatcctctatccccttacctctttgttatgggaatggagattctggacgttctcatcaggagagcggtggaggggggatatctttcagggtgcaacattcggggtggtagtagaacttcattgaatatctcccacctattttttgctgatgacacaattgtgttttgtgaggcgaacaaagaacaagtctcatctaagctggattctcttttggtttgaagcggtttcgggtcttcgaatgaatctagctaaaagcgaaatcattccagttggagaagtggaggagattcttgagttggcaactgagctagggtgcagggtggggtctctgcctttccaatatttgggtctccctttaggggtccccaatagggcttttctatgtgggatggagtggaagagagggtcaggaggagacttgcgctttggaaaagacagtacatttcgaaaggggggcggatcactcttataaaaagtaccttggctagtatgccaatctaccaaatgtctatcttccgtatgcccaagtccgttgctaaaagagtggagaaaacccaaagagatttcctatggggggtggaaacttggagggaaaagttcatctagttaaatgggatgtggtctgtacagaaaaactcaatggagggctaggattaaggagaatagccactctgaatagagccttgttgggcaagtggacttggaggtttgcgtgtgaaaaggataacctttggaaacaagtgatttctacgaaatatgggcaagaggaatatggttggagggttaagaaggctagtggggcggttggagttggggtctggaaggagattatgaaagaatctgaatggtgctgggaaaatttggcttttctagttgggaagggttccaaaattaaattttggaaagatagttggtgcactgatactccgttgtcccaatgcttcacccacctttttgtccttgccgtgcatagagacgccacgattgaggagatgtgggaccaacattcgggccaaggagattggaatcttgtttttgtgagggacttcaatgactgggagatggatatggtggtgatttgctccatactttgaggggtcataggccttccctggaggatgactcagttaaatggaggcaaggaagaaatggtctcttcagggttaaagaagcttacaggatgttggacaagcctaaggccacagtgtttcccgcaaggagaatatgggtggatagggtgccaactaaagtctgcttttttgcttgggaggctacatgggggaaggtgctcactctggatagactccagataagaggggtgcaactcccaaattgttgttttttgtgtggttgtgaagaagagaatgtaaatcatattcttttacactgtatagtgactagagccctatggaatattatttttgggttgatagatattaagtgggtcctcccagaaactgttaaggaggctttaacctcctggaggggttcatttgtagggaagaaaaggaaacagatttggaaatccattccgttgtgtattttttggacggtctggaaggagaggaataggttagcctttaggggggggtgcggtgaatattcagagattaaagaattcttttgtttgtaattatggaattgggccaaagtgtatttaggtgaggagtctttctcccttataggtttcttggagtggatagcttccacttgaggggaggtagttctttttggtcctttttctctttttgaggctgtagccgtcttgtatactccctgtatgctttgtggcgattagcctttctaatgcatatcttgtttacttataaaaaaaaaataataattagaattagaattataataggttattagagtcctagtagactttagattttttagagaagcctataaataggctaatcaatgtaaatcaaagggatgaatttgatgaataatattagactttctttcattgcaaggttgcaaccctcaatggtgagactccattgattttcttctaggtgaggctcctagaaggccttagtgagattctaaggttttccatatttttttcattgtttcttctttctctctatttcttatcttataattttctctaccataaaatttattccttgttcctctccttacaccctagaaataaaaccctagcccacctacccttgagtgtaggcaaccatcctagggttgtcctacatcataccaattccttgaaaaaatcaccttgttctctacagtcccaacatagttgcgaaaacgctatggtgaagccattaggccttgaagctttctctctgcataaattggactaggcaacagagatttcctcctcagaaaaaggaatctttagtctcctagaatccttgctccgcattgcttcaaagttcatcccactaattttgggtctccaatcttgtgttttaaggttattaggtcaaacacctaatttccatgttggttgctcatatgggtttcaattaccttgttatggcttttaatgtgcttttaagtgggttggtcaattaattacttccaactcccgactctctctaagtagcttaaaaagatgaaattggatgaagtaatttgactaagcttgtctattttatgaaggcagcttgttaaattgttaattattttgttattggaattgatgtgtgaacagaaaatatcattgacttactgcagaagaatttggcttgtaacaacatagatgatgactaaagtccaataatagttaatttgaatcaaaatatgacaattcatgaagtttatttggtgttaagtaagattattctaaacctaatagctgcatgcctgcagaaatgaggccaagctaactgatatgttccttctgataaaaattaactgatgtttcattgtatgaactttgattctctgtattttgatcattacaatggagagaatcttgtattagattttttaagatattttaattatgttccttatgcactaagaaaattgccatgttttctttgcattgacttatattctgtttttttctttaatcaggatttatgttctgttttcaatctttatctgataaaaagtagagttcatttcattgttaaaatcagaacttttttattccaaaagcatgattgcaaaggtcaagttgacagaaaattattttatttgcagcct

SEQ ID NO: 11486 - DNA, 6476 bp, Vitis vinifera
  Intron number 1 from transcript GSVIVT01028367001 (locus G SVIVG01028367001) derived from phytozome v7.0 (chr-ID chr7 ; pos 6686938 to 6693413)
aggtaggattgagtttggatgagtaaaatatcaatccaatgatattattattgacatggggtagaggtacgaacaacccgtctaaacccgaaattctattatttaatatattctccgattgaacatcccattgctttgaattgaattatttattcttcttctaatttatagtttttaattatttacttaaaattaatattatcattaacaaacaaagcaaaaaatcatcgtttgatgggttatatgctaaccaattttgttaaaaaaataaaagtaacaaaaaatctgtcttaaaaagcaattaatataaaagtccagaaaatattacttttaaaattttagttttgatcatgtacaaggttatttcaagattaataatttttacaataccaatattatttttataaaatcatgtcttccacttggtcttcaatttcaacttctagttaaaagtaaaaacaaaaagccattgtttttaaaaccggattagttagttatttaattagaaaagttattgttttacggatttttggttgaaacaatggtgaaatcggtgaagtaataaatatataatttacatattattaaaatttaaactaattataaaaaataaaaataataatttatatattatttgaagtgtttttaattaaaatgtcttctctaaaagcattgcaagtgacttttaactttttaaaacggtttttaaaattttatcaaatgccttatttttctccataaatgttttccaatgctaaaagttttttctaaaagtactacaaaagggattttgagaatgtgtttggaagtatttttatttaaagtgtttttagttaaaatattttctcaaaaagcttttgtttgaagaatcatctattaaatgcttctctatgaaacactataaggatttttcaactttgtagaagtactttctaaattttattaaatgcttaattttgctccaaaaacactttttatgctagaagtgttttttaaaagcacttccaaataggctctaataagtatcaatttggttgctaaaatcaacttgaagaaaaaaaatatcaagcaccatttgtggttattgaaaactaattcacgatggccaccatagagggcaccattcttgactagtttacaaacaagcgttactaaggtcttgtttgataactatttttgaaaatagttctaaaatttttttttttagaatagttttttaaaatcgtttaatgatattttgtagaacaaaaatttatttgataacctaaaatatttttaacttatttttaatttttttaaaatatatttatttatttatttttatatcttattctttatttttaattatttcacatgtttgtatggttatgttttagaacaaccttaaaaaaatcaatgaaaacaattaaaaaatattttatgaaaacaccatattttccatttttaagaacaaaaaatgaaaaataattttttagttgtcaaatatgttttctaatatttttttatttagagaatataaaacgcattgtaaaacaaggactaaagttctagatcttttttttttttcaaatttaaatgtgatagtgaaaactagtgttattcttttagacaacaaaatatattgggacatggatgtataatcatattaatgaaattggttgatgttgtattaaaaaagactgcattttatcttaggcatcaaagtgaaacacaaattataaattaaataaaagttatatttagtcataattttatcttatgaagtactcatatgcttcacatgatcctcatattgttttggagacaatcctttggtcataggatctgcaaccattagcacaatattcacctattcaatgaacactcatctctttttattttttctctagcaataaagtactttacattgatgtgtttgcttttagtttatacttttattatttttagataaaaaaaaaaaaaattataggcaaatgatcacaataaatcctcatgggtctttatagaatcaacactctcgaggcctttaataaaattctttaaccataaggcctatctaatagtttcatagcatgcaaaactttactttcatagtagatgaagcaataatagtttgcttaatacttcttcaagatatcacacctctagtaaagtggaaaacataccatgaagttgaatttcttgtgcctacacatccaacaaaattttagtttgaataactaacaacttctagacgatcaatatgtttataggttcacatgtagtccttggttccttgtaagcacctcgtaaccttccaatgctctatactagaattattttggtatcttcttattacacatattgcaaatcacatatcatgtcttatgtggattagagcatgcattggactgcctactatagatgcatatgatatgttattcatcttcctgcactaatgcattttatagacattgattgaatttctcccctttatcaataagtgctattgtagaactatactttttcattctaaatctctcaagaacctttctaataatacaagctttttgagacaatcctaatgttctttgtgatctaccactatgaatatctatactaataatataagaagcttcgttcacatccttcattttgaagtttatatccttaagatggagttcaagaaagttggcatgtttttggagaggcatatgtattctagagttgccatcaccttcttacatgtgggtaacgatggttgatagtcactctaaagtacaatcctcatggttctcaataatgtctttttaatgaatatgttcataggaagactaattgtatcatcaaaatctctatccaaagaaagggaaaaaaaatagtagcatacctttttaacttggagaggagttggtagaatttttcaagatacttttatgggtagacattggaaccataacaaataattctattaaggctcataaattctatagataaaaaaaaaatattgaaggtatgtttaacttattagaaaataagtctatttcattgtgacccttcttttttttttttttcttttttttttaaattattatcaaggaagtttaaactttttaatattttttctatgaaagagaagcaacaaattatgaacaaatcaagccataaaacttgataggaaacaaagaaatgtcacatactgaggcaaagatctagctgaaacttgataggaaacaaagaaacatcacacacttaggcaaagaactagttgagcaattgatgcattatctcagtttacaaatctaataactgaggtgttgattggaggcattttttattttatgtttttaaaaatagaaaatggtagtaactcttatataaaatgtatgaactttttccggacttctcttagaaagataatggttcatatttaaggatataaggtaagttcatatatatatatatatatatattttttttatatatatatataagagttgctaaattttatataaaaattactactaatttttatttttaaaaatagaaatcaagaaggatatccaaatgatcacaacgggttagattttttttttttttttaatttccttttttgggaacacatcttcttgttgtcttgccacctcagcactttgtgttttgttattaaggtaaaagttgttaggttttatgtgctaagtaatccaagctaatctcctaaacggggttgaataaggtgatagtcactttttataaattttacaattacgagtgcaaagacaaatataagtaataatataactatttttataatagttcaatgcaacccaatttacatcaattttccttgaactcaaatctattgagagtttcattgctttttatacttggattatagtttcaaataccctcacaacaagacttttaaagacaaagtctctaaaatttcaaattggattatggtttcaatgaatccttttaagagatctcaatactcccgaactccctaagcgaatcccacacttagcaaacctctcaaggattacacattaagggaaaaaaaaaaaattcctagtttagagttttggcttgaatggatacaaataaaatagtattgagaggtgtattaaagtgaaatgcaaatttaagaataaagtttgcttaaaagctctgttttaaggttgaaatagatttggaattttcatcttttcaatatatgaagcttaaagtcttcaaagacaaattagagatctaaactagttgttagtcaccaagggacttgaccggtcaaactggctactagccatggtggaattaatgcactgatgggtgagtgttagatccaaaagctcatttgattaaacaacaatttgactagtcctcgactaatcaaggttctacctcaactagttggaatatgcttttgccaaattgtcgcttttttggccaatcggttaataatttaaccactttggtcaaccattgatcaaatatataaaacatataaaaaattgatgcgtaaattacccttaacgaccccaattggatcaaaatgaaaacttaagattgaaaaaccctttttaatgacaaaaaatcatgttagatatgagtttttattattaaaataatcattatcatttttcataaaaatcattaaaattgcataaaggagttatatatatatatatatgtaaacccaacctttaaagagtttatcctttttggttcaaagaggcttagtttttaaagatcaacaactagacatattcatctatttggtttttaaaaaccttttaatcaagaataaaaatgaacaaaaagtggcttttatttaaaaagattttcatccaaattgtaaaaatacaaagttgatttagaacctatggatgaaataagatgttttaataaaatatgacatgtaatacgatcatagtacaccaacaaccttataaaaaaaaaattctaaaatactgaatttagaataccatccttttaaagtattattttggttcttgattttctcgacttgatatatttttttgattgcgtatttgaaaatcttctcacctaacatattgaaatataaaatattatattcaaaatttgttttattattatcaaaattgagattaactaaacattgatacgaaaatctcctatttttttaatgataacaaatcaaggttactaaaatatgctccctcaatatgtactctgtgttatataagaaaatagtcaagtttaagaacattaaagaacatatcgagggcacccaaaaatacaataattaatataaataacacaaaaaacaattaacaatcggtaagataacgatactagacaagatgcataaagatataaccaattaagtatataaacatatagcactaatattgaagattgttaaaacaaaattatctttttagtactagtagcctatataactttttcttctttttatcattaataaaaaaaaaaatcatagacaaggggactcattgattaatgaaagaaattgatgttataaaattaaataagaacaatttttttttaccctcttacacctatataatcctttcatgatgagtaataataagacttagatcgggtaaaagttataacttctacgtaaaatcttatgttcttttaagtaagaattttttatttaagtaacattttttttagttaaaagtcattatttttttaaggcaaacttcaaactcatatttttgctatgtttggttttggaaaggtattaaaaaaaggaaaaacaaatattaaaaaaagttgtttttttctgtttggttttattatgaaaaaaaaaattaatataattaaaattaattacaaatttatttattttaaaataatttaatatttatataataaaaaaataagtaaaatgagtttaaagaaacatataaaaataatttattaaattaaattttttttttttttcatttctttcacttttccaccttattttcttccccctcccttttctctcaagtttttcggaccgcctaaccaaacatggcctttatattgaagtgattatcttcccttcccattttctctcaaaattttcggaccgcctaaccaaacatggcctttatattgaagtgattatcagtttctattgatattttcttttcacatattttccaaaatgcaaatacaaactttaatgtaagttcattggttactttcaaattttaaattaaagcacctcacaaaataacgacagtgggactctggagatgctgagaaaaagagagagaaagcgggagaaaatcgagggtagatgaggtcaatagttgacagaggtcaaatcccaacccttatttggagttttctattggatgatcggctgtttaccctttgaatgtcctcaatagtcaattcagatacttcaaagggaaagaagaggatataattgctaataacacacaaccgttgaagccataacagtctttttcctcaattttcaaggcctc

SEQ ID NO: 11487 - DNA, 3243 bp, Vitis vinifera
  Intron number 1 from transcript GSVIVT01022604001 (locus G SVIVG01022604001) derived from phytozome v7.0 (chr-ID chr8 ; pos 5855734 to 5858976 reverse strand)
atttttgggaaagtaaggttggttttcgaaaaatgtcacatccatagtcacaacaagtttctttgaaataggattataacatttgtaccatttctatgttgtataatacccaacaaacacacacttttctaaccaaggatcaagtttagaatgattttgtttgtggatgtggacaaacatagtgcatccatagaattttagaggtagaaagtaaaaatgcaaatatgtgggaagatggcgagtaatctatttagaggagtgacaaattttaagactctagtaggcatcctattaattaagatgtcgtgagaacaacctcaccccataaatattttgggacccccatagtgagcattattaacctagccacctcaagtaaatgacgatttttttctctcagctataccattttgctatggagtatcaaagcatgtggattggtggataatgcccttttctttaaaatatctaccaaggatagagttgaaatattccttaccattgttaattctaataacttgtattggagtgtggaactgagtttcaatcatggaatagaactctttaaacactcattcaacatcagatttttcttttaagagatacatccaacagactggggtatggtcatcaatgaatgtaataaaccacttggttccagttaagtttgtgactcaagaaggtccctatacaccactgtgaattaagtaaaatggtttggattcttgataaggatgaaacaaaaaatgaacacggtgatgtttagataactggcaaacttcgcattgaaatatcaaaggattcaaatttttgaacaaagttggaaataattgtttcaaataagaaaaacaaggatggcctaacctattgtgccataccattatttcatcttcaacaagaatagaaatcacactactacttgcaacttgagcttgtccacctttgaggaaattgttatcaaagtaatagagtccatcaggcatcctaacactgccaatcatcctccccgaatgctggtcatggaattcacaacaagagtcacaaaattttgcaaaacaattagaatctttggttattttgctaactgacaaaagattgcaagaaatattaggaacatggagaacagatttgaggattagatttttagagataattatagaaccttttccctacaactggagacgaactaccatctgtaattcaaatttttaagtgactagaacatggagaataagtggtaaaaaagtgattgattagtcatatgatcagatgcaccagaatcaatgatccatggtgttggatttagggaactagtgaatgcactacttgtttgagacaaagaactagagggtacacttgaaagttggacttgattaatcattttgtagagatgctcgagtttttctttgttaaatggaatcttagtttttgcagtagcttacatttcgatgccattcttttctccaggtttccttttcttccaatttgctggttttccattcaattttcagcacttctctctaatgtgccgaggtttgttgcaataatcactccatatcttgagcttttcatcaggattattcaaaatctgggctacaggtctctgattgtatgctgctacatcaatttaattggttggtgcagtagcattaagtgttgaattctcattgttggtcaatttttttcccatcatcactccgctacgactttcttctcgtctaacttcagagagaatgctttactgattgagggcaatggctcttttcctagaacacaacctctcatttcatccaaatccatgtttaggccagctaaaaattccataacatggtctttctccacggtcctttgatattgagcactatcttcagcacatgaccattaaaggtcatagaacaagtcaagttcctgtcacaaactttttagcatattataattgttggattttaagggtatggaaacaaaagactagcccaaaagacacaaacaaagaacaaaatgaataaaaaaagaaaaacttatcacctaatgcgtgacaagcactatccttgaaatagatccatcctcctcgaagatgaactcgttgcactagggtaccagtggtctacctccaagattcaactaccagatctcgccttgggtgcactttgaaagcaagatgtgtacaactcgggtttttgaataaattcctccaaatagatgtatgaaaatactccccgaaaaactctttgaaaaaattctctgaaaattggtattaatatgagagaggggtgacatgcttttataggccactaacacaatctcaatgggaatctacttgtaattagaagatgacacaaagtggaaggtgattttacttataaaaggaatgagactccactagcataatcccagtaggactcttcccaaaaatataacattaatagaataaaataaaataaaataaaataaaataaaaataattcttaataggacacttcccaaaaatataacattaatagaataaaataaattaaaagtaatttccaaaaataaaaatagaaattatttacacttttcctacgataataacttgttacagacataatcccttgtgttgtatttctgatctttgttttcaactcataaacttgtaaggaattgcccaaatctgagtacatctcgttcactgcatcccatagttgtttggcagtgttgagatacatataagtttggtcgatctctagttccatagagttaacgagccatgagaaaatcatagaattctcagcctcctagacatggtatgtaggatcatcataattcggagcctgttttgtaccattcaaatagccaatcttacctcttcctctaacgaatagtttcacagattgtgaccaccacaagaaattctgtccattcagtcaatgagtagtgatctgcaagattggactttcaacaatccgagtcaatgaaatctgaccattctgagggtttgaatgttagagatatcccccgaaatttcatcagaaaatactccaaacattgtagaggaatcgtttaaggaattaaaaaatctggtacacaaccagattgagaaaataacaaaaaatctagaatacaaaccaagttgagaaagaaaaaaaaaatcgggtagaagactagataaatactgaattcttttttatttttttatttttttatgagtgatcaaccaaaaatcactcaaaaatccatcctagggtttagggcggctcctgtacc

SEQ ID NO: 11488 - DNA, 5997 bp, Vitis vinifera
  Intron number 3 from transcript GSVIVT01009592001 (locus G SVIVG01009592001) derived from phytozome v7.0 (chr-ID chr1 8; pos 9714722 to 9720718 reverse strand)
gcaaaacccaaaatccaacaactcaaattacgttagtgagacaccaaattaattgtttgatagcatctaatggaactccctagagacactactaaacaatatggtcttgtaccaaaataatagtatttttttctatttccctttatagtttaaaggataatttcgaaatcaaccatctacttaacatctttttacaagattgttcaaatctcttattcaatcaagtgaacataattaacttataagtttcaagatcacttattctttggaggggaaattaaagatatcttccaaaacgtagataacccttattgttgacaaaaataaaatttggaaaatcaattcaaggaaagtatatataatgcaacatgctcgaaaataaaattacaaagtagcttttaaaaacattatatttagatttccctagaagcatgtcttagtttgtctgagatgttctcaaaggataattttttaaaaattaattacttaagcagtatatatttgtatatgtatattgttgtttttagttaaaaataaattttaaaatttatttaaattgtaggtttaattattgcaatttaattaagagaataagaaagtgaatatgcatcaattaaaacatataaacaaaagaaaaactatggaaaagaagctagccctatgcaaatataaatagtatagaagaaataacattgttgttttcaatgaaaattttcacacttttattgatgtaataagagtttacttatatgcatagctaagaaaaactatttgcggcaatgtacatcaatttgtctacaactatacaacagttacagaattgttcaagtcaacacagcaaataacggttacaaaaatatacaaaattgattttgaatgatcttgcttaatcataggttatttgttcgatcattgccttatccttgcaatttgcctttatcagtgttacgtgggtgttccattaatactcataccaggttgtagaccctcaattttgttcctttagcatatgtctttaagttcacttccagtgctccacagtagttccttagtggcccatagctactcatactacttaccttttttgagccacctcggagactttggtagagagattcatttaaccctattgtgactcttagtagccctaatttagacttaggcccatttaggcactttaggttcacttagatccacttaaacattttaggttcacttagatccacttaagcactttaggttcacttagatacacttgggcaccaccctaagcccacttagaccctttaggtccattaggcaccaccctaggcccacttagacccattaggcaccgtcattggtccacttagaccctttaggtctattagatacacccgaggcccattagacattctttgcatgacttgagttgctcacatgattgcatggtgccatagattgtatgacactttactattattattattattattatcattatttacttaattattttgttaatttattttataattttctaaaacaccttgggattcattcattaagtctaattttctttatatttttgtagagaaactcaccaaaggaatcatcattagagagaaaaaggaaggttgaaaacgtgtattggcaaggatattcatgtgtgagtctttcaggaaatagaggatattcagtcaaaaaaaaaattaaaaagaggaattttcatgtgtgattatggaaaggaaatattcagcgggttgaaggatggattcaaggtggttggaagaggacaggatgtatggaaggaaatgaactaagaaggaaagcaagtatgcacccatgcatgtgttgattgtgcttctaatgaaaggaaatgaatgaagaaagaaaattaccaaagttgttttggcatggaaaaaaggaaaggttcaatgggtatttggacggaatgaagactatgttcaggaaggagagtcctgatgatgctagactgacgtggatgattgaggctctccgggctggtgagttgtcttcccatgttggcagagtactgaagaggaaggttagaaagtgagaggggggagagttttttttggagaggggtgaacgatcagccgcaccatacttaggacactttcagcacgcataagagggtctgacgcctttggagaagcaagaacgaccagctgcaccattcttgggacgctttcagcatgcatcagaagagagggtgacaccaaacgggaaggagatcaacagtcgcactaaaggggatccaagtgggaggagcgagattattttttggaatgtgagagggtacagccgcaccattgagatgacgatttctgaatcaaccgcaccgttgagaggacttccggagcagttgcactattggaagaaaggaaacattcagccatgctcctaggtttcaaagaccaccaagaagaagtcttcagctacagtgcatgggcagccaccacaccatgcatccttggcaatgattcttttaaaataaaataaaaaatagaaatcctactagtggaaagtgacctacacgtttcggaaaatgtgaatttatccttcctatttcaattttgattcaagaaatattcaattcaatgcataatcgttttagagttttatctatatagtttaattatttctaatatcaatatatttcctgatgacaatttattagttttaaaattattcccattcaatctttgtattttaaatttttattgtaaattcatgtttagcttagatgttaatctttaatttatttttttaatttttcttatctaaataaattaattattattgattcattattctagcttgaagattatgatttttgtttaatgtagttacaatttattattcttagtttgacaaattagattttttaaatattggtttaggcaatttttgttgataatggaaaggttaggattttttaagagtttgggcaattcatgatgatggtttaaaatttagaattttgattagcattattactattattattttttttctcaattaggaagttcataatttcatttaatttagttttaatttatcttttagtttagatgttattaaattttagtttattatttcaattgattccatgccactcttttcatatctaaaggttgttaattttaattcatgatttatccttttagttttagaatgtaagttggttagtttatttcgtttcgtgttgatgtattcgtgttttaataaataaataactaaaaataaagatatatatatatatatacacgctaattttgattgatcttgttttagttgatattttttagaattttaattagtttgattggttttttagtggaattattattatattgtgtcatttgactttatttactaactccatgcattttttgttttaatatggcagaatgagaattgtgtttaagtttagtttggtatattatattaaattcaaaaaatacaaattcatgtaattctacttttgaaaaataaaaaaaataatatagtttgatctttatttagtttagttgtgattcatttaattattagttgtttatttatttatttgctactaagctaatgctttgtaacttatttatttatttatttatcaatgagattgaatctatgggttaaaaatgcagtttaaaataaaaataaaaaaatctattgaaggtggtttgaattgactttaagtttagttaaaattatagtttgttgaaatgattgattttttatgtgttaagtattatattttaaacttgccttaattagttataaaaatgtttgttaagctcaaatttattttactaacataagtttattaaaaaaaagaaaaaattatttaattccttgtgttcgtatttcatttcattcatattttattttattcatatttatttatctgtgtcatcaacttatccatttgattatgagtttaattttataggttaaaaatttagtcttaggtagttttttaatttaatttgtggttaaggtaaaatgttagtttgttaaaataattgatcatgtgtgttaagaatttaagtatagattgactttaattagtgtttaatagtttttaagcctagatttcattttaataatgtaagtttatttcgaaattagattccctgaattcatattttgttttagtttcctttcgtttaaattgattcattttaattattttaggagtttgtataattttaggtcattaataaaatcaattctatttttgaaaattcatgcctttagtttactttgatttagttttgcacatctattcgatttaggtattttatataatattagttcattaataaagttaattctatgtttgaaaattattgtttgctttgatttaatttggttcattttagttaatctagatgtgtttgtgtgtttaattgatctcatgctaattcttgattgttattcttagtagatgtgtttcttgaatattcgtcattaattcttggtgggtatttcgttagcttatttgatccaagtttgaatagtttattgctttggtagtctctagtaaaatttacttttcggagaccatcgaaaaatagtgaagattggcttccattctcaccacttcaattttcccggttgtcaaaaattctactttgtgattttgttctcttttgttttgcttggtatttgattcatacgttttattgttttcaaattaatttcttttatttttaaaacataacactattctcaaaaaaatccctttaaaaatccatttcaaaaatttatttagagttcttagaatcaaaatctcattccctttaggaatccatttcaaaaattcatttagagttcttagaatcgaaatctcattttctcaaataatgtgcaaccatgttttgatctgtttgcatctttcttaaatttcaaataaaattacagttttgagtaagacatgaatccaagcttgtggtcccaaacaaatgggataattctaaactagatttgtatatatcaatcggggaattggtgaagcctctacataaggaaaattttcaaaactcatctttgttgccccctttgctatttaagaaaatcatgtctatttattttttagaaattatatagaagatataagcaataattgatggtttcatatactatgataattttttttttctatgctaattagataacaaacatgctaggacttcttattttattgtttgttatctaacctctcatgtcttgtgaaagcacgttacgagttatctatgctttccaggtatctaacctctcatgtcttgtgaaagcacgttacgagttatctatgctatccaggtacgtctcctgtcacctaccttccaaattttgtaaatatgatcgtcattatgatttatacctatgtttgagaatgcttgggatgtcttgatatttgctacattgtttgatcattcatgataaaacacatactgagtgatatattatctaaactaaccattgatgttttatgatagtgcttaagaagtggtccaggtacgcatcctaactttcctctatgggcatgattggtttttcttgtttagcatgctagttttgagatcaccttcgcctacctaggtaccctcaattaatcagttgattgccacatttccttcaacgtagtcagtagagacctttgtaaggtttagagaggtgctatctcctggaggtaccttcccaataagtaatctgatcctttgacctagactcgggtttttcaaagacatgcttttccaaaaaactatggagtcattttttagggttttatttcttgttttattttccctttaaaataaaataaaataagtggcgactctgacttttccaaaaacaacatctttaccaaataaaagcgagtctcaccgatcgagtggaggcgcacgtgaaaaatgcgggtccacacaagcatgtggctttcgcaatcaccaagatttttgccatcaagaactgacagcatcacatcca

SEQ ID NO: 11489 - DNA, 5079 bp, Vitis vinifera
  Intron number 6 from transcript GSVIVT01028494001 (locus G SVIVG01028494001) derived from phytozome v7.0 (chr-ID chr7 ; pos 8414872 to 8419950)
aaactctggttacttgcataaattgtttgacaaaggtacttctttttgagcatctatacattgtatcacagatactggttttaggcatcttataatactatttttatggtagatattccacacctttgcggtttgaatcatatctggccgtgtcatgttgaaattaactattgtcctcttgctgcatatgtgaatatataaccatgagacaattataatgctttatgacagtactttgagataatcttttgctctcaagcacaacatttgagtaaaggttttgtgagctgtgggtgaaggaccacattgttgattaacttggaaaacagggtttaaagttgagtgttgtcatagaatgagtaccttgagcgttcagctcgcttgagtgatatctgctacaattgactttagggtgctttggtttgctagcatctaaacttaaggatgaaaatcatatttctggaaataaagtccagaaaatataataaagttgggaattgaaatttatttccattatacctttttaccatcttcagaattaattgacataataacctgtcaactaatttttataaaattagatcttgttataagtgaagaaagaaataaaatgaaattttctacattccctttatcttcatttcgtaggaaggaataaaaaaataccaagtcctccatgagtatgagagttcccaaatttgagggcatctcatatccaaggaaattaaaataataagatgccccatttgctggttaagatacctgtgaaccaattgtgacctggaggttatacctgattttttgatagacaaaggcagaatggaaaaaaaaaaggcctaaaaacagggggtgtaccctatgtatacaggcagtatacaaacaaagcccaaccaggctgcagaaaaaagaaacagaacctacaaaacctacaaaagggaggctagtctccattaaggacacccaaaaattcaaaaagagagggattgtctaaccccaaaactggctaagaccactctaaaagtgaatgggtaaagagcttcctcagatttgggtcagacatctcttcctcttggaaagttctttgatttcgttttccccaaatacatcaaaaaggacaaatcggagccaatctcgacatcactcttttcttcttcctcagccccttaactttccattgtagaagaagatttctcactgaatccgggaacacccaaaccagtctgaaagaagttaacattagagtccaaggcattcttgtcttgtcgcaatgaatcaaaatgtggtcagccgactcctcactttctttgcaaaggctgcacctattggcctggaggttatacctgatgacttcttgtccttcattttttatttttttttccttttaacgaagaagaaacagagaagacaaaaatgtcttgttctgtgtctgttgcaccatgaattccttaattggaagcattaaatcctcttccagcagcagagtatgaagtagattcactgtactgttcctgctgccttttgtcacaatgagtgcttccttatcatttaaatggcagctcatgatggtaaatccaaagtcgggtgtgcatattatcatgctctctctctctctctctctctcccatttgtagaaatctgtggagtcatgataagttccttgcactaaaataaagaaatggataatgagacaatcaatcaatgaattatgacttgattttttttttttgataagtaaaaagaagtatattaaacgaggtgccctttaagtatacagggagtatacacaccaccttccctaactaggagcctatccagtctacaaaacttacaagagaagaatgactctctgctaaggaacccttgacccacgaccaaagattacatacaaaagaatatttcaacctttgaagcgagagatcctcatccccaaacgctagcctatttctctccttccatactaaccaaaaaatacataaaggcgctatttgccaagccttcttgcgccttttccccacaaaccctccattacacccaagaagggttgtcttcacggtacacgaaagagtccaagatataccaaaaagggagaaaagaaggttccacaggacccgcgtcttgacacaatgcagtaggagatgatccaccgtttcttcttcagatagacaaagaaagcacctatttgccaaagagaaacccctcctttgaagttgctcctgtgttaaaactttacccgaagaagcctcccaaacaaagaaagctacctttggaggcactcttgccctccaaattctttcgctagggaacatagaagagctccccggctccatcatagaataaagggacctaactgagaaagccccatcatttgaagctgtccagatcactctatcttcctcctccctttgaaccctaaaagcatggatcttctgcaacaaccgctccactaaatcaatctcccaatcattaaacgcccttgcaaaaaggggagtccaaccatccccatcaccaacgggattccaaacctccgaaacccaagcattcttcgacatggacatggagaaaagagagggaaaagactcacaaagtggcctatctccacaccacttgtctttccaaaatttgactctttgcccattacccatatggtaagctaccttgccatctaaccacccccacttcttcctaattgctttccaaagcccaactccgtttctccccatcacatcccgagtacaccagcccccctcctcttcgccatacttgaggctaattacacgcctccacaatgcctctctctcattagcaaacctccaattccacttacacaaaagggcactattcatcaaagctaaatttattacccctagcccaccttttcttttctccaagcacaccaagttccatcttacaaggtgaggtttttgggctagagctcccctaccccacaaaaaatccctctgaattttctccaatctcaacctcacttttctaggcaaatagaagagagacatcaaataaatagacatactggacagagtgcttctgattagggtgagtctcccccctttagatatgtattgcctcttccacatagcaagccttctacgaaatcgctcttcaaccccatcccacaccgccaaagaattgaaagctgcccctaaaggcattcccaaataacaagaaggaatcccacccactttacaccccaactccaaggccaaaccctctatattaagcacccttcccactgggatcatctcactcttctctaagttaatccttaaacccgaacatgcctcaaaccacatgagaagccaatttacataagtcatttgatctgaagactcctcacaaaaaaccaacgtatcgtccgcgaacaacaaatgcgagatttgcatcccctcacccctcccaccactcaccttccacccagataagtagcccccattaatagcccttctcatcatattattgaaaacctccatggcgatcacaaacaaataaggggagaggggatctccttgtcttaaccccctcgtgctttgaaaaaaaccggatggagaaccattaactaacacagagaatttcactgtggagatgcaccaatctatccactttatccatctctctccaaaacccatctttttaagaacaaccaacaaaaagctccagctaacacggtcataagccttctctatatccaacttgcataacacccctcccacattgtctttcaaccttgagtccacaaccttgtttgcaatcagcattgcatccaaaatctgtctaccctccacaaaggcattttgagactctgaaatcactttccccatcacctttttaattctattggccaacaccttggccaatccagttgaaagaactatgaattgaagtaataatatttttgaatcatcagaacatttttaatatttctttttcagtttctatacatgaagtctttgtgaattcatttaattctttcccatttctttgttccaaccattcatgaattcttctctcttttccttgatttaatccattttctttatttattcgattcatggtcattggcaaaatagaaggacttctattagcatcctcctctaaattcactatagtaagtcaaattagatacaactttagttcatatataaactagtcataatatcaagtatttgtattttaggttcaatcagattctagactcaattcttttcttcctctcttgccttttatttgaaaataaaaagataatgggagagagacagcctccaacttctcgcacattcttttctaaattcagtgattggacaaaagcaagaataaaatagaaagacaaaattggaaaggaggggaagtggggggaaagagaaaaagaaatgaaataggcaaggttattttttatggctcaagtatacatgtttttttgtcacttccatgtattttattccttgtataggctataacaccaactgaagtgctctatctaatgtttgtttcaaatgctggttcactttttgtagtctctcctgtttgttcagccatatgggttcatgtgaagggaatccattctcttgtcttgctctaaatttgtacattttggaagaatgtcttgtccttcttgatctttttaattaatagaaaagatctattgggtttctttataaaaaaaagaaagaaaggttaactgaagtgcaattgattgtgtaaacccaagggggaaaaaaatttctccttgcagggagggggatgtccgtagcttaattagttggcaattctcttttattcaaacaacttatttgtattggccaaaaaggaaaatgtaatgaatagttgggttgtaataagctataaatgtctgacttgaaagacaaccttaggtaggattctttcttatagtcttgcaggaattttctctagctgtctaacctcaatgataaataaatagacaaatatattacctcgcagattcattttaagactacagtagcatgtgttgtttttatggatgattttattgtttagcctctctgtttttattttcagcttgttggtcggctctcacaagaggaagtc

SEQ ID NO: 11490 - DNA, 3152 bp, Vitis vinifera
  Intron number 5 from transcript GSVIVT01034255001 (locus G SVIVG01034255001) derived from phytozome v7.0 (chr-ID chr9 ; pos 13598373 to 13601524)
atttgcaggtatgtcttatattcccatttgaatgcctttgagaatgaaaaaggaaaatgatgaataagcaactgggtaaaaattctggatttaactatctatacatacacatttttagctatcaacatatgatgcattgcatgccaaacataccttttggacaacaattcatatttacattttatattttatttatttatttatttttgataagtatattttatcacaaacaaacaattgattgatataaatttttgaagtatgagtgaaggatgagaaatccttccaaaaatatgaaggatgatttaaacccaaaaaagaaaaaaaaaaaaaaaaaaaaaaaggagggggaatatactgaacaagatctgcaagatagctatacaaatcaaagatgaaacaagaacatgagcaaagtatcgaaacagtgtacaactcaagggggtaaaaattccttcacaaaagaagccatttgcttggcttcattttttgctaatcaatctgcaatatgattagctaaatttggggactaagaaagttctgaacattgtgccatggtgatctctaattacaacctcaattgaagtttaacttagtcatgcccattggaggcactgtccctactaaaagcaactcattatctatactctttggcccacaaacattgttccaatctgagttttaaaatggtcaaagaagtaacttacaatagttttaggaataaaagcctaggtcaaggaacagaagtgtatcaaatcctaaataaactccattcatccttaaacaatccttacatctgtttccctcctattatccataacaaagtgacccaatgaacatgccaaatcatctctcagcaccctaaaatcccctaaaagaaaaataataatcataatcataatcatcatatttagtgatgactatggggccagtatttttgtgcacttgcctcgccccatccttaataagattggtttaggagagctataaatggttatatatatatatatatatatatattttgaaaattgccttgcaccaccccaccttcatataatttaattttttttcatttttctataaatttacttctcatgaaaataaaatataaagatttgtgaaaatttatttattgaaatattgtatttatttgaatataactaaaactttttaaaaaataacaaaaagaattttaaatgaagtggggcaaggtaggtacagtaaaacttcgataaattaataaacttgtttgaataataaaatcttttaatctcaacttgagttagtgtattaaattagtaatttagctatatgcataaaataacactttttttaggtatgcttaagggcccaaggaaatataaattgatgattgatgatcgatgaagtacataaaaaaatagtaaacaaaaattcataatacagtattaagtaactttttacaactattttcttaattcaatttcatgtacaagtattgtaatagaaacataatattttctctaaattaataaatactcatttatcaaaaaattaataaataattcatttattgataaattaataaccttgttaagataatgtcttttggtcctaagaatcttatttaactaaggtttacaatatgtgaaatttctttaccccccttgccttgccctaataagagcttgagacaaaacccaactcaaatccgtcctattgatgcccctaataatctttgtcacgctctagaggagaccctatctattttaaacaaggctaattggtttatgccaaaaactcaaagtcattgggcaatgtaaaaaaagatgatcaatcaattttctattccttagaattagtaacataacatttgggttgagaactttgaagggcctcctcatctacaatacatcagtggtgttgactttcttattagacaccaaccatgtaaaaatcttaaacttagatgaggctttagattcctaaatgaaattagcatgggaaagaggtttaagtgtcaaggattaaaaagtgctaagaagaaagactctacagaaattaagtttgatgaagttaatgataactctcacattcatggagataaactcacgagggtaagagatgccatgagaagattgagctctttagattttggatcagtgaggttgtaacaataattaaagttccaagccaaaggggaagaagaaaatctagaatagatgaaattgaggagcctctaactcttaaaactctgaagaaattcggagattgagtgcaaagtggttgaactctgtacctaaatcttcccaaaaatgaagctttgcactatcaccaataggaaaaaaaaaactataactagaaaaatcataaaaatattgtaaattggatttccaagggcaacaatgggaccatctaactgcattaatgacatctcaaccattagaatgtgactcataaggctcaagctaaccatataccataaaacatgaatgtcccttgagaaccttcataggcactttcttaagaggactttgtttctaaaagagatctttcccaaacccaaccccacttcatcctagctcacacactcagtcccaacttatgaaggggtctcttcttccttctctaacaccccaccaaagaaaatccctatgtgatatattaattctatatgctattttggaagggatcttaaacattaaaaggacgaaaatgggtatttggaaaaaataaggctacaccaaggttattccaaggccttagaagaaggctttcttcccttctgtgacatgcccaaataactgactcattctttgccttgtaatgagaggacatgatcaggggtatttatcggtatcctcttttttgtcttcctaaggtttgtatttcaatacagttggtattttattactcatgaacaatttaatgtagccagatgttaaccctaatatacctatgaacaacctgagtttgccctcaagttaatcacacctgaaccacctttagtcacaccatcattttcattgcaaacaaaataatggctcgtccacctcaatttccatttggctagcaatggaactagttaaagctgataaaaaattaattgtgaatctatatttatcatgtaccttgtagattgaagtgagactcggtgaagagaaggacctttt

SEQ ID NO: 11491 - DNA, 5064 bp, Vitis vinifera
  Intron number 2 from transcript GSVIVT01031452001 (locus G SVIVG01031452001) derived from phytozome v7.0 (chr-ID chr6 ; pos 18350829 to 18355892 reverse strand)
gtggatttgtaatgttagttggcaatattatatccatcttctcatttttatgttatgatgaacattcatattattcttttttttttttttttaaattcctattgttttatacaaaaaaagtgttttctttttaagctcatttgaaccattattatttcaagttatgcttatgttaattgttgattatctcaagttaagctagaatgaattaagattacttcattttgctgctcttatagagattcattttctttaatcatcattgatttgtcatcatcactattgttattgttgtttttatgatttatggattctcttctccctcaataagcattttatttatagcccatctagttgttgttttgtatgttcttgctttgatgcttcattaatggaacaaaggtattttccaaatacaacttcaaaacttcttgaaattatgtggtaatcatttgacctatgtgtagatattcatctctctctctctctctcaatcatttttttccctagttggaattttgatatacatttgcctagttgttgggtgctataaggttagcattctttgaagggtgtgctgcaatgcttgatcaacaactgaagtagaaaaaagtactcttggttgaacaattggatattttatcagcccaaatcttgctcggatgtatctttgaataacaaaggtatactgcatgaggggtccttgtggtccatgatataccatcaatagtagtgtttgatgttacttctttatttaccattttgattgcttatttgatgctattatcttaatttttaggcattcaaaatgtagtttagcaaaaggaaaaagcattttagattgaacaatgtgatattatattgacccagatctgactctaatatatctttggataatgaaggtatattgcatgatggatcgttgtggtcatgtcattggtaatgatgcttaatgttatctctttccctaccattttgattgcttatttgatgttgttatatcaatttttatgcataaaataggcagtcctgcaaaaatagttgcataaagtagtttatgttaaacaattgatgttatatttgctcatatttactttgatatacctttttcatttgaaggtacttctacaacatagttttaagaagtctcttccttgtttagggttttacaacatggataatttgttttatattggtaagtatgatatacattatgaacccaaattctataagcttaagctcttaggaaaattagtggttcaacatggtattagagcctcatttggtgggaggtcaagtgtttgaacctcaccatcgcatgtttatttccccaattaagccaacatgtaagcttaaaaaaggaaaaagcggctacatgtgagaaagggtgtaggagagtatgatatacattatgaaccaaaatcctataagcttcaacttttaggaaaattagtagttcaacaatttacaatgtgctaaagcatgcttcaaatatggctttgccatgttatatgaagttccaagacctgcaagtgttccattagctattgccaaaaaggttgactaccactaattttctaataaagatggaatcaatactgttgttaaacataatgatggttagtgtttactcttttgttcatcctttgaactttgttttcccttactattaacattctcatgcttcttgcttcctcatgcacattatatgtatggaaagatttgtgttttatgcccttcatatggtggagttataatgtaggttgacaatattatagccatttttgtaaccataattggttccattgaaaggaggggtctatttacagattatctttccatgctaggtaggtttgctatgaacttttagttggttaagacttttgaagaggtcttgctctgatatcaattgttgttatgaagaagcaaacttaccaagatccacataagacaataatttaaaatgctatcaagtaaaaggatagtggaagagaggctgcgagcaaggttttattgtggtttggaaaatctctagcctaggttcatgcttccaaactccttcaagccttgagaattttcactgactcaagaatcttctaattaagactcaagcatgcacttggtttactaggtattaggtgacctttttcccttgagtgacttcctcacactctcatcaagcttttacaaggctttcacaaggttcttataacctttaagagagaatcaaaataaaactttcttcgaagagtaggtatacaattgaagggcttgactttgtgtgatgaaatgcacaattaatgataaaaatgatttggatacaagctggtaatgattttcaatggtgtgtcttttgctttaatttcattatacattaaattttataccatttgtttttttatttttagaatagaaggacaaccttgaactactcaatgctttatgatttcttgtcttaggtaacagtattattaagtgtatagaccatttccgcttttatctatcttttgattttttagctatgttcacatgcaaagaatatgctatcttttaattcttttcaaccaaaatgatattggtttaatcaagggtgtttgattgtatatatgttttttgaaatcttcacaaacctaatttaatttagatttaaatagtgcttaatgcttaaccaattgcaaagcatcatgtgtcttggaacttagtattacatgtgcaaaatagttttatacttgacacctgatacaccttgacttgggcctttgatgcatggataggtccattctctcttttatattattctcttcacatctctccttaatgccatcatgttataacatttggatatgaattcttatttttaaggtcatccttgagtcatctagatgcctattgaatatggatgcttgtggaagatgtcaaaggggtctttcctgttctacctcttggcaaagatgatattatgtggtgtcacagtcgaaacaaagccgtgatggtaatatgtatcctcgtgttgggagtagggcttgtggggacttaaatggacttgatgtactttaatagtgaagttggcctttttgctattgagcactttggggttggtttgaaagtcttggtttggtagctagtgttgaaagtaggattggtgtgtatggagctcattggctagaatgagaaggagaggtacacttgtgactccatggcatatgtcatatttaaaggcttccctattatcatggaataatttgtgggagttattattttgcagcattgtaaaaagctccatttcttcccaaacaaaataagaaagaaattttagatctcctagaacttgttccttgattccactaccactttctccaaccccctcttgcctcccactctactcgttctccccttaaactcttgatattgcactaccccaggttgattggtctcctatagttaagaaccacataaacaaacatttgagttaaaaaatacaaataggggtagagtctcaaaagattattcaaaaaaattgtaatatattaatgtcatgttggctcttgaggcttggctcaagtaggaaggggttagagaaggtttacagtagtttctaagtttaagccccaatcgggacaaaaatttacctattaataaaaacattaatattatgttaacaaaaaaagacttgacatgactattcaaaatgttcaatttagaaccctaagattcacaagtgtgggtgggaaaaaatgaataggactattaaactaatgtgattttatatacatgtgttttatttagagcatttcatatatgagaagatgtagaatatcaaaacaaagagaaaaaaacattatttgattgggaatgatattaatttattaatattatttttaatgattctatattttgatcataaacctaataacaataactttatagaaataggcatgagaaagcgaaaccgtggtatttgtagaacatgatatttgttgacttatttaataataaattgtacattgatcggctcaatcacattatatattttgagcataaacataataaaaataacttcatacaaataggcatgagaaagtgaaagcatgttgaacatgatatttgttggcttatttaataataaattgtacattgattggcttgatcaatgacatcattttattattttattttcgcctttaacattcatgatcatctcaataataatccatgtgtcaaacaaggaattacaaaatagacaacaacaaacaccaaaagggtaggtgaataagaaattaactaatatgttaatttaattaatagcataatcgtattaagaaattcttttaaaaatatcttataactttataattttcacatccttcacaaatcgaaataatattttgagttggtcttaaggaagattcatgaattaataattattttttgacacagtcacttctataaggtttctttgtttaaggaaaacgttttatataacatatattgttataaattattttattgggagattcaataacatgataagaaaattatttaacaattgaaaactatattgtatggctatttcaaaacaattttatatttgtatattaaaaacaatctagggctataactttaaaaataaaaaaataaaggaaaaaaaattcaaagttcccttagtcttgatacattaggggtatttttggcaacaaaaaattgaaggcgtttatatctctttccctctctttctttttgtatacttttctatccctatacacatctgtctctccttctcatcgccaggtcaccttctttgataaatcatggacatattgctttattctagcaccatgtttctttaatctcatcaaccaccaaccctctctcaaaccccgatcttgctctcttcatttggtttcttcacaagagattccttctagattttgattctaaactagttttatatattgtttgtgtttctttttgttgatcacttcatttcaattcccatttattgaagttatagagtttgaatcgattctagggtttctaataagtcctcttttgggtttgatttgg

SEQ ID NO: 11492 - DNA, 1278 bp, Vitis vinifera
  Intron number 10 from transcript GSVIVT01017781001 (locus GSVIVG01017781001) derived from phytozome v7.0 (chr-ID chr 5; pos 3440856 to 3442133)
gaacattaactgaaattttcattgagagaggtaactatccatgcatgccacaaaccatggttgccacattctttggagttgattcagttatttgccattgctcatgcattcattgcagtctatctgttgcatttttttaatttgatttttcagtagttgccctctgttgaaaagcactttaattgcttagagagctcttttgttttgctatcaatggagacacgggttttgattgcttctgtttctttatctgtcaatataactaggttattcaagataaaataaaactttggaaacagtgagctgtataaaagttatactaatggcactgcacagatgcttctcttgttcatttattttttcaatggattatagaaactatgaaccatttcctgtgctaatccatccctacataacctgtcctgggttgttttccataggaattggaatgtgaccttagtagacaaatcatttatcctaatggagttcaagctcactagcaacatggctttgcatgctgtcttctaagctgaaaattaatgctatttacaatataaaaaataaaaaattgagccagccttctataattatttgtttgatcaagtgttctcatagtaaaatattttctttttaattggactagtgagaaagaggttgctttgctgtttttcttatgctaagcacagaaatgttatcacagaatgaagtaaccaattgaatatcagttgatgtcgtctcattcttaacttcattcttattcttatggatggtgcattctgctctctctctccccctccctccctccttcccagtgataatccttccatcatctattactgttctgtgacctcctcttttcttacttgatttgtttgtattttctattttatctgcagcaatattccgtcgcttttatgacattttcttcatatgattaaactaggagctactagtttattatgttctgcatttcatttaaaaatgaatctgtttggtttccttaggttataaaatgacctagttataccccaaacttgaccagtcttaaggattttaaaaaatgacatatttacttcttctggacatgatactctgaggccggctttaatattctgcagcagttttcttctcaaggatggatttgcatatcaaatttcatttctatggatgtccaaactctgtgccagtgcattacttcatgccatgttttatgtgtcagtgcattttgttttgatcacctttgattctttgagtttgttctgcttccaatagcatttg

SEQ ID NO: 11493 - DNA, 10246 bp, Vitis vinifera
  Intron number 2 from transcript GSVIVT01017404001 (locus G SVIVG01017404001) derived from phytozome v7.0 (chr-ID chr9 ; pos 8021354 to 8031599)
ttatatgtccacattgtttctttgaaattaagtaaaatgtatttctaacttttaatgttccttagttaatctctcttttgattcatgtttgttgcagaattagctagtttgagaaatttggaagtgttggatctaagctataatgatttggaaagctttcaactattgcaaggtacttcattaacttgctaaaaaaacttatgatattttgttattaaattaaaggtaagattaacaaacaatttcttcccattagttacttttctttgtaatatcattaaatttgatataaaatagtctaaatcatcctttcaatttataagttttaattaaaacgcatcaagcatgcacaaggtgtttaatataactaatattttcataagtaattgaattttttttatgaattaattaacttgattatcaataaatacttacatgtataagattaatatagtttcataagtattttaaaattgtcttacaacacacacacacacacacagagggaaaatgaaaggtatgtgatacatttatgctatgtttggttcccaaaaaaattgagggaaaatgaaaggagaaaaaagtggagaggaaaagtaaaagaaaagaaaaaaagtgaagaaaaatataaaattgattaaagtaaatacatgttactttaaacttttttacttattttaattcttcaatgtaaggatgaaagatttgaaaatgcataagtttctaatttttttattttattttatagtttttacaatacaaccaaacatactaaaatcattttctttaatttttttttcttttcttaatacttttcacgaacccttaagttatgtttggtttgcagaaaatatgaggaatagcaaatagaaaagaaaattagaaggaaagaaaaaatgaagtaaaataaaaataaatttaaatttaataaattatttttatatgctactttaagcttatttcacttattttaaattatttaaactcatttctaataaataataatggaaattgtagagaagtttgtgttattcaagctttgcaatgacttttcaaggtgaaggaaaatattcttgctgaaattgaaaaaggaaataccttcttaaatagcctattgaccgaaaacacattaccctaacatatacacacacctttattatttatacaatcatgtaatacttaatccagttagtgggattctagtggttgtttctatcttggtttccaatatttctgattgatagtgttcgattaatgaaatatcataaattttgaccccaataaggaccaatccctattaaatgtaattgggttaacctaagactaaatgctagacccaactaataaaaacccatctgtttgttggagtctaaataacctggccttaggtagagcccatgccttattattttaagatgtagtccaactggtttaacactagattgagtaaagcccaacttatgagcatctgtgcatttccatccatccacaacctactggcatggataaactttggtcaattaaacctattataactgtatacaaaattttaagttcaaaagataattttccttatttagttaggattcatattaaaaaggcacaaaacatgaattttcatgtttaaattcacaaataccacgaaagctccttcaagctctatggaccattttatttgtaacattatattactcttaattatcaaattaaccaacaaattcttctcattacttatctttcttttgtaatgtcataaaatttgatgtaaagtagtattggtcatcatttcaactttcaggttccaattagatgcatcaagcatgtgcaacatatttgatataactaatatttttataagtaattgaattttttttttctataaatcaattaacttgattatcaatgaatactttcatacatgatattgatgtagtttcataaatattttaaaatagtcatagaagtcttttatctgattcactagaaagaaaaataaactattctaatgaaaatacttgatgatttgaagtgattgcttttgattttatttgattgctaccattattaattgttagaaattggcaacaaatacccattttgcatcacttctatatgcatcgggggaatgaattatatttcatagagctaacagggcaaaactcaaacttttggaattatggaaaatgttgctagaaagctaattaaccatttatattatgattaagactagttgggttagaaataattcatatggagattaaaaaaaactatgtaatttagtttagtagcttgggtgctattgtaatgattaatgatctgcaacttgaacacatctactagtgctttctacttgtatagctaaatttatgttaccactttgaactagagtacttacatgagaagaaagcttttccctagtgataatgcaaaagaaattaagtatcaatttttgttaaaaataacaagtgatagtttagatatggtttgaatacactttctttcttctatttttttattttgaaaaaaaaaactctttaatgaaatataagaaatcttatatgtataaaaattaaagacttaaacaaaaaaatttgaaattttgaaaattttcgagaagtatttttaagaatttgtatttttagtataataattcctatattttgtataaaagtttttgtttaaaaaaatagaagtgtatccaaattacaaattaattgttaaattaagaatgtttctcagatcaagagataatgaaagttgtagagagtttgcattactcaacctttgcaattactttttgaaggtaaaaaaaaaataccttcctacataacatacaatggtaggttctggtttgtaagaaactaataaatgattaagaatatgaataagacttcctttataatagatatgtagagaagaatagtggatgataggtggtgaaaatcttgtaataaaatatcaatatcggttataagataatcaacattttctctatttcttgtacctatgtgattaagaatcttgtagctcccttattgaaatataatataaaaatataaataaactatttagaagtgcatgtagttttcaacatgaggaagttcaaaagcaagttaattatgataattttccatagtctatattgaacacaaattatttttactaaaggttcaatcgttctatgaaggttaaaagtttgaattgtttacatatgcaaatgtgaaatttgaaagtttataattttttataattttcttgtagattcaaaaagcttgtccatattcaaaaagctcgagaccttgaacctcaattacaacaagttcaaaaacactagcctacaacaattggatatatttacatcccttaaaaatctttctctaagatggaacaatgttggaggattttttcctatccaaggtatgtgtaattattattattattatttttaatgatgaaatattagaattgtcaacatcttttatctttttttcccctcaatggtgttgcagaattatgcactctggaaaacttggtgatgttagacctaagtgggaatttcttttttggcatgcaaggtaaatacaaagtgaagttttggttatatatatatatatatatatatatatatatatcatgtaagaacataactaaaatcaacattatttgcctatcaatttgtgcatgactattatttagttattcttcgtaacataattgaaagaatgtctaggtgtacaacatttaagaattttacatggcacaatgaaaaacatggtaatcaatgtgtgcaataaaattctaatagttgaaaaagaattttcttgtaattttatgttcatgtatagtaatcaaagagaaaatcatgaaaatgtatattagttagactttatatatcaatagacaaaaaagaaagaaaaaaaaagattagttccttaacttatcctaaaattttctagataacaaggagtttttttattttgggctataaggtttacaacctgaaaagtgaagatgattaatattagtaataaaattttaaaatataaaaattagtgaaataatgttctctataactataactccaactgcaactattaataaaagataataaaggtactttagactttgaatccatggttaggtttgcaattttttgatgatcaataaagctacaacttatgctgcaaaaggctatacaaaatgtattaggagcattgctaagctcatttatcaataaaggaaatccagtaatactttgattggaaaaaacctagaatcatgtttgatatataataggtgaagaaacaaaataacaattccatggtattagttagtttgatatctcttttgttatatggaataactattccattttaaaataattatttcatcttatcgctagaacaaaaaatttcaggcgattatatgggcttttgggtttcttaagaatttaagcatttatgggtcacccatatatatataggaagaataaaaaaaaaaatattctatggagacaagggtagacacccataaatgtacatataattatttaaataaaaatatcaataagaaacaatatacaacaaaatagaaaattttaatcttcctaaattttaaaaatagaaaataaatgaaaaaaaattaaaaagtaaaaaaaaaaaaaaaaaaaggtcaagaatacaaatagataagtaaacaaaatataaaaaaaatacataaattaaaattaaaatttttttaaaaaaaatacatagattaatatgaacactaaatgaggttttttgagatagacttagttagacttgaactagatggatattaaaaaaaataaaaataaaaattcaaagaaataaaaactaattagatgctaaatattggattaaaataaccaaatgaataaagagtaattattaatttttaacattttttattccttagaattattattttgtgtattaaatgtattatgagtgtagtggtataaaaaatgtagttaagaatactatgaagaataataatggtgatgataatggtgacgacacttaataccttttattgtacatttagaaaaaatgaggttcttgatctttatgaagattatcattactcatccgcaagcatgttgatagttgaaactactcaattatcaaaaattgaatttctaaccttcaatttttctctctcaaatgtatatgtgggtgagaaagcactaggtaggttataaggtctcacatgtatatgagtcataggataaaaaatatagagacaatactagcatttatttgatccagtggcaaatagagaaatataacataaccataaccataatgttctaaccttatatataccagaaccatgtttccttcattcaattttgcaactttttcttttcaaattagaatgtaactcgtaggatccattgtccatcaaaattttgaatcgaatattataagatatttcacatttctacctactaaagcatgagcttcaatgttctcatgcacttttggctactaagttaaagaactctttgagggttaatggagtttctatgagtagcaaagcattataatcacaaagtcttatcagtgatatgcaatttaaccaagaacttattcccaactattttatgacttttcttggctacttgtaggcaagctaaagaaattttctggtttgttcaagtctaaaaagtggtttcaagtttagggccaagcttgggctgcacctaggtccttgggccttattcagctccacgtttaaaccaaccttgagtccatctttgtaatttttctcccaattcattgatttatattaggattttataaagcctataaattgaccaactaaataaagtaggttcataaacttttaggtgaaaattttctctctaataaatgttaattcaagagtctccgtaatctttttatattcatattaattggtatttaaactgaccttactatattaaagtcaaataccaaatagtgaacactatatctgctactaccactatgatggtcacaaacatagaatgctcctttttttagagtcaattgatgcttataaacaacaactttgtttgaaaataaaatacatcgagtgattgcatcaagagattgatgtaataattgcatacttgatcttgataatgctgagttgactaaataaatgagtatttacttataaggtagcccatagaacattatttgtggaaatattcatgcacctctacatatgttcatgataacttaggttgataaatttaagaagaacaaattcataaccttgggcatagttagtaagaaatttcaccaatagagtttggtatcatgattctaattgttcaaattgttttaaaggagtattttaaattgcatgttaatttgcttctaataaatggagagaaaccaattcaagaagagaattgtactcaagctatgtataacattcatgaagatgtagaaaatattgatgaacttacttttgagcaagttgaaatcataattaaataaaagaacaaacccaagggttaagattgtcaagtaaaactttaactaaaatttattgattttttaaatgcctattagagggacaatagaagttctagataaaaagtaagaacttttctaaggaatcacttgttagattttaagtgatcaataaatataatgtccaatttaaaacttttataaaagcaatgcttctaaagaataacttgatttgaatttaaagttattattgatatttgtttataatggatgtagttaatcaactgaacatagtaaaaaacacataaatttttcaaaataccttctagttgttgggtatatttaaatagtcatccatatctcattatcttttcactcacatactaatctccttattgagtatttaccaattacaagtaggttgaaagttacttgaatttaagtcactaatcaatgttaacttgataacaaataagtctctctttgaaacttgttttacaagatagcgaaatgtagtcgatcaatcatcaaaacaatgttcaagcattaggatttagttgttaatttttatttttattttttgtgcttaaacaaagacaaaaatgataaaaactccttaaaagtacatagtaattgaatttaatttatacatcaaacaagaacaaactagtcttggatttaaaattcatcaggttttgtaattataattcctaaaaatttgtaagacaacaaaattattgggcactaggttattgggtgtgtatgactaagaggtgaaggagggttcatcttatacaaaggatgatttgattaattttaaagattggataaacaataattgcatattcaagtaaaaataacattgctaaaaaggaaaataagtattttagtcctcaaacctaaaatggctaaaaattttaattaatacaatacaacttcacctacaaaagaaaaaaaaaacccaaaacttttcaatagcacaactaagtccatttatcaaaaaaaagaaatataaggaagttggactcatttactagcaatttaacatatgactaaaacctattgaagaatttgcaatagcacttactttggtcatgtccaaacttattgcacatggtgcaaaaaggggtagtgctcgaggatgcttccacataagaaagaccctacttaactgttacaaaggttattttcccacttgtgggaatgctaaccttgctaatatattatatgccatgtttatcatatacaaatttttctttactaaatatttctttaatgatcttggacctaaaattaaatatttcattagtattggtcatgtcgttcctcaacttttcaacttttagagttaaatctttatctttatcattgatagttttatgtttagtccctagaaacttcaccttattaacaatatgttcatttaatattttgatatttttaattttcaaagaatcatagagctcattaattttaatgtctttttattcacttttatgctttcaacctttgtttttagttttcctataataatgcatcatagaccccatgtatatcattaaaataaaactcatttttttcattaggattcaattaacccaatggatcataatcaaaattagttgcatatgaacaaaagcaataagattatcattttgtacatctttactttcatttgagttcttagccctacaatcatcaaacatggaattactccaagttacctacatagccttcatacctaatgtttttaaggcaaggacaatcaacaaccatgtgtcccattcccccaatggttcactacgaaatcaaggtacatatgttatgctttctttgtttcatagtgattagagaggataaacattgtaaaaaaaaaagttgtcatagttaatgtaagctaaaactaaaaaacttgctttttcaattgtgtaagcatgttttgttcttgatgaatatttacaacattcagagttactaatgtttataattcacagagacctcattaacaacaagtaacaactaattgtaagtaaccatgaaaaaaaaataaggagaaaaataaaggaaaatcaaggaaagtgtcaaattttttcatccccataaaaaatgctaaggaagaaaaatgtgaagaaagtttaaagaaagtatatttttcaaaaattgaattttctttcccttaaagttggtatggacaaccaaacaagaaaatgatttttaaattcttttttgacctttttctatcattcttttttttttccccctactctatttcctttccctcaaactttctaggtagtaaacattacctaagataaatagggaagaaaatattttatcatttatttatttagtatttttcttacctttttttgtattttatccaaatataagaaaactacttttctttattttttcttttccttgttgcttttcaagaatcaagcatactttaaactctaattaagagttacatagatttacagagaaacaatgcaactagtaacaaaaaattaaggaaatttaattttttaatttttgagagtaagtataataagattggtttgtttgatacaaaatttgaataaaaattattttaatgaaaattcaaggaaaggaaaaaaaaaaaaaaaaacttgatctctagactataatactaaatcaattaaaaaatctcctaacatcgtttatgttcatctttttttttttatggatttgaaaaacccaataatttggagaaaactgattcaaggaagaataatttttagaataaaatattattatttaagaagatcataaattttatagtcattgttgaaaatgataaatgattaaaaaaaaaaaggtagttggaaatttagatacttttataagacaaatgcatttttctagtctggtatgaaaaaaggtaaaatgataggctttgatcatttttcaagttagtttgtttaaatcattttaatttattttgatttaagaacaataacttttattacactagttattttgattttcttttgatagattttgcaagcttaagcaatttggagctattggatttgagttataatttatttagtgggagcattccatcatctataagattgatgtcttctatcaagtctttatccttggctgaaaattacctcaatggtttcttagcaaatcaaggtacatatattgtgattacaggtttttctattttcttttttaatatcttgtttgttctttatgccaattaagtcatgcatgtctattaatttttggtatttaatgaaaaactttattcttaattcataaagacctcatcaactataagtaacagttagttctaagtttgggggcattgacaagacgaggagatgattggttacatgtcttattctcttttgttggcttttgccaattgaataagtttcaagaattagatttttcttacaacttattccaaggaatccttcctccatgtttgaataatttgacatctttgaggttattggatctctcttccaacctattctccggaaatctttcttcccctctgttacctaatctcacatccctggagtacatcgatctcagttacaatcattttgagggttcattctctttcagctcttttgctaatcactccaactttcaagtggtcaaacttggaaggaataacaacaaatttgaggtagaaactgaatatccagttgattgggttcccctatttcagttgaaagctcttatgctatccaactgtaagctcatcg

SEQ ID NO: 11494 - DNA, 1002 bp, Vitis vinifera
  Intron number 1 from transcript GSVIVT01017954001 (locus G SVIVG01017954001) derived from phytozome v7.0 (chr-ID chr5 ; pos 5056413 to 5057414)
ggcacaatatcaggttcgtgtagcttgttcattgtttcttgtttttgggtcggcaccttctgtgaaaaaactacaaatagaagagaaaaaaatcatattctatattatatcacgttaatcaaataaattaaacaatattattcttttatttaatttattattattatttttaggtaagcgaagcaagaactttataattattttaccaaaaactgattcattggttgttaagcttggtacccgctgttgaagaatcattattaaattccaggagcaatgcaactcaaagtccaaatcttgtttagtcatatgatatatcagaaaaattttgaaccacaaagtaatattagaggtggcggtccacaattctaaattttatgtgaaaagtcataccataatcacatcacagtggttcagttaagctggacagagaatgtaaccatcatgtagttggtggtggtctatagatggttgtggtgcatgtaggattaaattcaagcacatcttctgactctacgcttttttccatgcatgggtgttctgactgtcaacctctgcgaccttcgcccttgtggaaacattggtcgtagggagagttttgcagtgataatattgggctgggttagcccaattctgtacagggcggcctgaataacttggccagcttgaaccagtgtccgtgggttgggctcaattctgagaacaagtaggtatttggtcgtccttagattgggcctaaatcccaacccagccaaaacttcatattttgggttgggtattttgttagacaatcgatttttttagaagtaaatttaagaggttcgaatttctgcccttgtaaataaaccacagatattctctttcgagactgctcatcaaacaaagctataattctttggggtcatgggcttctagcaggatcttaccctcgtatatttctacatcttagtgcaagaatatttgattttgattatttgcgtaggtgggctaattgggacttcc

SEQ ID NO: 11495 - DNA, 5368 bp, Vitis vinifera
  Intron number 6 from transcript GSVIVT01013686001 (locus G SVIVG01013686001) derived from phytozome v7.0 (chr-ID chr1 8_random; pos 2626721 to 2632088)
aacaagacatgtaagttaacctttaaggctgatttgttctttggaatgatctgacatggaggtgataattgctgctcagtttttttttacatgttaggttcatctgtattaaaggagtgtctattgtgttatgtgctgtccatgattgttatacttcaataggaaaactatattggtttatgatagctgggaagtaagtatatgctagttattcatccattaaattggagattgtgctccaaaattacactagttattgttcaagcatgattcttggcagtgtatgtacaagccagaaccatttctttcttatttgctagaaaatattctctttattttggtgcaagtggttgagtatataaagttctagtcacatacggagggttaactatcaccatttttgatgaaatttaattttgttatgatttccatgtaagtggttcacatggaatttcatgaggtcatagtgatgatcttgagttctgttttgatggtgttgttagatctgggtgttttgagccttcttcaggtttgatgtttcagaacaccaggacttttgaagcttcttgttgaagttgatctgaagacattttttttttcatgggccatgttgcgtagccagggttgttggcatctttggtcctaactgagagagcatgccaccttttgctctctcatttaagtattgggtgcagtgatcgtcctggtttttttttccatttcttcaatgatttccgtctttctttgtcttctcaaatttgattatgtagggttaagatcattccagcctatggctgttttctacaaagtgaacaaatatttcaacaagcaggttctttcgagagggtctaggatcttagaaagagtgaagggtacttaagcaaaagatttttctcatttgttttaatgaagtgttcatgtattttaactttactgcataacacgtgatgtagctatgcatgagcccatattgccattttgctcagattttcatgttgtaatggtaaatatttcttagatccatttagttaaattaagcctaatttgctaataatttaagtgcttgaaatcttagtgacctttctatgtgaagatctcatgtttcttctagctcaatttttgttgacattggggcttgtaaagttagcctaaaattcatggttgtgtgtaattgacaggaaaataagagatggcccttttcatcattagattggattaggcacacaccccgcaccgccactcccccacactaccaccacaatgaatctgaccttatacatggccgaaatggctttctaaggagaccaatgagtttctctctaagtgattttagaattcaatccaccagtctaaaggccaaatatagtctagagtgccagatgccaccctttgttttctaggaaatctccttgtctgtttgccacaaagagccctgtgtgaaagcatcattgcctaatctcaatcactcttgtgcttagcttggtgactataatccacccaatcagatgacctccgcttggtttcctagggcccttaagaagccctttggatctcctctgttatttctgccacactattaggcattctgaacatgtagatgtaaacttaattgtacctttttaggggtagtcataaatttgtttttaatatgagtccattttttcttgttaggcaaataagaatatactaaattagtgcttgaaaagagggggcccaaacctaggtatgtaggttgtatgtaaggaacacttaaagcacaaacaagaagagctcaacccattccctactcattgttaaaatttaacaataaaagatttccattcctgaaagatatacttaatgatgaatccttgcaccaacaaatatttcaaatagaaatctcagtttcagaattagtggcttcacctgttcaaaatcctttgattctgctgtttttttaaagctatgatgtagagaggttaccatcaaagccaaggtgatcacacattatttatcaaaactttcatctagggaaacttaaagcattaattgtgtatgacaatgatattgttgtcattggagatgaccaagaagagattatggggttgaaatcatacttagttgaagaatttgaaatcaaggacttggtaagcattgatatttccttagaatcgaggtggctagatcaaagcaaggattatcgatttctcaacagaagtacatacaagatttacttaaggaaatgagtatgcttgggtgtaaaccagttaagacacctattgaacaaaatcacagactaggagagaaatctgaaggccaactaattgattgaggcaactaccaacagatggtggaaaaactaatttacttgtcactcacaagaccaaacattgcatatgccgcgagtatggtaagtcactttatgcatgctccacttagaccccacttagaagctgcatactggattttgagatattcgaaggcagcttctgacaaggttatcttatttaagaagggtaaagaattaaagttagaagcctacacaaatggagactaggcgagatctattgtgaatggacgatcaactatgggattttgtactttcttgggaggtaatcttatcatttggagaagtaagaaataatcagttgtacactgttcaagttcgagagcaaaatttagaactattgcataagatatttctgcacttctttggattaagatcttacttagggatctcaaaatcaaattttaagaacctatgatattgtattgtgataataaatttgccatcaatatagctcacaacctagcccatcactatcgaaccaagtatgtggaggttgacagatattttataaaggaaaagttggatggtggtcaagtgtgcatgccatatatttgtactactaatcaactagccaatgttctcactaaaggactcccaagtttagcatttcaatgaatgactgacaagctgggaatgcaaaacatctttgcaccaactttaggaggagtgttggaagaattgcaattgggttgttgaccatgtaatatagtttccatatataagtgttgtatagttgtacaatattatagatcctaaggttttgctgggattaatttgtttccttgttaaattttctgtttctttctttagattctagagtcaaaagctttgttcaatatatagctctgtatcaaaccttagaaggaataagaaaagaattattttctcctgcctttctttaattttagcatgatacaagtatagggatgagaaatttagaaatgtgaaatctaaaaattgggaattacacagaagtaatcatcctcatgcatcaggttgcatcactaagacagccagcacaaccaaatagctggatggaaaaagaatctaagaaaaaaccctaatggtagggtcattagatgcatcaggttgcatcactaagacagccagcacaaccaaatatctggatggaaaaagaatctaagaaaaaaccctaatggtagggtcattagatgtttcttatttattttttatggttttttaagatgattaagtcatttatgatcgtaataaggtgatcttctttcttgttctatggaatcaacaacactctagatacccagtttttggtatattctttaataaatctacaagttttagaagatgctgcattttgtttgttactcaaccatgtttttatgtacttgttgcattaagtggtgccagagtaatgtcatgtttggtgcaggtaaacaactctcaagtattattcttcatgaatttattcattagcagccaatagagaagtgaaaggtttgtttggtgaagttttttaaaacaattctcaaaaaattatttttgagaatagttcttaaaaatagttctcaattgtttttagcaacaaaattcagtttaagaactcaaatatgaaaaacatttttcttgtcttattctaagtgaaatcattatgcatttatgtacaatgcaaaaattctcagcctattctttatgtttcctgttgtctttcagaacactataaaaaccacatgaaaatacctcaaatttgttttaaaaaatcatcatgttttcagaaaaaattatcaaagaaatttgtccagtcaaaaatttgccaaatgtgtttttgaagttagaatatgttggatctctttatccagatggtttaaggttgagtatctgcagacgaattagtttaagatcttggtgaaattttgatgttcaagaataatttgtaaacagaccttaaggttgttggtagttggaatttggatgtggatcatgggaactagagtttgtgttccattaggagctcttatgattgggaattagtggtaggggtttcttgtaatgctcatctcattaacaacttatgcattagggaggccaggggggatactctgttgtagaagtttcttttaagtttctcttctaggtgcttcttttaggcattctctttgttttccagctttgaaggtttgggttcctagggttcaattcaaggtgtgcattttcgtacgggaggtagtatgaagtaacttaagtaagatccttgccatggatcagttgatgagaagatgtgttttggttaactgacattgcttttatccttggcacatggagtctctactggctacattgctgtggtgttacttttttccatcttagagattttctgggtttttctttgttttgtgaaggaccactttgttagttggtgcagctttgagaaaggaagacaaaaatactagaaaacactacttttctttcgttttttttttaatctgttttggtgcatttggaaggagtgtaaccaaaagtatctttgaaggggtgttgtttgtgttagctgaaagctctccttattgtggctttgtttcattagtccggagatcctccaaggcagggaaatttgtctttatcggattctttggatggtattatgttggtggggtttgctttctcgtggtgctttttattgtatttaccaggttggacctctggtcttttagcagaacataatattaattatggttaataagtaaccattttttgtgctgattatagtttaaagctgattctaacttgtttgcctataatgttcaagagtgacttaggatgatgttgcccattgcttgtctgtgttttaattggtttaatagattctttattctttgttataatattgcagaatcgatttcccccaaatatatctctacatacttgtttctaccatttctttttagcgttaaaacgattttatatggcgtaatgagaatcactgaattgacatattggccttttttccttcttaaatgtatataaccagctatttccagggcatccctgaggcagtttctgaaa

SEQ ID NO: 11496 - DNA, 21275 bp, Vitis vinifera
  Intron number 5 from transcript GSVIVT01000215001 (locus G SVIVG01000215001) derived from phytozome v7.0 (chr-ID chr7 ; pos 16148351 to 16169625)
tgcaaaagtggagaaggaggatctcaagagctacggtgtttccttttctcctttcttttttctttaaattttgaataattttattacccattaattaattcgtaattatttattactaatattatcaccatgactattgtcatcatcatcgtctttgttattattgttgttgttgttgttgatcatatagttggtttttgttcaatatcagtgttcattaatcaagtaaattttcattcttaaaattttttcctttgttttttctgtcccccatatttttattgttgttctgaattttttgctttcaagttaattttttttttagttaggtttacaaagtcccatcaatgaaagcagtgtaattgtctctagaaagcaggattaagaaaaaccaagttgtttggcttattaaaactgtagcaagggatgcaacctgactcaagtacacatgaagtctacaagaaaaccctcaagggaggaaatgaaaaaactactattgagcaaaaagaaaaacagagcagcatagtcaaggaaaggaagaatagccatgtaaaggtgaagtttatgttattattcttcaaaggacaagaagatagaagagaaagatctctatttttgtcattacatatgttcacaacaatttaataatctagttaattgaacgcttaaatgctacttctgaaactcacagtacttttgaaaccataatttactattgttcaaatgtttttcctcattatatttttctgtcaacacaccaactaatgattttcctttaaggtatgggaaatgccaaactgaccctaaataactcacctacttatcaggtctttgattcaaattgcattggctattgctatgcttaaacgtgtcatgatctgatttaagatactctttgtgagcaggattatgttattgagagtttaagtagtaaataagtgaaagggtatattttcattttccaatttccttgtaaataataaagttgtgcattgcagagaatagtttaaaaatttccacttcttgtctttttctttttctctttgttacttttttccttttacgccaaacaacttggcattagagcaaggtttaaatcatcaggactaacacagcaagttgatgatattcagcacaaggtttggaggacactgatatcagcagcagtacatgctgatatcagcaccatatggacataaaaaatcctgaaattttaggtttctgtcaggagtcgttggatctaaaattccttaggattcctcggctgtttgatggatcttcccatttttcttgtatttttttaaaaggctgtttttaccctggatttggtttcttctaccatagatgggtagctagctctatggaccagttgccaatcctggtagtgttagtttttgatgataaatgagtgcaaggtgaatcctttgagttcctttgcatggctgtgaaatttttaccctcttccatatctttggagcctaaaagttcctccctggtgcataggaggggactttaatgtgattagattcccttgtgaatgtagtaggagagggagggtgccttcaactatgtggaggttttcagaggtgattgatgatctagatttgagagatctttctttgcagaggggtccgtttacttggagtggcgggttgaatagccagtccatgtctagactggatcgctttttggtcactaaagattgggagtgccattttagtggggttgttcagtacaccctccgtagaccagtgtttgatcacttccccattttgctagatagagaaggggtgaggagaggactaaccccgttttgttttaagaatgtggtaaaaggaggaggggtttaaggtgttgttgaaaagttggtggcaaggttttaattttagtggtttttgtagttttgtcctggcagaaaagctgaaggtgcttaagaccaacttgaaaatttggaacaaggatgctttcaggaagattggggttaataagtctttggccttagaaaaagtttcattctaggatgagtaggagaaatcaagagagttgactttggaaaaagtggaggttagaaaagaggcaagagaggatttcaagaatgggtgctcctagaggaagtctcttggagacaaaagtcaagaaaagtgtggttgagggaaggagatagaaacacaggctacgtccataggatgacaaatgcccataaaaggagaaattggttggctaagattaaaattaatggctcttggttctcagaggagcatgagattaaggaaggggggtggctagggccttctagaatctattgatggaaccgagagattggcgccctagcttgaaggggcaattggggatgaggatgctgccaggttggaggaagctttcaatgaaaagaaggttttttctgccctgtttgagctgaacagggacaaggctcctggtccggacggtttctccattgcattctgacagtttagttaggagtttgtgtgaaggaagagattataggcttttttagagaattccatgagtgggggagatttgttaagagcttgaatattgcgttcttggttttaatccccaaaaaaaagaggtacagatgacctttgacactttcgacctatcagcttggtgggaggcctttacaaactgttggctaaagtgttagctaatagactaaagaaggtggtaagtaaggtggtgtctccgacccaaaatgcttttgttgaaggaaggcaaattcttgatgctgcgttgatagctaataaggctattgattctatgataaaaaggaataagagtggagtgttactattgattctatgataaaaaggaataagggtggagtgttatgcaaactggacatagagaaggcttatgaccacctaaattggaattttttgctgactgtgatacagaaaatgggctttggggagaagcgggtaggttggataagatggtggatatcctttgtgttgtttttggttttggttaatggcattccattgggcttctttcacaacactaagggattgaggcaaggggatcctctattgccctatctttttgtgattgggacggaggccctaagttgccttattaatagagctgtgagtgagggctttttatcaagctacagggttaggggaaggggaggagatgaggttcaagtaacccattttctgttcgttgatgatactcttgtgttttgtgaggcttccccagagcaaatggtctttttgagttggttattaatgtggtttgaagccatttcaggtttgaaaataaacttggattagagtgaaatcctattggtaggaagggctgagaatgtggaggatttggcccttaaacttggttgcaaggtgggggtgctgccttcctcttattttggggctttccttgggagctgctcataaattggtggtggtttgggatggggtgaaggagaggttctggaagaggcttgccgtgtggaagaggcactttgtttctaaaggaaggagggtcatccttctagtgcactttgtcaagtatgccgatatacttcatgtctttgttgcgtatgccacgagtggtaagatcgagactagagaaaatacaaagggactttctttggggtagggggattgaagaagaagcctcattttgtaaagtgggagattttttgttcaaataaaaagaaaggcgatttgggtgttagatgcctttctaaactctatagagcctttttgggtaaatggagttggcgctttgtgcaagagggggagattctttggaatcaagtgattagcaagaagtatgaggtagaagaaagggggtggtgtacccgagaagtaagggaggggtatggtgtgaggttttggaaggaaattaggaaggaatgacctttaatgaaaaacaatttcgttttctccatgggggatggtataagagtgagattttgagaggatacgtggttttaagacaatgctctaagtttttctttctcttctttgtttcctttggcggccttaaaagaggcgtgggtggcagaggtttgggatgctttgggggaggaggggggctgaaatccacgtttttctaggccgtttaatgattgggagatggagatgctggatatattccttttcttcttacaagggatgagggtggttactaacatggaggataggatactgtgaaaagaggctaaggatggaaattttttagttaaatccttttatagcgctgtggagggtagtagtacagtcccgttctcgagcaacattatttggtgcactcgtgttcttattaaggttggtttttttgcttgggaagcttcatggggtaaatctttaactttggatcaactaaagaagaggggttggtcacttcataatagacgtttcctttgttgtgctgctgaagagtctattgatcaccttctaattcattgcaccaacgctaggattttgtgggaattgttgtttaccttttttggtgtgctgtgggttcttccttcgttatttatagagatccttcttgggtgacatgactcatttgtgggcaagaagcgaagaaaggtttggagagtagcccccttgtgtctcttttaggacggtttggaaagaaagaaataaaatttcttttgaaaatgaggagttttctatccaaaggatgaaatatttgtttgtttgtaattttttgtcttggactaagtcgtgtatggatgaaaggcctaattttttaatcaacttttttgattggttgagctctagatgagggtggacgagttttttgtacccctctttcttttgtttttttgcctataggtgcttgttgtatacttcctatatgctttgggttggctgttggatgacttgttcttattaatatatcctttttctgtgccttcgcttatccaaaaaaaaaggttccttctttttgttggtttgctgcaactgttggccttgaagaggcttgtttctgctggatgtgaataatactgtggtttggaatgattttcgaaccatttgatggtgctgaaggttgttggttttgacttgttgctattttctgttttctgatcacttgtgtttagcttgtttttgtggaggaagggttatattttgcactagttgtgttgttgatcctttagacaaatatgtttaccagcagcaattttgggactgcaaatctggttgtttagggttcaaatatgtttggggcaagttccaacactctttttattcggtttactgcatttaaatttgatggaactaattatttaatttggagctagcaacacacttgtctctttttgtgatcttcaaataagaataaatgaaaagcactaataaaaaagggaagaggaggacaaattgaaatggaatgagtctaacaatggtgttttttggtcacttggagggagtggactcgactgaatagttgttacttgtgtaaaggcaaggaggaaacgagacatcacttgcttctcgtctattccaaagtcaatatgttatggcagctgtttctctctctctttggagtggtttgggtgatgtgttcttcagtcaaaaggaatcttttgggtttgcatggctctattgtggtgaaaaaacagaaaagcatgtagggttgtattgttatgcttgttttagactcgttggaaagaaaggagcagaaaggctttcaatgatgttgagcagttggacaaaaacaatcaaatccgactttatgtattcttttgtgaactgggttaggttgtacatagaggaccacttaataaatatgatagattttgtaaattaactaagcttcaagtaaggagagtgtttttctgtttatctccttctcgcctagtctaggtgtaaattaagtgtatgttagtgcacctccttttaggcatttccaatatatttactcatttgcctaataaaaaaataatattaaaggtaagggcacacttaatacataggaagtatacatatgggcttaaaaagtgaaaaaagagcaacaataaccacaacaacattctaactccttggagcacaactactcaatgatgtatggtaaggacttggaaaccatcttgtagagatccctaagactgttattataggttacaaatgaggaaatctttaagtgattggtctaatcattacacccctttaaaggatttttgattaacctcctaccaaattgtctagaacaagcaacagttattccccaagcctgccttctcttcttacccataaaactccatgccagcctattaatgacgctttcgtcaaagaaaggagaacctaagagatgtcaaataaatagaacaaaaagtgctacaacccctagccttcccataaaggatgaggaatgaccagttgatttttctgcatttatatatatatatatataacaataacttgccaaaagccaacatcttcatgatcaaaggttaggacccttctctatacaacctcccacacaaagaaacctactttagtaagagctcgtatgattgatacctttcctcgggaggatccattcagtattctcgttccagcagggttcaacaatggaggagagcgagagcgatggaggagagcgagtgaatctgtgtgcaagcgagggtgcagtaagcaatgtccacttggagtctcggaaaagcttgaggaagagcagctttggagtggagttgaagacttttgagatcgaggtagaaaagaagaagggcaaagtgcaagccactattgtggagaggaaaagaggggtttcttcttggattaagctgggaccggagagcctagggatctttatagaatgtctggttttttgcattaaggacacgtgaactagaatatgggaaagaaattggaaggaaaaagggaggttctattcgctggtgcgcgatgaaaacaaggggggatgcttcctccgtttgggcgttgtggatctggagaagaaaaggttcaacatctttattcccaaaggaagaggagtaaaagggggtcgggcttcaatggcagagacgcttcggtgcttgggtgttgctactgaaaggaaggagagtcagaaggacgaggtgatgccgtcgaggcccattttggggaaaacctttgcagaggtggttaagctgccaaggcgcaaaggcagagtagtggcgagggtggaagtcagcaaaaaggacctaagccgaaatttaaataagttggctcactgtcttgttggatcttgggaccccaaatcagtgaggggggatgacttgagaagttaggggacccaaatggcaaaaatttgggggttgaagggcaacttaggactggctaagttggaaaggggtaaggttttgctggaatttgagctgttggcagaagctgggaaagctctaaaccttggaagaattttggttgggggattttttctgtgattggagaaatggagccctgagacggggtgtctgatggaaggagagaaaaagagtgaggcatgggtgagaatcgtgggcttacccgtctctttatgggatcgggccatccttagaagggtaggggaggagtgtaggggtttcttagctatcgattctcaaatgaagaagctggaggagttgcagtgggccaggattctggtgaagcttaatagcgaggagattcctaacgtggtggaaatttaggtcgaaggggtgtgctattcgttaaccctgtggtgggaggttatgccggtaatgagatcgttgtcgacagaaaagagtgggaagaaaatcggagcagaaagagaggttgagggtgaggtctttgcacgtgtgggcaagcgctaggtggaagaggacgatgacgcaaggctcgagacccagttgcagtctgccaatgggacgtgggggcagacgagtgggtcggggcgccctttggttcattatcagggccttaatgggtcgtcggttgggccccatggaggtttgcagcttctaggtgggccccttaagccaggcctttctgaggacccacgaagctctaatctgggctctgggcttgttgggctagatccagtcttctcctcttcatttgaggctgggtcgacttcttttgggccgacgtctttggaggaccctaggtgggtcaaggctatggaggccttcgtggcgcttagttcggttaggctggatgattgccaaggcccatcccaatctttggaggggaacagagcccacatcggtgtggcctttccctcggtgtggtttggcccaagtcttttgaggggtccagacgttgaaatctctcatttctgggtgaaggatggcctgcagaagcaaattgaggaggaactctaatttgaggagagatcgaagactgacattgccctaattgaggaagcgtctaggtatgggagtgcttttaacccttgtggattgttggcttctgggttctcttcttctcttttttttttttttttcggtcagactccattaggggagtattacgactattctggggacaatagggagacaatccagggggaaaccctgttacgcatgctcaatgctccttggcctatagaagatgagactgtcaatcgttgggaactgatggaggttaacaatggcaacaatgaagaatgtggaaaggaattatgcttagttcaaactatgccacgagaagtaaagggctgggaggaggttagttgggaggaaagtgatctggctaggttcaataagtacttggggtttccgatagaaggattggagaaagacattttggattttttggttaaaatccaaaagagaagggaaagagtccatagcaaaactcttctggagaaatctaagttcgaaagggaattgaaaagattagaatgctccattaactacgagggggggaaaaacagaaatgtggaatgcaaggaagagggtgttaggtcatggaagttaaatgaagctaagactcttgagctggaatgtacgtggagctaacgacagttccaaaagaaaggtgatgaaggtcgtgattagaagtcagagggtggatttgttctgtctccgggagaccaaaattcaggcaatgtcagaggggttggtgagaagtttgggcactggtaggtttctagactggggtgccttggatgcctatggcactacgggagggttattgatttgttgggataaaaggaccttggaggtgcttgagatggaggtgggaaatttctcaatttcttataggctcaggaatgtggaagatgggctagtttgaatttttactagtgtgtacgggccgttctctagagaggataggggttgtatgtgggaggagttaggggcgatcagaggcatttgggatgatccatggtgtttaggggatgacttcaatgtcattctctcccaaagggaaaggaatagtcagggaaggctaactggtgtaatgagaaggttcgcccagattgttgacgagttagaacttcatgatctttctttgcaagggggtgtgcttacctggagtgggggtaggaataatcaggcttgggctagactggataggttcctagtgacccataactggcttgatcattttagtggggtcgtccaaagcaggctgcccagacccacctcaaatcactttcccatcttgctgatgggtggtgggttaaggcggggcccttccccgtttaggtttgaaaatatgtggcttaaagttgatggtttcaaggaccttcttcgggaatggtggcaggggtttgaggtgagagggatggttagtttcaaactagccactaaaatgaaggagttgaagcaaaaaatcaaagtttggaatagggaggtgtttggaaggctggaagttaataaaaactcagctcttcaacaagttgagtactgggatggggtggaaagtgagagaagcctttctgaaggagaaacagagctgaaaaaagaagctaaggaatcctttaaaaagtaggttttaatggaagaaattcactggagacaactgtcaagggagctgtggctaaaggaaggggataagaacatatgcttttttcaccggatgacaaatgcccattgaagaaataattccatggatagaattaagattaatggggtgtggatgactgaggaacatgagatgagagaggggattgtgaatgcttttcagcatttgctctcagaagagccaggctagagagttgatattgaggggatgcacctcaatcgccttaactcccgtgaagttgaagttttggggttgcctttcactgaggaggaaatttactctgccctgatggaaatgaatggtgataaagctccaggctcgaatgggttcacagtggccttttggcaagcttgctgggattttgtgaaggaggagattgtgaatttgtttaaggagttttatgatcaaagatctttttccaaaagccttaataccaccttcttggtcctaatccctaagaaaggaggtgctgaagacctgggggatttccggccaatcagcctgttaggtgtacaagcttttggctaaagtgctggtgaatagggtgaagaaggttttagaaaaggtggtttatgtggatcaaaatgccttagtgaggggcaaatagattttggatgcttcgcttatagctaatgaggtgattgacttctggcataaacgaaaagagagggctaatttgcaaattggacatcgaaaaagtctatgacaacatcaattggaattttctcatgaaggttttgcttaaaatgggctttgggtctcggtggatggagtggatttggtggtgcatctcaactgccaaattttctgtcctggtcaatggggtgcctataggcttcttctcgaacaccaaggggttgcggcaaggagatcctctttatccttatctctttgtcttgggtatggaagtgctaagcactttaataagaagggttgttggtgggggcttcttatcaggctacagacttcgggggagagggggagtggagatgattgtctcccactttctttttgttgacgatacaatcattttttgcgaagctaggaaagagcaactaaccactttaagctggattttggcttggtttgaggcgtcttctggtctaagaattaacctagttaagagcgttttaattccggttggtgaggttgaagagattgaggaaatggcagtggagctagagtgtagagtggggtctctgcccactgtttacttggggctgcctcttggagcccatcacaaagctatttttatgtgggatggggtggaagagagaatgaggagaagattagctcagtggaaaagataatatatatctaagggcgggcgtatcaccctcattaagagcacattggccagtatgcctatttaccatctgtccctctttcgaatgcctaagattgttgcaaaaaggcttgaaaaattacaaagagactttctttggggagggggaagcttgcagaggaaagtccacttaattaattgggaggtggtgtgcactcaaaaggagaagggtggtctaggcatatggaagattgatctcttgaacaaagccttgttgggtaaatggatttggagatttgcctttgaaaaggacaatctttggaagagggtgattggggtgaaatatggtcaaaagggctttgggtggaggactaaggaagctcacgggacgtttggagtgggggtttggaaggagattatgaaggaagcaaattggtgctgggatagcataaagtttaaggtggggaaggggactagaattaaattctggattgatcagtggtgtggcaatgcggcgttgtcccaaaatttcccccagttatttgccttagcggtccataggaatgcaacggtcaatgaagtgtgggactcaagccttggtcaaggaggttggaatctcatattttctagagattttaatgattagagacttgattagagacttgcttaatatgctgagggacgtcaagatatcttcagaggaggactcagtgttctcgaaaggagggggtcatggcatttttgggcttaaggatgcttataatctgttggttgtccccaatgcctgcgccttcccgaataaatgcatatgggtagataaggtcccaaccaaagttgttttttttgcttgggaagccacgtgggggaaaattctcactttggataggcttaaaaaacgggggtggcagctccttaatcactgttttttgtgtggttgtgaagaggaaaatgttaatcacattcttttacactgtatagtggtaagggtcctctgggagatcgtccttgccctttttggggttcagtgggtgttcccagagtcagttaaagaggtgttatttagttggagggacccttttgtggggaaaaaaaggaaaaagatctggaattccatcctgttgtgtattttctggatggtatggaaggaaaggaatatattagcttttaggggggttctttagctatacagaaactcaaaaattcttttgtatgtaagttgtggagttgggctagggtgtacattggagaggagtcctcttcgctcttaggctttttggagtggctagcggagacttaagggttggtgaggttgcttgttttttgcgttcttgttttaggctactatgtatactccttgtatgctttgtggctttttgccccttaatatatttgtgcttatctaataaaaaaagaaagtaagagctcaagagccctaccctaccttttgtgaggaatgacacttctccatccaacttcaatggaaagattttactaagaatttaaaggagcaccactgcacaacatatcttagcaaaacttgattcttctcccttgcctaccatagatcttatcttggccataaaaatttgctttctataaagcaaatctttaactccattttccaagtaagatttcattgaaaggggacaacactttaatacctagatgccccttcttctttagtagtgatttaatgttattaaagtcacgccatcacttgggtcacccatctctgcaatgtttgcttagtttggattcaaaatttaataaatgcacttctattgatcaattccattatgagccttgaaaatttgaaaaaaaataaatccttatatttttgtcatggtaatagaagtactacttttgatattattcatattgatgtttggagacattctcctaagctccacctagatattgttattttgtgacttttgtgtatgactccctcgagtcatctaggcaccttccaaaaacaagaaagtaatgtatatgatgtcttcaaaatatttcacaaaatgatcgctacttaattctatgcaaaaattgaagttgttcaatccaatcattatggtgaaaatattcatcaaggtttaggttcttatttttcaagtcatggtataattcatgaaaaatcttgtgcagaaactcctcaacaaaatggaatgtccatgaggaaatatcatcgtcttcttgagattatgtaatctttaacgatgaatgttcttgctcatttttgggttaataatcttttgtatgttgtttttccaatacatcaaattccatgtcatattttacaattttaggctcttgtttctcgttatctccaaatcgcccttatctactttgtaccttaagatgtttgggtatgtatcttatgtgcatatttctcattctcatcaccacaaactcgtacataaaagctttaaaatgtgtgcgcttacgctgcttttctacacaaaaaggatattgtcatacttttagtagatgagcattcacctccatagatgttacctcttctaagcatgtttctttttaactctactcaaaggactcctcttcatggggagagctatgttaaagaggaatctttaactccatcttttactcttcccattcttattgttacaaatggtaatgcttatcctactagagaaacacctgttaaaagttatgatattgatataaatgatacaaaattactagtgttctcaaggagaaagaaaggatacgatatatccttcttcaagtaataatcatagttcttctctttcatctatggtttttgatattgatgttaatcttcctattgttttttggaaagatattcattcatgtacttaataccttgtttataactttgtgtcatatacttcattatctcctagctatcatttgttcttatcttctatatcctctatttcaattcctcaatgtgtctcatggagcccttttacaattttgggctcttatgtctctttatgtccaaatcaccatttatttcctttatactttaaagtgtctgggtgtgtattttatggtaacattccttgttttaatcactaaaaagtctagcttaaaggtttaaaatgtgtatgcttaggctacttttctacacaaaaaagatatcattgttttcttccttttagtagacgagcattcacctccatggatgttaccttttgtgagcatgttccattttttatctactcaaatgactcctcgtcgaggggagagctatagtgaaggggagtctttaactccatctttccctgttcccattcttattgtttcagatggtaatggttatcctattaaagatacacttgttaaaagtggtgatattgacacaaatgaaagagaattaaaagtgtattcaaggcaaaagaaaggacctagtaatgtcgtatctcaagagccttgcccttcttcaggtaataattttggtcctccttcgtctaaagtgtttgatattgatgttgatcttcctattgttcgttaggaagacattcattcaagtactcaataccctattttataactttgtgccatgtacttcattatttccaacatatctttcagtcttgtttgtttgtcttctgtttcatttcctcaaaagtgtcataaagcccctttacaatttcgggctcctttgtctcttcatgtccggatgccatttatctccttatctcttgaagtgtttgggtgtgtatgttatgttcatatttctaattctaatcaccacaaactcatgcataaagctttgaaatgtgtgttttggctattcttctacgaaaaaatggattttgttgctatcatccttttattagacgagcattcaccaccttgagtgttaccttttgtgagtgtttttctttttttctttgcttaagtgactcctctcaaggaagagctatagtggcaaggaatctttaatttcatctttccatgtttctatttgtattgttttagctagcaatgcttatcgtactagagttatacttttcaaaagtaatgatattgataggaatgatagagaattaccagtgtattcaaggtgaaaggaaggatctaattatgtcacaccttaagagccttatccttctttagctaaaaatcattgtattctttgtctaaagttttgatgccgatgttgatcttcctattgttatttggaaggacattcatttatgtacttaataccatatttagaactttttgccatatttcattatctcctagatattgttcgttcttgttttttatgtcttctatttcagctcttgggagagtctcataaaaccctttcacaattttaggctttcgtgttttctgatgtcaagatcatcatttatttccttttatcaagtgtttaggtgtctccattttgttcatattccttgttctaatcgccacaaacttgcacataaagcttcaaaatgtgtgttaggctattcttttattaaaaaaaaaaacaacttccctctccccctccccacacacacgcacacacacacacacgcaaacctgatgtttgtgttatgtgctcaaatgactcattttcaagggcagatctatagtgaaaaagaatctttaactcttttttgtatttccattcctattgtttcaactgatagtgtttatcctatggatacacttgtagggaatccagattacttcattctctggccttgtgaagagtagaaaagaaattatagaagatcttgtacaccctaagtcttctgcttgatgacttttccttaaatcttggcacaaagatgtggagatctcatgaatgtggaggttatggttttctctctctagaatgaatgggagaaaaaggaatggaagaaaatggagccctaaaccttaaaggggtatttataggcttcccatagtcttaagtgacttgagcttaggtcacttaatatagccttagaaagaccctaattgattaattagtccaaatggactccaatcaatcaattagcttagtccaaagagattgtttactaacacctgtacaactttgcgtatttattggaatgcctttatgtatataagtgaacaaagaaccaatccaaccctaaaaaatcagccataaaggaatatgagctcaagcaagaaccactggaacctataagacaatattggctcctttaaaatccaattttgaaattgattcaacatcccattatagagaactaactgaattctagtaccatgtaattacaatgagacataagtgcttgtatctattatagacctttctatgtgatcaactgacatttcctaacttgcaaagagcatatgtcaaaattcacttaaggaactattatgaccatagtttacttgaacgtacttcctgaggatcactcaaggggacagattatctcaaactccatgagatatcatggtgtttttattaaaaatacctatgctatcgacttccatcaacaatgactcgatccataaggaatatgtgaccacttgagtgtctcacctgtaggtcaaagacactactaacattagcataaactcaaaattctcttaaggttgaaagaccatatagtattacagtttgatgaagttatgaccacccaataaccttacatcataattcaccgttggtcctatttaatatgtaaccgtacacattagcacactcaccataggaaactcatctcgatgacctagaccagtcatccctccaattagaaggtgatgcactacaacttcaaatggattccctaagcccatgaactgactatgaacaaattatctatttgtaaggaacttatgacttagattttttgtgcaattcctaatgcatccaagttatgcacaatgcaaaagatgttaagccaaatgcttagtagtgtaatgcatggaatatgatagataaaagtgaaactggaatcatattaaataaataataaatccaaaattttcacatcatgttatatgcttttaagggctttgtcttaacaataactgttaagtgtgatgatattgatgcaaatcatagagattgtttgcatattcaaggcaaaagaaatgacctaatggtgtcacatctcaatggcatcgtcctttttaaaataataatcatatttttttctctttcttataaggtttttaatattgatgttgatcttcctatgatgcttttgaaagaagttcatttggtgtctatcggtgcctgagtgttagacgtctcttagtgctcaacaaggctcttttttacaaatagagttagtattttgttgatgaaaggggggctcattagaagcaagttataggtgggaagtatgaagaagaagaaggggaatgacgctcttgttaagtgagagatggatatggagttagtgttttgctgatgaaaggaggaccctttggaagcaagttataagtgggaagtatgaataagaaggggggtgacactttcgttaagtgagagatgggtatgaagttggtgttttcctaatgaaaagggggctttttggaagcaagttataagtgagaaatatggagaggaagaaaggggatagtgttctcgtgaagtgagagatgagtatgaagttgggttatggaaagtcattaggaaggattgagatcttttaagcagtagaatttcgtttttagtgagtaatgggtggaagatgaggttttggaaagacaaatgatatggagatgaaccattgtgtgctaactttgttactttatttgccatgattgttttagaaaagcgtgggtggttaatgtttggaatccatcaattgaagggggtggttaaactccttgcttctctaggcctttcaactattgagaggtggaaaatgtggagtggttccttttaagattacaagggataaggaagatagggtgattgagacaaagtaaaagagcggtaggtttttcaatcaaagccctctattttgttttagagtcgagaagtccagtccctttctcggtggactatgggcattatttagaactccttagtactaccaaaggggggtttctttgcttgggatgatatgtgaggaaaggttttaactttggtttaggttcaaaggagaggttagtctatagcaaacaaatgtttcctttgtcaaaacaaggaagaatccattgaccacatcattgctcattgtacaaagacaagggtgctatggcaattgtcgtttacccttttaggtgtgttgtgactcatgagtgctttcttttttttgttagagagaccctcttaggttgtcgtaactctttcatgggtaaaaaatgtgaaaaaggtgtggagaacagttcccttatgtgttttttggacaagtgggaaggaaataaactcaagagtgattgaaaacgaggagttttccaaccaaaggctaaaacctttttttttttttgtaatccttgagctttgactaagacggttattggcgatgcttccttgtctttaatcaactttgttgattgtttggggtcttatcaagggctggtgttgttttttgtagcccctctattcttttggttgagcctttaggcgaccattgtatacttcttgtgtaccttgggaggctaggctttgttggtgtttccttttatatacatgcacttttgttttacctatatatatatataaaagttcaaaatatcttgtatactaggcatcaaatcactaaaatactgcaccactaattgcttttcactctgtaatagaatcctatgctttattaattgacaaaatttttcaatgtagtattcaacactttggcttctttgccttaaaattatgcaaatattagtataattttttaacataattaaaggcaaaaatattttttttttgacataattaatggttaaaaaatttattatttttttattgtcatcttttccctctccacaatttcaggctttcttttacattcttgtgatgtgtaattgctcccaccatgccgacattcttcctttctattgaatggctgcagatttgaggaccttatttttgggtatttcatgctgctaaagtatgtgctctatagtattaagccaattgacaaaatcttgggccttgagactctcataaaattcaagaaacttgactttaaaattagcttcacaaagtcaatttgtctattcattggatgtttggttttacggaagatgactgggtttctgaaagtagccctatattggagacatcatttgtttttcagaaattaacggcaagaagtgtcattgatcagcttgttgatagtgtgttgagccaattgctaggtccacattgcaacttatctttgcaagagcttgactttttcttgagattgttgggataagggtttatgtgtagtaagcacttaatgatgtctacctctcaattgttgttgtggaggcaagtttgagctgacaaaagcttcaacctaagctttgatttcaagcctaatgctccaaggttagatgatcaatcaccgtcgcaataaaaactcaaacaagaaagtaggagaatgattgagaagaaagagaacaataaggcaaattgttgttgctaaaatgaaaatctgtatttcgaaagtaaatcatattctccacatactggttataaaccatttataaacctcttaattaatcctaaacttaatagggaaattgattgcttaaagaaaaagaagaaaaaaaaaagagagaaataggaatttttctaaactgtaacatgtctaaaagtactaaaaactagaacagaaatagaaatcctaagcaatgggaaatcgtctagcaatacgaaacttaatacaaattggaatcttaatgttatacaaattattattgtaggttgcatccatagaaaatggttgaggatatttgtaaagatgaatgaagaaatggttttaggagataagggtggtcttgggtgagtgtacaattagaaaaggttaggatacatttcagggtcctatttccttttgtgcaggatggacaaaggattaggttctgtcttaatgggtggtgagagggagtttgagtccaaggatttgctttccatctctttatgtgttagttggtaacaagaaagtgtgcataacttacttattggggtaagagggggcatggtcattggaatttgaatttcattagaaattttatgattggaattagatgagatagggagtttttctggcttgtatttacctgaaatatgttagcatggagaagtgcgacaaacctgactgcaagccatcaaagtatcttctttatttcgtggtgctattgccttgttctctggaggtttttttcccactacgtgggttcttgtgtgtcattgaaggttatttttttgtgtgggtggggttgggtggtctgggaagctgtttggttgaggcatagcggctgtatactggatattagtgggggaatcaactggttagtaataacttctcttctttggttccttgagaaaatggtcctatcctgaaaaaggcggtactaaaaggttgtcagactccttcaattaaagacgcccaaagagaagtagagaagcaaagtctgtcccatgtcttggctgttgatgcttctttgccctaaaaaattatttcaaccagatcgaccaagcagtggctaacatagcacagtgccacagctatgcttatgcaagaggaagtcttgtcacctacctcaccctttgaccttctgaagctctgtaaatcaattgttttaagtgttgactgcttgataaaatatttctatctaggcatgctcatgctccttgttgtccttttctattttctttcttctatcacatgtcttcttacactacattttatggcgacatcaattttcattagcgaacctccttgtcatccaatctctgtttaaatatatgtgaatctgagttttgtggttgcaaaatccattaataaaatggtctttcatctgtttattctagaaaatatattttataaattatgaaattaacttttattgtaatattggaatttattgcagtggctagagggaagaggcgaaaaagtgactctggc

SEQ ID NO: 11497 - DNA, 2695 bp, Vitis vinifera
  Intron number 14 from transcript GSVIVT01014500001 (locus GSVIVG01014500001) derived from phytozome v7.0 (chr-ID chr 19; pos 4541018 to 4543712 reverse strand)
gtcagtagagattgctagggagaagctaacccagcttgggaagaactgaaatgggggatgaaccgaatagaactagcagcagtaaccctttctcctagccaaggtttccaggatattgaagcttataaatgactattacatctgaaaagaaaatagatacaaacaccaactgaaaagttttgtaacttactagctaccaagagtagctctcatttcacatgactcttaaggactgaccagcttgcataatttgttgaatggtttattgagttcaattcagacctatgtagaaaccccatatcatccaaattaggagaagaatggcctatgatccaattattgattctcagatcaatgaggtcaagttcactgttcacatgcccaggagtaataccacctcagctgggaacttcctgggatagaccctagagtggtggaactcccaggatctatcctagtatcctcaggatcaatcctaggacatggaaaaaggaacattcctaatttcattagggctctgtacagggtaatgaatggagatatacattatatagttgatcaattactgtctctaatcttgcatatcatagaagcatcaaaagtcaattcaaatctaaaacttggaggaacctttcaaaccacaccctacatttattatcagacttagccttcctttccattcctctgccaaccaccacatttttagaaataaacaattagtattccataaagtcaacgatattctgggttggtttttctataatatcaactgggccaatggatctttttcaaactgaccaaaacaaaagcaagttttcaactcaaattaacaagtcatggtgtctcttcatttgctaataggccagtgttaagacattcaaaaccaaacattacatgccaaagatctgaaaattgaccggaaaagtttgcttcatcatttgttgatggttacaaacaaccaaactcacctaattcaagacctgactggttattttaatggttactaatgtgctgactggtatttagattaaggaaaaaaataaatggactatataatatgatactgttcttggtgcctcattttcttaatacatcaaagcataaacttctgcaagtgctccctgttacaaaaagggtcaactggaaaattattattatcatccctttgggaaattcaatgacaagattttgagaaacaaatttctaaattgcctgttcaacaaaatacaacatcatatgatgccagcatgaccaaaagaaaagagacaataacccaatcaagtgattgggattgtttatttccattctagaggttcaacacctctaaaaatgaaccaaggacatattggtaatgatttttctgttattcaacatagtacaatttttaaattttccagggaagacacctgatggcaattgcctttaggtcataggtcaaccacattatggaagatattattatgcacaaagcacaaatttgactttgggttattgaggagaaaatttggcacattttcatatgtatgggatttcatataggccctaccacaaaacaattaaatcactagtggacataccacctaggtttggaaagctgagcctgcctacaaactcaaaccaattccttaaactggttttgtgggatctggagtagattggttgacatttgtaaccacctcctgctcatgtgtacatattgaaccaattccttaatagttgacctattgagctgaatcttgggacctgggtaaattcgatgacatcggtaattatctgttttttcaaattagatattcttcattttgagctcaagaacagcacacatttaagaaaaatcccgagagctaatcccatgtgtctggtcctaaacatacccagagccacctttccagaaaaaataatcattttggacaagaatgagtcattattgtaggccaatcccatgtttctggttctaaacaattcatccagtttgttggtatgtagacattccttgccagctctttattggtgtgacagaaaaatggatctcaattaaagttcaagaagagcatgaccttagttccacagccgtacctttcagcctggcctgctgactcttgcaatagtgccagccactcatccccaagatgccataaacaacatgattaatggatcttcttggcaattttctcattgctaaaatctttatatccataaatcaatgtaaacccagaatgactcacttttatggcaatctgcagaagactttatatgaggtaaagcagaatgagtgaatggcattcctttacaaccacgccacttttatacgtggagactcacggcgttgaatttgaggtcctttacccaccacttccaaattcaacggggttgttttcagagaaatctgctaatgacttgtgaactgaaatttatggggtgttcatcctttttttttttcctctagctattcctgaatggaggcttgaataaaagaaatgcactagcccaagaaggttgaggacatcaatgggaggcttcaccattcttttcttctcctccactttactgtccatcttcataacttctgctgcagtagacaccataactcaagctcaatctatagatgatggggagaccattgtttcagctggtggggattttgaactgggttttttcagccctggcagttctgagaatcggtacctgggaatat

SEQ ID NO: 11498 - DNA, 4623 bp, Vitis vinifera
  Intron number 4 from transcript GSVIVT01037355001 (locus G SVIVG01037355001) derived from phytozome v7.0 (chr-ID chr6 ; pos 15271809 to 15276431)
tttgggagaaactaaaggtggttgcagagaggaaggtgtgtttttcattatatttagtgtactttgaaccacttacaacattcaattctatggtcatgattaagatagcaaatacacattattgcataagggctttcttttgataggctatgtttatgctatgcctcatttttgttgttctttaaaacttttatgatgtgcttggatgtgccattaagcaaaaatcactgaagtatgttgtacattaacatacaacaactcacattgttattcatgtagcattattttgaatttccatggcatactatctttcaatttttctttccctattgaatttcttgatcactccattatttgtgtaggctccatctttggatggatttttcgacttgaaatatatgaaaaagacattgaattgcttcattttattggataatccactgtgcttattctctacttgaatttctatatatattctaagaatatcaaggttgggtgggatgcatgtaccttagtttgtgtttaagcttcaaacatttcagtgttaccctcgtatcgtaaagattaggttatatatggccattaggtttctaaggggggttaaggtgcctaattattgtacttgacaagagcatctcccttatcttctgagatatcaaggttttggggaagaatgaaattttttaatattaccttataatgtaaattgcctgtcatagtgaaactcaaatttctctaactcactgttgatgaaatccaatatcctatctagtaatgattgtttgatgctatattttcttgtgtgttctagatggaatttgggaagtacaagggtcttatcaaaattggctatgctttatgtagtaatcattaagctctggatatcaccatctgtaaatttgtttcttgtatgatttaaataccaccgtgatccattccctatttgaaatgctttgaccttagtcttcaaatgtttgtttctttctagagacaaactcaaatcccgtggaaaaatggaactctatgatcaaagagttacatttcagttctcctatttcaactcccttcttgagtgcaacctacatgaaaaataaatcaataaaataaaaaacaaacctgtgcatatgctgctcttgaccgaaaaagagaatgggaaactatttttttcattgatatattggctgagaaatacagaaaaatgccatattatgttataagtcttaagttcatgctatctgttactttactgctgggaagagaatctcctcccatgtatgtgtgcatgcacgtgttgaaaaatgttaagttcatgccatattatgtcataagtcatgagttcatgtgttggactgaaaagtgcagaaaattgcaatattatgtcataaatcttaagttcatgctacctatcactttactgctgggaatataaccccctctgtgtgtgtgcacatgtgtctgagtgtttctgtgcttgtgtgtttctaatggagaaatcaaacatactacattccttttttttcctttcaaaattttaatgtgatgtgagtttgaaagatgatgtattttgaagtcaagtccaagaaaaattcatatgacaggaaagggattggtctcccactttttgtgttttggcagttcaagtacattctaacttatagtgcttatacttataaaattggtttatgatttttcttttttctcttttttttttcttttctctctctctctctttctctctctctctttgcattaaacatgtctttaacctttagtcacactgaatcattgttgtcatgtgcttttatttcatttggtacaagatatatgatatgttctgcatataaaactttatgcactgtcgatgtgcaaattaattgtatcttttggaaaacatacaaaacatttgatgggtgatacatcttcaaaattgacagttgttgcttattcataataacaatcaatctttgacttcttttatttctaaagatgtatttgaaatgtactcttttattatgtttgtttgcaaggtaattcaacattaataaaaagcatttaaagactatttcactatgtattgcttggaatccgatgccatttatatacattctttacattataagaaacccaatcacaatagtttcttttaacaagaaaaaggcacattgcatgaaaggcgagattttattaactttgaattttgaaacttcattggtttactagcacatcctgatataattgataaagtgtataatacttgtgcgtagttgaacttgtgaaactccttttcttttttccttttttctcttctagtttttcaatgtggacaattggaaactcataacctttttttaatagtacttctagactttgagcctgggagctaaaggcttaaccgaacagaactatactattggggcacacctcaataaattatcatactttggaagtatatttgttggttgtatgacgtcctttgtgtccttgtggactttggtgcgctttttacgaagtgctttttactaatacatatattttgttataaaaaaaaatgagagtatgtgttttataaatgattcctgcttttcacaacccttactcatgaatatgattaattagaaactgtaattttgaatctcctttgtcatgttaatgaatgcttgttctttatttgagtttccaagtattgatatggttgcatatatttttctgtttatttcaattcatattaaaaatttatggtgttgctcagggtcaatgatacatagaaaatgagaaattgctactttttttggtagatcatttgacaagtatgcatatccctacaataaaaattgattaatgaaacttcttaagtttcattcacatttgcttgcactaattatccatgcggtttctgtatgctatttatttctattgtgcattttgtttgcatttaaataagtcttttttaatgatcccttacattcttcatctattttccacgtttctgtacaattttggacagttttcacttttcataatgcctattatctttttcatgtttattttaacaaatcttctacaaaattaattcttgaactgtgggtccgttcctcacattttaataagtgctaaaaatatcatgttgtagaatgggaatcataaaacatgaacatgcctaataattttgatgcctgcttgaacaatgaattctacctctccacaaacaaagtccacttgaacagttgaacctttggctctagacttaagcatttcatataatttttatttaatctttatcaaagtcaaacttacaagcgataatgtcagtgtcatattattctatgtataacctgcacaattttttttagctattgcttggaatttcaggttgagttcttccatctattatatttcgttgactttactagggaatgaaagatctttttgttgaagagcaatattatgctgtatggttgttactttaggattacagagataggtggttttaccacaaattgctttttccatggggatgaagggtgaaatttgaagagcaaagaaattgatttggctgctcggaaattcctttttgtgaagagatttcactatttttgttgttgggtattgattatttttatcatcagaggattgattcagtaaagcaaacaaaggtgtagttataaaaatattttttgataggtaggtgtcattataaaaaattatgataaaactacacatcaacatgtttattagttgatattgtactacatttgttctttattaatagaagtttgtagtattaatactactttggcctatcaaaaatataaattaatacttctttgcattattatttatattctaaaaatcatgtgttgtattgttttttttcctacatcctattaaatgctccatcttctaaaagaggcttgttccttttttggtatttctcttctctatgtttcactttttacttgaaagaagtttctgatttttctatagaatttatatggacttttatgctttagagtcagttcctctttcttccctccctttttcctttgatggcatccacttcttagggtagagcattgattagaatataatctacaatgtgaaccatctattctcattaagctgtgactacttgcatgcagatcattatgtacgcgacttatagggtctaggccattgcatgacttcctttcccatattaaacctttccattaatgtttcttttaccaatgagttagtgggtacatggattttttcaattcagtatgttccattcctaactggcctgactatgatcaccttaccgcaatctcaaatgaaaaagtcctatcactttattctgaagaatgaacatggcatggatctcaaatgatgtttcattgtagtcattttttgaattgaggaatcgtttgcatatttggaaaatgaagggaataatggtctacattttttgttggaatttgtgatttgggttaaaatggttgttaaaaattcctgaaattacttctgtttgagagtacaacaaaataaaaaataacacataaaaataaaacaagggaaaactaactatcggtgcttgtatctattataggtggggccggtggaggcggagagattctgcaaggc

SEQ ID NO: 11499 - DNA, 7122 bp, Vitis vinifera
  Intron number 1 from transcript GSVIVT01008532001 (locus G SVIVG01008532001) derived from phytozome v7.0 (chr-ID chr1 7; pos 1048932 to 1056053)
gcaaagagataataaaaattaaaaatagatttaaagttaataaattatttttatgtattttttaaaactcgtttcacttatttttcttttttttaaattaaataaattttaatatatataattttataattattttttgattaaatttgattttttctatttttcatggtaaatcaaaattttaaaaaaatattttttctaaattttttttcttattattttttttcgcaaaacttatatatgaacatttttcaattaaaataatttgaattcattcaaaatattgaagtaataatcttaattaaaaaaatctccacataattcatatttctttccaaatttgaaacaggaacatggataatttcaggttccaatccataattttatgatttcttttattctataataccatcataaaatacttctcatttactttaactttaagatatctaatttaatatatttaatttattttaattattcttcattaataatttttggtagaatatggagtagaaaaatatttattaaaaagaaaaactactgtttggcccaaaccagcttcaagtgtcacatctcatatgaccttttcaaatatttcactatttcgtttctaattcaaggtttctcttgacaatcttttcatatgcttgtcgaagataaattcattgaaataaaataaaatgcacaataagtcatatcactcactacttcttcaacattttgctatttcttactttcattttctaaataattttattaaaatttgtttttatgattttcggtattatatataagctgatttatttcatcatatactttgaataatccattctttattacattattcataattttaatcatattatttatatttgctcacattcttaatttacatgttacatgcgttcaaacaagattaggtaaaagcttttaacatagcaatgaaagtgatattcattattgatacatgattttaatgtgaaaaggtttaatcaaccaaatcaagtttagcttgatcaatccaaattcaaatcaattttaaaaattgagattgagtaactcgagttataggttgggttgtgttgagttttagttgattgtttcttaatttaggttaagttcggattagtcatcaacctagcaactcattcaaatggtagccttagatttaaataccatatttgacaagaataaaattttaaattagtagcaaaagatgattaataaatctcatttaataaatagattaagtcgaattagggtaagatacttttaaataaataagcataatttcattaatttttgtgttagcttaatgcaattatgactctagcaattcatttaagaatattgcatgacaaagtaaattaaattttatcaaatacttcataaataaataaaaccctcaattttgatattatccactaagaaattaccataacacaaatcaaaatgggctatttcagaatatgtttttaagtattcatttttatatatggtaatttttagtcattaataacatttgatctcaattattagtggcttataaaaattgtttgtgatttgataacttacatactgcattgataagaaataaatatttggttataagggatggaataattcttaaattgtgaatctaatcgttctcatgttttttcttgaaaagtaatttattttttatataaatgtttttatcatttcaagtatttatatgtagagtttaaaagagatagttatttttacaagaaaataatgagggtctttttgtcaaaacgaggccaataatgggtgagaggttaaatttaaaattttgggttttcaaagacccttttaattaaataaccattcatgaaaatcaaaatagagaacacacttaaagaaattaaattataactaacttttatccaaaaatagtaaaaattaatcccgttaaaagaaatatcttaataaaaattaaagacttgtttgacacttaagtattttcttttaataaaaatttgagtactaaaaaaattaaaagcactttttaaaattattagcagactctaaatctaaaatatattctttcaaatttaatagaaatgcacctatagttttaattttaatttttatttcattattttttttcttttattttttgtaatattgttgtgagaattatttcctttattataactttaatatatgccatttcaattcaatttccttcattaataatattgtatctaataaatttttttttgaaagttagtaaagaatagaaaatgacaaataaaaaaaaaaaaaaaaaaagagataaagataaatgtatagtggggcaatggatgtaaggagttttggatggtataatggacggtgcaatagagttcggcccaaaccgacctaacgacgatatctaatacaacattttcaaatctttcataacctaattttacattgacgtgtcaatatcttgcactgtctcatttccaaattgagatgtcatcgtgcttgtcttcttcccaagcaccccacccccaaaattcttttttttttttataaaaaaaaaaggcctccatattgcaaaaaaaaaattggcatgtcataaacgtccaaaatataaatggcatagatataatcatataaggtgtagaagaaatccagtgaaaacaactaattaatgaaagaaatcgacatcttttgaaaaaagttaaaaaaaatcgggacatgtgtccatggattccaacactaaattttggaagatatatttatcaatagatttttttattttcttttcatattttttttttttttacatttttgcctgggatatgatgacctaagtatcatatattttatatttatacctaaattatatatatatatagagagagagagagagaaataaaattttaataaatttattaattttgattattattttcttcatattccatttattttattattgaaaacacaaaaatcatgaattatatatatatatatatatatatatatatatattttaaacacgaaaaataattacacatatattttaattgtcatacattaaattatctatttatccatgattttttagaaaagtagttagtttttttttaatttatattatattttgtatttttttagttttcatatttattacattattttaattttcattttttttaataaaaaaacaaaattcacaaacaataatttaaatttagttttcatatttagatattgattctaaaaatattttcttcttaatcttcaatttttttctttaaattaattcaattaattataactaataaaattaatacactttgatattgttttttatttataagataaataacatttatctaatatatttttatttcgtttgctttgtaattttaaaaaattattatcaattttatgtgaaaaatgtgtttataaaaaacaaatttgttattaatttattaaataattatttacaaaagaaataattttgtttttattttaatttttaaattaaatttattatataaattctaaatttaaaaatattaatatttaatttcaaatttaactgtaaaaggaataaaatatagaaaaataaattaatttattattcaataaagtaattttcaataaaattttcagcattaagagatataatttttttaagtattaatcaatttaaaaggaaataataattatctgtatattaaaatattttatttagtaattataaatgataaacaactaaagtaatttgaaaaaataataaaatatttctttaaaaataatttaatatacttaaaattagaaatgattaactattttttattaagaaaaaattaaggaaatattttgtaatataaattttttttaatctgtttttaatttttaatgttataggtttcaagaaaatcgatcaaataaaaaagaataaataaaaattaagaaaccattttttcaaaaactaaatatccaaataaaagtcttcaaattcaaatatacatcataaatataaacactaagggaatccttaattatcaaatattttaatattaaagaatctaagtcacctattattatgattattagaaaaccaataatattgtttatgtaaatactaaaaaaccaacaaatatcccaacaattaataaaatatcaaccatcataaaaaaaatcaattattatcatgaatgcaaaaaaccaataaacttcttcatatgaaccatcaacaaagaaataataaaaaaaaatcaatatctaaatattaaacttaatttatatttttataaatattattgttgataaatatctcaataattataattttttatatattaaatttagtaaataaaattaattagttttatatacatatacatttataataattatattatttaaaaatatatcattaattaaattctttttttgggagaaaatcgtctcctcaaaagacgacttctcccaactttttttttttttttagaaaatcgtctattcaagagatgatttcttcccatttttttttcttttagaaatcgtctcttcaagagatgattttgtgtaaattttttaaaaaatgaattttagaaattgtatcttctaaagacgattttttgatatataaattgtttttcaaatagataattttaaaaggaaataacattatctctcctacttgacaaaaattatggtagatttggaattaattttttcacaacgattgtttaggaattatttttttaaactaccgtactcttatcaaaaatctctcttttttttttctcctttttattttgggtttttagccttattttcaagatcaccttctccttgtactgcttttccctaggaccctagcccatagaattgagtcatgtggaggagatgaaaatagaggccaaaaaagggaggaaatgagagatgggtaagtgaccttaagaggatttagaaagccacccatgtggtgaaagagattcggaaacatttattaaaagtatgaggtggggttgagatataaatggaatatcattatttccatttttttggttgaataaagatgactaagaaaaaaaagaaacagaaaaaaaacatgctttaaagcttttactagaggtgtcaagttggcatcttttaaaattggacccaaagttgggtctaattgaagaaaaaagtacaaaaacaaataagaaattaaaaaaaaatgaaaatagaagatgttttgagcacttgttgtatggcctaattttgaaaattgaggaatttttactttgttgattttatagtcttgtttatgagttatgactaagttgatagttggtaacaaatgagtttaatttgtttaatgtttatattttgtgcctttttttaaaagtcccaaagcatctatttcatgatttaaaaccttaaaacactttacattagacaaattaaagtcatattttatggcatttatcatcattgtaggtacaatttttcataagttgaactaagtatatgagggatcctttcataacacaaatttgtcgacctatgtttagaaaatttcagatcatcaatttcttgataatttataatataaatttaccttatttttgcaactcttagtagtgaccactagttgacttagaagtttgattggttatatcaccaaatcattcgaataggtcaatcaaccgagtttgctcatctcttaatgaagtcttgaagataatagactctctcttaatttagttgaaaaatgagaagaatggatattggttgaacaattataaatcttaagttatttttttttacattttctatcaagtgttttcgggaatcaaacataatgttagtattattttttttcatatttttcaatctctttaaaaaataacctccatcaaacttctttattatatttcatatcaaaacattttttacaaaataatataagggatatttttatttgtttgaaactatatttataattttaaaaatatgaaggttaatgcatgtttggaaatattttttgtttttttgttttaaaatagaaagtttcatataaaaatatatgaattcttatcttaaaaatgggtacttgaaaacatttcttaaaatttttaaaagataaggaattaatttttttttcacttctaaatatttttaaataatatttcctaaaatacaagcggttgatagagggttggtgggaggtttgagagttatttgatgaaaaaataatgaataaaaattgaaggataaaattatcaaaatgaaaaaacatatataattttaaaaatattaatttattattataaatataggtatttgataaaaggcacgtgggattggatggacttaagagtgtcaagggtaaggcttttggggcaacgtggtaatgttaagacttgtggagtaatggggtgacaaacctaaatctcacatctaactttctaaatctgaccggtccatttctaattgggtcatttgattaaaagtatcattaaaacccaaatttaaaattataatatttcaaggaaaaaaatcaacatttgctatcatctctaaaaacctaaaccaacaatgtgggacgctcatagtcatctcatagcaccgtttggatcataatgtaatagcacaagagtcatataacctagcatttactagatggacataaataagtagggcactatacattcttgcttgacaagcattaactgtaacaaacattgaactgtcatgattggtgtaataggttgaatcgtcagttttaaggctcatcaaagcatgacaatcgttataggccagtaatcattgacattaaaggcggtaacgcgcgatcaaaggcactattaagacacttaagaaaacgttacatttaggcaagaataaatagtcattcttgaccacaaaaaaagagatgctgtcacttttccaagaaatctatcttactcaagttttcactctctgacttaaacttcaaaatggcatgcctatacaattcatccgaacatttgttcaagtggaaatgttgtataagctttgaaggttagtcggactatccttatccactatacaccaacaaacaacacaaggaagaaaaaaggaaaaaattaaaaaaaaaaaaaaaaaaaaaaacct

SEQ ID NO: 11500 - DNA, 4497 bp, Vitis vinifera
  Intron number 4 from transcript GSVIVT01029323001 (locus G SVIVG01029323001) derived from phytozome v7.0 (chr-ID chr1 7; pos 14285370 to 14289866 reverse strand)
ctcaggtagttttactgctattgtgttatattttgagctgaagcttaactccattaaattcctaagattggtggacaacgcagcatggtcttcctggattaagtactttttacaacagtagaataactgtactcattctaaactaaacagtttagggtttagatggaggcacatattttatccgaccatagaggatttcctaaacattcaaatatatgatttctttctttttttttaatttattaaagattaggttttcaacctatgaattgttggatttaagggtatggaaacaaatgactaacccaaaagacacaaacaaagaacataattaataagaagaaaaacttatcgactgaggcatgacaaacactgtctttgaaatagatccaccctcctcgaagacaaactcggtgcactagggtactagtggtctacctccaggattcaacagccaaatctcaccttgggtgcactctgtaagcgagatgtgtacaactcgggttttgaaaaaattcttccagataaatgtataaaaatactctctgaaaaactcttttaaaaattctctgaaaaattgatattcatattttgagagtgaggggtgacttgcttttataggccactaacacagtcccaatgggactctacttgtaattaaaatacgactcaaagtggaaggggattttacttataaatgaaatgagactccactagcacaatcctaataggactcttcccaaaaatataagactaatagaataaaataaaataaaataattcccgataggattcttcccaaaaatataagactaatagaataaaataaaataaaaaattatttacactcttcctacaatcccccacagaatgtaaacgtgattttttttttttttttttgaggaaaaaaaatccaatattacatcagtactggtgcccaaaggctatgaaccagtcttaagacaaacaagtattgaatcacaaaacatggtgaaaataaatttctatgaaccaatgtttcttgatgtaactcaagggacttttacccacattggttttctcaactacactacgagttgtacaaatgggttggcacaaataggccttgtgccttacctggatattcatgagagctctatagaacctgcctaagttctcataggaagcagccccacttccactctcatataggtgaatccatcaagtatgttctgcatttaaacataccatccataaggaatatggtattcattaagagtaaacactcaaccttaatcaatgcagaatacgctctatctacaccatagggataaactctcatacaattagagttgatagagcacatcaagtcaacaagtgatttgttattactcatatgaacctacttcatgaaatttccattctaataggttgggttaccaccactcttgacttctataataggcataagcctcatccccctctatgtttcttccactagtttcttatttagtggtttggtcaaaggatcaaccaaattcaactctaacctcacaaattataaggatataacccttatttcaagcagctgccgcacaatattgtgccttaagcatatatacatgttcttcccattaaatattttactcttagccttagcaattgtagtttggctatcacaacgcatagacacagacaaagctggtctcgtccataaagggatatctgctaagaggtttctaagccactcagccttagaacttgtcttttctaaggcaataaactcagcctccatagtagaccaagtaatgcaagtttgcttggcagactttcaagaaactgcacttccaccaaggatgaaaacatatccactagtggatttcatttcatctgaatccgagatccaatttgtatcactaaatccttcaaggacacttagaaatccactaaagcacaaaacatagttaatggtgcctctcaaatacttaaggactctacaagcaacaattcaatggttctgattaggacttttggtgtactgactcaatctacctactgcataagcaatgtcaggtctggtatagttcattaagtacattaggctccctatgatatgagcatactctatttgggcaacactatgttctctatttttcttcaactctgagatgggatcataaggagttgacactggtttataatcaaagtgttcaaacttccttagaattttttcaacaaagtgctcttgagaaagtttaagcccattaggtgttctagttattttaattcctggaatcacctttgcctctcctaggtcattcatatcaaacttagaacctaggaatttcttggtctcacacacaacctgctagttccaaagatcagcatgtcatcaacataaaggtagacgactacacatgtgttatcctcagacttgttgtagatacacttgtcaacaacattaatggaatatccattagttacgaacacatgatcaaacttgttatgccactgtttgtgagctttttttaacccatatagtgatttaaccaacttacacacctttttctccttccctggaactacacaaccctcaggttgatccatataaatttcctcttccaaatccccattcaagaatgcagtcttgacatccatttgatgtatcaccaaattatgaatggaagttagagtgatcaatactctaattgatgctattatagttacaggggcaaaggtgtcaaagtaatctacatccttcctttgtttaaagcctttggcaactaaacgagctttatacttccttatggacccatcttgttttaactttcttttaaaaatccacctacaaccaatagtctttggaccaagaggtaaatctactaactctcatgtatacatgattgattcgatttcactgttaatggcctccttccagaatggtgcatcaagagaagttatagcttctttgtaggatctgggtcctcatctattaggaaggtgtagaaaccatctccaaggtttgtttctttcctatctcttttactccttctaggttcaaattcagaaggttcaatagacttgtctctacttgttttctgaacttgttgttcaccatttagtttcataggaaagatgttttcaaagaaacttgcattctttatttctattatagtattgacatctacaagactgttttctaacttagtaacaagaaacctatatgtcgcattattctcagcatagccaatgaacattgcattaaaggttttaggacctagttttcgttttttaggtctaggaagaagaactttagctaaacacccccacactttcaagtatgctatattaagtgcataacccttccacaactcataaggagttttaccatttttcttgtaaggtattctattttgaatatgacatgcggataggatagcttccccccacaagttcaagggtgctcctgaacttaccaacactacatcaaaggttttaagtcaatcaaaatgtgacccaagttcactacaactgcagagaaaaccctttcttgccatctcttaaagaatgtcctattaaagggatcaattttggaggtgttagaacgggtgtgaactagagaagcttccatttggatattggatttaagggtatgtaaacaaatgactagcccaaaatacacaaacaaagaacataattgataagaagaaaaacttattggctgaggtgtgacaaacattgtccttgaaatagatccaccctcctcgaagacgaactcgatgcattagggtaccagtggtctacctccaggatcaatagccaaatctcgctttgggtacactctataagtgagatgtgtacaactcgggttttgaaaaaattcctccagatagatttataaaaatactctcttaaaaattcttttcaaaattctctgaaaatttggtattcatatttagagagtgaggggtgacctgcttttataggtcactaacacagtcctaatgggactttacttgtaattagaatatgactcaaagtggaaggggattctactaataaatggaatgggactctactagcacaattctaataggactcttcccaaaaatataagactaacagaataaaataaaataaaataattatcaataggattcttcccaaaaatataagactaatagaataaaacaaaataaaaaattatttacactctttctacataaatcactagtaatatttctatttaagtgatgcattattgcatgtagtaaccatctatagaatttctttcgagttctcatatataatgattctgtaattttcttcaaaaaccttttaatctctctaagtttcaagtgacaattaacctggctagatttggattaatgaattttgatgattttggtatttctttactctatcaacctttgttgcactgacaatgtatataactactttctgttgcttgaaacatgaacagcgttggttccttttgaaacaatttgggctgagcca

SEQ ID NO: 11501 - DNA, 1486 bp, Vitis vinifera
  Intron number 1 from transcript GSVIVT01027900001 (locus G SVIVG01027900001) derived from phytozome v7.0 (chr-ID chr5 ; pos 9179196 to 9180681)
ccagcgctgaaggagatcctgctcaagttataccggtaagaatcctttgtctctgggaaatggcaacacaacatcagtgttttatttaacaggtgtgcaaagcatgcatgtaatttttcttttactggtttgctgatgaattttaagattgtcactgcaatttatgtaattctttatctacatatttttttgcttctgtccaaattgatctgcaactatgactactgtgtgtgacaatgttgaagcagttgtgttcatccagtgtggaccagtgtgagtcattataacataaatagcagtagagaaacagaagctcttatctactttctgacatgtgtcattcgaatattaaaggataggatgatattttctagatattaaatcaacagcaacagtaaaagaaagtgattaagttagcagaaagaaacaatagtaatttcatttgacgactctattccagaaaccaaacccaggaaagagattttcattttgatattttggatggcaagtgtggcagagtaaatagcctaaccaatccatcattctaaagaattgaaaatgtaggagctaggaatcaaacaggacataatgcaaggtacagaattgcacatatggatgagggagccatatgtaattttcacctttggtggggacctcttgagcactcatgctgtttggcagacaagaaaatgtgatttccaggtagatacccagtgaatagagttccaatgattgccctgtgggatgaagctgttctcttctttcactttggttggtagttacaacattttccaacaagtgggtaagggggatctgtcaattcttgtcttcaaaatctgaagtcaaagatcaccaacttgggtgggaaaatggcaaccttctagcacgttttatcttcagtttcagtcatccagaaatgagaatctgccatttcatagtgttggatagggtgcaaaacaaaaagtcacttttagtgccctgcatttttcaatgaaaaatgagtcattgtaatgctttgtgagagctatcaggtgcattgaacctttaaatcaaacatcaatcagtaattattaaccaacttacaaaagtttaatcttctttaaagtacatatcatcagttaatttgacaagctctcattaacctcctagtttaataactcaacgttagtagaatcaatctcatggatatttgccattgttcctgctgcaaatgtttcagtatgaattagttgttttgccacatataatttcattattaaaaaactaatcccctgtttggtttcctgagaagatgaaggaaaagaaaagaatttttggatcttcgtgggaatgaaaatgctattgtagtgtttttggggtttcatttatttctgagcatcttctcagcagccaaatggagcatggaagaagtttgattagtgcagaacaaaattaaaattacactaatgatcaagattacttctttcatggcagcactgagaagcct

SEQ ID NO: 11502 - DNA, 11252 bp, Vitis vinifera
  Intron number 3 from transcript GSVIVT01026498001 (locus G SVIVG01026498001) derived from phytozome v7.0 (chr-ID chr4 ; pos 22617481 to 22628732 reverse strand)
cgtactggtgtaagtcttttagcatttgcatcccatgccatcttttctaacttctcatattttcttctattgctattattagaaaataagagaagtacttggttaagacaactcctttatataaaacatggattgttttctggaaaatggacttttataagctatgttacatgggtttgagttcaggtattgggtgcaggtatgtgtctaggtgttggattctttgcattccaaaatcttaggacatgagaattttgctgaaagtatctcagctatgagaattcctcatatacatcatcaataaaaaataaattaacactaaaaatttccttatctcagctatgttacatgggtttattgtagttgaaaaatatatttattatatcttttctagtttaataagatgttatacattattttactttgatgttatcgttaattgtacataaagaatttatttattattgatcttttattttaatagaatgctgagaaaagtctttaagaaaatattataccaaattattagtaaatgttgattagtttaaaactttaaaaattatattaattttgtaataaagtttttctaatatactggatattgataaaatataatttctatttaatttcttatcatacgaaaattttgatctttttttatatatcaattattataatttatttttagattttttaagatgttaattttgatatttgtctttagattttatgctattaattattatatttatttttaaattttatatgatattgattattatatttacctttaaattttatttattataatttaaaaaaataacaaacagataaagcatttcttcagttacaagacttagaaattaattcatttaaattttttttttattacaatttatgaattgtattttgtacattatttgttataattaaaaaaaaatgataggaaagagataaataatggaatagttgtataggataaaatataaatatgattaaaaaaatttaaagaaagagataaagcaatcatgagctaaatagcctaatttgaagcaatataagagtatttgacattgatctcaacttgcacttgtgtcatatcatgtcgacaagggtatttgggctaaagttaatgtgtccgtatattacaatttataaacatatttaagaataaaaaagaaaggcaataaaagagaaaagacgagttcttgtcaaagatatatttacttttgattaatgtctaattgttttttttttctttttattatattgtatctaagtgctcatacccatcgctaaaatcctttttggttgagtctccatttcctaaatttgtaagtgtgaaggatagacacctaaacaatacccatactcaaaacattcacaccaaaaccatgaacatggctttgtatcattaaaacacccctcaaggaacgttagtgcttgaatgtgccttgcaactttgtacacctttttccttattgcttagaacatagatccttggcttatcataaaatgtttattggctcttagtgagcttcactctttggtattcccttccatctcactaaatactccattataagaggtacttcttgttgttgagtcataagatcaggcatgataggacattaccaccatggtaggtgccttctaagactctccttaacttggtttcttgtttccttgaccaaggcttcaacaaacttgtatggaaggcaaaatgaattttaagacattaagggagttcaaccttgtaggacactttacaaactttacccacaataagtagggcattcatatcttccgtgccaatcgtttatgtcttagggacttgaattcctaaggtagtaacttcacaagggctaactccctaacctaatcctttgtaggccaccttctactattgacccatttctttgttctctcaacaaccttatcaaggtaggggtgagctatggtaattatcaacttactcatgcaatcctttaacaaacttgtatgtcataacactcttaataaaactataagatcatcactttgatgtaaggagtggttattacctcatagctagcttgagtgcttttctactatctcacttctttatggttatatgaacattaggccatgtgtaacaacttggccatttattcttattgatggttatggttgcctcaatatagtttcaataggacattcactcttttttcttttccatccatccattcattcaagatgaaagcttatagaaaaatgaaggtttgacctatctaccttgaagagctttcccagaacttcctagtgaaacgagtgtatttttggctaatgataaattcaggccaatccaaactctttttttttcttttctgaaagatcatgaacaaacattttattaccatgaaataaatacaaagaaggatgaggaatccttgtctcaaacacaaccacttcataactctaatcaaaagtaagaaaaattgtttattttagatgttgatggaaatacacaaccaagagcggttagaactaaggattctgaacttaggggggtagaaaatcccttgcaaaagagatcaactaattagctcccaattttggtaacatatttgctatttggctagttgcttaaggaattttgccaaaggaacactccaactttagatcaatattaaaaagttggcgtaaccacccattaaaccttcacaagcctctcttctttttattaacccaagatgggactattgcaaaatcttcctctactagaagattgaataaactcttagttttatctagctttaagtcttttggcaagactaatgtctttgtcttgatggctatatctttctgtcatttataataatttatctcactaatgtttcgtgatgattcatgagcatttctccaattcctaactgttttgggttacctaaggagcaccctatcaaaatcaacttcatgtagcccattagatgaggcatccatgttgggagtatctcttcaaccaattgagcaaatatatgtaccattggagtgcatgatatacattgtgggtctttccctatcaaaaaaagaaaatatacatcgtgggtccgaatcctacaagtttaagcttttaggaaaattggtttgtctatatatatactaatttccattttagcaataatataatgctcaaatgggtttctggaaatgttgcattggctgattcccaaaaagaagaagagaaatagattaaatcttaaattatctccaaagtactccatttatcctccaaattacctcaattccaaattccagtacttcaccgggttacttacgaacaaaaatattacctctttcacttcgagtttgtaagagttgttataaaggtagctaaagaattgatcctccgccatgatagttgatttgtgtcccctcaactaaggtaatattgatgataaagtcctcaatcaaactctctcatggtcatgcaagtgtcaccagcggctccaacattcctctaaggacctttaccttatatttttggcacacattatgagtcttgtcataggtctcatttctcatttgaggctaatagtaagcatattcttttttctgataagaaacaatcatttcattgtgatgaaatattaggtacaaagaaggatgagcaatccttcaaaaagtacgtaattctctatacaaagagggataaaaaatgacaaatgaatgtatactagttcaagaagtcaaatatagctacaattcacaatggtataaaatctcctacaaaagaaactatatgtctagctccacgttttgctaatgcatctgagtagtaagcatattctagtagtatccttgggcaccgttgtcttggatttgggcttgtagagtctctatcttttggcgcattaggggttgtcatccacctaaaactactttgccttttccttactagttatgttgataaggctcatggcctagtgatcctttattggattaaccaactagcatagggtttactaccatggaaccaacctttgtcttatgggttaaggcattgaccgcctgataaactctcttgagtattgtactctcacaactcacttaggacttagcttcttctagtttgaaggagccattgatatgctatcattctttactgcaaaaggtagcttcaagaagtaatgattccacatgtattttgactcttgccatcccatttttgtaaaccctacaggggcacttcttgttgtttagcttgtggattccataggctagaggatgcctttcttcatgatatccataacaacttaggctttgattgagaagtgttttcaaaatcatttttgaaaaattgtttttgaaaattggtctatgatgtttgtaaaacaaaagtttgcttgggaacttgaaatattcttaacctggtttttgtttttaaaataattttctaaaattaaatttaatttgtagtatttttaatttttaattattcttcttgtttttttaattattttttaaaatagtcattagaaaaaaattgaaaacaactaaaatatattatcaaaatatgccttgttttatgtttttaagaattgaatgttgttttttgtcttttggttgctgaatattgttttatgtttttttgttgctaaacatgttttctattttttttgttcttaaaaacagaaaattatttttgaaaacaacttccaaacatacccttatatcttcttttttgtcatttaattttttttccatcttttatttattttccctacttggtttctgaagaatttctgaactcctttattgataataatcagtacacaccatacacatatatatacacaaatgactgaataagaaaaaaatcaaaaatcaatctagcttaattctctcctaaaattaggaaactaaatcataaggaaatatcctaaatgatctctccttttttatttctaaattaaagtcctaactttggcattatttcaacactccccctcaagctggagaatatatatcatataatcccagcttgcaagttaagtcttcgaagttaggcctaggtaaagctttggtgaggatgtctgcggtttggtgcttggtaggaacatagtttaatttgaccgtctcactagtcaccttctctgtgataaagtgcctgtcaatctcaacatgcttggtcctgtcatgatgcacggggttctttgctatgcttatagctgcctgattatcacacatcatcagaattggagatgaactcatttgtcccagttcactaagaaccctttttatccaaatcccttcacagattccctgtgcaagagctctgtactcagtttctgcactacttctggctacaactgattgcttcttactcctccaggtaacaagatttccccagacaaaagaacaatatccggaagtggaccgcctgtcaatgatgtttcctgcccaatccgcatctgagtatacttcagtgtcacggttctctgtctttctgaagaataggcctttccctggtgtcatttttaaatatctaagaatcctgtagactgcttccatgtgttcctcagtggggctgtgcatgaattgacttacagcactcactgcaaagccaatatctggccgagtgtgtgaaagataaatcaagcgcccgacaagccgctgatatctccccctgtctaccggtgtactttctttctcgataccaagtttcttctgactatccataggagtatcaattggtttgcatccaagcataccggtctccttaagaagatcgaatatgtattttctttgagagactacgattcccttccttgatctagccacttccataccaaggaaatatttcaaatttccaaggtctttaacttcaaactcttctgacaaatacttcttcaaattctgtaactcccccatatcatttccagatagaataatatcatcgacatagactatcaatatggccaatttcccggcatgagacttcttgacaaatagagtatgatcagcctgaccttgtttgtagcccagcttcaggactgcttttgtgaatctatcaaaccaggctcgaggagattgtttaaggccgtacaaggatttttggagtttgcaaacctgattctttgccatactttcttcgaaaccaggtggtatttccatgtagacttcctcttctaggtccccatttagaaacgcattttttatgtccagttgttgcaagcaccaatcttgattgacagccaatgagagaaggatcctgatagtgttcagttttgcaacaggagcaaaagtctcctgatagtctatcccataggattgtgtaaaccctctagctaccaaacgagccttgaatctttcgactgatccatctgctttgtattttatggtgaaaatccacttgcaccccacaggcctcttcccaaccggcaaatctgtgatagtccacgtcccattcttctcaagtgcatcaatctcatcttgtactgccttcttccattctgaaatttttaatgcctcttgtattgtgttgggaacctgagtatcatcaagagaagtagcaaatgctctgtaagatggtgataacccttcatacgtaacataattcccaattggatgatctgtacatctcctaacacccttcctcaatgcaattggcaaagtagaatcatcaatgctgggaattaacacctctccagccctatcctcacctatgttctcttcaggaagacttgaattggagtcaatatattggccacatgttgactgtgatccgtgctctaattcctgtcttttcctcctcctgatgtaaacttgtaagttctcattagcaagttgtggggctataggttgaataggcatgggagactggatggtcacgggagaaggaacatttgtgtgctgggctggctgaactgatggcggcatgggtgtggacaactcagtgggcgcgaattgggaaggatttggtgactctgagtgaaaagaaggtacaccctcaagaaaagactcccaaacttgatgttcattcatgctctccccctgaacatgagatttgggatagaagaagacatgttcaaagaaagagacgtccatggtggtgtaaaatcttttgttggttggagaatagcatttgtaccctttttgggttggagaataccctagaaaaatgcacttatttgctcgaggagcaaatttgctacgattttgaggatacacatgaacgaatgccgtacaaccaaatactttgagtggtaaatcagaagaggcggcatgggtgtgaggaaactgttttaagaaaagttgacgtggggattgaaaggtaagcactctggatggcatacggttaatcaaataggtagctgtgagaatagcttccccccagaaatagtttggaacattagaggaaaacataaggcaccgggcaacctccaagagatgtctattcttgcgttcggccaccccattttgttgtggggtgtcaacgcaagaacttatgtggataatgccatgattttgaagataagtactgagactactagtaaagtattcctttgcattatctgacttgaggacttgtattttggaattgaattgattttgaaccataagattgaaggtttgaaaaatgtgcccgacctctgacttttctttcataaggaaaacccatgttacccgagtatgatcatcaacgaatgtcacaaaccatcgagtgccagaaatattttttatccgggagggaccccacacatcactatgtactagagagaaaacagtcgaaggtttgtatgggatttgaggatatactgttcgagtatgctttgcaaactgacaaatttcacagtgataagatgctggatttttattgataaataatttgggaaacaattttgcaaggtaaacaaagctaggatgaccaagacgatagtgtaacattataatctcactatctttattgaccttagaatttgacacagaattgaaagactctgacatactctgagactgtacgcaacttgcttgagagacttggtttgagaattggccacatgaaaggaggtagagcccggaacacagttcagcactgccaatcatcttccctgatttcaagtcctgaaaaacacacaagtttggatagaatttagtaacacattggagatcatgagccaatttgctaatggacaaaagattacaatccaagtttggaacatggaggacagagtcaagatataagtctttagtaagttttatagaacctgtcccggcaatttttgactttgaaccatcagcaatatggacggatgaatgaccattacttggcttgtaattttgaagaatggcagcatctcctgtcatgtgatcagaagcacctgtgtctactatccacggcctcattcctcctcgattagcagtgaaggctacaccggtagtactgccactgccaacttggcttaataatttttgtagcatctccatctgctctttgttgaatggactcggctcgggaacagatgtgctctcagagttggcagccacgtgtgctctgccatctctgtcaaaccgtggctttggtttccaatcagcaggtttgccatgaagcttccagcaagtctccttataatggcctggtttcttacaataatcacaccaaggcctatcccgtttctgacgatctccaccactactattaaatgaccgagcagcaagggcagaggcatccaatgttggggcaggttgctcttttgatcccatcatcactttctttctactttcttcacgcctaacctctgaaaaagcctccctgagacttggcaggggtttaatgcccatgattcggcctctaacatcatccaattccctatttagtcctaggaagaacttgaacagtctcttttgttccacaatttgcctgtatgttgctgcatcatccgaacatttccatgagtgagtctcaaataagtcaagttgctgccaataccttgtgagtgtgttgtaatactgagtaactgactgctctccttggcggaagtcatgtagagctgattcaacctgaaacagttctgaagtattttcagaacttgagtaagtttctttggctgcatcccatatgtcctttgcagtcccaaatagcaagaaattttcgcctatgtcattgttcatggaattgataagccatgacatgatcatgctgttttcaatcttccacttcctgaaacccggttctgtagtttctggcatgactgcttctccagtgaggtactcatcctttcctttaccgcaaatgaacagcaacacagattgtgaccactgtaaatagttatggccatttaatttgtgtcctgtgatgagaataggagaggaatcattgccaccaaggtttggaatttcagatctgccccctgattctggtgacgtgacgctggatacttgtgatgatgccattccgtattttgtcatggaccggaaaggtagaagaacacttctcaaggcacgtgcagggactagagttgagaaaaaatagccggaggacgccggaaaatctgatcagagggcccgcggaagcaaaaggaccccaaaagaggcacgtgcagggctcggattgcacaaacaggtaggaagggtggctggtcggcgtcaggcgagcctggaggaggaagcgcgtcgccggaaagtggctcacgcgccctcacgcgccggcgcgtgagatgcagtcgccggccggaaaaacgcgcgtgggcggcgcgtggatgggtttctggttccggtgctttgggacaaattcgagatctcctccaggcgctccttgcggtgtagaaaaaaccgtcgccagaagttcgccggaaaaattcgccggaaaagttgccggcggtgagtgttttctgacgacgattcgactgaccggaaagcgttttctcccttggctctgagaacagggactgatgaccggagtgagagagagagagagagagagatgatcggattgagatatggccagagagatttggccagaatgagtgatggcctgaataagaggtggccagaagggattagggtttcagaaaactggctctgataccatgaagaatttctgaactcttttattgataataatcggtacacaccatacacatatatatacacaaatgactgaataagaaaaaaatcaatctagcttaattctctcctaaaattaggaaactaaatcataaggaaatatcctaaatgatctctccttttttatttctaaattaaagtcctaactttggcattatttcaacagtttccttgcttaatgagaaaagaatcccaatgcacatagtgcataaacattgaaataaaatcgagatctaacatattctcatgttgcatgaaagtgagtcatagagtcctaaaagtgtttttttttttttttttaaaaaaaaaaaaagatttcccttcatgatattggtatttaactagattagatccttatgatgttctttcccatagaagaaagtccagttgttttttaggtttttgtggtttgggatggttggtattttcttcttctctccctctcttgctagccttttggcgtgggttatatacttcgttgtgtatgtggttgcgccatttgtgctttttaatatattctatcttttacctatcaaataaataaataaataaataaataaaataaaaataaataaaaaacctagattagatccttatgatatcttatgatgatcaaatacttatgcacattttttttattttctctaaacatgtgtttttttaatccaacaatcatttgtaagaacaatattctatataatctgacaatgaagcgtatcatattttcaatatcagtattattgaaagtatatcatcacgataaaatgttttgattgacaagcagttgaattgaattcaacaatgaaatttcagatgatgccaaccaacttttaacatctgtaaactaaatttaagactcggtatcaatactttagcgcataattttgaactatatgaaatgttcactaagggaaatttctaaatgttggcagttgatataaaacatggatgaaagatggcgactaatgcccaagtgtcattgccccttttagaatattgttataacttgaaacagtggtttgatgtgttacatctactattttaaatggatggattagtgctattctattaactaagcttaaattttgctttttggttttcttaattataatttaatcaccttgttttgttcatagatatctgat

SEQ ID NO: 11503 - DNA, 16727 bp, Vitis vinifera
  Intron number 2 from transcript GSVIVT01028283001 (locus G SVIVG01028283001) derived from phytozome v7.0 (chr-ID chr7 ; pos 5563415 to 5580141)
gactggagtttttggtagtttggcttgtttgaagggtttctttgactgttgacttactaatagtgttttgctttgggagattgaaaattgaagtggtcttaaagaagaaactacgtctgaaaatacttgattactgtacacatgagcatgcatcttatgacctttttgaacaccaaaaattatgtgagaaggaaaatgattttaatgttaagttggagagttgccttggttgtccttaatcatcattccctccctattgaattaggttcacatactagttggtaaaagccatttaataaaaaaattaagaaatatttacaaactaggttagcgttaaataagatcgagtacactatttgatctaggcattttggaggttctttcttacaacttgaacttccttaagggggcattaattttgaaaaatgaatgaagttatggatgaagtgtcttcacttaaacgggagcttaaggctatatttggttctcaaaaattttaagggaaaatgcgagggaaataaaatagaagtaatagaagtaaaaataaaataaaatgaaaaataattttaaaattaataaattatattttgtacttgcattgtttcaaatttttttacttattttaatattaaataattttaaaatatataaatttctagccaatttcaattatattttattctctttcacattttccatatgaaaaaaaccaaacacgataaaatcattttccttatcattttctttctttccttagacaattttgaatttctcaaaattctaagatttttttaaaagatattagactcttaaattctttaaaataactctttaaaaaattaaccatctaagtctcatttgatcctttggaccataatatcctagtacaaaaatttcaaaaagattgattgaaaatagagagcagcttaggtacttttgaaccactcgtgttgcttaaagttctgggatgttttggctagattttgaccccttgttaatttgatatgttagtaaactgaaaatagaaccaaagagtaaaattccactccattctgaatttgtttgcattagaaaagaatttctaaaatatcaatgggttttcaatactatgtgctaagatagttttagattcccagaatttgtgtatattatttgggtctcttatgagtttataaattattttttaattttatagacttattgtagaataaatcttgagagttttgtaatttttgaaactcatttggctaatgaaaaaaccgagaaaatgagtagcattgtagaatactttgtttttagcaaatctagaaccaatttaggttgaagattgattgatgatctttcgctgaccatttgacttggttattaatcttcaaggtatttaaattcatcaaacatattcattgacttgagttccacttgaattgaactttgtttgcctagatttgtttttaaaaaaaactttgtatcttttcatctagggtgttgtttgggtgaaaataggcttgcaagaccttagaatcctagtttcccgtttttataaaattatcaaatatctttaaattttcttttttagaggaaaacttagattttgaggaagcatcatattgtaaaaaatattaactttttagtatagatgtttttgtgagtagtttgatacatatgattttattaaatttttcagaaagtaaatatctataattgcttagttttattaacatatgttctatattgcttgcttagtttactaatagcataaaatatatgttgaatttctatttcgtgaagtgcattgattattgagtttgcaaaaataaatgttgctttgtctttaagtaattatttaatgacttatgtgtattgacaattcacgaaattacaaattgtgttatgatttaaataaaatatagaaacatttgggcatttataactaaggggcatcagaacatgcacatccacgaagtatttcatgcaattttgttttggaactctccaccaattgtgtagtaagaggaaaatcataagacagggttatgtgttctaatgtcagtataggtggtagagttcacaaagtatacccttttgtaccctttaatgagataaccagacaatgagttttgtggtattatgatcaaggatagtaaaaccctaaagagcacgtagatatgcggtaaccataaagataataggcttgtgtatagttaatggattgaccataaatatgtctagacttatgattttattatttatatcttacatgttctttaaatgttattatcattacattatgctagtttttgtacatcataactatctactaaatcgtctattcactcccatagattttaatgtttttcaagtaaagactctcagtatacttatcgaggatgtagaattagtttcagagagcaagtcactaaatacctagctttgtgtcttttcttattaaacttgtgggatatgtagtccatttcctttatgtattttaattttaatttagttgttttcaactatatgcctcatcttgtcaacctttgtttccattattaatttattttattgttgttgctttatcaacattatttagttgtatgttttttgttttttttttcatacaatatatttatctactgagacaataatttcattttagattatgatacaaagtgggctcattatctcttagtggaccctttttaggccggtccttacaaaataagttcctaatgatattcttatatattagttttcttatcccttcatgaattacatagtaattttctcttattggtgtagacatgtttttaggctgtttgaatttagacccaaggaaaataatatttacactaaaaaatgagttgttctgcttcattgtcaaactaataaaaagactaccatgaatatatatacatatgatcacaaataatcagccttaccaacatatttttagtctttgaattaaatacattttatcccatcaaccttttacatgttttactagttacccttcacattcaaaatccaacaaacagcaagcacacatgagtatgtgcatcattcaacttgttcttttttatttctatatatatatcacaaagtgtaaaagtccattagggtacaaaatgtgaatagtgaaaaagaatacacaaatgacatacaaccaatttgtgttattattatttttttctttattcatttatcagaatgaaaatatataaaaacaaaaaatgcaaggcctacatattcattttattcgttatggtcttatagaagtcctaaaatacgtagttatgtgctcaggactcgtaagatgaccatgcatagtggagcttcatttacgttcagtagccatgacaaccggagtgctggcatgcgaacgtgctctagggggaggcatggcatgacccccaaacttcattccattgggacaaggtaagcctttttcggggacacggctgcatgaacttagtcctgaaggagggacaggtcctaaaagcatagatttcaaaggaacaatcttatcttcatccactcttctttctctccatcaagaaccctactagcactgccgggttggacactcagaataaaaacaactgctgtgacagctaaaacaatgttgagaaatttcatgatgatcttggttgggttaagcaaacaggagatgatcaggtagagcaatatttttatgcgggcaatatgaagatatatggaggagaacgatcaccggttatttatattaatgctgccagtggcatgactagagtttttggtagtttggcttagttgaagggttttttttttactcttgactaatagaattttactgtaggagattagaaattgaataggtcataaaggaagaaaatacctagaattacccaaatgactagttttcttttgtagttaatttaattcaacatatgaatttatcttaaaccaattagaaagaaaatatatgataatctctccaagattttttgaaaatagatatgagaaattaatccattcccattaactttaattaatactaaagtacataatttggcttggttaaatatcattagttgtcatttctgagaaaaattcagataattattgttttggagaccaggttctactatataatcacatttttttcaccaaattaagcaatattcgtaaagcttatttacattattgatttgtaattaacctgtattggacactgaagaatcaatttatatgctacaagtacaagtgatattcactagcatgttcaggatacatggccttttctgtgccatattaattgcataaggggctgctaaatcatatctcataaaaattaatcatttccaaattgttagcattaatctatagcaaagttaagtattaattcaaaattttctcatcgttgtaaagaacttaatggtagaaataggagtagagagaccaatctaggtaggtatggtctatgaagacttttgtcttatataatacgtaccatttacttcattattttagaggcattgattttgaacaaagataaattaagttgtggtaggaacacgtttacttgaattggggcttgaatgtttggggcttttagacgacatacttctagcagattcaagtcattgaacataactctaccaacacgcatcagcttttccaccctcaggagccatgagacaaagtccatttctatgtatatatgcacatgtaccaaccctctttattatgactctacccatgttgacatagtttaacacgagttcaaattagtaacttaggatgatatttaaggcttaagctaaattatatattttgataaatatggttaatatggttaatattatctgtcatccaacaacttaaggttttaaatcaaatgagcaatttaacaattacactatccttattccattaattggaaggctcttcgtatcttttgcccaagatatctaggaatttttattttttttgcttaaataataatataatttataaataaataatatatatatatatataacagtattttacaacgtattaagaaaaaatatgatatttttcgaagtcggtctttttttaaaaaacaatttcacaagcataaatggtttttaagaaaaacaatttcttgttcatagatatcttgtatttcatctcttattttctttcttatttcaagtaagattgttgtttcaaaatgggattttgacatgaatatagtactcttttatacccttaggtgagatgactaggagatgatcgaactctatagtattatgatcaaggatagtgagacctaaagagcatgttgatgatacgtggtggccatgaaggtaataggcttgtgtatagctgatggattgaccataaatatgtccaaatctattattttattatttatatctcatacattttttaaacgttattatcattatgttatgctagttttggtacatcaaaattactccatatataatatattttaagactatttttaccttgtattaattatcataacacaagtgcagcataattatccactaaaccattcattcacctaatagattttaatggttttttaggtaaggactctcgtatgcctattcatgaggtagaatcagcttcaaagaacaaatcactacgtacctagatttgtgtttttctttattagacctatcggatgcgtaatctatttccttaatgtattttagttgttttcagttgtatgtcatcttgtcaacctttccttccgctattaatttattttattattgttgttttaccaaaatcattaacttgtgtgtagtttttatactaaatgtttatctgttgagacaatgatttctttttagattttgatgcaaaatggactcaccgtctcttagtgggccctttttgggtgggtgtttacagatcaagtttctgataatatcattatgtagcagttttctctttactaattacaaagcaattttctcttaatgatgtagacatggttttaggctatggttacacctaaagaaaataatatttatactaaaaaataagttgttctgttctattatcaaactaatgaaaaagctaccctgaatatatccatattatcacaaataattacccttgcatatacttcagtttttttcctcttctctagcatataagtgccgtaaacttggatgcatgagcaaagtttgacaaaacacgcggatgaatgccgaacaaagatgatgaaaatggaagtactgctacaaccagcaatcatatatgagcatatgcatcattcaacttgttcttttttatttctatatatatcacaaagtgtagaagtccaccagggtacaaactgtgaatggagaaaaagaatacacgaatgacatacaaccaatttgtgttattattattttttctatgagaaggaaaatatatcaaacaaaagaacaaaaacaacaaatgcaaggcctacatattcagtttattccttgtggtcccataaaagtcataaaatacgtagttatgtgctcaggactcgtacgattttctgatgttgagtgatgactatttatggtggaggctagagcttcatttatgttcggtagccatgacaacaggagtgctggcatgcgaacgtgctctagggggaggaatggcattacccgcaaacttcattccattgggacaaggtgagcctttttcagggatatggccgcatgaacttggtcctgaaggagggacaggtcctgatagaatagatttcaaaggaacaatccttatcttcatccactcttctttctctccatcaagaaccctactagcactgtggggttggacactcagaataaaaaccactgctgtgacagctaaaacaattttgacaaatctcatgatgatcttggttgggttaagcaaacaggagatgatcagatagagcaatatttttatgtgggcaatatgaagatatatggaggagaacgatcaccggttatttatatgaatgctgcgagtggcatgactagagtttttggtagtttggcttagttgaagggtttttttgactcttgactaatagaattttactgtaggagattagaaattgaataggtcataaaggaagaaaatacctagaatttacccaaatggttagttttcttgtgtagttaatttaattccacatatgcgtgcatcttaaatcaattaccaagaaaatatatgatactctctccaagctttttcgaaaatagatatgagaaattaatccatgtccattagctttagttaatagtaaagtatgtaatttggcttgattaaatatccttattttcacgagaaagttagataattatcgttttggagaccgggttctactatataatcacatttttttttcaccaaattaagcaatattcgtaaagcttatttacattattgatttgtaattaacctgtattggacactgaagaatcaatttatgtgctacaagtacaagtgatattccctatcatgttcaggatacatggccttttctgtgccatattaattgcataaggggctgctaaatcatatctcataaaaattaatcatttccaaattgttagcactaatctatagcaaagttaagtattaattcaaaattttctcacggttgtagagcacttaaataagagtagagagaccaatctaggtaggtatggtctatgaagacttttgtcatatatgatacgtaccatttacttcattattttagaggcattgattttgaacaaagataaattatattgtggtaggaacacgtttacttgaattggggcttgaatgtttggggcttttagacggcatacttccagcagatttaagtcattgaacattactaacacgcatcagcttttccaccctcaggaaccatgagacaaaatcacacaatttcaacaaacacacaagcccaatttcaacaataatcactattaaaatcaaagggaaaaaacttacacaatttcaaattttagaaggataaaaaaatgagagaaagttgatgaaatggaagaatgggagaggaaaggagggagttgtcggttggcagtggctaaccagcggcgggagggatgatgggtttttttttttggaaataaaaaaaataaaatgaaaaaagaaatggaaggaaggaaatgaggggtgcatgtggcagtgaaaaaaattgggggccagccactaccttgtgtgggagctggggagggaaaaaaaaacaaaaaactctagaggggagatgggaggagagagaatggggagtaggtggagtggttggggaataataggaagagaaaggagagaggagagaaaaaagaaagaaaatgaagaaaagaaatagaaataaaataataataatagtaaataataataaaataaaataataaaaactaataattagatggtgagttagcaaaaaatataaaatataatcgaaatttaaaaactaaaaataaaattgggttaaaaattaatgtaaagataaaattggaacaaattttgggatctacagctcttcgtatatatcctctatccaagatatctaggattttttttaaataataatataattttaaaatatatatatatattacaaaaatataatatttttgaaagttgtctttttaaaaaatgatttcacattcacaaattgtctttataaaaaataaaaacaagtttttgttaatagctatcttgtatttcatcttttattttctttcttatttcaagtaagatcattgtttcaaaatgcgattttgacatgaatatactcttttatacccttagatgagctctatggtattacaatcaaggatagtgagaccttgaagagcatgttgatatgtggtggccatgatggtaataggtttgtgtatagctaatggattgactataaatatctccaaatctattattttattattatatgtcatacttttttaaaatgtcattatcattatgttatgctagtttttgtacatcaaaattattccatatatactatatttttaaactgtttttactttgtattaattatatcctaacacttgtgcatcataattatacgctaaaccatttgttcacctaatagattttaatgttttttaggtaaggactctcgtgcgtatgcctattgaggaggtagaattagcttcaaagaacaagtcactaagtacctagacttgcgtttttccttattagacctgtaggatatgtagtccatttccttcatgtattttagatgttttctttaatttgtatgtctcatcttctcaatctttgcttccactattaatttattttgttgttattgttttatcaaaatcatttagttgtatgtatttttcttatactaaatatttatatgttgaaacaatgatttctttttagattttgatgcaaaatggactcacagtctcttagtgggccctttttgggtgggtctttacaaattaagtttctaataatattattaataacagttttctcttcacaaattacttagtaattttctcttaatgatgtagacatggtcttcccctatgcaaatttagatccaaagcaaatagtatttatacttaaaaaataagttggtttgctttgttatcaaactaataaaaaggctaccacatgaatatattcatattatcacaaatattagccttgccaatatatttgagtttttttcctcttttccagcatataagtgccataaacttggatgcatgagcaaagtttggtaaaacacacggatgaatgccaagcaaagacgatgaagatggaaatacagcaacaaccagcaagcatatatgcgtatatgcatcattcaactagttcctttttatttccatatatatcacaaagtgtaaaagtccaccagggtacaaaatgtgaatagagaaaaagaatacaataatgacatacaattttttgtgttattattatttttccttaatgtatttatcatgatgactgactcatgcccaattggtgtctcagctgatttgtgttcagctggtgctccttgattgaggaagtgatcaacaaaatttatacctataacaccatacactagggtagcaaatacaaagctactatagtatagtggctctaggatcgttcactgggaatgatgaacaagcaatcaaggataccaattccaagtgaattggtcttgtttcatttcacggttagcttaagaagtaaaacacaaagtttgattggtaaaggtttagacttaaactaactaacttaacagaagtttggaataatttaggaagaaaagcattccttggagatttaggttcactggggtggttcctcatgcaaaagacatagctccggtcagatggttcatttcctcgcattagagattcaacttagagtcaattctctaaccggtgatgtacagagactccttcaattagatttcactttaattctctcactgatgcaacttgcaatggttcatgcctctcacgagcacttaccattcaaggtgatctttaaccttggatttcccttcacaaactcgcaagagataactaatggatgtctcctaggagtccaaaagcttaccaagtgttggtaattctagaaaatcctaccctgaagtcacctaccagaggctcgcaaggggtaaactagtgcatttccacggttggaaatcacttgccttaccaagtgttggcctaggtgactccaaagtgttttaagttaactaaaaacattgaaatcactaaaggatttcacttccttttcattactagctaaaaccacaaagctttgcattcttgcacttggaaccttccccggcaatcttagctccaaggaattggaggtttagttactcattctctggggaaaactcctcagagaattcataacttagaaataaaatgaaaatacaaagtgagaaggtaaggcagtagaaagaaaagactttacttgcttaccaaatggttacagaaggaactcctccctgagaacaggctcccgagaggtatatatatcaaaacaatataaaattaattgttaccaagatatttggtctttttactaacttaaaaactaaggaatcatgtaattggtggtttacaaggagtattttgggatttagacaacaaaaatctaatggaaaatatctcccaatgtcggtagcaagcttcgggaggcttcaggagccatttcgtaggagaaaagtggtgtctgcgaaatttcgcagacacccaagagggctgcgaaattatttcgcaacactgagctatcttcaccaggctgcaaagttggcttccatcttgaggtttccagctcccttctcgcggcatggttcatgcatcgtcagaaggagaaacatcttactgtacaaaagtgctgcgaaattctcgcaacaaaaggctgattccgcaacactttagagtgactggcttgtaatggctgcaacttcttcgtttcaactccgaatcgcgcaccgtttgaagcattggattgttgacttcctaagctttgaaatggtatatagcttgcatcatttggacttcagaaagtgctccaaaagtggctgctacgactgtcatcaagaataggctttatggcagattctctttgctttttctccttgcaatccggattcactcttggcaattgaattctaagctttgcccaagattcctcatagctctcctcattcttgacttgctttggtgatcaaaatactaacaaaaacaccaaaacttacacaaagtgatcaaaattgctttaaaggatccttaacatgtcaattgagttaaaaggcctaaactactactcaaaagtgttaaaaaggattaattaaaggctatcaaatagcactttttgagtagtaatcaatgactatgtacaaaaacaacaaatgcagggcctacatattatgtactcaggactcgtaagattttctgatgttgggtgatgactatgcacattagaggctggagcttcatttatgttcagtagccataacaacaggagtgctgacatgcgaacctgctctagggggaggcatggcatgacccgcaaacttcattccatcagtacaaggtgagcctttttcggggatacggccgcatgaacttggtcctgaaggagggacaggtcctgaaagcatagatttcaaaggaacaatccttatcttcatccactcttctttctctccatcaggaaccctactcgcactgccgggttggacactcagaataaaaaccactgctgtgacagctaaaacaatgtttagaaatctcatgatgattttggttgggttaagcaaacatgagatgatcagatagaacaatatttttatgtgggcaatatgcatattgacggaggagaacaatcaccggttatttatacgaatgcagccaggcatgactagagttcttgctagtttggcttagttgaaggggtttttttttactcttagactaaggtggtatttgttttttggccgaataaaaaaaatcaaaatatttagttttttctattcaactaaaaataaaatgttaacatcatttaacataactaaattaaacctattgataacaagttcattttaattatattgaatgatgtcaacagattacttttaactgaatagaaaaaatcaaatattttaattttttctattcagccaaaaaacaaacaccacctaatagaatttaatttactctaagagattagaaattgaataggtcataaaggaagaaaatacctagaattacccaaatgactagttttcttgtgtagttaatttaattccacatatgagtgcatcttaaatcaattacaaagaaaatatatgataatatgaatgcatcttaaatcaattagaaagaaaatatatgataatttctccaagcttttttgaaaatagatacgagaaatttatccattcccattaactttaattaatattaaaatatgtaatttagcttggttaaatatcattagttatcatttccgagaaaaagttagataattatcattttggagaggaggttccattgtataattacatttttcttcaccaacttaagcataaatggctttcctgtaccatatgaattgcaggaggggctgctaaaacttatttcatcaaaaatcattgccgaattgttagcgttaatctatagcaaaattaagtattaattcaaaattttctcacagttgtaaagcactcaatggtagaaataagggtagagacaaatctaggtaggtatggtctatgatgacttttgtcttatatgatacgtaccattgacttttgccttataaatcaagttgtggtaggaacacgtttgcttgacttgcggcatgaatgtttggggcttttagacgatataattctatcagattcaagtcgttgaacataactctactaacacgcatcagcttttccaccgtccatgttgacatagtttaacgcacatgtaccaaccctctttatcgtgactttacccatgttgacatagtttaacgcatgctcaaattagtaacttaggatgaaatttaaggcttaaagctatattaccttgataaatatggttaatatggttaatttgacccattatccaaccgacttgagtttttaaatcaaaacggtaatttaacaattacactattcgtgtaccattaattggaaggctcttcaaatccccttcataaaatcgagaaattagtgatttatcaagattttacaaaaaaaataataataatctaatatttttttaaaaaaatataataattgaaaaattattttcaaatctataataaaaaattatcttttgaaaaaacaattacaaattttgaaattatcttctaaaaatatatttttaaataaataacttaatttagtcataaacatatgaggttgtgaaaccaatcatattgatttaattaaaacccagttattaaataaattgttagatgtattaccgatttaataattatatcatattttgatccatatttttaacttgtgtgatgttatccatgcttttaactcgattttcattggtgtcatgtttagattaacttattcaatagaatgcttgaattttgaaattaataacatgaatgtatcccatcagcacaaattacatatattagacaattgtttttattacgatgttaccataaatcatatataattcacaaagttttgaaacttcaatccattcttcatatatatatatatatatatatatatatatataatataactttatattcttaaaatgatcaggtttaggtttttttttttcatttttttccaaattaatattttattttaagtaaatttctttttcctttacaatttccttttctaacttcttatatctcaaactactatattatttttagtcaccaatgaactaaattccttcttttacaagtttctttttcacttctttttatgtattaattttgtgaaatcaaggtttggctaatctcgattttgatgataacataacaaaatttagaactaattattatatttcaagtgtaattaggcaaaatgatttacaaagtgacaatcacaaagacgaatcaaatcaaagaaaaataatgaagaaaaaaagacatcaaagagaggtatttttcaagacccaagcttcataagatctctttgtaaagttgttgatgcactagcattttcaaacattacattctttacttatgcaccaaaatcatccaagagttattttattttaaatttttaaaaatttgatgatttcatgttttcaattaaaatcttgtgtcaaatgttttccaaacttgtttaaaatgttttaagttgaaaaagttagttgttgagccaaaaacggctcaactagttgaaccggatgattagtgcaccattcaatcctaaatttcttgtatcatttgagtttaaagttttgtattaggatttaatgaaatcatttataaatctttgagaagaaaagtctaagtgtaaagtatcacttagggattctcaagtgaggagtatcacttgaggggttgttcaagataggggtatctcttgagaagtgtaaagagtgtttgaagccaaaagtccaagatggtggattagaaccataatccaattgtattgcttgaaggattagtttgaaaactttcaaatagtggaacctcaagcttgatattgaagctaaaagagagtggatgtaggtcaggatacatcgaatcactataaaatcttgtatttgtattctctcttctctgctctattaatttatatgaagttatctttatattgttttattatatacttgcatataattgtttcttacattcacatagtttgaatttcatcactcttttcaccccccctcccccccggggtgattaccttagattgaattagcctaatttttctaacaaattttatcatcctctatcttcagcaatctaacttatctataacagaagtaaagaaaaaattaatgattcgcaccatctccagcactgaatattatttgaagattttatcatattatatttcataaatccttgagaaaaacatttgttctcctttgaataaatggtagtaaagagaccaaaatttaagttgaagacaagagaatgaatcattactgacgataaggttttcaaagttttggcaaatgtcaaaccatacgatttgaatcttgataaccaacctcaaagcttaacgttgaagcatttgaattgggtctgaatcaacttttcaaccttatagaagtaaagttttccataacaatggaaaacagggaatgtttgttgttgaactagaagtcaaaccagtacgcatgagagcaggttcatgggaagctgcccaaaaattatgtactccagaagaatttttgttcctcttccacactgttgaacctcattttcggtcttattaactgtggggtaattgaaattgatcagaaaaataggcgagggaaggaaaaataaatttaaaccttaaatgactctctctctctctctctctctctctctctctctctctctatctatctatctaattaacgtgcaagtaaatacattatgactatcctggacaaatacagggaaaataattcaaagggttgactaacagggaaaataattcaaagggttgactctctctctctctctataatataggaattaatacatttttttttccacaaaacatctctcataatttttgagaaatatattaatgtactaatatttcttcattttagttccttcactgttattttttatattcgaagagactatgaaaagaaaattgtatcctctccttcagatgcaatggcaaatctcaaaatcttcctacaaattaaattgaaaattaaatttttattaatgacatatgaagactacgtagttcttgtaatagcaaacttgggtaataactcaaattgccggcatgcgccctgaatgtcaaattaagatggttgatgaggatggtaaagcagcaactaccagcaaagatgatttccaacttattcatttattctcaatttgtcttagtgaaaaaaccttcagaagggtacgtacgtaccacatgtgaacaataatcaaaattacaaaatacgtaaaattgccagtatgttcttcattatgtaaacaaacacacaaactttatcacaagaatgacaacatacacgacccaatgaaaagaatttctgattttgggggctccc

SEQ ID NO: 11504 - DNA, 4309 bp, Vitis vinifera
  Intron number 8 from transcript GSVIVT01029407001 (locus G SVIVG01029407001) derived from phytozome v7.0 (chr-ID chr1 7; pos 16578273 to 16582581 reverse strand)
cagaacttcctacaggctcttggacggaggtacaactttcaccataacagttgcttgtttaaatgtttgtacctgtatagatcttgattgggacatgctaatccttacatgcgcaacgttgtttgtaatgttatcttttccttagagctttttctttgtttttttttttcctttttcttttgtgatttttgatcaccattatgaaaagaatgaattgtatggaatactttttgataataaagaactaatggcatgtgcgtatcccacttgtaattattcattaaagagcatgttgtttcacattgaattgtaagatttaacacttttcttcaattctaaatatttgaatttacaaagtgcgagctgtaaagcttggaagggaaatgtatgcattctaaacttatgtatatgtagacctttaaaactgcaagaatagactatatgatgcaaagtttgcaatgttagtttcacttaaaaccattttagttcccaatgtaattgccttttttccatatgtatctattgaatgcttaacttgcaatattaaatactttttggggccccattatgtagtaaaacttatttatttctattagaaacaactccattatattgaaatgttaagcacaacgaatgacaagaaagctttctaaaccatacaatgacggatcaaaaagctaaaactatgcctaaattgcagcaaaaaaataaaaaataaaggcataggtttaggcgagaaaaatagtccatgtgcagaaaacactacacattcaacgaggtaaaaaatctcctagaaaagaggccaactactttactcttgtttggctagatggttcaaaacttgactagttgagcatagaacacaagtaaaagaacatcccaactttctagaaatatctagtcaagtcatccattaaacttcaactaacctctcttccgcttagacgcccaaaaattaataatggtagaatctctcttgacacttaggtttgaaaggcctaagaattaacatcccctttcttagtggccaaaccctctttagcaagtttaaagtaacctcttaacattgcacctgatggtttgtaagcatgccacttatgtgtaattgtcctaggtacccaaagagcacctatcaaagtgttgacacatcagttaagaatccttatagaatagggaagtcaaaggctgattattagctggttttcaaatataggaaattacttcttttttttcccaatattttccatgtcaaattctttgattttaggatgttagttttttttttctttgtagttctatatagatgcctatcagattgtattgaatcattatccaaaatacactaataggtatattcaacttcatcgtatcaaatctttagactctttcattctttggttatttcttggtttcaaagagttatgtgtctatcaatcttcattgccaatgatgaataacaattctcatcatttttttctttcacattgttttttgtggttacaaatttatcttttactcaacacaccatgttggaaatttttgaggtaaagaactaggtcatggcatttcaacacactgtaggcatagttttaaaaggtgtaaggctcatctaggacacatgcctaagtgaaatgaaacttgacttagaatgcatatcaattttataaactatgatccaaaatctaatccaattaataaaatatttaaaagatttcaaatattttggagcaacagaaggtttgttttgaaacgaaacaaaaaaacattcaagaacaaatacaaagatcacaataggatatgaaaattagggtataattctgaaattttttattaaactcctaacaattacaataagcttttaaataatgtttgcaatgcaaaaataaaggaaataacttaaataggaaactacaaatatgaaacgaagataattagaaactaggaaaactaggaaagaaataggaaactaatgatgaacttaaaaaggaaactaatgaagaacttaaaatagaaactaatgatgatcttgtgctgcatcaatcccctccagttgaagaaaactcatccatgagttttgtggttgtaaagaaaaccaatccagaggaaagtattcaaagatatcaacaacgttgaaagtattggaaatatttgtattagctgaaagatcaatcttgtaagcattatcaccaatcttccaataaaccaccaatcttgagatgtgataagtgttcctccttattcttactatagatgagaatatcatcaaaataaactaccaaattttttccaataaatggacaaagaactaggttcattaactacatgaatgtgcttggcgcacttgatagcccaaatggcatcactagccattcataaagaccacctttagtcttaaaagtcgtcttccactcatcccctccttctgtgaaggcgatgacgcaaggacaatggctgaggtctctgcttgctttcatgttgagttcacaatctaggtctgttgctttagtgcaaagctatgtttgcaacacaaataatggtgcgactcaggtgagagggaaaccttaaggtcgacaatgatggttgattacaatcttcaactcggcaatgaaggctgaaattttcttctcttcccagatttacaagcctaaagctctaataccatgtagaatatgaagaattggaaagtaagagaataaatttcatccttgatttcaacctatatagacccacatattgatacaaaaattcctaacacaaaaaaataaaaaccttcctaacctaattatactatatccctttaattacgggattgtcctaattctctccttaattaaaaaattatacaattataatctttcctaattatattcttccacaagtaaaatgcaatatcttataggagttaaattttaaaattgtggagatcatgcaaagctttaggcactattgtaagatatgaaaccactgttgaaattattatagatggaaatgaagctgaaaattataccccgaaaggtagttcaaagtatgataagaaacaatagattaatggaggtaacaagattttgttgccttgcatttttttattcaaaaatttttttatactttgttgttaataagttgaggaaggcaagacaaataaattgtcattaggtctatgttaagagaagatccacctaaattttgttaaaatggagggaagttttgcttctttgttgatgtttggttttaaggaaaaagtaaagaagattggccagttctttgctttggtggtgtaggatggagttaagtggagttctctaatattccaacacagctgtaaccattccattgaaatgttcaaagatctgattctagaaaaatatgcttgattttaaccaaataacatttgtttggttctaggaactagcctatggagtcttcctttgcgccaaataagtatggagtcaaattttggaagaggaactggagaagttgattctgaagtgtaaatttgttcttataccatctcatccatgcattggaaaccttgtcttgatcacattgacactttcatgtgatggatcatggataacaagaaaaaaatgaaagccaattgttcatagcatgtttccaaatgattttttttttttttttttttatggtggaaaaagaaataaggaaaagtatagatattttttatttgatctataagttttattgggcattatttactcaaattttgatagaaattttggagttgttttctgttatggtaatttccttttgtttccaaaagtaaaagcttaaattaaatccttaagtccttagctataacactgttaaccctgatcatgatttttattttctaaagtgtcctccagttattgggctcattacatcattccaatctttaattttgtttggcaactaaaaccaacaatgtaggtatttaaaatggtttgtaggggtaatatgagactaatatcaagttatgaaagttctcacatgtatgtttaagtcttcagcattagaagttacttctggtaaatgatgtacttccattgtagtaatgtaccacatattagaatgatgatttcataacatgaaaaacaaatagaaggttttggacctttcaatttcactgtgattgcttgggaagtaaaacctttctttacaagctcaataccattgttaagatacaacaagtctatgttttcaatattgtggttcaacattcttattgaagttttagttgcacctgtttaattctctaattggaaagttttactaattgtgtcatttgttctctttcttcagaaggttagaa

SEQ ID NO: 11505 - DNA, 20771 bp, Vitis vinifera
  Intron number 3 from transcript GSVIVT01020995001 (locus G SVIVG01020995001) derived from phytozome v7.0 (chr-ID chr5 ; pos 15704763 to 15725533)
gaatttcgggtctcaccttctttccaatacagatttttctatttctttttctacttatgatcccataactggaagatgacatctgttagctttgacatagtttttcatcctactgcatgattgagaatattttgatgcctttttatttttttcaatgttctgtcctctgggtgtgttgcaactaaggtggtgcatgcttgttatttctttgtgtaattgggcacataagtgagctgctggacatggagaatctcaaaatctgttttgtcagcccccttagtacatgtaaagtttggagtgtagaattttgttcatgtagactagtttactgttttttttttgttttgatttaattttccagccaagaaagcttttcccagttcacatataggctcctgtgatcactttattcaaacctttttgtaattttttggttaagtctaaaatttccttaaattttttggaaaaaaaaaagaaaaaaaagaagaaaaaaagtggttgtgatttatttgaaagcctatatgaatgttaattgaggttcctctataaattaccaatgatttttaggtcacgctgatcagtccatttgagtactagctccatgtcattgcatagattgaagtaatttatggaatagttgaaactattgtgatgaaagaattaactgaaaggaatatttcaagataacaagagtctagggaagataaagaaccacaaaatgtagcattacccatggtttctatctttgtttcctttctctttaaaaaatattctatgtcctcttatgtttttttctaacaaacctcctctttttttttttattttttttctttttaatttaattttgattttattagctttttttttatatttgtggcatggtgggcaaggaaaagtaatagaatacatctgagaacccaaccttaatgaaaagtatcaaagattgaggagttagttaggaaagaaatgcgaattcctattttgtagggataagatctagttgttatttttcaaattgttctatttcatcaaatctggttagttatgggtttgttaggttgttgagtcctttatgggattgtctttccctatttattggtaatttctcaattcttagaattaatgatttttgattcttaaaagctcacatggtgtcggagcttgagctttgagtcttgattggaaaatttttagatggcaaaaacctctatgactagagccactagaggctcaaccacttttggaggggatgcggacaacactcaaactatctccttggcaccgttccaacaatttgattgtgccaatttgaattcttctttacaattaaccattcacaatttgattggtgagaattacttagaatgggtccagtgtatgaaactagtgattgatgacaaaggaaacttgcccatttgataggtgaagtaacgaaaccggccacaaatgatctgactttgaaaacatggaggtctaaaaatcctatggtgattgcttggctcatcaattctatggaaccaacgattgggaaatcttacatgttttactgacgaccaaagaagtctgggatgctgtttcagatctagaaaattcttcccaaatatttctgttgaagatgaacctttggcagtccaaacaaggagattgagaagtgaccttttgttgcaatgagatgatgactttgttgtaagagttgggtttgtgttatggaatgggattgcccaatgacaatgtgagatacaggaaatggatggaaaattatagtctatgcatttttggcgggacttacaaggatctggatgagttagaggttgaattctaggcagaaagccactgccatccattcaagaagttttctgtgaggtacgaagcaaggatgctcgatggaatgtgatgctaaatggagaaccacgttcgaatactgatacagaagcttctgctcttgtatcaaagggacttgactaagatggaaatcgaagaaacacacacaaaaaaaaaaaaaaaaaaaagccttggcgtgatcactataaaaaaaaggcttggcatactcttgagacttgttggaaattgcataggaagccttagaattggaaaaagaagccaagtggagataaccgagctatccaggtttccaatactgattaagggcaacaagctgcttcagaaatgcttcctttcaccaaggatctgctagaacacttgtataatctacttcaatcttcttctttcaatgcaaactctaatttattgaaggaaaagtttgagtctgaacaggttttcaaattttttcacaacatagtgcaaacttagtttcaaacaaacattcaaatcttttgaagtgacaatgggaaggaatattttaataaaatcctagggaaatactttgagaaaaatggcattgtgcactaaaattcttgtaatgatactccttaacaaaatggagtggctgaaagaaaaaacaaacaccttctcaaagttgctagatccttaatttttacaactaaggtccctaaatatttgtgggggaagactgttcttagagctacctatttgatcaatcagatgccatcaagggtcttgcattttcaaacactaatagattttttcaaaaagtgttatccttcatcaagaatttcaggtaatattcctcttaaaatttttggttgtatcacatttgtccacattcacaatcatgaatggggaaaacttgagccaagagctaaaaaatgtgtgtttcttggttattctccaacacaaaaaggatacaaatgtttttatccaatttaaataaaaatgtttgttaccatggatgtcatttttttgaaacaaaaaaatatggttttcatcatctttagggggagagtgatggtgaagattctttctttaataacctccaaatagaaatgccttttgtgatgtctgtcctagattcagaaacagaaaaatttgttcaatcaccttccggagcaccagcacccgtggcaacccttattttagaaatacccatgcctaactcgatacccacttcaggaaccgctgggacatccacagaagtaaatatgttaaatgctgagaggaatggacaactgacgattatgccatcagaaaatcaaatggaatctgaaatgtgtgagaagccaggaaaaatatcaaatgagtttattgtctattcaaggaagaaccttgattaaaggaaaacaaactccacttgtcagtagccctaagggcctaacttgagaacaaatttgatttctgtcaatcctccaggtaaacccatgtctgagtctaattcttccaattcctaaatttagtttgttaatgatttaggtattctgattgcttgttgaaaagatactaggcaatgtactaaacatcctttgtctaactttgtgtcctatggaaaattatctcattctcttcttacatttacttcacaactttcttgtatgaacattcttaaaaatatacaagatgctcttaatgttcctaaaaggaagttattcttgaagagatgagagctcatgagaagaacaagtcaagggagatagtaagtttgcttgaatgtaggtccacaattggttgcaaatgagtctttacaatgaaagacaactcgaacggctctctagaaagatataaagctcaattagtagcgaagggattcactcaaacgcatggtattgcctatttagaaacattcgctcttgtaggcaagcaaaacatagtgagagtgctcttatcaattgttgtaaatctggactagctgttgcaacagttggatgtgaaaaatttctcaatggggatttggaacaagaagtttatatggagtctcccttaggctttattgaaaaatttggatcaaagatgtgcaagctaaggaagtcgttatatggactcaaccaattgcctagggcatggtttgataaattcacttagtccataaagaaacaaggttatactcaggggtaaactggtcacaccttgtttatgaagttctcattcgaagggaagattgctgtgttaattgtttatgtggatgatattattctcattggagatgactttcctgagatagaaaggttatagaaggttctagcttttgaatttgagattaaggatgtagggtcattaaggtactttcttagaatggaagtttcacattccaagaacggcatcgtcgtctcacaacaaaagcacattctcgatctcctaaaagaaataggtataagtggttggagaccaactgatactcttgcacaatacaatttgaagctagaaagaaaacaacaaaggacctgcagataaaacgtgatatcagaagttggttggcaaactgatgtatttgtcacacactcgaccagatattgcttttgcagtgagctttgtgtgtcaattcaggcactctccacatgatgaacaccttgaagctgtttacaagattataaggtacttgaagggtactctagggaaaggattattgtttaagaaggatgagcaatgaggagttgaggttcacattaatgccaattgggctagattaatcactggtaaaagatttacctacgggtactatatgtttgtatagggtaacttggttacttggagaagcaagaagcaaagtatggtgtcacgaagaagcattgaagcagagtttagaggtatgaaacatgagatttgtgagatgttatgaccaaaacatgtcttagaagaactaaggaggcccattactcttcctatcaaattgtatagtggcaaaaaaacaaccatcaatattgcacataatctaacattacatgacaagacaaaacatgttgagattgatagacatttcataaaggagaaacttgggactgttgctatgcttgccgtttgttcctgcaatgcaacagacagtagacatccttaccaaggaactcttaaggtctaactttgagtttcttgttagcaagttgggaaggatggacatctacacaccaacttgaggggaagtgttgaagatttaggagttagttaggaatatgagatttaggagggagttaggaaagaaattcaaattcctattttgtagggataagatctggttgttgttttttgattgtcctatttcaacaaatttgattagttatgggtttgttaggttgttagagttttgagtcttttataagattgtctttccctatttatttgtaatttctcaattctcagaattaatgaattccaattctcaaaagctcatagaaagaatatagaagaacttataaatacccaaaagatatggccatttcttaaggtagtctcttaaaattacttgtttctagatggttatgatgcttgtacaagttttcatgatcattttctttttccttttttccctttcttttgataactttcttttttataagcaaacaaaaactccaatcaaaggtgcctaataaaaagggtaagaggcaacaaaagaagaaaaacaaacctgcccatcgaagaacaacaaaagctatgataaattatgtatagtttagactattaatggaatccgacaagatacaattttttttttctttttggataaaaaacaaagatatattaatgttgataaaagttcaagagaaggatgagagttccttatcacaaaatacaaaaattgatcaaagtaagactagactcctctagtatacaaggagaactatacacattggcatacacaaaatatcttagaagtcagaatcaactcctgtcaatgttattccccccttttgaataacaaactgaaagccaattgagttgaataataataagtgggactcctctaaaagtgacaatacaagaggcctaaagggatgaatagaagtgaagtagatcccataacatctcttccattctccacttgtcataaaaaattctaacatttctctccacataatccaatgtatagtgaggcaagcgatttgtcaaaagagtcttgtctttgattgaattccctaatcctctaaatgacataatcatcatatctccaatactcctaggcggaacccaattaatattagctaaactgaacagcttatgtcgaagtccaaatgttattaggcaatgtagaaaaaatggtcaatcgattctccactaatggtgcataaaatgcaccattgaagactaagagatttgtaggtccatctcacttgtagcatgtcattggtattgtgcaccactaaccaagcaaagactttaatctttgaaggggcttttgatttttaaacataattggctggaaggaatgggattagatttgaggaattggataagactaagaagaaaaattttactaaaaataaacctgaggaggataacgaccaagctcttgaacctggggtagaaggagacaagtgcattgaggtaagtgaagacatgagtcttatgagaaatttaatttttatatgtgagattacgacgaaaattaaaattccaagaatgtggatagggattaccaaagatggttgagatggtgagatttttcattgagataattttatagggccttgaaaattgtgaacagaaatgttgactttcccaccatatattttcccagaattgaattctctccctgttccccaccacaaagagggtgtaccggaaaaagtcttgaaagactagcggaataatctttcaaggacctttgtttgaccatctaaccaaaatgttgatgtaccatccattaggatgtgtcctataaatgctcgtaatagctagatgctatagactacaactttccctagggaacttccaaagccactttcctaaaagagcacaatttcgcaaggaagtcttcccaaaccccaaacctccaaactcctttggcttatacaccatatcccaattgataagatgatctttcttaccatcctcagtctttgactaaaggaagtccctttgtattttctcaatcttgaaggctattgatgtcaggatcttgaaaagagagaggaaatagttatggatgagagacaaacaagactgaattaaggttatcctcccctccaaagacaaaaaagcatttttccacccatccaacctcctgagattctatcaactattggatcccaaaatcctattggtgctttgatttattatctcattaccgtggaactctaaaaacaccctcataaggtcctctttaatcacatcctaacacttttgatacattgcagtagtaaaaccattagggctaggggcttgttccttatttagttggaaaatagcaaggcacaccccttcttcagaaaagggacggtctagcctggcaacattgtctccaaatataggagaccactctaaacctttcatcctctaagaaacaccaaagggtttggattagagctttcaaaaaaagattcatctcctctaaaatattttcaatgttgcttagagttaccccttctttagacaccaacgactttatgaattttttgttttgcctcctattggtcagtcaatgaaagaatttagaattgcaatctcattcttttatccatttaaccttggatttttgccttcaatgaaactcttcctttaataataattcctctagatcttgcttccttaaggctttcaaagttgagagtttagaagtcaattttccttcctactcaactaagtcaatcttaacaatgtctaacataatgatattctttttctcttttttatctccaaacaatgctctgttccaatctttcaattttgcttttacgaactttagtttcatcataaatgtgtgaccttcccaactgccaacttgacacttgtaccaccaattactaaaactttccttaaactcaagtttgttcaattgggttatagcttgagagactgagctcgactccaaatgattcaacaaaaaaggctgacatcggccagattgagtagtagaagcagaagagagggatagaagatttgagtaacaagccctaactaaagattggtccttaataaaagtccaaagttaaaaggaaatacccaacttggcaatccatggtgcgagagcccttcacctctttcagtccctttgattgaacaggtttttttatgagaaaggaaagttatcgccttggttgaagagtccaactcgaataaccaaattagtcatggccttcagcttagtgcacttgctcaaatccaaatcatttccacccattaaagcctcctcctcttttgaagacttttggaagtttgggactatttttcttgccagagacgaaattttgaaacatagaggccaacttttcgttggaagccttgcattgtctagagttgccctttgagtaggcgacttttgtgaatgagtgacaagttggaccttcatagagcaggattcagtgcctagaattttggggatgaaaagtcaaatgggcctcccttaaatgactcacatgggctccttgctattggatgggctttgttgttgtgtatagaagaaaaaagcctaagagcacattctctatttgggcttcctccatgttgagccttaatcaaagaatgggctttttatctatggttggggacataatgggccttgatgggcttcccaccactgggcccctcttctccactgccaagccttttttttcctctttaaagcttcatttggatttgaaaaggaggaacgagaaattcatgcacaactgttttccctttttccttttgagttgccccatgtgcccctttcttgagattgtccaaaggacacctcctcctgctgaatcaaaatcatctctacaagttaacttatctctcacatgacatctttgatgaaaactgaaaagctattagagctattatccaagtaaactaccaccaagttacttcaaacaccattggagccaagatttcttaaggaaaaaaatctaggaaaaaacccttcacaaaagctaaaaccaggaacttctggttaatcacctttatatattttttggttcatcatcaaaagttcttacaataaccaagttcttcccttttataatgacaaccctcaactactttttgaaggtttccaagacaattagtagcctttaataacaaaaactgacctttggacgtctaatttaataacaaacctttcccatgcaaaccttttatgttttcaaactgccataaattgtctaatattgactacatcattctcccctccttagaagaagcacgtccttgagtttggtgctgctggaaacatcttttagattttcaccagtgtaagaatataaatctgaaatgttgaatgttgaatcaattcccatatgttttggtagatctaagcattttccccaatcttcttgatgattttgtaaggtcctatctttcttttacttagcttggaataagagccagctggaaatctttccttgcgtgggtataccatcaccatgtagctctcttgaaagctttggctgtgccttttctgatctgcatatttcttatactttgcatttgactcctcaatcttcaatctgatttcttcatgcagggttttcattaagtcaaccatgttttcactctttaaactatttcttcccatttttggtaaaggagctaaatcataaagatgcattggctgcttcccataaacaacttcaaaaggacttttgcctgtagttagattcttggaatagttataggcaaattctgcttgcgcaaccacagcttcccattgcttaggattttctccaaccaggcacctcaataaatcacccaaacttctattgacaacctcagtttgtccatccatttgaggatgataggaagtactatattgcagcttggttccaaacttcttccataaagttctccaaaaaggagagagaaacttggaatcttgatctgaggtgatggattttggcactccatgcaatcgcacaacctctctaaagtagagatttgctatatttgatgcatccatagtcttcttgcaacaaatgaaatgagccattttttgaaaatctatcaaccaccacaaaaatgggatccattccccgttgacttcttggtaatcccaccacaaagtccatacttacgtcttcccaaggagctgtaggaactggcagcggagtgtacaaacctgtattttgaacttttccttttgattcttgacatgtttgacaccttttaacaaatttgtaaatatccctcctcatttttggccaaaagaacttttgttcaatcatagcatatgttttatcttgcccaaaatgtcctcctaagcctccaccatgcatgtcttgaatgatcttttccttcgaagggcaatctggaatacagagttgattccttgaataggaagccatcatgcaacaaatactttcccggctgcccattagtacaatccttccaaattgaaccaaagaaagggtcacctagataaagatccttaaaggaatcgaaacccttgacagtaacagtcatactggtcaagaacaaacttcttcaactgagtgcatctggcactttgttacttgctctggacttgtgctttatcacaaatgtgaatcgttgtaagtaagaaacccaatgggcatgccttttgcttaacttttgctggctgttgagatgctttaaagcttcatgatctgtatgcaaaataaattcttgatgtatcaagtaatgctcccaatgcttaagaggctgaatgatggcataaaattctttatcataagtggtgtatttgcttctcgtgtcattcaatttttctctgtaaaaggacacaggtctgccttgcttgacttagaacagctccaatcccaattccagaagcatcacactctacttcaaagacctttttaaatctgacagcactagtaccggggctgagctgagcatctctttaatcttttgaaaactttcttctgcttgttctgaccattgaaacctccctttcttcatgcaatcagttataggagcaattatagtgctgaaattcttgatgaagcgtctataaaatgaggctagaccatgaaaactgcgcacttctcccactgtttttggcattggccagcttctaattgctttaaccttactgtcatcaacttttatcccttcagcactaactatatatcccagaaacagcaaagaatcagtgaaaaatctgcacttcttcatattggcatgaagcttctcttttgagaacttcaaatactcccttcaggtgttgcaaatgagactccttggatggctataaataagtatatcatcaaaatacactaccacaaactttccaatgaatggcttcaaaatttgattcatcaaacgcataaatgtgctaggtgcatttgacaaaccaaacagcatcacagtccattcataaagcccattgaaggctgttttccactcatcaccttctcgaatcctaatttggtgatagccacttttaagatcaattttagaaaatatttttgctccatgcaacatatccagcatatcatctagtcttgggatcgggtatcgatactttatcgttttccgatttatcgcctgactatcgatgcacattctccaggtaccatctttctttggagttaatagtgttggaactgcacatggactcattgattcacttctgtatcccttctgcagcaactcttccacttgtctttgaagttcttcatgttcttttggaggcattctataatgtggcaggtttggtaggctggcccctggtactagatcaatatggtgctggatacttctttttggaggcaatccacttggcagctttataggaaatacctcagaaaaattttccagcaatgcctttgcttcattagaaacatcttgctggtcttctaagacttcttttgccaacaacaaaaaggcgactctattaacttcaaactcatttaaaaagcattgaacaagtacataagattgtacttgttcggccttagacttaacaaactcttcttctttcattggggcaagtactaccttaagcccatttttgtagaaagcataaacattcttctccccatggtggacagttttattgtcaaattgacatggccttccaagtaacaaatggcaagcttccatttctactacatcacatagaaccttatctgaataatttttcccaattgagaagggaacaagacactgttgcactacttctacttcacctcctttcttaaacccagcaattcgatatggctttgaatgtggtagcacttccaagttgagcttcgtcaccatttctttagaaacaagattcttacaacttcccccatcaataataacattgcaaagcctcccatgtgaagaacatctggttttaaaaatattgtttctccgccaatcactttttgatgcttttggagctaacatggaacgtcttgccactaaatttggaagatcatggtcttcatatgtgacttcatcttctgtgaattccaacagccctccatcaccttgaggtttcatctctagctcctcattatcattattctccccttcatcttcattgattagtaaattgctggcctgttttcagcaatcagaagatttgtgaccctcttttccgcatttataacatattattctacgtcctgtaggctgcaatgagttgctactatttctgagaacatgatttctcattgttccacgcccttggccttggttgcgagcttggaagtgagtatttgatctagaattctgcaaatcatcggtcgttgccactgatttctacttgacatctccctgctgcctattatcctccaattgattaggcccccttgcacttctaatcgggtggttgttggatcatctttgttgattttcaactttcattgccaactgaacaacaccagatagcgtccaacaaggttgtagctccaccaaatttctaacatttggcctcaatcccatcaaataacgatgaatgacccgcacttctatttcagttagttgtactctagtccacattttgtaaaactcattagtatattctcgtacagaacgttggccttgctgaagtgcttggtattgctgaaaaagaatcccttcatagttcaatgaaaggaattgacttcagatttgttgctgcattttagtccagctctggattttctccttctcagattggactcttgtcatctgcacttgctgccaccaagaggaagcatagcccttcaattttatagccaccggcttcacccttttattttctggaagatttagaaacttgataaccctttcaacttcattcaaccaatctaagacctcctccgcttgctcctctccagtaaagtgtggaatatctaccttctgtttagattttgatcacgatctgcagtacgatgaaacatcggttgcctctccaaaggtaaaactccaccttcttcatctgaaaagtcccctacagtttgctggaagtcctccatagcaggctgatttctcacattctctcactggtaagttcgaaaattctgccttgtttggcctccaatggtggaatttggagcaccaaaaataccagcttgctccaatctggtacataattgattaagctgctgctgcaagtttgcaaactcttctctagttgggccacttcctgctggttgtgatgctgcagcattcaaatgatccccagacccagccattggttcaaacaataacagatctggaccaaaggctctgatgccaattgatgaaaactgaaaagctattagagctattatccaagtaaactaccaccaagttactccaaacactgttggtgccaagatttcttaaggaaaaaaatctaggaaaaaacccttcacaaaatcagaaaccaagaacttctggttaatcacttttatatattttttggatcatcaaaagttcttacaataagcaaattcttcccttttataatgacaaccctcaactactttctgaaggtttccaagacaattaatagctttaataacaaaaactgacctttggactttgttgaatataatgaatttatagtgtacaatctttttttttttttaatataggtcacatgtatggtagttaggactcctagccttgtatatatatattttctcaattgtaagtacacactacatgaatgagaatcaaggttttcttctctctctctcttaacatggtatcagagctaagacagaaaacctaattctttccagtttccccgtgtcatcaattccgggaaaccttcctgtgaccgtgttttattccgatcaccttccccaaaccccaaagctttccggtccgtcgaatcgtcgtcagaaaacattcaccgccggcgacttttccgacgaacttttccggaaacgtctttttccatcaccgcaaggagcgcctggaggagatctccaatttttcccaaagcaccggagccagaaaaccacccacgtgccggccacgcgcgtttttccggccaacgactgcatctcacgcgccgacgcgtgaggccgcgtgagccactttccggcgacgcgcttcctcctccagcctcgcctgatgccgactagccacccttcatacctgtttctgccatccgagccctgcacgtgcctcttttggggttcttttgcctccgccggccctccaaacagtttttccggcgtcctccgactattttttctcaaccccaatccctgcacgtgccttgggaagtgttcttctacctttccggtggtgccacggttgtttttcttttctatttggtctctcacacgggcgattcttcggtttttccttcttcagccgcatttgaagccgtattagggctctcttcgatccaaatatacttcattatccagataagtggatatggctactaaaacttccattttttcctctgtcatatctggatctcctatgattacttcgaagaaattggttggcagtgaaaattatcttttttggtctgcctctgttgaactttggtttatgggacaaggatatgaggatcacttggttacacaggaggcagatatccctgaggttgagcgcgtacagtggagaaagatagatgcccagttatgtagtgtattatggcaatcagttgatcccaagatccttcttcatcttcgggcctacaaaacttgttttaaattttggactcaggccaaaggattatacacgaatgatatccagcgtctttataaggtggcttttgctattgtccatatcagccaataggacttggatctatctacttatattgaccatattgcctctcttaaggaggagttcttgactgtgatgcctcttactcctgatgttggggctcaacaaacacagcttgataagttcttcatggtccttactcttattggcctccgtccggatcttgagcctgtccgcgatcaaattcttggtagttcatcagtttcgtccttggatgatgtgtttgctcgcctccttcgtatttcgtctactcggactttgccatttgatagcatttcagattcttttgtgttaatttctcacactacctctcgaggaggacgcagtggtaatcagggtagaggccaacgtcctcattgcacctattgcaataaacttggccacactcgcgatcgttgctatcagttacatggacgacctcctcgcactgcccatgtggcccaatcctctgattctcagctgccttagcctctaagctcctccgtatctcaggaatctcaggtttctgttgcctctgttgcccagcctggtaatgcttctgcctgccttacccacacatcttctcttggaccctggattctagattctggagtttctgatcacatatctggtaataaggatcttttctcctctattactactacctctgctttacctactgttaccttagctaatggttctcaaactgtagctaaaggtattggtttggcccttcctctgccttctctacctctcacttatgtcctttatactcctgaatgtccttttaatcttatttccatcagcaaaatcactcgtactcttaattgctttattaccttttctgataaatttgtgaccttacaggaccggagtacggggaagacgattggcataggacgtgagtctcaaggcctcgatcacctcacctcggattcatctcctgcagtttgcatttccactgatgctcttctcctcattcacagtcgtttgggccaccctagtctctccaagttccagaagatggtccctcgtttttccactttgtcgtcgctttcgtgtgagtcatgtcagcttgggaaacatactcgtgtctcgttcccaaagcgtttgaataatcgggcaaagtctccttttgagcttgtccacactgatgtttggggtccttgtcggactgcgtctactttaggatttcagtattttgtcactttcattgatgactattctcgatgtacttggttatttttaatgaaaaatcgagttgagttattctctattttccaaaaattttatgctgaaatccagagctagttcaatatttctattcgtgtgttacacagtgataatgccagggaatatttttcagccccatttacttcatttatgtctcatcatgggattcttcatcagtcttcttgtactcaatactccttaacaaaatggggtagctgaacgcaagaatcgacatcttgttgagatagctcgtactatcctcctccatagtaatgttccttttcgtttttggggggacgctgttcttaccgcttgttatttgattaatcgtatgccctcctctgttttacatgatcagattcctcatttccttctcttccctgaccaaccactttatttgcttcctcctcgtgtctttggttgtacttgctttgttcatattctcactcctagacaagacaagctttccgccaaagccatgaagtgcctcttcttgggatattccagacttcagaagggttatcgttgttattcccttgtgactcatcgatactttatttccgctgatgtcactttctttgaggacttaccattcttttccaccacttctgagtctcttcctgtttcttaagtcttgccccttcccattgtctccccatctgatgttgtgcctcctcgaccacttcaggtttatcatcgtcgccctcgtgtcgttgctcctctcccttttgctgaggcacctgctgactcacttcctatcccttcagcttctcctgccccgactctgccttctcctgatgatttacccattgctattcggaaaggtactcgctctactcgtaatcctcattctatttacaattttttgagttatcatcgattatctttaccctattcgtcttttgtttctgctatatcctctgtttctcttccaaagagcatccatgaagctctttcccatccaggctggcgacaggcaatggtggatgaaatggctgctctgcactctaatggcacttgggatcttgttgttttaccctctggtaaatctacagttggctgtcgttgggtctatgcagttaaggttggtcctgatggtcaggttgatcgccttaaggcccgcttagttgctaaaggctatactcaggtttatggttttgattatggtgacacattctcccctgttgccaagattgcttctgtccgcttgcttctctccatggctgctatgtgttcttggcctctttatcagttggatattaaaaatgccttccttcatggtgatcttgccgaggaagtttatatggagcaacctcctggttttgttgctcagggggagtctggtttagtgtgcaggttacgccgttctctatatggcttgaaacaatatccttgagtatggtttagccgttttagttctgttgttcaagagtttggcatgttttgcagtacagcagaccattcagttttctatcatcataactccttggggcagtgtatttatctggttgtttatgtggacgacatcgtcattacaggcagtgatcaggatggtattaagaaattaaagcaacatctttttactcactttcagaccaaagacttggggaaactcaagtatttattgggtattgagatagctcaatctagttccggtgtggtcctttcccaaaggaagtatgctttagacatcctggaagaaactggtatgttagactgtaaaccgatagacacacctatggatccgaatgtcaaacttgtactaggacagggggagcctttaggagaccctgggagatatcgacggctcgtaggtaaattgaactatctcaccattactcgtccagacatttcttttcctgtgagtgttgttagtcaattcttacagtcaccatgtgatagccattgggatgccgtaatccgcattcttcgatatatcaaatgtacaccaggccaaggtgtgttgtacgagaacagaggtcatactcaggttgttggttacacagatgcagattgggctggctcacccacagatagacgttcgacttcagggtactgtgtttttattggaggtaatctaatatcttggaagagtaagaaacaagatgtagtggccagatttagtgctgaagcttagtatcgagctatggctttggcaacatgtgaactcatatggttgagacatcttcttcgagagttgagatttggaaaggatgaacagatgaaactcatctgtgataaccaggccgcattacatattgcatccaatccagtctttcatgaaaggaccaaacatattgaagttgactgtcacttcattagagagaagatcgcattaggatgtgttgctacaagttttgttaattcaaaagatcaactagcagacatcttcactaaatctctcagaggtcctaggattaaatacatttgtaacaagcttggtgcatataatgtatatgcttcagcttgagggggagtgttgaatataatgaatttatagtgtacaatctttcctttttttttttttaatataggtcacatgtatggtagttaggactcctagacttgtatatatatatattttctcaattgtaagtagacactacatgaatgagaatcaaggttttcttctctctctctcttaacagacttctattttaatgacaaacttttcccctgcaaaccttttatgttttcaaactgccataacttgtctaatattgactacatcaatctttcttcttctgctcccgtaactgaaattgcaaccatgaaagtccaagcaccatctttcacctccaacagcgtcatcaacaccacatttaggtgcatctccaccctcaatttaacctttgacaaatctacaagttttaaagaactgtgatcaacctccgttacctgccctcaattcttcaaaatgaaacgtgattggtttttgttccatagatggaacgaaagacctcataattctatccaacacctcttaaattttccaagtaccagtatgttttctcttggcgaccatctccttagaagataagcaagtcctcctttcactactagcctatcttgctcttggatccactcaaccctttcaatggagtccacaaagaaataacctttatgtgctatgaatgggtttatggaaaccattcccctcacacctagctttcaagcaagagccttatcaacaacaacccaatctttaactcttctttgacttttgtagatcataattctagcccattttccaactgacattgaggctcctttccttagaccctcctcttcaacaacttttgcataggaccgatttccactgcaacaacctaaacccacctgtttctttgtcttcgcctcctttgaaacattaaaaggatgaaaacgaaactttgacattgaggaggttttccatcctttgtttttaacacccttaggaacaaacaaagttgtggcttttctatttgtgacaaattctgtgattttgatgaatctacctttgctattgaaacaaatctccaacaaacgtgtcctcgttttacccttgaacttccaaatgaaaccaaagaaaccttcatctccaaagccctcttgaactacttcgacaaccatgccaactcatccttttcgaaagctaccatgaaagtgcttccttgaaacctctttgtgattgagacccaagttcccttgtggatgccttcaaactttaccttgaaagcctttttttccacttcaaaccgctttgccattgcatgcatttggagtgtcactttctagggacttattcttatctttccaattaaaccgtctttttccaacaacaagatacagttttccatctctaataagacactagaccattagaaaagggatttaatgtaatgtcctttagctttttacctgaaggctgttctccattaaaaatttgattattggtctctctctctctctctctctatatatatatatatatatatattcatcaaaacaaatgaagaggagccaatctccaaagcttaattcacctcttatctacatcctgaaacttccaatctaatggcaggtctatgatagggttcaggcccaaaaattgcaagaaacatatcccacaactatctagtcctactaaagagaattagaatgtgattgactgattcttcatagtcttgtagattttcatgtttggcataaaagttgtaatggagaatgatgaatgtttatgttcacgcatatatttaataaatataaagatgcagagatttcagcaaatgtcctcttgataaatcaagtaaaaattatgtctaaaatagttttctgacaattatcatcttattgtaatgaataatcttgcaggggcttccctgtgtggctacgtgatatccctggta

SEQ ID NO: 11506 - DNA, 5748 bp, Vitis vinifera
  Intron number 1 from transcript GSVIVT01017067001 (locus G SVIVG01017067001) derived from phytozome v7.0 (chr-ID chr9 ; pos 3926182 to 3931929 reverse strand)
gaagaaaggcgattttgaattgaccacgaaggtatgtaatccgtttgcgtaacgttaaacaggagtatgcgtttcttttgaattttaaattcaaatctcggtatagtggctctctccctagcaaatagaaaaaattaaattacttcagaaaccgtcaaaagactccaacaactcttcctcaaatcactcaactttaaatttctctctctctctctctctctctctctatatatatatatatatatatatacataacaggaatatgcgtttggtttcaatcttttcaattcaaatctcggtatagcggctctctccctagcaaatagaaaaaattaattacttcagaaatcgccaaaagacgccaacaactcttcctcaatcttttcaattcaaatctcggtattgcggctttctccctagcaaatagataaaattaattacctcaggaattgtcgaaagactccaacaactcttcctcaaatcactcaactttaaaactttaaattacctcaggaatctctctctctctctctctctatatatatatatatatataatatttgatattgtgtcaatagaatctgatactctctctctctctctttatatataatatttgatattgtgtcaatagaatctaatactcatttctttttttctctttttcctttttttttctttttctttttttatttttatttttttttatctattgctcctccctcctgaaacccatttttattttcctaaaggtggttgtttggataatggtcaattattgatttatactccacccaaaactccttactgcttgtcaagacttcagtagttgtgtttattctcccttcatagcagtcagtggtcaagaatggcttgctgatcaggttgtaatcatgcaacttatgtagtgattgaaagtgaaccctttactcttcttagacttattagcaaatccccacttagatttcttaaacaaataattgatgttgccttaaaatttttagcacttctttggatgattctcgtgctcctcccttgtttgattgtagtccaatataccattaaagaaacaccaacgaagagttgcaagaccaaaggacattactcaaaattcatgatgcactgcttgaaaggtcgttttagatgtatcttcttcgtacacttgaatctgatcgtacttggaattaatatttaattttgaaaagaacacaaccccgtgcaattcagccaatagctcatttatactaggaatgaaaaatacatattttattgtgacttgattaagggtttgataatctacccacagcatattagacttgcctttgggagctccattaaaggcagcaagggtctggatgtggtggagagatttcaaagaaggttttttatgtgttgaagaggtagtacctctcaaaaggagggagacttgctttgatcaaaggtaagttgtctagtctaccaatttatttcatgtttctgttcttcatcccgaaaaggtgatcttaagattggagctgattcagattttcctcttggataaggtcgtacttgtgaaaaacccgtctgataaattggtctattggctactcaaaaagtatggaggtctcaatattagaaatctctctgctcttaacatgactctccttggcaagtggaattggagatttacaactgagagtcctatggaaacacgttatattaaaaaagtttagggaagaataagggggatggggttgagtgatggctatgtctcacttcataattgacaatgaaagacggtgtaaattttggaaagatagatgttgtggagacttatctttggaaggggtcccgacattattttctatagcctaccaaaagttattcatagatagtagaggtgtgggagcaagttagggaggatggtcgatagcgtccttgcttcacaagatagttccatgattgggagcttgaaggagtaacgacaattttatagagattgcatacaagctgagatgaggatgatagagtgggttggaaggaaactaagcgtggcaaggtctctattaaatcccgctactcttccttagtttggggaagaagagagccttttcccacaagtatagtttgacattcctaggtagctttaaagttgagattctttgcatgcgaagctacatgtttaatgattgatcggctcaaaaggaggggatggattatgctgattcactgaatagatgctttctatacaaaaagatgaggaagaatcaattgatcatttgctccttaattgctctaaaggaagtaacttgtggtagtcaattttctctctatttggtgtgacttgggtaatgtactctacaataagagaaactcttttgagttagcatggatcattcatgggaaagtaataaaaaaagctttagaggccacaagccacttatatgtgtttattttgaatgttgtgaaaagaaagagacagaggtcatttgaagctaatgaaaagtggatcaaataattaaattttcttttatgaatacttttttgaaataggttagagcgtacataggtaatcatttattgacaatgatagactttgttaattgacttatctctaagtaaagagagggagattgatctttttgtttttctctgttcttttcgcttgcctatttggtgcctcttgtatacattgtatgtactttggtgctcatttgcttaggcactaaatgtccatttttgggtcatcaaaaaagaatattacacagttagagcacaagtgtctgtttttcttttcacatttccttcccgattgtgccttacttggtaaaatctatttggtcaggttgaagccctgtaatgtcccttgttaacatccttgcacgacatggtaatcaatgaaaaacactacctattggcccaagatttgaaggcttcaggcacctaatatagtatcacagcctcccgaagtgagcaagaaaaattctgccttaatgggagtgcctcggattatggaagtggcccagagtgatgttcctccaactaaacaatctccattcaccaccattagttcaaaattagatcctgattgaattataatacttatccttttttcctcttttggttttaaaaagatgtgtggatccattgtcaataagcatattgatgagctgacaatataataatctacccacccgcatggtttgagatctctagctactgctcctttgatcctgctatctccatatcacaatttttgtctctgattgtctctgacatcttctaggatgccttgtgcatgtctttccttagtttttggcgcctctttttgatatatttatacttctttatgtataaaaaaaatgtctttccttattctccatgactgtcaagcatttagtgacaaaagatggcttcaacatcctaacaacttgatcagctgtcactttgtttatttcaggcttattcatccttatttaagaaattgtttatcctcttggccaaatcaatggcaggattcatactggtaggttggaacaactatgccccaactcttatcttgtcttttagccacaagaaagcaactaatcaaatataactttatgaaccctttagttcaattagtaagcctctaaaattgattttggaactcttgcatagatgttgctttgcatactttgcaagagcccaagcaaaaaattccaaaacttgccgtgaaagctgctgccaactcatcccatttcatacaagatcagatttgttcacattgaaaccaatatgaagtttttcctttcatatgaaatgaagcaatgaagcctgcttgtatcgctaacccaatgggtcacctccctcaaatgtaggaaaccttaaagcttgagtttatatgggtctgcacactcaataggcaagtagtagtttatgcagaatcataaaaatattttcaatgttatatgattggagatcaaagaagaaaaaaagggcaattgcacctttaagaagctagatagctactaaattttcagtaaatacaggcttatagactcatgaaattctttttcctgataagactaagactatatcctagggggagtatgacttactttttcctattaaattagaaacttagacaaataaaaatctgactaaaaataaactaccaaagtcgattctaattaaaaaaaaattaacaataaaaaaagtctagctaaaaaccatggcatgttaaaatcacttgatgagtatttttctcttttctttcataagacttcaaagggtgctttcaggttgcttcctattaatgatccattctcttgctagaacttctctaggtcacaattcgtattcttggaaattttatcatattttagatcaagagcagttagcattacagtggagtcctgctattgtactcgtcagtcaagctttggtgttaggtggacagtggactcctaaaattgtttaatggcttcatgcatttttgctccttgagttccttctctgccatctctagagctgcctaagaaacagagcagatgctgactctctttgaggagagtcttgctttcacagaaaatacaaagaaaattgggtaaaaactactcttccctttatttatcaacttcttaaataaacatacgctaacagactcaaatcactctttatcagcttattcctactctaaattatgacctatatcttcagtactacacagacctacaatgacttctatgttgcatttggatttcagaagaaaaaaaagaatctcaaattcttattaatcatgagtgagaattatttaagagctaacgtattttttgtttcttttccctttgcttttttttcttttttaatcagaacaaaaccagaattattaaggtcaagctatttttgtttcttttccctttgctttttctttccttccctttttacttatccttgttcttctgtgatctaacagaggctttcttgattttcaatgatttttgtgataatgaagggtattaattcattgtacctggtgattccaaatttaggtagttgcgttattcaagcagcttatgggtcttgtttgtaagattttgatcttgacagatgttatgatggagaaagcaataatttaagtgaaagtttggaactctagaatttaagagttgttttcgtatggaagttgggaaatgagaatgtgataggtatcattctgttgattcataggctatccattgtgtgttgatagtgctagctggcctgtgggtgaagtcttttttgcactgaaggttttaagtagcctgttggtgaactctatgaattatactggagatagctttttgaccccaatatggaaatcccattttgtaacctgtcagtgcattagaacaaaaaaattttaaaaaaaatgaaattcaagaaatggatattaagttggaaattaggtatcagttttaaatgctggtatgaactaaccctccaacccaagtgactcctgttttcttacccacagccagaggcagggaaagcaaggtatttgagtaatgggattcatgtgtttaaacatgttttgttcttttgttagagtttacagtcggcacttttttttttttcgacttatttgtcatggaatgagaaagatcataatttttgtgtttctttgttatcacatcaaatggcccttttgtttggatattaaattcactcttttttcttcccttgtgttttgctctttccttctttttctcagttcagtggtaaatccattggaattgttgggttggg

SEQ ID NO: 11507 - DNA, 12211 bp, Vitis vinifera
  Intron number 5 from transcript GSVIVT01010214001 (locus G SVIVG01010214001) derived from phytozome v7.0 (chr-ID chr1 ; pos 17669310 to 17681520 reverse strand)
agcttgctacatataaggagcttcttcgttcccaagtaagtgctcaaaattttcttttcaacaaaatgatcttcccaattaagttcattactgcatttcaaaaattttccattgttattagattttggggtatactaattctttatgcttttcgttttatgaggaatgagaacacatttcaactaaagacaaaagggaacaacataaactcccaatcgggaagagagacttccttatgagaaaaaaagagctaagagaaaacttataatccttgcattcagactctcataaggaaacttgttcccttctaaaaaacttgttatattggctccttttagatttgaaaatatgtggttacttcatcttgattttaaggactagaaaattttaggttgggaagtttaggatctatttgagaactattttcttttttgataggtaaatgagagaatatattaaagaaaaaagcgcattaaagtacacaacaaagtacacaacacatgctaaaagtctagcaagagaaagggaaataccaaccacattgaagtcaaccaaaccataacatcctaaaataaatggactccctaattggaaagactagtgctaaaaacacaacctacacccaaacaacccctaaggcctaggaacaaagaacgtgccaaagacctcctcaagcctaaaacctgcaacctagcaggaattgaagaaagtgacatcaacaagaagaagcttgtaccccgttgctcctcctccttcctttggttgagaggggaaagcaattgtaattgtccaagcatttgagttttcaaatctccctctctaaatgagtagcctaaaacgcatgaggttatattgagtatctatgggacacatcccaatggatgggacgccaacaacatagttcgatggtcacatcgttgcccctagaagccattgcacacattctcttggttttttctatacacacgtgcttggtagtgggtgatgagaccaaaattcgtttttgggaagatttttggtgggggaaccaatcgttatgcttacaattcccaagactttcagagtcaccataactaaaaaactttccatttcagccattttgggtaatgatacttcttcatcttgggatcttatcttttgccgcaatttgacagatgtggagattgtggatcttgaaagactaatgtctttactttccaatgttcatttgactccttctactccagatgcgaaagcttgggttccgtcctcttcaggaggtttctcagttaaatcttttcctttagtcttatccagtttctcatattctactcttttctacctaactcattttttgtggaaatcaagagccccctattaggttatggctttcgcttggttagtggcacataagaagacaaataccaatgacatgctacagttgagaagatttttcaaagcccttagccctgattagtgcattctttgtaggaggagcagtgaggcagttgatcatctcttcttatattgtccgatcactttggcattgtggcataggatctgctcacaggtgggatggcgtgggttcagccagatagtattcgtgatatgatggtgatctctttcaagtgttttggaaactctattagaggtaagactctttggaggatcacgtctctctttgttgtggattgtgtggagagagaggaatgttaggatctttgaggacacttcgaagacgccagacatgatgtgagatgcgcttcatttgcttgtttctttttgggcttactatacatacatttttaaactctatcctttgagtgtaattcaacttagttggttgttgatttgcaccccttaggatagggtctataggaccaagagttgtgacacttgtataggctcttgtttgttttgtttatccccttgtataaaggagatttacttagctctttttgatcaagtctgtatttcatgaggaggatttctcatcattttcaggttttctattcttatttaatatatttgtccatttttgataataaaaaaaaaacaaataactgaaaacgatttcttttttcaccctgcaaacttttcttgactccattttcctaaaaaggaaatttatttccttctcaaaccctaccattgggagtcccaaaaagttgttgaacgtgaaaaacttttcaaggaggctaacaaagctaatttcccctccttcgaaaccctacaagtctctagagctttactagcctcgaactcttctaccctaacctccaaatccttacccaaggaatcctttgttgcactccttgtgagatccaccaacctcccatcttgaggcaacaaatttatcgactggatccccgaaccttacgaccccaaggaaggccccactgctgcaacatcacatgttgtgccattgggagtcccaccaacctctatcttgacatattgtcgagactttcattagacctaacaaccgtcacaccctccaagtctttactgggttagccttctcttaaaaagtcccttttatcgcacgaaggatggtatgctccctcggctttgtgagaaagagctcatggggaaactaaacccatatccttgttgggaaccaaacccccaagcccatcacaatcacccttacctttaagagaacaccccttgatctgctttctttgttgactaaggttgttagccaaatccatagttttaaaaggcgagcttaaagcgtgcctatgctcaaggcgcaaccactccctagctatagcgctttgcttgccaagatgtgcaccttgttgaagaggtgcgccttatctactttacttttcatttttaaacacttttattattaaaatttctaattgcatattaaaatttatacaattttattacttttttttgttgaatgcttgttttaaatgtttgaaatcttaaattttttattgattggattggattttggatcataatttataaaattgatatgcatactaggttaggtttcacttcactcaagtgcacgctttgtggtgtaccttgtgcctaagctacaagatactttcgtgccttaggtgagccttgtatcttttaaaactatggccaaatccaacaaaacaccccgctctttgagcaaagaagaagaaccagatgaagtagaaggttttctcctcgtccctaacacaaagagatggaaacttacccttacaaccaactgcttccaccaaaagagtggcatctgtaaaagatgaccctacctcaaggctttgagccttcatcaagctacatgggtctggaaggagaccttggggaaccctaacctcattggttgatgaagtgggcctcttaaaagcactactaggaccactaccacccaagcccaagatgggttgcttttgacccaaagaactagatcaaggcccagtgctcatcgggcctcccacctcctggcctaaagagacaagagggcttgagactttgcctactaacccatcataggccaaaataggaggcttaaaggcctctttttacctcaccgccactaacttactactatagggactagaccttgggcccaccatgacttggtcaacatgtaaaggtattgagtgcattgtttgacttgcacgcttccctatttctgctcccacgtatctagccgtgcgtggcctctcctcgatctcttccttaacctttaaccccttgcaaattttcttcgtagagaccaatgagaagaaccatggtggagtctcccaccataactgaatggcacaagtcgctgaccctaccacaataagaagaatcccatatgccttcctaccattggagctaactaaaattctagcccattgtaaatgacatttttttttctcgttcttgttgtgtccacatccataaccacaaaacccccataagtatcccccactcgtttgaagaaatcctttccctacaagtgcataggcaacccaatcactcttacccaaattttattagcagaacccttccttgaaacaacccacctcttgaaagcagttttttttcaacaaaaaatagttttttgacttggaaaaaaggtggaataaattttttatcaaaaaaagttttttgaaaatttgttatagaaatgttagaataattttatgatgttttcatgtgtatttttgtgaagcattctaaaagcaattaaaattatggagaatattttgaaaacgttttcattatacatagtgcatagtacctttacaaagagaataaactcctaaatagaattttattccttagaacaattggaaactattttaaaaatctgttctaaaaagttgttttggaaaatgttgctaaacaaatcttttttttaataagaaacaacaatgcattatattgaataatatcgttgtggaaggaaaaaactcaatattccactatttttataatgatttcattcccctctatatatagatgataatactcatctattttagggatatttacaacttacctaaaaaaaaatcaaaactacctaaaacagaaagctataaaaacggaaatttatacctacggatttggtaatagactaccaaatcccctaaaatcatggggtaagaaaagatgatctgttagctatagatctcctcaatcttagcccctaacattgctgacatatcatcaaattaagtcttcctataattctacactccccctcaaactgggcggtaaataattattaaccctagcttggaacttagatcatcaaacacctttctttgtagagccttggtaagaatgtcaactgtttgaaggcatttaggcacgtacaacatcttgattattccttcctctatcttctcctttatgaaaggttgatcaatttccacatgttttgttctatcatgatttactggattttttgcaatgctgattgctgattgattatcacaaaacattttcataggttcttcatctgaaatctttaattcctttagcaccctttttaaccatattccctcacaaatgtcgtgtgccattgcccggaattcaacttctgcactgctccttgacaccactgattgcttcttacttctccatgtgaccagattaccccacacatatgtgcagtaccctaaagttgatattcggtcttgtactgatcttacccaatttgcatcgctaaacacttcaatatctcttctttggttcttctaaaaaaataatcctttacctggtgttagtttcaggtatctcaagattctatacacagcctccatgtgttcttcatttggattattcatgaattgacttaccatgctgacagaaaaaccaatatctggtcgtgtgtgagataggtatattagtttacccactaacctttggtatctccctttatccacgggtgcacaattttccttagctcctagtttggttgttggatccataggagtatctgctggcttacacccaaacattccaatcttttttaagagatctaggacatattttctttgtgagacagagattccctttcttgaccttgcaatctccatacctaggaagtatttgaaattctcaaggtccttgatctcaaattctgcagttagaaaacttttgatggtgcggatttcttcttcataatctcccgttagaattatgtcatgcacatatacaatgaggacaacaagctttcctgtaggagagtgtttaacaaatagagtatggtctgtttgacattgggagtagccatgtttcttaactacctttgtgaatctttcaaaccaggctcttggagattgcttgagcccatatagagatctcctaagtttacaaactttgttgcgtgtagtttatgtctcaaatcttggaggaatttccatgtaaacttctttagctaggtccccatttaggaatgcgttcatgacatctagttagtggagaggatattcaaggtttgcagccaaagatagtagaacccgaattgtgtttaacttggctacaggggcaaatgtctccttatagtcgattccgtatgattgggtgaatccctttgcaaccagtcgtgccttgaatcgattaacactcccatcttcattatatttgactgtgaagatccatttgcagcctactaggcgttttccgattggtaattttgagatttcccaggttccatttttttcaagtgcatgaatttcttcatacattgctgatttccactcaggtgagccgagagcttcttgtatattattaggaacctggatgttgtcgaggttggcaacaaatgttttgaacttcggtgacagtccttcatatgacacaaatgtgtatatagggtgttttgtgcatgatcttacaccttttctcatagcaataggaaagtcactatcatcattagttttgggattatagttacctgatggatcttcacttgatctagaacttgggtcagactcttgggtttgctcaagagatgcttgttgttccatctccttttggttctttctccttcttgagtaggtaatcaactcatcattctttgttgattgaatagtgtccagattttgaggaggtggattagtaggcggattgttggtttgatcttgagaaggagattctaggaagtaaggagactcaaggaaaagattttgaggaggaatggattcatgaagtgatgggcagggttggtcagagaattaggagagaaatgagacgattcttcaatatcccaaagctggtattcctggataaaattagtctccccctgaatatcagatttggagaaataaggttgttgctcaaagaaggtgacatccatggagtgataaaactgtttagtgaccggtgaatagcacttatatcctttttgagttggagagtacccaaggaaaatacatttaagagctctaggatcaagtttgtccctgtgttgttgatggacatggacaaaagctgagcacccaaaaactttgaatgggattgtggagatgagacgagtattgggaaaggactgaagaagaatttgacagggagtttggaagtcgagaatacgagatggcatcctatttatgagataggtggcaatgagggtggcttcacctcagagaaattttggtacatgggtagagaacattagggtgcgagcaacatcaagaagatgccggttttttctttcggcaataccattttgctgaggagtgttgacataggaactttggtgaactataccatgactcaagagataatcattaagaatggagttgaaatactctttggcattgtcagttttcagaatttggatttttacttggaattgtgtttagatcatggtgttgaaggttttgaaaatctggtttgcctctgatttttctttcatgaggaataaccatgtgagtctagtgtgatcatcaataaatgaaatgagccagcgagaaccagtaacattttttatcctagaaggaccccatacatcactatgaatcatggaaaaaggttgagatgctttgtaggattggttaggataagaattacgaatatgtttagaaaattgacagatctcacattgaaaatcatttggatttttattatggaataatgaaggaaataacttctcaagatacaagaaatttggatgacctaacctatagtgccacaacataattgcactatcattattaaactgactcacagacaaagaaataggactactggacattgaacaatcagaatgatgagttgatccttgaggaggatcattaacctctagaagatagagccccaaacacatcttagcactgccaatcgtcttcctcgagtccaacacttgaaattcacacagatttgagccaaatttagtaacacagttgagatcccgagtgagtttactaatggacagtaaattgcaatttaattttggcacaaggagaactgaatcaagagtgatgttctttgaaactctaacagaacctgtaccaaccatctttgagagtgaaccattggctattctcacagttaaatttttatagcatggattgtaagtggaaaaaaacttctcatctccagtcatatgatcagatgctcttgagtctataatccatggatttagcttctcctttttaacatttagagcactaaaaaaattacctttttgtgccaaggaaccagtaccaaccacagtgggggcaagtgcaggcaaggattggctaaacaatttctgtaagacttctatctgttcctcactgaagggagtgggttcgggtgatggtttttcatccatggagacgaggttgccctgtccttctttgtcattggcaaatcgggaaggcttccaatctgcaggtttgccgtgaatcttccagcaggtgtccttagtgtgaccaggacatcagcaatgatcacaccatggtcaccctttctttggtctgtgatcattgttgttggatggatttcctcaaactgcaggggttgagctctcaggatttatcacagaatcttgagagcccatcatgatcttctttcgactttcctctctccgaacttctgataatgcttcccggatatttagtagtggtttggatcctaagattcttccttgtacttcatcgagattcttatttaatccaataagaaatttgtatattcttttccgttcaataatctgtctatacctgattccatcgctcggacaactccaattgtgctcctcgaacaagtctagttgctgctagtagtgattaagtgtgttgaagtattgagtcaccgttaactctccttggcggaagtcatggagaacactctccgcctcgaacaattccgacgtattctcattgttagaatacgtttccttggcagcgtcccaaatctcctttgctattccatagagaagaaaattttctccaatgtcatttgtcatggaattaatgagccatgacatgaccatattatttttagcattccagactttgaacttttcatttgtcttgttcggtttggtagcaactccattgagataatcgtctttaccctttccgcatgtgaacatcattacggaatgggaccattggagatagttgttcccattcagtttgtgtcctgtaatgggcatgaggttactatctgcactattgttgctggaagccatggcttcctgattggaggtgatttgggaaacggtagctgttgaatcacgtttgccgtatttggtcatatgagggaattagggttcaaagaaagctctgataccatatcgttgtggaaggaaaaaactcaacattccactatttttataatgattacattcccctctatatatagatgataatactcatctattttagggatatttacaacttacctaaaaaaaaaatcaaaactacctaaaacagaaagttataaaaacggaaacttatatctacgaatttggtaacagactaccaaatcccctaaaatcatgggataagaaaagatgatctgttagttgtagatctcctcaatcttagcccctaacattgctgacagatcatcaaattaaatcttcctataattctacaaataagaattaagaagtataatagaaggatgaagaatcctcccataaatgaaagctaaacatattgaataccaaaagcaaaaagccatatggtaattacaaaaagcaacctcttcttactaatccatgtccttggagctacacactgctaaccaatctagttgaaccacattaaggtgaatgcccttaaaagttgtggtgcaagatgcccaaaaagaagtaaggaagtgaatggtatcccatggaacctctaaattccttgccttgtcctaaaaaattctaacatttctttccttccacacaactcaaattaaagcaatacaagcggttttccataatactaggcttttcttggatcctcccaatctcttataattaatggtcatcatgtcacaaatgctttttagggtaacctaattcatcttggctattcgtaataatctgtgtcatagcctcatcatcaaaggataatataagaaaaaatgatttgttgattatctattcttcatacacaacttatagatatcatggctgagagctttatagagcatttttaactgtaacacgtcattagtatttaccttcttgtatgccactaaccaagcaaaggacttgatcttaaaagggacttgagattttcaaatgaaattagcaaggaaagcaggagatgaatcagaaaggtgggacaagactaaaaagaaagacttgactgtaaataaccctgaagaagatagaaaccaggctttcgcatctggaacagggggttaagtgcaaacaagcaagagaagacatgaggatttctaattcttccatcttagaatcgaaaaggttacaatataaattaaagttcctggagaagggataagtaaaactaagaattgaagagatgtaaagatttttaactatgactattctgaatagtcttggaaattgggaacccaaaggttggttctcccaccacaggtcttcctaaaaacaaatgctctcctcatctcccaccacaaatcgaaagtacatggtaaaatcctgaaaaacttatgcaatagctttccaaggacaataatgtgaccaccagactatagtgttgacatcccaaccattagtatatgtccccatatatgcttagaatgacttgatgtcatagagcataactctccctaggaaacctccacaaccatttccctaaaagagcatgatttcttagagaaatctttaaactttatgcaaatagaagggactacaagaaatttaaattatggaataaggtcacttttagggacatcaaggaaaagaaagaagacatctttagcaacattgtcatattagattcttgtcaaggggaggttgtcaatgggagggtacattgttactaatggtttggagggaaaggaataagataattttttaggataaatgaaggactttagaatctattagggatttaatgcatttttattcatccttttgagcttcttcctctttagcttttgagggttcttcattaaacatttatagcggtttgaatatggtttataggttaaagatcgtaggtttgataacaatgagtaggaaaggaatctgactcctaaatttttaacattgagagccataaagagattgcaattttaagtattttcataggataaccaatggtaggcgaaacaagaagttcatgaaatccttggtgtcagaagagggggtaactctaagcaccattgaaaatattctagaggaatagtgcatttttttttcttttttctttttttatgagatatactccaaacccttaggtgattcttagaggattgaatgattggattggtcccccatatcttgagagagtgttgcacggctagaccatcccttttttgaagatttatgccttcctgttttccattggaataaggaaaaggcccttgggcctaatggcttcaccattgcagtgtattaggagtgttaggatgtgatataaaggaccttatgagggtgctattagtattagaattccacaataatgggataataaatcgaagtaccaataccacatttattgttcttatgccaaaacaagaatcaaaccaacaaaatctcatattccaaacctattagcctggttacatgtttgtataaaattatagctaaggtcttatcaaggtgcttacatagagttcttcatgaaaccatctatatatccaagggagcctttgttgaggggagaccaaatttggatgctattttgattgctaatgaagtggtggatgagaaaagatgtttaggggaggaagaggtaatcttcaaaatactttttgaaaaggcctatgaccatgtgtctttattggggatttttggaccatgtactagagttaaaagggttcagcacaaaatagagatcttggatgaggggttgcttgtctttgacaagttttgcaatcctagtaaatggaaatgccaaaggttgggttgaggcaatcctatgcagatatatatcactggaagcttaatatccttggccctatctttattagtcaaggaagttggaacttgcattctctccacaattctataaacaccactgctaggaagtttttagttgttaatcagctcacatttaaccagaacggaacctagttctcgtcctcctcttgtgtgttttaatttattaatctgagatatgtgatatattgcaggtggagc

SEQ ID NO: 11508 - DNA, 4763 bp, Vitis vinifera
  Intron number 1 from transcript GSVIVT01030911001 (locus G SVIVG01030911001) derived from phytozome v7.0 (chr-ID chr1 4; pos 18876291 to 18881053 reverse strand)
ggagatcctctactctgaaccatttcaggagcagtgtaattcagtgatggctgaaggggtagtattgaatcctcaacgtcatattcagcataatggaaggctggcacattagctaaatcatccgatgcctgatatgatgaaattgcaaagccaaatccactgagtttccaagctccacttgaaatagtgagcacagtcttaggtgatatagcccgatgaataagacgagcatggttatgaagaaattccaaggttgctgaaacctggggcagaccctactccacctccaacagtcccatttccatctccttaagctccttaggcaccttcccaatcccctcaaaactccccagcgcattcgccaccgacgcaaacaacggctcaaaaacatgcaaactcttttaccctgtaaggcttccttcgaatgatgaggtatcttttcttgtattacatggcaacagtctccaacagagcaccaacccaataacgagaatatgttttctgtaactccttgctcccatgggcagagatgagaaaaataatgcattccatgaaccggtataggaaacagaggaagatggaaaaaaacaaagcacaaaagaaaacgaagaaataaaagaaacttcaaaggcttcacttccagaatgatcagtgagccctctgattaggtgagaaaaaccacatcaaatgcaaccatggatataatcctttggtatttcacaataagggcaaagcaagctaagatttacaataaatgggaaatctggatcatgttttgacaagcaatcaggtgacctccattatccaccccaaacaaatcaacaaacattcaacaacatatatagaggaatgataagtagtcaaattaaacgataagcttgtagcatgcatacctgagggtgcctttctccagtaaggttctgttcagcttcaaacgctccaaatcctcctccaaaaccaacgaaactaatgaaacaatagatcctcctctactctccaaacacacaactccctctctctttttcacctccccctggtattcactcccccagcccgctaaactatgctccctcccctcctgtttctctcttctcccacaagccaccacccgctccactatgcatcactcagggaagatgtcatcctcaaccactgccactccttgccgcacatccatgcagttggtttttctccggaaagaggtctcccccacttaaaaaaaaagggaaaaaaactcactctcccgagtggtcccaaaacaaaagaaaaactatatgtttttttttttaagtgtctacacctaatttattaattatgcatttttattattattattaattctttatcttgcattgtttatggatataaaatttgggtttgtagatatattacatttggtggttaatttgggatctttggattaggtcaattgcatattgtttatcatatttggacttggacctcttgcttattggctagttatttaagcttattggattgagtttgagatattattttttttggtcttgtatattattaatatagacttgttaattgatatgaattttgaacccatttgttgtgggtgaaatttgttggattggttgataattggtaagagttttgcctatttgaattatttaatttgacatgaatcaattgtggcatattttggatgttattttaggtttgcatattaaatttggcttgattttggttgtagattttgagtttgtatattaaatcaggcttggattgtggaatattgaatttaggcctaattaaatttattttgatttattatatttgagcttgactaattgagtttttatttttttttgttatcaatttggaaattttggactagggcctatgacatgtgggatatttctattgggttatatttgctaattttgacccattttaattggtgaaatttattgtactaatttgaagtttgaatttggcattgaatatttgctttaaactttgtacattttttttatatttacatttgagtttttttgttttgcatgacctcactattgggattttgttgattgagtgaatttatgacacatggaaaattgaatttcataaagggaaaggaggcttaggaaggctgtaaatggggtggtgaatttgttgtaagcttgttggggtatacgttttatttcccattttcatttggttttatttttattggtttctgtaagtattcatttgtttatatttattaagtgtgtacaaaattgaatatcgaataaaccataaattttatttgaataaaaggacaattcagtaaatatgttttaataaaataataatcctaaaatatacctcttaataaactaaagtgatttttaataaaaattgagaaaaatgtttctaataaaaattcaaaaaattgtttttagtaacaactattcaaaaatttatttgtttaataaaaattgttcgaaatttttaaaaaaaataaaattgcccaaaaagttaatttttaattaaattgtccaagaaagtgtttttatttttattttttttaactgaaactacctttcgatatgatggattgaaggtaatttttgtaaatggatgttttaaatatcttttcaatgagagtaggaagagtcttttttttcaaattaaagttgtagaaatcattttcttaatacaattggttgaaaatggtttcgtaaacaaagtttgtaaagaaattaattcctttgtaaataaaattaaattgaaatagttgtaaaataatcttttttatttttaaattgaaattttataataaattcttttgataaaatgagtgtgcatagctttcttgaaaatcgaatcaaattacttattgaaaataaattaactcttttcgtaaataaataaattgaaattattaattcaaatttgtttttaataaacttctttaaaatttcttggaaaactaatttttgaaatatttttttatttagtttaatgaattgatttgtataattttcatgtcatttaccttatatattcttgtaatttgattttatcctcattttcttgtatattaatttgtgtccttaattttgatattcattattaattaattaattgttatagttccctttattcatttagtaaagacgtatgtatacaagcttagagggatgttacgacttagtaccgtacattcccaataggtaacctgatccctaaatatagactcaatttttgcaggcacatattttccaaataaggagtcatataaaatttctttcttattttgttttccattttaaaaacaaagtaaaataagtggcgatacttgacttgattgtgattttaatttttttttaaatgtttaatattttaaattaaagaagataaaaatttggttgtggtttcgatatacttacaattttccctaactctattttttttaaggaccttttttcttgtatttacaatttttccctagctctacattttttctatgggcctttttattatggtttttgaaaatatattatttgtccgtttatgcactttgaaaggagtttcgaacattattcatatttaataaataaactattgatgtcactatatatatcaccactacttatgtcactagatatactatcatccttcaattcaaatatacatttttatttatttatttacttttttttttctatacatacactatgaaatatttcataaatcaaaagataaattctataaatataatttaaagaataaaataaacacaataattgaatctaaaatgaactttatattgaaaataatacctcaatacagaaagtttgaatctagatacaaacttattgacaacaaaaagtttttattacaaaggaaagatttttttaaaggagagatattacaaaaaacctaagaatcattaatcgaataggcctctatctcgctttgatcgtctttaccttgagatgaacttcatgactctatttatatagaattttgacgagcttgatactcgttgaaatctatggacttagaaatttattgaaatctataaaattatttgagtagactacttgtttttgcaaatggttgatggagattctctggtatcaagaatttttatggcatgcttcacatatggtttttcacacatttcacttttttaagagattattctcgagacattttgaaacacatagtggaggaaacactttttttttctcattttttgtgactaaataataattgatactatttgcattactttctttccattcaaatattttgttatcaaaatattcttattataccatttatttccattcatatttctcagttaaaaatagaaaaccatttcgaaatcataggaccaacaaactcttcatcttgtcaaagagtgaaatttattcagactaatgaaaattcttgctaagcttaaaaacaattttattttattttttatttaaaaaacttactctaaaaattaacataatttaatataaattgtattaaaaataactaaaacggatttgggttagggagccctacccaaacggagcaaaccaagcccaacccactgcccaagcccatgataatggagttgggttgggcgagtggggtaaaaataggatttaaaaacagaaaaaaaataaaaaataaaaaaaaaaataaaaataaaaacaaataacataagaaagacagggttccagaaacatcaccatatcaaaagaatcaacggctaaaagaaaaacacgtacattgcagtggtaaga

SEQ ID NO: 11509 - DNA, 5817 bp, Vitis vinifera
  Intron number 14 from transcript GSVIVT01034228001 (locus GSVIVG01034228001) derived from phytozome v7.0 (chr-ID chr 9; pos 13084954 to 13090770)
tactttgcatcaattcttggcaggtactaatttaacttgtcgaattatttttgaagatttaaattgtcttgacactgaaattgtaatcaagattgcatagcttaaaaaattattgataaggataataaacaagtcaaggttgccttaaccttcatctctagcttgatgatatattagtattaaaaataataataaaacataacatcatgaaacctctaaaccaaaaaataaatttaaaggttaagtgaaaataacaaaaaaatgtaaaaattgaatacaaacacacataattcaagcatagatgtgaggatttctgaattaacacctatatgaatgcaaaagaaattagtttctatgtaaatttccactcaattgtggataatttttccttgttcttatttattaattatgtttggtgtttgaatgttctattttaatttgttatagttgtaccttatgacttgctatatctttgagagtttttgagaatactaattattattattattattttttccgttactcttaatttctcaaagatactgttttatctagttattttgttgtgtttttaatctttattgacaataaatcttaaattgcctggaaaggaatatcttacactttatatcttctacaattaggatgatcaaatggtttgaaccattggcttgtatgtaatctctttagacatggtttttccttcttttcttttttcaaatttttataatttattgttataattttttatatatatatatatatattaaaattttttgaaaaaagcctgctttgtggaaacaggaatcaatttatttgtctgtaatgttggtaaaatgtaaatagatgcaccttttaaaatcgtctggaatttgcttccatggtttagtcaatattggttcataaatgccttcattttttcccttgcctagctcaagtggcaaggggttgaaatggggatataagaggtgctgggctcaatttccaagagaaaaaaatgttacctataaaaaaaaggtgttacaacttgattggttagcggtgtgtaattccaatgggttggactaacctagagattttgcttgtttttactttgtattgtcttgtatttgattccttgtagttttgtttttctttggtgggaggattcctcatccttctcttgtacttcctttttatcaatatatctctttgtcgtttcctatcaaaaaatttcctccgtcacctggggttgatgttccatagttcttccttgtgtgtatacaggtttgcttctatcattttggttcatatgatcaaatttggctcaattaagtttgattttcaggccaggcttggctgctggaactttagaattggttttgttttgttttgtttaaacagggttattcatgctgatatgtgatttaacatttgaattaatatttattttattatttaatacatttcctctttacagaatcaggtccttattccaatgtctctatttaagatttagccaaataaagtatagcaaaatagttagccaaataaagtatagcaaaattgttattattattatttttattttgtaaatgctttatatcctacctctcatttttattttattttattatgttattctggaaatattaggttgggactgctaaggagtagggtaagcacctatttggttgaatataagaaatgttctgtactttttcttgtggaatactattttcagaagttaatctgtctcatgtgttcatgaatgaaaaaatcataggcttcacaaaatgttttgtttgggtcttattttctaataaagtagaaggttcctatatgggattaatcttcttgataaagggtgaagccttgtttagggttcagtactttgaagggatgtagttttcagagttaaaactgaaaggcacctatcttaagtctatttttatggtctaggaattccttagggaccttgtctttcctagattgcactgatagttggtgctggcctaaggccttgtttgctgtctttgatgttcccatatcttctttcctttggcattgtctggtgtcccttgtctacatcatgcattccatggttcacctcttttggtatttatcatatgctatatatcttctctttgcttacttatatatagaaaaaggtagtctcaattctaaagtggcatcttttgttgtcaaattgaaataaaaaggctttggaataatgagattccatgtgttttccagattgtaatatatctcccacttagtgaatttgttggtgccttcatgtgctagaaaagacaaacaatcaaatgttcccaaagccactcacagtttgcaactattggaccttaccctactatagacatccatgtgagtgtccagatttacatgcaaattggatggtcatttttctcaagtaagaaattttacatctgaaacaagacatcaaatgttcatgaagccaatcaagcatgaaactattgaaactcactttgatatagatgtccacatgatgctaagatatacatggattttggaccaacatttttctcatctttagaccgaagctttatgtgtgatggagaaaatgcaataatagacaagtaaattttttttttttttgataaccgtggatgtccgggccagcttatgcgtacctcgactaatcccacggggccttgaagttaacgaccgggtaaacctccagtggccctaaggggactcgaactggtgaccattggggagcaaatccaaggccggaccaatagacaagtaaaaattttaaaagctattttctaaagtttcccaaaataaaactactttttaatttaattttattttttctatcattttattttcacttcaagcttgcttacttgaaattttattaggggtcaatttcattcatttcccgttttggctaaatacacttgacccccattggtttgaaattttatcaaatacctccctatttttgatgaaatttcaaaccaatgggggctaagcgtatttagccaaaaccttgggggaggtaaatgaaattaacctatattatgattattactattgttattgttattgttggaaggcaaggaatcgtttggccttcaaggatgatatgttgtcaattcaaagattgaaatactcttttattttttctctttgggctgaaacaaaattgtttatagttgattgccctctaactatagctaattttattgattggatgggctctaattagggttgtatgttggggctttttgtttcttttagcattctcttgaaggagggtgtataggtttgtatttcttgagccgccttcttggtgtctcttttttctaatagaatctcttttacctatcaaaaaaaaaaaaaaaaaaattgttattgttgttgttgttgttgttgttttacaaatataaaaaaattatcatatgtaacgctttcaaaataataataatattaatgttaatatatataatataatttaataattttatagatcattgatttactcctataattaaaaaacaatgtcattgtatttgttattatatagacttgaaattttttaatcatagtataattattaaaaatattataataaaaaggaaaattagtcttgataattgttagaaagcaaaattaagtcatgtcgtaatgcatcgtactttcagtctgcttgtattgtaagtttaatgtataagtgttgtacctacatcttgtgacaatcctcctaatagcattagaagctaggtgacttattctaccataggggtgtctatattaatacatcatacccctgaattagcatcgtatcttgggtgcattcttattgactatgatatttatcatggaacccatatataaatatctatatatatatataaagtgtcttctaaggttaatttgtagtatagatggaatgttaaagagtatacgaagaccatccacaactgtccgtttaaaaaaatttacaaaaaaaaaatgatattaggtcatgtcacaatgaattatttagcatatttatgttgtaagatcaatgcatttttgtcgtacctattccttggcttctatattaatgcaaaatattggtgcattagcattgtacacttggtgaattactattatgaatgatttttataataaaaacttgtaagctttatgaatgtaaaaacaaaaaagaaattgtcttctaggattggtttatagtaaatgacatcataataataaaactatgaataatgatattaataaaatattaataatatgaataatattttcacatgatcataataatagatataatattattaagaatgatattagttctactaataatatgaataatataacactaatatcataagcaataatattaatagcgatattaatgtttaatcatagcaataataataataatacaattagtgttaatatagcatatgttggacaaccgattttcctaaaagcttaagcttgcaggatttgagtttacaatgtatatcatcctctttaacaccttccctcacatgcgaccccatacccacacatgtagagacacaatggcccgtagacaaacaaccatgattagtctctcttgggcttaatttaagcttaataaattggggaaataaatattatgcggtgagactcaaacacatgaccttccgtcaaatgagactctaatagcaaattaaagtaccaattttcctaaattcttaaacttgtaggatttgggccacaatggatctttaacagcatatataaagcataaaatgcataaaagatgtgaagttaaatggaataggaggaaagataaacaaagggtataattggaattacaagatggtcaaattttcaaagtatgacttatggacttaaagagaattttaaaccttgaggagacttgttacctttaggtgatccttttggataattctcccaattttattctaagcaccttcatcactacttttgtggatttggccctctctttgtttaatgaccaagggagatttgcacaatggtgtaaaacttattcttcatgtataattcatttgggatttttagggttcgctgaatggtttcacctttatatatgaaattgaaagttgctttttcttcctgttgtgcatcactgatgggcatatgaccaagacctccccaccagatatttgttgtattatttgggtgatatcataatgagcattattagaacatgcttatcatattgatcattagactatgcttcaatcaagacttgaacaaagtggtctaaggaaaaaaaaagaagggtagggggggggggggggggaggaaccttgatgaactctttggaggttctaactccactatacttgctacattgtatattctttttttttttttttttgataaccgtggatgtctgagctagcttacgcgcacctcgactaatcccacggggccctgaagttaacgaccgggtaaacctccagtggccctgaggggactcaaactagtgaccattggggacccctcagggtttctacattgtatattcattgtctcatattaaataaaatggtcataatgccctctagtgttttatattcttacaaaaaacgaatatatagatccatagaatgcgtaagcaagaaaaagtacaaaaaatgcattgacatttaccttctgccaacatttttaacagatggtaaatactatcagggcttttaactataactatttataggcggcatattcttcatctagcaactgtttttccatcgccactttttggtggctcattgattttacttgtgcaggtgaaaagatacattg

SEQ ID NO: 11510 - DNA, 8030 bp, Vitis vinifera
  Intron number 5 from transcript GSVIVT01028445001 (locus G SVIVG01028445001) derived from phytozome v7.0 (chr-ID chr7 ; pos 7673415 to 7681444 reverse strand)
gacaggtttgctaaaccaactttaaccttggtcctaatgttttaattctcccttttgtgatttagataagttgtttgttggaagtatttgtttgtagctattactttttataattggcaacgtttactgttagtgcaagtaaatagtgaaggaagacaaattattgatgctcatttgatagcatatcttttaattggttacataataaataccatgttttggcaacctaaacctagtattgcaggcagcacaaccatcagaaaggattttttcggttaaaggacatttgttcctggtaggatttggagccttttgttgctagtagggtttaatgatttagaatatttatatgaaaagtaggttaagcttcaattcattgtaaaatagcaaataattgttcacacttccattgctgtgaacttgtgaggatgtattggtcatttttggggtttctttcagttaggtttaaattagaggttaagattagttcagattgagtggcccttgaggcttggctcaagtggtaaagggatggggttaaaggtgatatatggttattttttaacagatgaaaatatttaatttaaaaaatttattataaaaaattctttctttactagttttatttaatatttaataggtgtttggtaaaccaacttaacaacttagaatgatttaataacttaatttgagtaattaagtatgtttggtaaaataacttaatgatatgatttaaagtataaaataacttttaagtaataaataaaaacaattaatttattcttaaatccatatcttcattttacctttttatctctatttagcccaattatctctacaatcttctttgctactccacgaacttttctgttgctcgaccttctttgtttagttataatttatgaggacaaatatgtgaatttgaagatttagaataagttttaagttaatcttattaaacaaccttgatccttaaagtaagaattaagtaataagttttaagtcaacgacttaactataatttaacttaaagtcaacttaagtcattaagtaataagtattaagttttatcaaacacccctttagtgagtgtttggtaaaccaacttaataatataaagtgacttaatggcttaatttaagtcattaagtaaattaagtatgtttggtaaaataacgtaatagtatggcttaaagtaaaaaacaactttaagtaataagtaaaaacaattaacttattcttaagtccacatcttcattttacctatttactcttatttgccctagtttcctccatgatctcctttacttctccacaatctcctttgctactccacacctctattattacttgacttcctttgccctaattataatttatgaggatgaatatatcaatttgataatttagaataagttttaagttaattttttcaaacaaccttaatacttaaaacaagaattaagtaataaattttaaatcaacaactttaagtataatttaacttaaattcaaattaagatattaagtaataagtattaagttttactaaatactcccttagtatggggtgataaataaaaaagttttaaatccatgcttttatcattgtatggataatgtcctttttatatttattagtttttttaatctttgtgattatatttatttttataataatttaaataattctcttaaaaattttggagttcttaaatgaacatatttgcgtatcgattgatactgatctaagatattgagactaatttgcctcgagaccttctaagtcaatgacctctatgactttgaactatgatttttactcatttttttgttgctgaataccctacaaaaacatatttgagagtaggtggattgagtttaaggcggtattgagcatggatatgaacaaaggacacaaccaaacactttaggaggtagtttgcaaaatccatgaaagttgggaaaaaaacttagagaaaacagtcattggacttttgtggtctacgaccttagagggaagttggtttattaagtgggcagtaggaaaaactacctctccccaatatgactttggaatatttctaaaacaactgagtgacttctaattggtgtcattttttctgtttagcaaagtcattttgttgtaggatatctgtgcaagaggactagtgaataatgccctcatcttaaaggaatgggatggtatttgattgaagtatttccttcaattatcaaacctaatagtttaatttggaccctaaattggttgctaatcattttgtgaaaaatgggaaacacattgctcacatcattttttattttcagaagaaaaagccaagtcactctagaacaatcatcaataaaggacacaaaccactgtgcccctgaaatatttggaattcgacaaggcccccaaatatgagtatgaattaatgcaaaagggtagaagactttctattacatataagaaaggacacatgatggtgtttggccaattcacaagtctcacaatgaaaaccgttaacatgcaaatgtgtaaataaggaaggaaacattttctttaataaagaacaaggtagatgccctaaaaatggaaatggtgaagccaaatttggtctttattaggtgaagatgtcgctaaaagatgagaaagagctgatcgatcaccatttccacttctagtttcaaggaagtagagcccctcccgttccttagcattttcgatcatcctccccgtaattcggtattgaaaaacacaataggaaggaaaaaattttacactacaattcaattctttggttatttgatgaatagacaataggcttactgaaagtttaggaacatgtaatatagatttgagtgtaagagagggtgtgagattaatggttccttgtccagtagtggctgcaagcgtgctatcagcaaccttgattttttgttgtctagaacatgggttatatgttgtgaaatggggtggaggagtgggtcatgtggtctatggcacctaaatcgatgatccaaagcttagaaaaacaatcttttgagacattaagagaatgaaaaatgagatacttacttgactgtcaatttgtctgaatgaccttcacgtctttagacctttcgtatatataggaactatacaaccaaatttcacagcgtttccactaattacaatagagattttctcccaatcccctagctgtacatgctattcctatatggaaaacccaactgtacaaaataaagatcatagagattttctcccaatcccctagctgtacatgctactcctatatggaaaactcaactgtacaaaataaagataataaagaccttttttcaaagaaaatcacattttaggatacatgaagtttgttagcagcagcatcataacaaacaaaacctttttgagcattactatagcccataaaagcacatcgtgtggattgagcagtaaatttgtgacgttcagtgggtgggagatggacaaaacaaacacacccaaaagtatgaagggactgatactcaggatgattaccaaacaagcagagataaggagagtcatacagcaaggtctgcataggcaagcgattaatcaagtagacaacattagacaaggcttcaacccaaaatttagatggaccagaggattcaattaacaaagtacgaacaacatccaagagatgccggttcttgtgctcagccaccctatgttgctgtagggtgtaggggcaagagcattgggaaaggatccccttctgctgtaagtagttctgaaaattgtgagacatactctccccctgaatcaaaacgcaagaccttaatacaagctgaaaattgtgtttcaattagagcaacaaaggtttgaaacacagagaacacatttgccttagatcgaagaaagtagacccaggtgaaacgactataatcgttgatgaaagttacaaaatacttgtgctgagcatgtgaaataaccagactaacaccccaaacattagaatgaatgatctcaaggcattttgtagtgaagaaaatattcttcttttttctgtgccaaaactgaatacaaagtgacctatatatatacaagtgggattcctaatctaagccatataatatgcacaatcactatctctaaggaaacaataactaattaagagggattctctcatccataaaaatagaaaatatcctaacacaatccctctaatcttggcacttaattacaaatcataatcccatatttccacatgtagttagtgatctccaattccaattggaaccttcgagcattgttgtcttgattgtagatacaccttagatactcccacatctctttagcagtggtgaagcaatgaaggttattcaccatgtgaggctcaatagacaccaacaaccaagaaacaattcttacgtccttgttgtcccattgagcaagatctgttatgccggcaggaactttgctcttgccatctatatggctccataactctttccctttcataaacatcttatattggaactcccacgccaagtaattttttccattaaaacgcacaatagtgttttctcctgacatcatgcaaaagtattgacttctaatggacagaaactccaaaaacgaattcaggcaatccgcaacacactaaattacccttcgcagataaaaaagaaacccagaaaactcccaagaacctccagaaatcctccaagagaacacaccaccgagacccataagaatgattaaaaaaccaaagagcccgaagggctaaaccaagagattatgagagattgagacaacaaagagttctagttcaaaaagtagctctgataccatgtcaatttgtctgaatgaccttcacgtctttagacctttcatatatgtaggaactatacaacaagatttcacagtgtttccgctaattacaatagagattttctcccaatcccctagctgtacatgctactcctatatggaaacccaactgtacaaaataaatataatagggattttctcccaatcccctagttgtcctatatgaaaaactcaactatacaaaataaagataataaaggtctgccgcatatagagaaaaataggttgctgcacatcctattaccatttactgtgtcaaagagtaggaggcactcgacttgcctagtgaagagagaagggttcaaagtctttcaatctcgtccttgttgaaacaaccattgttagaagcaattgaagctacatcatcatcacaatgagccatattagcttgtcctccctattagccacttcgatttccaatgcctctgccaaaggattgaggtttttcatgaagtttccaacaagtttctttagtgtgtcatggctttttgcaataattgcaccataatgtcacggacttagtcgttcactaagctcgtgcggcacttagacaagccaagacgtttgatcttggtaagtcagccttgctccccaatgcttagcttgctcggctaagacacttgcgactcaaaagcttaagaagcttggtaggcaactcttgaaagaatggaagctcttatttactcaaggaagcctttacaagtgcttggaaactcacttgcttggttaggaagtgatttgggtggtgccttggccaaatgaggccctcacctatttataggcaccaatggaactctctggaaccttggagggttccttacaaatcaagaatattctagaactccctacactaatctatgtacaaccctatgtacaagaatatgcaagagatctttagaatcttttagaaagccttggactcctctcatgccttccaccatagtgtagagatgtgtggacatctctaggcatttctagaaccttccacactcttcccaccaatggcttagtgtagatggctccaggagtttccagaagcttccctcctcctatataagcccatggggagggtcatttgaagcatcctgtgacaataagctatctttcttgctggatggtcgaggcccctcatttttactagaatctacattgctgttgttgccattattttaaattggtagcacactagagggagctgttatagcaagggttgaacttttagaagtgggattatcaagcatcactgttcactgtccttcttcagccatgtatgagtgagaagacttcattcaagggtggtaaagattccttgctaagaacacgtatacatgatcaaattccacattaaggccagcaaggaagtaaaaaattctctcaagttcaacatataattgcaatagggcagcatcttcgctactcttcatcctaaaattctggtagttgtttaattcaaccacagtcctttcatgatattataatattcaatcacagatagagtaccttattcggtggttgtaatctttgttttgatctcataaatttgagctgcatctcacactttggaatatggttgtcaaacaacctcccatatctctcatgcagtgatgagcaacatataaggccctagtgatctctggttgtatagagttccaaagccatgacatgatcatgaaatttgcctcatcacaaatctaggatcatctttgcttatctctagatagatcaagtgacttaatttcccttttcctttcaagaatgttttcaatagctgtgaccaggttaaataatttcgaccattcaatcaaaatgatgtttaaagattttggtattctcctgatgatggagattgggtgttaatgtttgaaacaagaactgtggagattacttatgatgtttcaaacatgattagtgctaggaatgagaagaaaagaaaaaaatatggaaacaaacaaaagaaggaacaactgctgatggataaacaaaaaacaaactggaatttcatggcaaagaatgtcatgcaatctcagaaaaaaatttagtagcaatgaaggccaaaagttttcttatagctctgataacacaattacaaagaagaataattcatcttatttcaaaatgaactagttcatgatatatatatacatacacacatacacatatgtatgactcctctactcttaacaaggaaaaaattacgattccctagttgtacaactcctaaaattcagggataagattgcttagatttacaattaaggaaaagaggatcactatatcataatctagcctaaattaaatgcaaaatatatatctcattcataatttgtattatgttgactttccaacaaatgatatttacaaaatagtctttacattttgtaaaataaaaaatgacaatactttttacatttttaattataacatggttagaaaataatggttatatttctgcagaataaaaaatgatgatatttttttataattttaatcataatatgtgaaattgtatattaaacaaagattttaaccactacttaagcaatatatttttatctccatgatttaaattttcaaagaattttatattagaagtataaaattcactttgtaaaaatggattatttttggaattcaattgttttcattagcaaatgatcaaatgaaattcaatacttttacctacgataataccaaacactatatgtttctaccaattcagcattttttgtgctctttttggagggcttcctttaagtgctccttgtatgcgtattgtgtacgctagtgtactttgcttctatttctaatttatatatacattcctttacctatcaaaaaatcaatactaatccccccttccttgaaattttaattttgaaagtaaagattattgaccatatatgggtcatctgcctacaaattaaaaagaaaaagagaaaaaaaaaagggaaactaaccatatattggccattgcagatgatctttgcaaattatgtttgttggatttcttttaagtgatattgtgcttcattgttttatcctttgtttaatgactaaccaaaattttgttttgttaaagttgtttcctcctctgtcaaagaaatgacattttcattattttgttttcatcaacaggagtatttaggcaggg

SEQ ID NO: 11511 - DNA, 14763 bp, Vitis vinifera
  Intron number 15 from transcript GSVIVT01009087001 (locus GSVIVG01009087001) derived from phytozome v7.0 (chr-ID chr 18; pos 4919935 to 4934697)
accttagaagatttataaaggtgatgataatgagaggaaaatccttagttattatgggtctgttgaaagattgttcactttgcttagtagtatctttagagtcgatatggcctaaatgagctaatactaaagaatgaaactttcacacagtggttgaacttgaagttgattgaaagaactgttcttctttatcttctgcttgtgactttttaatctgtggaaatatcgttcttagttgccttgctggtgaatggaatcaatttcaattacataggtccaactaaacttagtggatatatacttagaccacaaaaatatgagagggaagagactgaacttgcttacttatcaattatcttaaattagaggctcttggatcaataagatgtaggatgagattggtgggagtatgattaggaaagtatggtgcaaagagacaatgaagaaggtttagggaagcatggtggagagagagagagagaaggtttataattattattatttttatttttggttggcaaataagaaaatataagaaatactatattattattatatttgataggcaaataagaactactatatattattattttctctaggcaaataagaatatataagaagttatatattatttttatttttgatagacactcaaaaaggtgctagtaaaaaaaaggtgttttattttgataccatcttcttttctaacacgagggaggaagagttgcagactctcaagagtcttttgttagtgtttgggcacatttttgggctcaaggtcaaccttgacaagagtagtatttatgacatcaatcttgatcaggctcatctttcaagattggctgagatgcttgattgcaaggcgtccagatggcctgtactctatctgggtcttcctttgggtgggaaccctaagacgtgtgacttttgggatccagtaattgagagaatctcaagtagattagatgggtggcaaaaggcctacttatccttcggggggaggataactcttatccaatcttgccttacccatatgccatgttacttcctttccttatttaagatacccgcttcagtggctgcaaaaatcgagaggttgcaaagggattttttatggtcagggattggggaaggcaagagagatcatttagtgaggtgggatgttgtgtgcaaaccgaaggcgatagggggtttgggttttgggaatatttcttggaggaatctcgctcttctagggaaatggctgtggaggtatcctagagagggttcagttctttggcatcaagtcattttaagcatttatggttcacactccaatagttgggatgctaacactttagtcagatggtcacatcgctgtccttggaaggctattgcacaagtcttttaggagttttccttgtttactcggtatgtggtaggaaatggggaaataattcggttctgggaaaatttgtggtggggggaccaacctttgggaacccaatatccaagactatttagagtagtcgtggataaaaacattcctatttcttcagttctcggttctactcgtcctttctcttggaatttaaatttccgccgtaacctgtcagattctgagatagaggacttagaaggcctcatgcggttacttaatgaattgcatctatcttcttcggtcccagatgccagattctggccattatcctcttcagggctttttttagtcaaatccttctttctagcattatttcaatcttctggatctccttaggactttccttcaaagttcgtttggaattctcaagtttctttcaaagtgaagtcctttgtctagttagtggcacacgagaaggtgaatactaatgacatgctacaagtgagaagaccctacaaagcccttagtcctgatatttgtattctgtgcatgaagcatggggaatcagcagatcatctttttcttcattgttccttgacgattgggttgtggaacagggtatttcaattagctaagatgaattgggttcccccgatgagcatatctgacatgatgtccatcaaatttaaaggctttggtacttctaagagggggatagttttggggcaagctgcgagcatcgctctaattcgagttgtgtggtgggaaagaaacgcgaggataaaacaaggaattcagaatttctttgggactctattgttttccttgcttctctttgggctttctgttccaaggtatttaaggggactccccttaatgtgattcaacttgattggttagtggtgtgtactccataaggattggtccttatagggagttcgtttgttttctgtgtattttcctgtgttttagttgtctttgacgggaggatttctcatccttcttcttgtactttcttttctatcaatatatctttgtgtcgtttccaataaaaaagaaaaagaaaaaggtgcacctctagtacacatgaagtatataaagcggccaaaaggccatgagttacgaatgaatgccacaaagcttagagcataagcacaagtgttcttaagcatgtcttttgttcttacccataaaacccttatgctaattgcggattttgggagaaaaattgagtcaattgtatatttgaaagaaactttaacacaactatgtataatgattacaaagctaattaaaataggaaactaactctccctaaaaacaaatttctatattagtgggattctaactattcctaaaaacaaattcttatatcagtgggattccttaactattatcccatcattctaggaatgtcaacaacacatgctttccaacactcccccttaagctggtgaatatgcatctttcattcctagcttggagataagtcgttgcactaccgtattactatttacttttgtgagcacatcaaccagttgatcattagttgagacgtatggagtacaaattaatccactatcctactttccctttatgaaatgtttattctctttaatgtgcttcattttgtcgtgttgaacaagattgtgagcaatgttaatggcaaatttttgtcacaaaataatctcattggttcttcccatttgatccttaggtcttccaaaattatcttgagccataataattcacactccctaagccattgccgtgaacttcgcctccgcactcaatctagctaccacattctgcttcttactccttcaagtcacaagattgcatccaaggaaagtataataacttgtagtggaccgcctatcaatgggtgagcttgcataatctgcatcgatgtatgcctaaagaactagtctagtgttccttctgaacaaaataagcttgtcaagattagcctttaggtaatgtagtaccctatggattgcctgtaggtgaacctttcttggcttgtgcataaattgactaaccacacttatggcatatgcaacatctggccttgtgtgggcaatatgtataagctttcctactagtctttggtacatttccctgtttacaattgggttgtcatttgcctcttcgagtttgtggtttggatcaattggtgtggaaactagtctacatgctaactttctcgtctcctttagaagattagtcatatatgtctgttgcgaaataaagattccttctctggaatgagctactcccattcctagaaagtacttcaatctcccaagttcttttgtcttgaattctttgactagacatcttcttaaggcatccttctccttctccttctcatcatttcctattacaattatgtcatcagcatataccaaaagagttgtgattccctctacatccaaatgctttataaagagtgaatgatctctctgactttgtctatattcgataataagcattactttggaaaatctctcaaaccaagcccttggtgattgcttgagatcatatagcactttcatcaatctacaaactttattgtctctcatatttcccttgaaggtcgaaggaatatccatgtatatctcatccttaaattatcgtgaagaaaaaaaaatttcacatcaaattgctccaaataccagtcaaagttagctactagaggcaacaaaactcttacaatattgattttagccatcagagcaaatgtctcgtgatagacaacaccataagtttgcatatatccttttgtcatgagtatagccttctatctctccaaagagtcatttgacttgtacttcactgtaaacacccacttacatatcatagatttctttcctggtggtaagtcaacaatttcccatgtttgattcttctctagtgcctacatctcttatctcatagcatctttccatttctcatcaaataatgcctcaaataatgtgttaggaatgtgaatggtgtttagactaactagaaaggtactatgtgaggaaaagaattttttaaacaacacaaacttcgctaatgggtacagtgggtgtttagtgcattctcttgtgtctttcctaatggcaataggaatgtcaagatcatgtgttaattgagaagaaatttctggttctgcaactgtatttaccttattctaagggttacgtgttgaatcttgaattcgcttaggactaggattcaggtttcttcgtcttgaatttacctgcataaatctcatagagtcacaaagttcattattctttgtcatagatctaatgcgatgggtgaaaaagttgatatagactgaggtggtttgataggtacaagcatggaaggtacaaacgtggaaagttcgagttggactggcacaaaggttgagttggagttctaaggagccctgagttctagtcctgaattatataataagaagcatagaaaaacacattacagttcatatcatgggtgagcttttgtatggatactaggttggtaaacaatttgggaacatgaaggacattttttagtgtaagatatggattgatatggatatcccctagactggctacaatagtgagagaaccatctgcaatggctatttttcaattgcttaggcaagaagtataagtgctaaaatttagtgaagagtgagtcatatgatctcagtcatatgatctatggctcctaaatcaatatcccaaagattcttgataggttcatctggacatttaatccttgagaaatagaaagtttacttgagagtgcaagagagcatgcaccattgggtttctacaacaatcccaaaagtccacttatcttcttgatcttctccttattgaatttgctctggtcttgagacttttcttgacttggttggttcatggtaaaggcttgaccttggttcctttgctggccttcttgggagccccactctttgcttgaagatcttgacggatttgccttcctattttcttatattggcggttgttccatttttgtcaccatgctgaacctttcgagacttggggattcaagcataacccccttatgactcttctcagctcgaataagagaaatgatctcatttagagatggcacctcttccttgctaggaatttggaccccgacttgatcaaactcagcgctgagtcctgcaagaaaattgtagactcgatatttttcaataaaattcttcaaattgcaacatcttcgcatttagtcttaatgcattgataatggtcaagttcttgccacaggctctgcaataaattcacataataaaagttttgcggtcttgtttcgtcgcactagtcttgactttaatctcttacacttgtgttgcatcataagccttcaaatacatttgttgaacagcatccgaatctctttagtcgtggacaaaaacatgcgagtgttgctaattttaggattcattgagttccataaccatgacatgatcaaggaatccgcttcatcccacatatcaaaccccgaatctccttcctttggcctgaatattctgcaagtcacccaatgcttaatgcgagatgacttccttagattgtacaatgatattcgatgccttggtctcaaacatattggattgggtttagcaaaagagtaaacacagagaaaactgacaatgaaggttgtaaagattgataaggtgaggaataaaaatttataagttatactactatgacatgagaaaaaaaaaaaggtcactggcgatgaaggccagaagaatctgtcttgaaaactcttttacactcgacaatgagggctagaaatagttcaatgagagccttactgctctgataccgtgtggattttgggagaaaaattaagtcaattgtatattggaaagaaacctttacatgactatatataaagattacaaagctaattaaaataggaaactaactcttcctaaagccaaattcctatattagtgggattctaactcttcctaaaaacaaattcctatattggtaggattccttaattgttatcccataattctaggaatgtcaacaatacatgttttccaacactaacttatcagtaactcttttaataaaggagttaggacccaagagatgtcaaagagagaggacaagttccataggctcttagctttccccatgtagcctatcactagaaaacccctactttataggaggctaagagccttatatttcctttgagatgaaaaatactcctatgttctactataaaacaaaatagaaagatttcactaagattccgaattgaagtgtctttctccatgctataccaagttcttaatgcttttttttattgatagacaaatgagaagtatattaaaagcttggcatattaaagtacacatgatgtattaaataaatgccaatctagatgggaaaaagttaaataagatgcaactcggtaatgctatccacctcctaaccttggaaatgtcttagggaacatagattccaaaggacctacccattctctatgacctaaacactagctcattcagcaagggaatgggtattttcacaaagacgatgttttctcgactagtcgagttcactaaatgctttaggttaggccaattccctcccctgccacccacaacaggctattcccaatcagctctcaataaagtcaagtaaaaaaattgaatgatccatcccggaattggattattcaactaggagagagatgtgggagtaccctacgtcgaatggatgcattgtgaaaggttggcactagccaccgaagcctacataaaatctacacaaagaaaaaggagagagaaaagattcctttaaaggagaatcaccatactaaacacgttgccaaaatttgtttcttttctctttgcctaccacaaatcttattatgaccttaaaagctttccaccctttcttattctcttccacaggctactgctatacccttttctcccaacttgagagcatcatcctccttgctcctccccaaatttttgcactatgaccttttaatgagaatgaatctccaaaatctacttaagaaatggatggaaaacacgaatagaatcttggaatactttatttaaggtattgtagtttttttaggttctcataattaattagttgttggtattttagatgcatttaatatttggaaagtttttttattaaaaatctcctcaaaagaattttctatatttctgaactttttattttcttaaaagaaagtttcttatttctaaaaattctagttaaatccttaaaatctagaagttttttttttattattagaaattcttattgcaaaaagtttctgttctaaaaagaaagtttactttttaatatattttatttttagtagatttaatagttttaagaaaggaacaagaatcttattaacttattacataaatcaagtttgtatttttatgattttatttagtttttagtgtttttcaaggcctatcaataaagctaattgttgcaatatgagattgatgatgaataatacacttttcttttaggtgagactcaaatctttttcattatcttttctttttctgtttttttttttttttttttcctattgatactccttaagcccgaaaaaattgaggccctagaccacctatttgaatatagagagtcatcctaggtttgtcctacatcaccctcatctaactaatccctctctaaagaaaatgttcaatacttgtttctttgtaagactatatcaagagtagacaaacactttaatacctaaaaccccctttctttttatctttgcaaatcgatgaccattctactagatgagatttcttctctggagcccctcatctttgtatcaagtcccatttaatatctttccaatctcaatgccatcaccttaggtacaacaaaaagggatctgaaataaataggccaattgctaatttttagcaaagatcttgtaccttttgagaggtgttgtcctttccatagagtaaacctttttaaaaacctctcttaaaaagagctcccaaatgcaggtttaaacaagtggcatgaactttcctcaccctggacctatcttactagaattatttcacttttgtacaagttaacttccaatcttgaagaagcctcaaacgttaacaaaactcaactcgtataggtctactgatctggacaaggattgcaaaaaagtaaggtgtcgtcagctaatcatggtctgataaaaaaaaatatcagaatcttgtggaaagtactatcatgcctagattcatgtgaaaattggcatccaatggttgtgagggctacatgtagggtggtctttaagtggttggcgagttggtgttggttctattataaacactataagaagagtatcaaataaggtattgtaggttatgctaaatcatgttttgaagcaagggcactttacattttttcaaacacttcctccacaaatatgatttgatgttaaggacaaaatgtgtttgaaacagttgtgctgaatattctaggtgtttaattgtattaaatgtgtgtataatgggcatgtctatacatctctttttatttgaactctagattaagcaaaataaattctacataattgtgaactagaaaataaaaccagcatgacttcatgctcacagacaacttttcaaggacgaatatgattaaaatttcctaaattttaggaaattgccaattcgtaacccaaatgtgtattaagtgaaatcatgtaatttttctttatttccaattttgaagaactccaaggtcactggtgtagtataatggtactcccacaccaccattgcaagaacttcaccaaagagaaaggacaccaaacaaccacagaagacttattgggtaacaaaataaaaggtagcccagaagaacaagttggctgctgtctttgtcttaatgtctgaagcttccacagtgctatcatttgtatttgttaaatataatgtatttatagtatattatctttccttgttaatataggtcacatgtatggtagttaggactcctagccttgtatatatatatctctcaattgtaagtagatattacatgaatgagaaataaggtttttttctcctttctctctctctcaacatggtatcagagccaaggaagaaaacctaattctttcctatttcccgtgtcatcaactccgggaaaccttccggtgaccgtgtttcattccggtcaccttccccatctcccaatactttcggatcgtcgtcagaaaccactcactgccggcgaaattttccggcgaactttccggcgaactttccggcgacgtctttttccgacaccgaccacaccaagaggagcgcttggaggagatctccaactttctcaaaagcatcggagccagaaaaccttccatgcgccggccacgcgcacttctactaccggcgactgaatctcacgcgccggcgcgtgaggccttttccggtgacgcgcctcctcctccagcctcgcctgccgccgaccagcatccctacctacctggttctcccatccgagccctgcacgtacctcttttggggatttttgtctccgtcagccctccaaacagccttccggcgaagttccggctactttctctccaccccaatccctgcacgtgccttgggaagtgttcttctacctttctggtggtaccacgtcgcgatctgaggccgtctccctttttcggtggtgccacgccgcaatctgaagccgtattagggctctcttcgatccaaatacgtgaatatgaccaccaaaaatcagatctttacctctgttctctctggatctcctctgattacctcagagaaattggttggcagtgagaattatctctcctggtctgcctctgttgaactttggtttatgggtcaaggatatgaggatcacttggttacccaagaggcagatatccctgaggttgaccgcgtacagtggaggaagatcgatgcacagttatgtagtgtattatggcaatcggttgatccccggattcttcttcatcttcaggcctataaaacttgttttaaattttggactcaggccaaaggattatacacgaatgatatccagcgtctttataaggtggcttctgctattgtccatctcagccaacaggacttggatctatctacttatattggtcagattgcctctcttaaggagcagttcttgactgtgatgcctcttactcctgatgttggggctcaacaaacacagcttgacaagttcttcatggtccttactcttattggcctccgtccggatcttgagcctattcgtgatcagattcttggtagttcatcagttccgtccttggatgatgtgtttgctcgcctcctccgtatctcgtccactcagactttgccatctgatagcgcttcagattcttctgtgttagtttctcaaactacctctcgaggaggacgcagtggtacccgaggtagaggccaacgtcctcattgcacctattgcaataaacttggccacactcgcgatcgttgctatcagttacatggaagacctcctcgcactgcccatatggcccagtcctctgattctccgctgcctcagactccgagctcctccgcatctcagacatctcaggcttctattgcctctgttgcccagcctggtaatgcctctgcctgccttacccacacatcttctcttggaccctggattctagattctggagcatctgatcacctatctggtaataaggatcttttctcctctattactactacttctgatttacctactgttaccttagctaatggttctcaaactgtggctaaaggtattggtttggcccttcctctgccttctctacctctcacttctgtcctttatactcctgaatgtccttttaatcttatttccatcagcaaaatcactcgtactcttaattgctctattaccttttctgataaatttgtgaccttgcaggatcggagtacggggaagacgattggcataggacgtgagtctcaaggcctctatcacctcacctcagattcatctcctgcagtttgcatttccactgatgctcctttcctcattcacaatcgtctgggccaccctagtctctccaagttccagaagatggttcctcgtttttccaccttgtcgtcgcttccgtgtgagtcatgtcagcttgggaaacatactcgtgtctcgttcccaaagcgtttgaataatcgggcaaagtctccttttgagcttgtccacactgatgtttggggtccttgtcggactgcgtctactttaggatttcagtattttgtcactttcattgatgactattctcgatgtacttggttatttttaatgaaaaatcgagctgagttattctctattttccagaaattttatactgaaatccaaacccagttcaatatttctattcgtgtgttacgcagtgacaatgccagggaatatttttcagcccaatttacttcgtttatgtctcatcatgggattcttcatcagtcttcttgtgctcatactcctcaacaaaatggggtagctgaacgcaagaatcgacatcttgttgagacagctcgtactctcctcctccatagtcacgttccttttcgcttttggggggacgctgttcttaccgcttgttatttgattaatcgtatgccctcctctgtcttacacgatcagattcctcactcccttcttttccctgaccaaccactttatttccttcctcctcgtgtctttggttgtacttgctttgttcatattctcactcctggacaggacaagctttccgccaaagccatgaagtgcctcttcttgggctattccaggcttcagaagggttatcgttgttattcccttgagactcatcgatactttatctccgctgatgtcaccttctttgaggattcaccgttcttttccaccacttctgagtctcttcctgtttctgaagtcttgcccattcccattgtctccccacctgatgctatgccccctcgaccacttcaggtttatcatcgtcgccctcgtgtcgttgctcctctcccttttcctgaggcacctgctgactcacttcctatcccttcggcttcacctgccccggctctgccttctcctaatgacttacccattactgttcggaaaggtactcgctctactcgtaatcctcatcctatttacaattttttgagttatcatcgattatcttcaccctattctgcttttgtttctgctatatcctctgtttctcttccaaagagcacccatgaagctctttcccatccaggctggcgacaggcaatggtggatgaaatgactgctctgcactctaatgacacttgggatcttgttgttttaccctctggtaaatctacagttggttgtcgttgggtctatgcagttaaggttggtcctgatggtcaggttgatcgccttaaggcccgcttagttgctaaaggctatactcaagtttatggttctgattatggtgacacattctcccctgttgccaagattgcttctgtccgcttgcttctctccatggctgctatgtgttcttggcctctttatcagttggatattaaaaatgccttcctccatggtgatcttgccgaggaagtttatatggagcaacctcctggttttgttgctcagggggagtctggtttagtgtgcaggttacgccgttctctatatggcttgaaacaatctcctcgagcatggtttagccgttttagttctgttgttcaagagtttggcatgcttcgcagtacagcagaccattcagttttttatcatcataactccttggggcagtgtatttatctggttgtttatgtggacgacatcgtcattacaggcagtgatcaggatggtattcagaaactaaagcaacatctttttacccactttcagaccaaagacttggggaaactcaagtatttcttgggaattgagatagctcaatccagttctggtgtggtcctttcccaaaggaagtatgctttagacatcctggaagaaaccggtatgttagactgtaaaccggtagacacacctatggacccgaatgtcaaacttgtaccaggacagggggagcctttaggagacccctagagatatcgacggctcgtaggtaaattgaactatctcaccattactcgtccagacatttcttttcctgtgagtgttgttagtcaattcctacagtcaccatgtgatagccattgggatgccgtgatccgtattcttcgatatatcaaaagtacaccaggccaaggtgtattgtacgagaacagaggtcatactcaagttgttggttacacagatgtagattgggctggctcacccacagatagacgttccacttcagggtactgtgtttttattggaggtaatctaatatcttggaagagtaagaaacaagatgtagtggccagatctagcgctgaagccgagtatcgagctatggctttggcaacatgtgaactcatatggttgagacatcttcttcaggagttgagatttggaaaggatgaacagatgaaactcatctgtgataaccaggccgcattacatattgcatccaatccagtctttcatgaaaggaccaagcatattgaagttgactgtcatttcattagagagaagatcgcatcaggatgtgttgctacaagttttgtcaattcaaatgatcaactagcagacatcttcactaaatctctcagaggtcctaggattaaatatatttgtaacaagcttggtgcatatgacgtatatgctccagcttgagggggagtgttaaatataatgtatttatagtatattatctttccttgttaatataggtcacatgtatggtagttaggactcctagccttgtatatatatatctctcaattgtaagtagatattacatgaatgagaaataaggtttttttctcctttctctctctctcaacagtatttttatctattcatggttctaaaatttgtagtagcataaagttgttttggacaccccttatctgtgtgagatcagtcttggatgacaagattttggcagaaatttgtttagtgttgacattggttgagagcctgtcatgcaataaccataaattttggtagttcatatactgattcataaagttgactcaatagttgggtctggctctggttcagtcaataaaactggagcattttgatcaaaattttgaaatttatatttaactttttgctggaatgttttagttttgctaattttgtgactgttctctttcttttttatgattataactaatttgtttttaagttttgcataacatagggggacccaggtactaaggggaattttgccactcg

SEQ ID NO: 11512 - DNA, 6802 bp, Vitis vinifera
  Intron number 17 from transcript GSVIVT01022623001 (locus GSVIVG01022623001) derived from phytozome v7.0 (chr-ID chr 2; pos 13655839 to 13662640)
ttgctaggcgacaaggctgtgcagcacaagtactatattctattcttttctgacttatatgtacttattttattgatagtgaatcaaagtcaattacttatttctataatacttttctctctaaaccactaaaaccctttgttaagaatgcagcatctgtggtattagaaaaatatgaaaatcctcttcctccttgccaatgctaccttttccatctactaggtgataccttttatcctaaagctcagtttgttggtactgctctggtttgtcagattgctgcttagtatttgattattaattcatataccatcatttagaaaagcaagcataataccattttagaacttctctttcctgtcctaatgattagcatgcacactgtccacaatataatcattaactcctcagtcttcttcagcatcatcgtgactgtcatcatcacccttatagtatctagaggtacttattccacatgcatttgctcattgtgttaccgtctgtggttccatagttccttacctagtttcttgtttattgttggttttgagttttgaaattgagtagacatagaagattataaacaaagaatagttgctttatttgattccttgggttttctttgcatctgaaattttgaaaagatgaagaaaaatacagaataagtttctcatgtataccactttgtgcaaatattaatcattatgaactatgtccaatgtttaaaaaattgggaaatatcatggatatttcctgaaaattttgtgcttaggtcatcactgacatgacaaatggaaagaaaacactgaccaactgtctttcgttcatttttcgatagtttttgcccttctttttggctaatttcagtatttttctagtttttttgccaatactttcaacattatccgaattgtttccaattttctgccaataatatcccacattgcgctcctaatgattttgcgcatccctcagtcaatgtgttgcttcctctcccaggcttagtcaatgggggctccttctctccccttaattcttgccaactccttagatttaaaaattgggttttgaacctaagatgacaaggatgaaatgagcctttcctaaccactggatcatctatattgtttgtaataaaggttcacaaatatatatacatttagatatccatggcaaaaacaaaatgttaaaataaaattttgataaattaattaattttaattaatttctaattgattgttaaaacatagaaattatcatgataattttcttaacaagtatttatgtatatcttttatgtattaattaaatataagagaaatctaaatattctaaaataaatcatatatgtatcgttatttcttttatatccttgaatacatttaaattaaatagatcattattttagcattaaatatgttttcaatttcgatatgttattatcaaatattaaaaactttattgtacaaatattactttcttcactaaaacaactttaatgtgcatattattacttattttatcatttcttaaaaacacttttaacatttttatgggttttgatcaatttccatcgcaccagaagtttttgtgaaaatttccttagatatttcttgatatatttcgatatatccataaaatccacctattgatatttccataaaaactgatatttttatccttcactatgtctatagagaagattgttatagagaaaattgtgaagggcatatatttgctcctattgatgataggtttaatatgcagttctttgttttgaaaattgattgcttttataatggcagtagttctgctaatattttttttccttcttaacatgtgactctgtataaaattatccttaatatacaaaactttcttatatgtttagaggcttgttgaacatgaattctacaaacaagatagttctatgtactttctattgttgacatccaatttcatactagcaatggacctatgacgataagcactttgactatcgtgatatgcataattaaatgatatgcagaacttgtttcattattatctccacccttgtggttgtgtcatcgattattgatgctgcaaggaggtaattaccaccgacctattgctggaaatattcctcactaccctgtcaagggccaacaccactcctactgctctgacaatgcagagaggacacctactatctagtacccatattaggatagaagcctttacatcatgaggtcaatgggggagctatcttgagtaccctcacatgctaaggtgggccacttccctttgtcccctggttggctttcaaccctttgcactctatcaagacgatatgtcatgccccaaaacccactccaagggcatgacagtcatttcacacctcaaactcgaaggttcaaagtcaaaacgacacaagttttcatcttgtaaatagaaattaccaattaccaaattgttgttcaaagtagtaaaataaataaattctaaaatctccagatatcaatttataaaaaccaacacatcaactcaagtgttattgtccaaataacttcaaactcaaataattcaaattgaaaataaattttaacatttaaataatgttcaaaataaaaagagttttaacaaatgtcctaacaagccaatttctcctccaatttctcctcctaaccgtcactcctcgcctgaattgagggtacctggaaaattatcaacaaagggggatgagctcaaagcccaataaggaacattaacatagtttcatagatcaattattttcaattatacttataaacaggagatataacatatattgttttgaatgatctattttcagttatacaaataatgatctatttgattgttttgaatgagttcaaaccagacatgatccttttatctatcttctcatgcatgtattgctatcctttggaattgtcaattccatgctgtctgttgtgataaaatcttaggtccaaggtttagccaagaaggagatgggatagggaaatactaaagaggagagaacatggaacttttatttttttatttttttggctggtgatgcgtgtgatatgtgatggtatgataaagtcttgtccaggaaatttttttttttttgacaaattctttatattttaacctttcttatactacacatactttatcggtgtgtatttcagactttgcatggacataaagcaggagaaaaattttcaggtcactaaagcgtatggattcatagtcaggggagagctagaaatttaatttagaggcacccttttgagaatatacgaatagaaaaatgaaagaattaattataatacaaaaggttgattatgcttatattcaataatttatcattaatgggatttaatgatttatctatttatcttcattcaggtatctaattaattttaaatatatgtttttttttttaaatcttatataaaaaatttaaagaatataaattatttcttttattaaaaaagagataaatagcatccacattaagttaatatagaattgctttggaaactattcttattttttaattttttttttccttttttgtaatcttttttcaaatattggaatagaaagcattaatgtgagattcatctaagtattataattacttatattaatcaaatagcatatgtcccagcttagtggtagagcattttatatggatacacaataaaaccctagtttgtatcaaattttttcagcttgtcctagcttagtgcatttttgcttccaggtggtgtaggaaaggatgaaaaacttctgccatttattgggctagtactagatgaattgaaggttcctgtgcaaattgactagtaatatgtttaaatgctttagaattgtgtgaagaagtattataggtatttgtaatcactacaatccagtttatatgaccattggaccttttatggattaagttctgctgactcaagcacgttaaactttaatattagttttccttctaaattccacaccatctatatgagtcacttgtgcatggacctagtaagctctgctactatttattactcattttggtgttattattttcttttcctttcagtagccttctgggctgtcttagggctgatgacctcctgtttattctagtattttggagttcttgtatgtcagtagctacaacttctcaatatcactattggatttattgtttttatcaattccttccttccaaacagaatgattccttccttcatgccctattctttgtgcctgcaagttaagcaaattgctatgctgttgctcctaaaggcccttgatcggtaacaaagcatgatatagaactacccgtgaaacttggtccaaattatgactgaaaagaaaatgtgtaggaagagtaagaagaaactgattttttttccctttcgccgccaccccactcccctcccccccaccccccctctttttttcctttttttttataaagatagccaagagtaagatgaaactgatattgaaacacaatattctttcaatcaattaaataacaaaatctataagcacatttattttgtaggatctcagtgaatgagttcaggttttaatcctactgatcacaatgctaagttgcaaggtttttttctttttcttttttaatattctgttgcattaatatattaagcacaaggaaggatgagaaattcttcattacacaatcctctatacaaagtttgatcaagaaggtggatttgtgtataccggttcaataagtcaaatctagctataattcatgaggtataaaatctcctacaaaagaaagcatatgtctagctccatgttttgctaacttatttgcagcatgattgcctaagcgaggaacctgaggggtacatcttaactctgaagaaatatcaataatttggcataaccacccacgaaacttccagaatcctcttctttaccatattatgacaatagtagaatcgccttttgaaagggctagaatttttgccttaatggctaaatctcgacctgcatgtttagaggtactcttaacactctgcgaaagtgatccctaagtaacctttttgttcctaactaccttgggttgcccaaagaacatctatcaaaatgaaacggagcaaaacccattgaagatggtagtcattcaaaaagtgtctccttggtcaacctcgtggttctgcaaactaggttccaatctagtagaataaagcttaaaaatccttcattggtggaagccaacaaggaagaagacaagtaaaataagttcttaattgtttcttgagacctctacctatccttaaaaattcttgcactcctttcctgccaagtagtccaaatcaaagtgaggttagcaacgcgccaaagattcctgcctcgaggaagtcctccaaaacctctgaagaacataatcagcattgcctcctcctgtccaggtggtgcccaatcaattcctacaagtcgaaacattctacatcatgatgtcaatgctacggggcaatgtaatagaaaaatgatctagagactccctgctcatacacaccattccaagctaagtgctttgtatggtcttctttttgccacaagtcatgcaaagtgaagacttttggtgagactttgaatttccaattgaaagttgcaggaataaaggagactacattgataaaaatagagataaccttaaagagcgaactaactgagaactatcctaaagatgtcaaagaccaaactttccaattaagaaaagtgggtgacaaatagacatgggcaaaagaaaacattagatgagctagttcctcaatttcctgcaaatttcttgttttccactacttttagccaaggatattttgaccagatggatttctaggttatccactaaatagaacctacaaatttaatcctagtgcttcttatgagaattatgttatagggaagttcctgtaaagtattttggttgcactttttactgcaaagtagaatccttgaaaagaaattctcattagccgaagttcagttgtccaagcctgtcatgtttgttgtaagcctgagctatcatttcaatgtttcaattgattacaatataaaaatttcctggaaagctttactagtccaatagtcttttcatgtttaatggtgtaacctcacttatctcaggaatgttcatttttaagataatttattgctatgtgtatttgagttcataataatggatatgcacccaatgcatggtaagtgataaccagttgcatccatggataaatattagtgcatctgtagtaatgatgacaatcaagaacctagttgtggggttgtctctatgatgaggatatatctccaaaatatacatcaagaaaaggaattagtgtcagttgcaataaaagtaggattaatattacttggacttaaattaggattagcatttgttggagttaaattaggagtagctaattaggttattggagaattagaattaaagtcataatgggttattagaatcctagtagacttagatttcttaggaagctaggctcatattggcctaatcataaaaatttttacttgaccaaactgaataagttggttctccattgaatcatacacaacttgtttaaaggatcagagtctcatcatctgtacattttcttagaatctataccacttaatctaatataaatactgaaaaatatttattctaggtattttttatttctttgtgtgctagaatataactatgttcttgtttataaatgtctgtgtaggttgcatcagagaaaggacttttctctattgtcat

SEQ ID NO: 11513 - DNA, 3680 bp, Vitis vinifera
  Intron number 1 from transcript GSVIVT01032024001 (locus G SVIVG01032024001) derived from phytozome v7.0 (chr-ID chr1 3; pos 23449180 to 23452859 reverse strand)
ccccatttaacctttataatttctttcaagtaataccctacacttaacaagtactcgagtaatatattacactacacttaaacaaagccctctagtgatacctcaaacttgacacaaacccttcaatgaatactcacacttgatacaaatcctctagtgaacacttacaaggtttacaagagaagaataatataacaaactcctacttagcaagtttggctcaaaggatagaaagaaactaggattaaaggtacattaagtaagaataaataaaagtaattaaatatgtactcaaacactttttaaagctcaaataaataatctaactatagtttctcaagattcctattgttcataaatgtacttcaagagttttgaataggagtttcaatgtggaaatagtagttagatacattttgtcccgtgccatcctataccccaaaattggtcctatttttttcatctaaagtttgatgcctatttatatatatatatatatatatttgtgccctcttacctatatctcatgcactcttatttgtatttttattattttacttcttttattttatttgtatttttgttttatttttctttattttaccttatttactttacttttgaggaagaaatagaattagaaggaaaacagaaaatcaggattttgagagagagaatcaagttatcagtaattaaagaaggctttctccgtccgacaagagccggcccccctccttctccctggttcttctttcttttttggattttttttattttcttcctctgcttctctctttgctcttggccgccatctctattaccagtacacactaccacctctctgctatcacccttccatggccgtcgctctcaccaccgtccgccttaaaactccaccatctccaactcctcttcctgactagccaaaaccacagatcaacgaccaccatggctgccacctacatccttcatctcgcctcaccacccgctgccacttctcatctccattatgccctcacagtccatgcaccgtcacctcccaagttgttgcttcctctctctctccggctccatctccatcaccacaccgcagccagcttcattcagtccacaacggaccattgccgacacagtcaccctctccatctccctcacagcctcacccatggccgccactacctattattgttattaggaagaaataatataaccatctactaggaaaacctagcattattttaaaataaatttatgattacatagatagctcttgatacatgggtatacctacaaatttctcttaaatagaaaattgtaaacaaattaacttttatatatttcttttacaattaatgactaagaagaagcttgactaggcatgagtcttgggtttggtcttgacctgatataagtttactttgaataatattgactaagtgtgtgaatgcttgatcttggattaaagatactacaaacttgatttttgaatcttcaaacctattcttcaagttttagaagatttgtaaagtttcataaattcttgaagcagactctttatgatttttttcaaatgtagaagtttgaaagtatgagagtatgttttgaaagttaaagaagtataaagattaagaaattatctttaatatcatcctcgatttgttttagagaaatttgtcctaggattataagcattagattcattttttatttacttattgtgaggaaatagacttcaagttggttatatacttgaagaaattgtgaaagtacattggaacctagtaatcaaagtgtaaaaggattgaagattttaaccttaaaagtcttagtgatagtggaatccccactcgttaagagtttaaggagagcggatattagcaaattatccactcttttatttgacattagcagattgtcaaaccattataagagagcgtgtgtatttccctttatcttttatttaattcttgtttagtatttcttattcctttcgtcattaattggttgtttttgaaaaaaaaaattaacatccaattcactcttttttaaattaaccattttttacaatcttttgactcatttttgtaaaggggataatcttagtggactctcacacttgtagcataccaagtccttctctttatctacattagaggatttcttcttttggaaaaccttccttggatatataggattttcttcctctcttttttcaaacctgattcacttcttaaagtttcttctgataactacaaggtactcttcttcaatcattaacctcttgttctgtatcttcttcttttttaatcaatcgtgaggctttaagagttatatttttctttctcttgtctttcacttcttgatgacacttcattgtgatttcataagtcatcaatgacccaatcaattcttccaaaaaaaagtgtagtaaagtctttaacttcttggattgtaatcttggtgtctctttgcttaagaagatatctcaaaatcttcctaatcttctccggtccttgtagactttttccaatgcttgaattccattaatgatgtcaataaacttgtaaacaattcaacaatggattctcaataatgaataatataggttttaccataaaattttgagttttctttaataggtttaaacttcaacatcctccaaacaaagacaactaatgatgtttgttaaatcataatcatgaaaaaaaaaatatttcttgccacattttgataacaatataaaatatgcctctggatgaaattttcacatcaaaaagtacctttttagagctaaaaaattaaataatcatgttttttggtttagctttttaatttttttttttttttctcatcataatttgcctccaactattaaaatggttaaaaaaacaactcaacacccccttgcatctgagaaatttttgaaaagttttttttttcttcatattaatgaaaaggtagaaactaaatgattgaaattttagctcattgatcattgttcaatttatataaatcttgtcaatagatggtcaacttagaaaaatattttcaatttaattaaggtttattggattaaaaatgataaaataattcttaattggtaaatctaaccctccactttttttaaccccaaaaaaatacccttttttaacaaaaatattcttttacatgtaaataatccaaatgttaaatgaaatttatatatatatatatatatatatatatatatatatatatatatatatatatatatatatttatatatggttagttttcattttcaaatatgggagacattaaatttactaatttaggaatgagactgtgaggcaagtattcttggaaatactcaaatattatttatcgtatggccaataaccattcccacacatcatcttcaataaatgatatagaaataaataaataaaagaaataatttataaatataataataacccgatcattcaaaggcataagattttaccctataaatctatccggcatttttgcctttcctcttctattattatcgcagatagcaaatttataaattaataaagtaaaaaaaaaaaaaaaaaaacctcattttatggtaaaaaatgttgcatcaaatcaaccgatttcctcaattttgatctctataaagggagtaaagaagaaccttgaaaccacagccactc

SEQ ID NO: 11514 - DNA, 813 bp, Vitis vinifera
  Intron number 3 from transcript GSVIVT01008271001 (locus G SVIVG01008271001) derived from phytozome v7.0 (chr-ID chr1 7; pos 3763677 to 3764489)
catctgtcagctgtgaaggaaaagctgccaggaaggtacctgctgcctacagtaatctctctctcaaattctacagaattgtacggttttcttcccacagctgactgcaagtctagaaaatgaaatcatttattattcagaatcacatatcccttgtatgaatttgtagtttttgtcaccctgtggaggtaaatgtgaaccaggacatggctgtttccatgttattgaattgtgtgttcctgtattgaattatggtattctgttattatgacaataggcaacattttccagtggtttggcttgaatgaatgatgtgtaggcagtctgtttcctggaagcatatggaagatgtttaatcaatcctggagattataaaatcttcactaaaagggatgcctttctgtttttcagaatggacctttaggaacaagaaaaggattccctcctttaatggacatgaaaataccaaaaaaaaaaacaagtgtaaagaagtcaagaataatgaggaagctacacaacacaaacccaacgccttgcctttctcctagccttgtgggaatcagataccaaaaagaaaacaaatagaactcccaccataaaccaattgaaagaggagccaggttgagatcctttatattctcaacatcgatcctatttttcccttttattcatcccctttttcattctctgtttgggcttcatgacagaaagggcaagtttcaattctacacctctctctttttttttgggctccctctctgttttggcttctgatttaatttgtttgtgaacatggcatggcagttctactgc

SEQ ID NO: 11515 - DNA, 2788 bp, Vitis vinifera
  Intron number 1 from transcript GSVIVT01020812001 (locus G SVIVG01020812001) derived from phytozome v7.0 (chr-ID chr1 2; pos 1682617 to 1685404)
gtcgtccgagagaagtaatcgccagttacgcagaggttggctaatttccgtgttttttaaacctttttttggagagttgtttcgtgctggtaaaaagctgcttaatttgatcaaatttacagaatatgtcattcatgtggacgaatagagaaatattttcatgtggttttgtgatttattgttcatttgtttcttttcaatatgttttttttttgtttggttttcttacgtaaattaagtgaagattagcatgaacatatgctttgaaatataattttattttttaaaaacattaatggtgattaggaagtggtatttttgaaaaattagcagtgatcatacaatggcatgaatgtaactgtaggaagtgatcattcctggtgcctacccatgaagcatccgctggcgatttcagaccctgtttgaagtggcttcttgaacttgaaaggtctttaaaagtacaatacgagcttttaagtgtgtttatttttattgaaaaagagcttaacatgaaagcaatttcagtgttcttcccgaggaagctattcagtttattttgaggatgaaggaacttttaataatactgaagttacccatttgaaatcatgctttgccttgtcaaaaacaaaatgctatcctggacagggtgttttgttgaataaggagaatttgattactctatgaagtcagatatttaattatccacatgctttataatttttctgattttttttttttttttgaattttcaaataaaggctattgatattgtcctgtttgattttccctgcgttccttgcacttgattttatacttattttaaaaactagcattttgttttgatcattcataaaagttttttttttttcccctttttttttgtggtgtcgtagcatataatcctcataacttagtgaaaattactctgcgacctatccaaaatgaaactttttacagtttctgcaatgattgtaccatttggtaagactgagtaatgctttgttttcattcaaacatatacatcacataaatgcttatgattttacaaaaatttcccagttgaaaaaaaaaaacctttttttagttgtttaatgattgtgcaatcgggtaagttgtcttcttgaaatgaaagtttcaactatacgaatatgtgagattcatggcattgaaatggttgtgcctttgaggcctagctcaagtggtaaagggatgggaagggtttatgggaggttccaggttcaagtcccaatggggacaaaaatttaccaatcagaaaaaaagaataaaaaaaggcattggaatggttgcgcataaaattaacatgtggcattgatgtcaatagttgatatgagtatgcaaaattatactggcttgatgggtctctcagatatgtttatccaatttttttattatcattgttaggactctgtgacatgtacaaaattatactgccatgatgggactgacatgtttatgttatttctactattattgaggtcattcatgcactgtattttgataatgctgcatgttaaattgaataaacatgccagagagacccattaagccagtataattttgaacatgacatcaatagtagcatgttcaaaattaaactggcttgatgggactgacatgcttatgttattattattattattattgaggtcatttatgaactgtattttgataatgctgcatgttttctgtttatgttatttgttgtttttaccatgcttttcaaaaatggactggacattgatatttccaccattgatttttgaaaagaaatactggtttgaggagtggtacaaacactttcaaactaagagttaaatgcaaatgtcgacatcttgtatgttgataatatcttttgttaaagcatagctacaggtttggatttgctcaaaatcatatgagatcagggaaatccttgcccaaattcacatggcattttgactttggaattatccaaaatcacaataaagcgcacacagggtgaattcaatcagaaatttttctgttggttcctggaatctaactcagtagaatctgggcctctcctctagagtctgattccgtgctacaaaatgaggctctagagttctcaaattttgctataatgctcttaccaccatgtagctcttagtttagagttttgtataaactacttgatcaatcttggatgcaattcaattaaataacattggaacatagcatatgatttctattgtaattatgatattttctactcgtttctacaattggttttcctttcctctaccctgtgcttgctattttctttgcgtagttcaatcctctcattttcctcttctgttcaagacattaagcttagtttattactgttccactaatggtcaaagactgcccatgatttagtgctttatcgacatgttcttccacagtaatacacttatttgaagtgtatggtgtaaaaactgcatggacttcatgttttgttgatttactttttacccatggaattgaacctagaacctcttccatcccactccaatccttcgcaacctaagccaggtatcgggggctttacttcattgttttgttgatttattttgataaaagtattcttggaaggcatatgatagtgacttcagtacattccaatgttattctaagatgtaaattattttgtgattaggatgtgcatttaaagattcttttatcaaagtgttgaagacttgtagttcatctctatggcctgatttccagaatctgaattcaatctcctgtcttgtagctctttgtt

SEQ ID NO: 11516 - DNA, 5430 bp, Vitis vinifera
  Intron number 2 from transcript GSVIVT01016270001 (locus G SVIVG01016270001) derived from phytozome v7.0 (chr-ID chr1 3; pos 5656223 to 5661652 reverse strand)
gggtaagggaatatttgcatggtattttaacaaaattgagcagttacattaataatgtagacatgtcttgggtcttggcgggcttctgttatgttgtcacatcatgtaggccaggttagaaggtgaacaatctcaagttaagagatgaagaaactattctgtttggaaatttttattccccaaagttgttatcaaagcccatacctcagagattggagtagcattcctgtgtagggtttggcatcattttgtctttggcattatccagttctcctttacattttatgaaatattatttcagtggtactctttttttttttaaataaataaatttcccctgttggattgggggtgttaaaaatctggcccaactcaatcttgttggaattgaggaatcatgtagttagcatcatctttgctttctttggatcctttgatgttggtagggttaataatggtgaaactaggagctttatcaataggtttaggcaattgagagtcaaaacttaaaaataaatatgcataggcgtacctgctgtttctattctctgcaatttcaacaatgtgtttgttttgaagttttttgtgtgtggggttcacattagatactttctatgatgtagggaaaccttagggtggttgtctaaaattaaatggttgggctaaagcttcaatcttttagaatttaaggagagaaatgacgaactaaaattatgggagctggacaaagaaaataaaatatagaaaaataaaaaaataatgaagaaaaataagaaaccttaagggtttcactaaggccttattattggagtctcacctagaagaaaaagtaataaaatttcacctttgaaaattaaattgcaatatatgtataagacttattattgtttatcattaatctcattttacagcaattaggcttacttgtaggctttggaaaaccttaaaaattgaataaaaacttaagctatgtaataacttatgatgattcttattcattctttaaaactatgaaatcttctaaaaaattaaaataaaattgaaactttctttttagaattagaagcttgactttatagaaaccttttgtaattagagtttctaataaagaatacttttagagtagctaacttttatgaaaacctaaggtttcatttaaggtcaatgtcttcatttggttagtgacacacaagaaggtaaacaccaatgacatgccctacaaagcccttagttttgatctttgctttttgtatatggaaagtggagaaactatggatcatctttttttatagtgtccgttgactttggagctatggtattgactatttagagtagctaatttggattgagttcccctatgagtctttgtgaaatgatgattatctcatataaggacttagggagcttcattagaggcaaagatttttggcaaaccatttgtctcatatgtttgggtaggaaaaagatgctaggatgttttaggacaaggtgaggactttagatactctttgggacctcattcatttctactcatccttttgggcctcttggtccactactttaaagggcattcctctcaatgtgttccaaaccgattggtattcagtgtgtagatcaaaaggttggggtagcaaggagaggagcattccgctcattgaattgttttttgtacattcctatttgctactatattgatgtataagtgtgcttagtattttggatgtgtcaaacatatttttttatcaggtcattgtagtttagggaagattctccattcttcttttgtatttctttatcctcatttaatacatttttttatgaataaataaataaataatacttctagattttgagaactcatgcaaactttaggggaaaaaaaaactttttaaaaataaaaatttagaaatgtggaaacttctttcaaggagaaattttcaataaaataattccaaatttgaaatcaaagtcaaatatcaatcactttctagagaaccaaaaaaaatctgcaaaattatgtaaatattcttgataaagtaatttggggtttcttgatttcttgtcatttttttctggagtagatcttggagatttatccccatcatgttttaggcacacactgtggtgctctgaagtgtagatcatgaggaggcattgtagcaatctattatttgagttaatggtttaaaagttataagccatggagttgataggggaagatcattactggtggcttggacactaatgaaggatatgggccaagatttatggagaggctgaggaagcattagacaataatatagtgtagcaatttgtatctaatggagaagtatcctctcctttataggagaattgcaggtgaaagagcgtgttgtgggttggtcagattgtgattatcattacaaacttccataactgggaataagatagttttttttaagttctgttattctttcaaaagctgtatccattaagaaaaatagagaagtgaatgatcaggaggtttggcatggaagtgtgataatgcctagttcttggttaatctgttcttaagatgttggagaattataaagagattgcattcctgaccaggagggtgtggatttcatctgttccaaccaaggcagctttgtgtgctgggttgtgtgaggggtaaatgattgatgttggatcacttgatcggttgaaattggataatgctgaagaggtgcattatgtgtgggatagaggaggtaggatcaaggatgggcaactggtcaaatctagtctgtattttacatggatgatagttggggtctgctagggtttcttcatagtttggtactgttccaaaagaatacacttgcaagttcattaaatcccacccctaattagattaacgacatctctttatatcattagtgtcaattttggaggaaaattggtaatagacataaaatcactgattttggttttatatttgttgtcatgtactactaggctaattctgtgctgctaggcaaaatattagccaaatagaagttgctcatttgtaattggtctttattgttggtgaaaattcatgctctcattgctaaagggcaccttcatgggcttgtctattgtatagatggttttttttataggcaaataaggataaacaaaaggagagtatagcacactagaagtgtacatgtgagaaaacaaaaagaaacaagcagcaacacaacttcaatctagcacttaaagctcaactactcaataaaatctataaagaatagtggaccagcttgaccatcaactataacatacgcctaagagtctaagaccacatatatggattagatataagggagtctttcaaagattagttagacatgtctcctaagttatcacaaatttaggcatgtatcctaagttatctcctttttccttctttctatcctctatcatcaagctcaacttctaagcaaaccagttccattcgttcttaaacattcaaagtaatctctagcaaaccctaattgacccccatactttcaaatcctatttcttattttcctctttaaaccttttcaccttccagccacattacccaatcaactttaaaagaaaaaggggagaatcaacttttatatcattgtgctgcctgaaccattattttcttcatccaaatccttctcatttatttttattttatttatttatttttgttttgtgctggctaattccttcactaattcatcaaagtatggtcctaattttcacacaattgctaactgagcaacctttccatttttataggaaaaaaagattttcattaaatgataacaagagataaggaatttgcaaaaatgagctatccttcaaataagatcaaacagaagattttcaagctaagatatccaatttacacttgtggaagggctttctttcttgttggtttccccactttgagggaaggaatgagctcaagatttcttatcaaggggaaaaaaaagaaggaaaatacgaaacatgaagaagaagctctgaagttccaaaattagttgtctaaatgaatggtttcttaatacactcattttctatatttttattatggatttgaattagtagaatgctagttagagcagctaggatcttcgccaattttatggagtgagaataggaaaagggttacccaatctgccatacctagtgagacgatgagagtcttcttccatcctaccattagaggatgagtggagcactaatgaggaagggcatggaattatatgatagaggtagtgctaatgcttcttgacacttggaaaatatgctttgtgcataaatctatgaatagagagtttaatgcacaagtaactaaacaacctgaatccaaaaatctttgctgttgtaaacaccagagttgaggagaagaatttttccttgcatgatgagaaattcaggcttcagactgctgagacagcttgtcagctctttcattctcctttgttcacaattaaccatcttatagccatacccctgagttagatcaactttgttggagtggagtaccaatcctctgcttgagtgagaactacaggcttttgtgatctgtccctttctgaagccaagcgcattattcatttagcaactgcatcaaactgcctaaagattttgataagaatcaaatgggcacgtttttatttttattttatttttaggtttttttatacgcgtgtactgattccatgaaagggtgaacgaaagggggagcagcatcaaattcagtaggattcagtttctatgttttggtagccatatataaggccaattttctgtttgcttgacaaccctcactgccatttcatgatagtcataaatacaagtctaaccttcattctcaaattgtgctgatagttattttcttttctctgaccttgacatgaaaagtagttgcatcctctaaacagtgtaagtgtaagagctcaattgggagagctgttaatttctacttttagcagtataagaactacttttgctatgtgattgatttaatgtttggaaactatatttcagaaatgtttttattaaaaatagaataatttttaaatttttaaaaatttaattactgtaaaaatctgcttactgcatcaggttttaaaaaaagtagaggtctcccctgttttcccaaaatgtggataaatcatgtcaaaagtgtgagacccacatttgtgagttttatccaaacatcattaaaaattgcattggaccttcaaatgtttcttttagcatttaagaagcacttctaaatagggctcagcctttttctctggtgggtgcctttagaatagtctgttatgtttgttccacaacacaaaatgatggacctctttctctctcgttttcatttttcctattttggaatgtgcagattacttcgacacttacatttgctgcagcctgtgc

SEQ ID NO: 11517 - DNA, 3769 bp, Vitis vinifera
  Intron number 2 from transcript GSVIVT01012069001 (locus G SVIVG01012069001) derived from phytozome v7.0 (chr-ID chr1 ; pos 1647446 to 1651214)
atcaaggtacaagtcgcgttatcgactataaaccctctttcaaccatcgcattcaaccacctctctgcctctaaaaccctacccatgttacagcaagcaacaaccattaacttgaaacttacacaatcaggagacacccctctttgacacatttcaacgaacatattctctgcaatttcaaccaaccccattcccactgcaacatccagaacacaattaagtgtttgggtacttggaaccaagccctgattttgcatctccaccaccatgttaacagcctccttcaattttccattttcagcaaaattcatcaccatacactgcatcacctcattggctctctccaaattcttgttaccaatcaaagcggtggctgaaactatgtaaaggcgcatgaaatgccggaatttaggaaacccaattgcccagtacaagaaactcaaggccaccatggaaccagcttcatcagccagcgaagcaacgaccgtaatcgcctggtcatgggtcagagactcggagtctaatgggaggtgcagctttggaggggtgaatctgacatgggtttgctggtaataagattgacagaccaaggaacagattgttctcacaacggattgtgagtgtgattgggattgagatgatgaagaagtagagggttcatcgtgaatgtaacagtgtggtctgagactgaatgtagggtgtagctgggagaggaagacgctactcaagattgacgatgctggcaatttctgaggcagtacatgaaaccgatgaagaagaagacgtaacaccatgaaaacagatcaatggtagaagaggaatcaacgaaaaatgaactggaataaaagagggaaatggatgattcaaaattctgtttggctgctaagaaaacggtcgggattattaacttataatcaacaataataattaataactatgggttgaacaaatttaaaaacctgtttggctgcatgttttgaaagataaaatttaaaagaaaaaaaaaatgttaatgtctaataagaatttgagaatttgtttttaaaaacagtatttaaaaataaaaaaataaaaaaattatttagatggggatttttaaaaataatttttgtattttcatttggtaaaaatactataaatttaattgatacaatagtaaatcttattaaaaataaaaataattttataattacaattaaaataagaataaatagctttaggataaattatattttttttcacaaaaattatactatttcagtatatctttttatcgatattacatctttgtaaaatctaattaaaattttaataaataataaataataataattgttaataatattttatttaatataaataataaataaaatttaccttttttaaataagaagatttttcattacatggtacctttaatattcaattataaatataaaatttcattaaaaatttcattacatcccgttaatatctcaataaatatactttataaaatttaaattttttaaagagattttggataaaaatattttaaaaacatattcttaataattttctaaaaaaataaattttacatatgaaatatatttatagggatattaatcaagaaaatttaatatcaatagtaacttattagacttaaaaccaacggatcacctttctctttattatattaaaattaaataatttaaaaatatataaattttaattatatttgattttcttttatattttctataacaaagcaaatatgaaaaaaaatcatttttcttaatattcttttttcctttccctaatatttttttggaaccaaatatagctttaaactattaaatcttattccatctaaacaattagaaatcataaatgtttaataaatctatattttatttttattataatttaaaccatttaataaattgtatattaataattaaactattgacctaacttgtaaaacaacgaataattttatttggttaaacaatagattcaattttgaaaacattgtataaacttatatcttaaactcatcttattcacaatcaaatgaagagtaagaacttcttttataaaataataataataataataaacaatccattaccaaaaactctcacccacgatgatctagaaaataaggtggagaaattctatcttcacacattggttatgcttgtgaactttaaaagtctccaaggtacattgcacccattttgaaactatatatgtatatatttccttattaaggcatctttgcatgttgcatttatattaagctttaccactacctttcaattaagtaaagatcttccaagatatttctaaccacccatattccttttttccttaagttgccctaatgatggagaggaaatggatggtatctttgatgaataatgacaaattaatagctttccaagtacactatgattttggaaaagtttatttgtgatacatggaaaaaatattaaaaaaaaaaagaaagaaagtctagactcatcgaaagatggtataaacaatgaaaccaaaatacaaagaaacaagattacgtataaacaataagatcaaactaaaaaatatatgtttgaactcgtatgaaataatgaaatctaaatgtaaagaatatgattaattttgttttttgatatttactgaatcaataatgtaacccaatcctatatataagattagtatccatatatacaagtattgtatccaagtttgtacaataatttttctaagcttttctaggaatcaatcaatcccctttattaaaggagtgagaggttgaagatgcttcaaccatcacatgcacctccatttttccatgattgcagatcaaaaggaaaaaactacaatgacttgtggtcccatggattttccatgagcctgaggtcaccaagagctacaagacaaactaaaactagtctattttcctgttatttttgtcaaagttagacaaaacaaagtaaacaaaaataaattttacagctgccacttgacattgctcccatgaaaattccatggaactgccacctaccataccactcttgctaatatgcttgtttcactttttcacccaaaagaaaccctcacacagtcaaagagtttgaaagggagaggtgtagtgcaaaagggaggaaaacttgaaaagcgtcacatgcttgctttgattaaaaggggacaacaatcattcttttttatttttttgttgagttttgactatcatccacttcttttctattgttcatcttttactaatcacatttagctctaggatttttgataaaatacatgtacaggcaacccattataaggcaaaattcaatgaagataagaaatgtacaataagtcttttttcactgacacaagacacccaataaaaaatagccacatagttttcaaagtaggtttatatttgcttatcttggcaattgttttatttctttgtgcctggtagatccactttctcaatattcgatcatattttcttgtatgtaagttctataactttgtattattattcaatggtttagatttgactacatacattaagagctcagactcaaagtaaaatacgtaccgaactagtagcattgaattttccaactaagtattaataaatgtttgttgttgtgatcccaatgctttaccaaaacttaatgtagatctggcacaaaatacatagaagggtttgttagactaacaccctttttcaatgtgtaaaggaataaagaaagagaggaaaaaaagggaggaagat

SEQ ID NO: 11518 - DNA, 2279 bp, Vitis vinifera
  Intron number 2 from transcript GSVIVT01014169001 (locus G SVIVG01014169001) derived from phytozome v7.0 (chr-ID chr1 9; pos 1049025 to 1051303 reverse strand)
gtggccagaaaggtagtgtccctaggaatgtgtaatgactaatgattggcaccaaaatgtattgggtgttcattgatttttggcatacctagcataaatttgagcatgaagatatttccatcatatttatgtatgtgaaaacaaagataaacaatcctttgttgaaaaagatgaagcaactttctcatttttaggcaaaagtgattcaaacaaattggtgctgatttatgtgtaaaccacttcaaggtcaacagtgttgaacaaatcccataaaatcgccatgtcatgattcatgcatggatttttctcctcaatattacagattcaacatcaggaaactactttcatgtagcataattagttgtaaaggagaaacccctacagaatctgtggattgagctcaataaaccaggctcaaatcttttgtgattgcttttatcaccagagtttttgtgatcgactccacatgttaaagtgcagttatattgatgattgaattgcaagagtaatttttctcttgaacatgataatcttacttctaaacaagagcaattttcttgacatggactgtagtacaatcaattgataaaaacactatatcctattattttgacatggtggagattctcttgaatttatcctgtaattttcccttgacattgattgctttctaaattaaattgtaggttgacttctattgattgtttacttaactttgattactttttgatgttttttccttttgtgattgctcattgttcatttaacttgcaagaggcaataatttttttcttttccttgaatttatcctgtaattttcttccttttgtttcttgtttttttggggttgaattttttatgaatcaggaaatgatatttttgcttaatgcatatccttaagagtgaacggttaatgagccttgtagggtgatgtatggtaaaaaatattacctaccaatacaaaagaagcaaagttctggtcctgatttgctctctcatgtgtggtaacctccgttatctgttttgattagggtttttttttccacacacacacgcacagatatttcccatttttaatatctaaaacatatttatgacttctctagtcaatgttcataattttaaatggtaacccatttaagacagattaggtggctatttgtacttttaaccaactatgggcaatagcagcaccaagctccaagctggttcacttcaagaaagaaaattcattctaaactgtgttgagtaagatgctgaatgttttatattgttcagtcccttggtttaagttttttgtttcctaaaattttgcaattgttctttcacagtctcaggattttgcttccagtgttatttcttgttttattattgggaagcttggtttctaatcttctggaatcgagcttataaagaaattctaaaattacataaagtgtagaggtattccataggacctattagctcacatgactcttgcttatatgcttcttcaggctttagcacattttcttatgtgttcttgtgtgtgctattctctttcttgtcaacactttttgcttcccacttctttgttttctcatatttttggagtccttgtctgcactgtagtttagaaagagatggaatcatctccattccttttatagacagaggcgatgtcattgtaatttttctttttatcttcttttgataagaaacaagaaattgtattgataagacacagacggaccatctacaaagacaaactaagctcataggctgaaaactgaaccagagtgaataaaactacaaattcctcgtgtggaagaaaatctccttcaaggactatcctcctcagctagtgggagagtgtccaaggaccttccttcccagaagaaagaaaataactgccaagatccccttcaatttgaaggcttctaatgctgacatctaaatgctaggaccagccctcctgaagttctaagagctcggcttcaatagccatcctgttgtgtgatcttctcacacataattttgtgtgtgaatctaagcttcatttttaggtctagtgagactaattttcattaaaagtagattactttcccagaaatatgcttgacatacctttcatgaggggtttcacatattcatgttgttttagctgaatcatgcttatattactatgtcacttgctacttctttaactggagaacttgattttatcttgtcattgtctcttgttagtattacaagatcaaaaatattaatatcattttcctcaactctagagatctggg

SEQ ID NO: 11519 - DNA, 7156 bp, Vitis vinifera
  Intron number 33 from transcript GSVIVT01018288001 (locus GSVIVG01018288001) derived from phytozome v7.0 (chr-ID chr 15; pos 11739383 to 11746538 reverse strand)
gaggtatttgttacgttttgtttattaaatctaatcagaaacttgtttcttaggacctgaaagttgtctggtttcagatgtttagcttgactgaggttaatgggctgtgccctaacttgcctaatcttcattgaagaaaatggcaggattgtagttggttattagggttctaacacactggatataagccaaatatcttgctccaggatcctaccagaaataatttcatgcatccatcctcagaaactggacttatttatcatcaagagttgcacataaacttcaatatactgaatgcactggctatttcttttacataactacccaaaatttcattgctgaaacacctcttatactggtagttgttagtttttgaatagatatgattcagaaaagctttgttcagattaaattaataaaggtctggaggtatatgaaatgcttctgtgctctgtcttaggttactcaaaaataaaaattaccattaagatttacctttgtaaaactcattagaggcagtgaccctcagtaaaccttctggacctgcacgctaggttccaatcctatcatataaggctcaagggggtgtgtgcaaaggcttcaccagctgaagcccaaggaggaggaaataaaataagtcctaaactgcctccaagctccatctattctcagaactcacatctcttttccaccaaatagtccatatcaatatgggactagtaaaagtccaaagttatgaggccccttaaaattctttaaaggaaatgaaactgggcaggaaacagagagactgtttttgttatattattttatttcttcaacacaagtagattgataagctaggttttgtaaccacagccctttattttaggaaattcacaccagctatattttaggatattcaaaccagctgtaatattacagctagcaacaagtaacacaatctcccataattagaaaataaaccaaatcttggattttatcgttatttaaagaataagaattattcgggattctctacactcccccttaagctggactaaacacattgaataggcccagcttgtcaaccaacttctcaaacactggcttgaatgatcccttagttgacaaatccgcaacttgctatgatgaaggcacatagacaacacaaatgctcccatcttcgatcttttccttgataaagtggaggtccacctctacatgttttgttctattgtgatgaacgagattatgagagatggcgatggcagcctcattgtcacagtaaatcgtcataggctcatttctcataaatttcaatttatccaacaatatcttcaatcatagtaattcacaaatcccatgtactaaagctctaaattctacttcaacactacctctagtcaccactgtctgtttcttgctcccccacatcactaaattaccccacacaaaggtgcaatattcgattgttgacctcctgtcttccactgatcctacctaatctacatctataaaagtcttaacactgctctcttcacttttcttgaagaataggtctcgtcccaaagtccctttaaggtatctcaaaatctgacacatggcttccatgtgttcttcataaggagaatgcatatactagctcacgacactaactacgaaggcaatatcaagtctagtatgggaaagatagataagctttcctattagacgttagtatcaacctttatcaattagtgtgctttcagattgttctcctagtttcaaattaggatttatgagtgtacttgcaggcttacaccctgacatctctatctcctccaagagatctaggacgtacttcctcaagactgaaataccgcttctatttcttgctacttccataccaagaaaatatcccaatgggcctagatctttaatctcaaattctgctgcaagagtattttttagcctttgcatctctataatatcatcaccaatcaagattatatcatcaacatagactatgagaatcgtagtcttaccccttttttgtctataaaacagagtgtgattgggttaagcttgttggtaccctgtcattgaacccttgttcatggtcatagtaggttctgcaaaaggtgtttgtggctgtttaggcttaggtagtagtgtttgtggttgttcaggctttaggtggtggtgcatatacgggagcaatgacatcccaaatatttccatcctcgctaactttctcccctttagggaaagttttggtgaaaaaaggttggttttcaaagaatgccacatccatagaagtgtaatacttgcatgttcctagtgagtaacacttgtaccatttttgtgcaggagagtatcttaagaaaatatatttttgagctttagggtcaagtttactcctatcattatcgtggatgtgtacaaaggaagtgcaatgaaagactcttaatggaagtgaagagatagattggttgtgaggataggttttgagaaaacaagttaacggtatttcataattgagaatctgggttggcattctatttattagataataggcagtaagaacaacacccccccaaaggtattttggtacattatttgtgaacataatggctctagttacttgtagaaggtgtcaattcttttttcagccatgccattttgttgtggggttattatgtaggagctttgatgaataatgtctttctcagagagcaaacttcctagaatagatttaaaatattcttttttgttggttgttttgagaattttaatgtttgcattgtattaggtgttaatcatagcataaaaaaattttaacacttgctttgcttttaatttttctttcaaaagatatacccaacaagcccaagtgtgatcatcaataaatgtgatataccatttttttttcagttaaatgtttaactcatgaaggaccccaaatatcactatggactaatgaaaaaggtgatgaagccttgtattttttagcaggataagtggaatgagcatgcttggctaattaacaaatttcacattgaaataaatctccattatgaaatagtgatggaaacaaaattcgtatatatgaaaaacttgggtggcctagtctatgatgccgcaacattattttatgtcctctagaaaaagacttacaacttgtagtttgagcttgtttattcaatttggcttctttctcaaaatagtatagccccacacattctctagcattgccaatcctcttccccaaagtcagcttactaatagagagaaggttgcaagacaaatttggaacatgcaaaacaaagtgtagtttcaattttatgactaattctagtagttccggttccttccactgttgaaagagatccatctgttattttaaccttgaaacttcctgaactaggattttatgactagaataatttttcgcaacctgtcatgtgatctgtggctctagtgtcaaatcacctaggtttctagatcattgatgcaactactaagggctaagaaaaaattacctccttgtgctagaaataaagtattggtgtcctatgatggtttgagtagtttgtacaattgctccattttctctttggtaagcaagaactatgtaccttctccaaaaacattctactttgagctaggatctggttagttagagatctcagctaaaatatgaaaaccagagggatctcgatttccaaccctactgtccttccaatttggcggcttaccgtgtaacttccaacatcgacctttggtgatttgttttcttgcagaaatcagaccaaggattgtttcttttttagttcttaggggattcttgaccaggaattgctaggactgaaacttcaggcaatgatggttttgattcgcccatcataacccgttttcaacttgcctctcttcagcaaatattttagcaatcaatgggagaggtttgattcctagaagttggcccctgactcatcaagatcaggatttaattccaccaaaaaatcaaagactcattcttttttaatttgctttttgtatagttcaacatcctgaggatttgactatggaatttggacataaagaccaatttcctgcgacaagtgagtcaaggcactgaaatattgggcaacatccagctccccttgtttcaaatcacgagctctctttcaaagttcaaaaagttgggctgagtttttcatgtctgagtatgctagagttaatgcatcccacatctccttagcggtggaataatatagataaaattccttgatatcttcttctattgaattcacaatccacgccataaccatggagttttgtgtgcatccatcccatgttggaaaagagagatctcctggatcaggtttttttattgaaccatccgcataaccaagatggcctcatcctctttagagcagaccgagaccattgaaggaaattttgattattcagtttcatggttgtgatttgaagagaagaattttcggaaaaggttggaaaggaggctgcagtggatgaacttgtggggatgggctgagagacttccgaagagacctcagaaccagcatccctgcactcaccagttaaggttgttctatacatcttttttctcaactggcaccagctctaataccatgaaactgggcaggaaacaaaaaaaaaaaaaagatgaaggaaaaaaaacgctgcagaaaaaaaaatgggcagaccacaaagtggatactgtttttgttatattattttatatcttcaatacaagtagatttataggttaggttttgtaaccacaaccctttattttaggagattcacaccagctgtaatattacagctagcaacaagtaacaccatctcccatatttagaaaataaaccaaattctggattttatccttatttagagaataacaattatctgagattctctataggaaataattatcatctcttctaaacttttaggtggaacccagttaatcacaagaagtattgcaccatgatactatggggcaagtaggaagagatgatcaactaattctccacgccccttgtttaaaatttagacgtgacaatattcttatcatcgatttcgtgatttgccaaatggatttttttatattttttattcctaatttatggaagtaatgatagattgatttttgagcgctttgatttggagaaacacgtacctttttagtacaaacaaaacaagaaactttttaattgtttagaactgttcgtgtcatattcataactgaaatatcttaaactgaaccaaaaagtatgaagagtattgcctacttggtaatttataatttatgatagatttcttattgtctattaaaaaaattataatttactatggatgataatactaagtcaacagtaagctataattgcagcacacccattatctttttcttgtttcagcctccaagttggttcaaaaccattgcactcaagtcttaaatgagtatgttcaaccatgcatttactctaagtcccttttacgtgatattttacttgttcgagagctctagaagttaattttttgtaatgttagtagtttcaccggaaaatatatctgtcttgagaagatattggcacttctcgctattaatctgagatgtttaaatgacatccaatacaattatataagttaattcagtgcaccatgcatcactagtaaatttcttttttttttttttgataggaaatgacaaaggaatatattaatagaaaaaagaagtacaaaagaaggatgaagaatcctcccaccaaagaaaactaaactacaagaatacgaagacaagaaaatacaatgtaataacgaacaaactctctagactagaccaacccaaaggaattacatgccgctagccaatcaagttgtaacacaataaggggagtccccgtaaagaccttggaacaaaaagcccaaagagaagtaaggaaatgaatagaatcccaaagattctctgaattccttgctttatcaaagatcctcacttttctttcccgccacacaacccaaattatagctatgtacgcaacttgccacaaaactgtccctctcttatataaaccaaaaccattgtaattgatggacagcatgttgaaaatgctcctcgggggaacccaatccgtcttggttaactgaaataatttgtgtcataaccccattgtcaaagaacaatgtaggaaaagatgatctgttgattctccatgcctcatgcacaacttacaaatatcaggactaagagctttgtagggtcttctcaattgtagcaagtcattagtatttaccttcttgtgtgccaccaaccagacaaagaacttgactttgaaagggacttgagaattccaaacgaactcagtagggaaaactggaggagaaccagaacattgggataaggcaagaaagaaagatttgactgtaaaaagccttgaagaagataaagaccaggatctcacatctgaaaccgaagatgacaaatgcaaacaatcaagtgaccgcatgaggcccatcactagtgaactatcaaaatctgtttctctgggatgtaaggttggtgtcatgggaagttatggttggggatctttcaacatcgaatcctctggtgattactgtggtccttttggacaaagatttgttatttggttaatagggcttattttggttcaaacacttggcaatgacctggataaggatataggcgactacgaggttgttttaaggtaaatttgctagtgttaaaaaatgggaaagaaggggtatttttgttgttttgtgcaaatgagtgattctggtgaatctggggtaaggataaatgggcaggctttggaaatcatttagatgcttgaaactctaattgaacagcatacaaaaagttttaaaaagggtgtctactagtttagtactgtattattaaagggttgtgaatgaaattatatattctagtttctggtttatcaatgattgtctgatactcatgtagtggaagtacttgaggagaagttaaactgctttattgtttcacttttgtcttttaaggatatgttacttccctacctatgaaatggcatgttaatatgtggaatttatatggaccaatttattgcaagtacctaattgcccacattctcacttgcataaaaataatcttcttaggtgg

SEQ ID NO: 11520 - DNA, 16807 bp, Vitis vinifera
  Intron number 1 from transcript GSVIVT01030954001 (locus G SVIVG01030954001) derived from phytozome v7.0 (chr-ID chr1 4; pos 19628944 to 19645750)
catacggcgtcgtttacaaggccttcgacaccgtattctattttccactttctttcccccttttttttcctaaacaatcacaaatatagaaaaagcaaattatacaaattaagtttaaattgtttggctctttgtttgagacatgagaaggcagaaatcagtagacaaacaacaactacaattctataactatgttggtcccgtttagatttatattatatatttttggaaatcaaagcatatgtatcgaggcataagatttgaagtttcggattcgtttcttttccgttgttctttttctaggcgggcaaacggagggttagggaattgatcttgctaagtctaaatttgtgggtggcatttggatttgactgggaattttaattctttggactgggaaatttttgctgaatcggggtttatagagtttagattcaattccgaacaaccccagcaaataaaaaaagcagagctggattgatctggatttccaattctgaggacctggaaaattttgctgaattgtagtttatagcgttggaattgaactccaaacaatcccaaactacatgcagccaaacataaccgacagaattgcacgttgtgttgatcacctttgatacccttttcctcaagatttgagcagcatttttgtttgtttctgagaaaaacagaggaatatacaaattaaaatggaacttctaatcttctgttttcagttgttttggtttccataaattaaacaagaaaattaggtttcttttgttatggaaaatatttactggttttcattttctatctttacctttttgaaatattccttattttatattttcctaccaatttgcatctatataagcttctaaacttagctctgcattctttttaaacaatattctttctctagagtagatttaagatggtgtaggattttgtaaaccatttgaagatgtgtttcttttggcttgtgtatagattgactcactacacttacaacataggctatattccaccatgtatgtgatagataaatcaatctgctaactaacttctggtacctttctcagtctactattgcatccttatccactttatgcagtttatggttctggctcaataggtgtatcaacctgtttacatttgagttgtcccatctctttgagaagatcaactaaatacttaagttgtcatacaaatattccttgttgaatgtgccaatttaattcctaagaagttgttgaactaccaatttcctaaaagcttaagcttgtaggatttgggttcaatatgcatatcatgctcttcaacacccttcctcatgtgtggccccaacctgcacatggagagatagacagatagtggagagagatagatgggctcataggcaagaaaatgcaaatagcctgtttttcgggacttacagatatgtgaatgggaaaccaaatatacaaattgtggaaagacgactcgaacatgagacctcccattaaaccaaggttggatactatgttgaactaccaattctcctaaaagtttaagcttgtaggatttgtgttcaatatgtatatattgctctttaacagaagtacttgagtttcccaagctccgttatctcaaattccttagctatttgtttttgaagtaggtgcctttcttttggatcattccccatcacaattatgtcattgacatatacaattaagattggaaatccccttgaggttgagtgctttatgaataaggttatggtctacgtgaatttgcttataccccatctctaacattaccttagaacatctttcgaatcatgctctagaggattgctttaacccatacaatgccttatttaactagcacacttaattcttgtcaaaactagagcctccatggatacctcttcttctaagtcatcatgcaaaaatatgttttttacatcaaattgttgcaaacactaatcaaggttaattgctaaagagaacaaaacatgcacggtattcattcttgccattgagacaaatgtttcttgataatccaccccatgggtttgagtataacccttagctaccaaccttgctttgtatctctctaaagacccatcaactttatatttaaccataaaaacttatttacaccacactgtctttttcctcttggaagatcaacaacttcctatttttggtttttatctggtgtctcatcttagcacccatggcctttttccggttcttatctctaagtgtcttatgttatgtttggggaatgtcaaggaagttcaattgagtgagaaaagttctgtatgttagggattatttttccaaggatatgaagtgagatataggttattgagggctttttgattccttttctaatgttaatgagtatgtttaggtcattaacaacaggagaaggaagaggaagaagttcagtacctggtgctagcttagattcttggacctgcataggttcaagaacacacttttctcctggagtaaacttgaagtgtctgggcagcgatgggattagacttgacagctgtaggaatgacagtttcagattcagattcaatggaagtaattgttggaatttcttgggcagttgctggaatttttgggacatttgttggaatggtggttgtgtcttcagacttgagcccataagaacttgctggaaagtctaggaacaaatccttatcttccatagatgatggtggcttcccttgaagataaggattttgaaagaaagattgtttttcagaaaatgtgatatccatgtccatggatataaagaacttccttaaaggtggatgataacacttgtaaccttttttttttttagagagtaacccacaaaaacacactgtgatgtccttggatcaagtttatttcgattatgagtatatgtacaaatggtacacatccaaagatcttaggaagaagtttgcaaaaaacattgaaatcaagaaaatttgaaaaaacacgttgatgggattcttgaatcctaaaacttgagaagttatccgatttattaagtgagctgctgttaacactgcttcaccccaatatggttctagaaacatttttgtgggcataaaagagctcgagttacttctagccaatgcatgtttttatgttctaatatcctatttctttgtggggtatccacactagatgattggtgaatgataccttctttttggagaacaagttgacaagctttgattgaaaatgatctcttgtattgttagatctaactcttttaatacaaaccctaaattggttttgaatcattctatagaagatcgggaaaacactactcacttcaaatttttgttttaggagaaaaatctaggttattctagtgcaatcatcaagaatgagacaaaccatgtagcacccaaaatatttggaaccttatatggagcccaaatgtctgaatgaactaatacaaatggagtagataatcttgtattacttagaggaaatgaaacccaatgatgttttgcagactcacaaacatcacaatgtaaactatcaacatcaacacttttaaacaacaagggaaaacatgtttttaagtgaacaaaggtggatggctggatgcccaagatggaaagcgatgaagccagatttcatctctatttgatttgaagttttctcatagataagaaagcaggaatcagcattttatttttttgataggtaaggtgattgctttcataaaaacatggaacttaataaatggattatagcatcattttctaagcatttccgtttgagacaaacagtctaagacgaaaatgtgtgcttcaaaaatttctagctgtaaactacttggtgagaattctctccttggcaatgttagtttccatggaggtgttagtgaacagaacttccgttattgaatttctctggtagtagtgtttgtgttttgaatcttgtttgaaaaagatgattcgaaatcagtcggttgtagtggagagaaaggttttccaagtgaagtctgaagattgcaatggaggaacgtggatttcaataacagagagaagtcgaggttttgtggtttctttaggttttggagaggaggagacgggttggttagtggagcagttagagaaagctgtggatttggaggcttccaggggtttcattcaaaaaatgaggggcaagactaggactcatctgatggagatatgttttaatagcagagggagatatatgaaaatcacagaatatgttgcaaagagaaaacctttggtcttagttgttccaagaggtgttaatggttgtgggtgggaaaatcttaggaagatgattgtttcagtccaagagttctctgttcaagctgaaagagattcgaaggagaagcaaaaaaagcctcaagagagcaaaggaatgtacagaggtgagaggtcctatgctgatgtggttgcagagaaaggaactaggaatggtgtagagatgccagttggaaaatgggcaagagctgtggtttgtgaaagcaaaggaaaaatacgagactggtgtgaggttggaaaagctatagcgagaagggtggggatgaaaggaatggtgtctgtaacacccatttctgcttacaaagggtgtttttttgtggaatctgcaaggaaagatcagtggattcaagatcaagggagcttcacagcgagaggagaggttattgctctgaggagatggtcgccaaaagagaactcagttgttaatggaaaatttagatgggggtggttggaactaagaggtctccttttccacctgtgggatgaggtgcagttgagacacattttgcagcagtgggggagggtaacgaaggtggcgaggaaatcattgaagcttgttgatttgacgaaggtaacattgtgggtggagatgcttccaaatgtcgtgcttccagcgctattagaggtagaagatggagattggacatacatggttgtagttatagtcaccggagaagatgacggagaagactctatcaagcctgagtcgaatcgcagcaaggacgagctgaggtcagccgggggttgcgtctttcggaagccacagaacgttgaggggctacgagctattgacaggaccattgagtgccatagctggatgcctcgtcatctttcccattttcgttcttcagattcaaaatcggctaagggggggaaaggaaagggaaggtggatgttgggcccaacaacgggaagcaacatcgggccaacaccaaacgcctttgaagcccattttgattgggcccaatttggggcgaaagattttgggcccctagcgggcccagcccataaaggatcctctaatggcggcccagatgcatcttcgtcttcaaagctcctaagaccagggctcactgcaaagaataaaatgccgaaaggtcttctttaagtgtcgtcaaagccgaaaggatcttcagtctccgtaaggcgcagagcaagaagtgggccgccgagatttgaggaggcgtcttctaccccgaagcgaaacttagaaggaagtggctcattggagacaaatcgagacacttctcggggcaaatctcactccagaaagagcgatctctccactggttttgaaacatccaaagtttctaccggcgagacagagggagaagaggggattctgcaatgcaaattgatcaatgaggtgcgtactcctttctcagctgtatctgagcgagatcttcctctgtctggggcttttgagcaaaattttattcccgaaacctctgtttctgtggttcacccttctcgctgtcagtctttttcttcgattccgttggagtcaagctacgccgtttagtgtggttccgtttttatctctcctgtggtgaataacaaccatcgtggtggtgcgtcctgttcggaaggtgtggtggttcccctagaaacctctaaccgaaaatttaaagaccggcctctccttagggaaactctcagtaaccctgaggtgtgtggtgtctcaggtgaggcttcgttcccagtgctagaaccttccaccctcccgttggaaggttttcaggttgaggggcttacgcctcggaagatggtcaaggttcagtcggttctggagagtttgagggttagaattgtcagggataatggaaaaggtgtggaaggagagaacaagagtgctctctctgcggacaaggtttattccagaagaaagaagaaaaatgactctggaactcgaggagaggattagttctgggtgtgggttgtgtcgggttgtttttgttttcatgaagatcttaagttggaatacaagaggtttaggatctaggaagaaaaggaggactgtgagaaggtttttaagtactcaaaacccagatgtggtgatgcttcaggaaacaaagcgtgaaatttgggataggaggtctgtgagtagtgtttggaaaggtaaaagtctggattgggttgctcttcctgcttgtgaggcgtcgggggggattgtgatcttgtgggattcaattaagttcaagtgttcagagaaggtgttaggatctttctctgttactgtgaaattgaactctgatgaggaagagtttttttggttaacctcagtgtatggcccgaataaggcagtgtggaggaaggacttttggatggagcttcaagacctgcatggtctgactttcccaaggtggtgcgtaggaggggattttaatgtgatcaggaggatatctgagaagatgggtgactctaggttaacagtcaacatgaggtgttttgacgagtttataagggaaagtggtttgttggatccccctcttaggaatgcggcttttacatggtcaaacatgcaagtcgatcctatttgcaagaggttagataggtttttgttctcttctgagtgggattcttttttctttcaaagtattcaagaggcccttcctagatggacctctgaccatagcccaatttgtttggaaactaatcctttaaaataggggccgactccttttaggtttgagaatatgtggttgctccatcctgagtttaaagagaagtttagagattggtggcaagagtgtacggttgagggttgggaaggtcacaagtttatgaggaaactaaagtttattaaatcaaagttgaaagagtggaatatagtggtctttggagatttaagagagaggaaaaagcacattcttacggacttaggcagaattgatcgaattgaacaagaagagaatttaaatcttgatctggtttcggaaaggaccttaagaaggaaggagttagaggatttgttattgaaggaagaggtacaatggagacaaaaatctagggttaagtggattaaagaaggggattgcaactctaagttttttcacagagtggccactggaagaagaagcaagaagttcataaagtctctgatttctgagaggggggagactttaaataacattgagattatttttgaggagattgtaaatttctttgggaatctctattccaaacccgaaggtgactcttggaagattgaagggattgaatgggcccctatttctgaagagagtgcaatttggttggatagaccgttttctgaagaggaggttcaaatgacagttttccaattgaataaggaaaaggcccctggccctgatggctttattatagcagtttatcaagagtgttgggatgtgataaaagaggatcttatgagggtgttttttgagttccacactaaaggggttataaatcaaagtacaaatgcgacattcattgctatggtgcctaagaaaagccaaacttttaaaatctcagattatagacctattagtttggttacaagtttatataagataattgctaaggtcttatcagggtgtttacgcaaagttctacatgaaacaatctttggctctcaaggagcctttgtggaagggagacaaattttggattctgtattgatagccaatgaagtggtggatgagaaaagaaggtcaggggaggaaggggtagtcttcaaaattgattttgagaaggcctatgagcatgtggattggggctttttagagcatgtgcttcaaaggaaggggttcaaccagaaatggagatcttggatgaggggctgtttatcttcttctagttttgctatcctagttaatgggaatgcaaagggttgggttaaggcctctagaggtttgagacagggagatcctctttctcctttcctttttactctagtagcagatgttctaagtaggttaatgattagagctgagaaaactgggataactgagggtttccttgtggggagggataggactagactgtccttgttacagtttgctgatgataccatatttttctctaaagcctctttggaccttcttcaaaaccttaagattatccttttggtttttgggcaagtatctggtttaaaaatcaacttagaaaaaagcaccatttcaggtattaacactaggcaggaggtgttgtctagtttggctttggttttggagtgcagagtgtcagagtgacctttgtcttatttaggccttcctttgggagggaacccaaagacaataggcttttgggatccagtggttgagagaatttcgaggaggctggatgggtggaaaaaggcctatttgtctttgggagggaggattactttaattcagtcttgtctgtctcacatccctagctacttcctctccctctttaaaatccctgtatctatagcttcaaagattgagaagatgcaaagggattttctttggtctggggctggggaaggaagaaagatcacctaatcagatgggaggttgttagtagaccaaaggagatgggaggtttgggctttgggaagacttctatgagaaacattgccctcttagggaaatggctttggaggttccctagagaaaggagcagtctttgacataaggttattgcgagtatatatgggacatatcctaatggatgggacgccaacatggtggttagatggtctcatagatgtccttggaaggctattgctcaagttttccaggggttctccccttttgtccgcctagtggtgggcaatggggagagaattcggttttgggaagatctttggtggggaaaccaaactttgtgttctcaatttgctgatctctacagagttatttctgtgaaaaacctcactgtctcaaatgtccttggcaattccttaccattgtcttggaattttaactttcgccgcaatctaacggatttagaaattgatctccttcagagattaatgtcctcccttaattctgtgcttctttccccttcttcatcagactcaagagcgtggtctttgtcttcatcaagctcgttttcagtaaaatcttttttctatgccttgtcaaaagtttcaaatcctttaatgttccttccggccaagtttttatggagctcaaaagtcccttcaaaggttaaggccctcgcttggttagtagcacatgggaaggtaaacactaatgacaagttgcaattgagaagaccctacaaagccctctgtcctcaatggtgcattctttgcaaaggaaatggagagtcgattgaccacctttttcttcattgtctcgttaccattggactttggcacaggttgttcaatctagtaggtgtgatttgggtccctccaaggagccttgaggacatgttggttatttcttttaaaggcttagggaactcattaagaggcaagacactttggcaaattgcttgccttactttgatttggatggtgtggcaagaaagaaacaataggatctttgaggataaagggagaacggaagagatggtttgggatttgatccggttttattcttctctatgggcttcttgtactgaagcttttagaggagttcctctaagcattctacaactcaattggattggggtttgcgtttcaagagtttgaagattgatggggtttcttttgtttttagagttctattgttgggtgtttttccttggtatttgtgtaggaaggacctctcatccttcccttggtttttttctctttcttttgtctctttttctctcctgtatttgttcttttattaatataatcttcttcgtttctgatcaaaaaaaaaaaaaagaaagcaggaatcagctgcaattacctattgttgtttaaaaaaaaaaatggagtcccttctccatagcacgtctaatcatcctccccttaacctaatcctgaaacatacaataagtagggaagaaagttacactacaagtttagtccttggtaatttgatgaatagacaaaagattgacgaatagtttaggaacatgtaacacattctttaaaaaaagagagggatttagagtgactgccccttgagtggcaacaattgctagagaaccatcaacaactttaatcttcatatttccaaggcatggattgtatgtaacaaattggtgtgaagtgtgagtcatgtgatcagttgcccctgatttgatgacctaagaattagaaatgatgtgtttgaggcactaagagtataagacacttatctgtctgggccaatgaacatgatcttattggtttctcagtagtgataaggaggtttttcagcctttcaaattcctctttgttgaggcccctaatttttgtaacattgagacttgaatactcatgagagttctcatgagagtgatcttccacatttgtcaagtgtgattgacttccttaccatccactcttgaagccaccattccgaccaataccttgtggtttcccatgaagtttctaacaagtctcttttacatgatgaggttttgcagtatgtacaccatatgccatcatggtcatatgactttaaaattcattcttcccttcttttttgttactgctttgtccctcattattaattttgaatccaccatcatttggctttggaaaaatcatagtagagccatctatagattaggaatcaagcgcaacaattcttctaccttcttctactcaaatcattgagaacacgtcattcagagaagacaaagactttttcccagaacttgcactcgaacttcatcaaactccacattgagtcctttaagaaattcaaaaatcctttcccttgctacaaatttttgtaacatcgtagcatcctcactacactttattttaaaattttgataatagtttagttcaagctattaatcctttcataatgttgtaatacttaatcattgagagtgcaccttgtttggtgacagatattttatactcgaacttcatcaaactccacattgagtcctttaagaaattcaaaaatcctttcccttgctacaaatttttgtaacattgtagcatcctcactacactttattttaaaattttgataatagtttagttcaagctattaatcctttcataatgttgtaatacttaatcattgagagtgcaccttgtttggtgacagatattttagtcttaatataataaatttgggctgtgtcttgcacgttggagtaggtttgttaaactatctcctaaatcttctttgtagttgtaagaaacattcaggttccattaatttcaggctgcatagaattccaaacccaggacgtgattattgaatcttcctcattccatatactaaacttcggatcatctaggtttggtctagtcccaatcggatgactcagcttcccttttcctttcaggaatgtcttcattagttgtgaccattactggtagttgtgaccattgctggtagttgctaccatttgcggcttgaagcttttggagttttctcgttgattggttctgttgagttttagtggttggagtagggagattgattttggatttctcgagcatattcaaatgatataaggcacagaaggttggctataaaggctatataatcttttttttttgaggaatttcaacaatgaaggccatagaataatctaaataatttcctagagaatgtatgatttgataccatgtgggaaaatatgataattcttgtattcagagagaactattggtacaacctttatatatatagaataaatgggctaactaaggaaactctgactactctatcaatccttgtaaatcggggataatttatttttaataagaaactaccatattttaaatttactactgttgacaaattaactaagattaagaaaatcttagatttttcaacaaatatccatagttggatttagtatgcccacctctgattcaaatgtctcaaacaagttgagattttatccacatttcttttacttggaaaatcatcctctaggaaactaacatcttgcaacttggtttcaggtacactcctatcttaatatttgctaagcatcacgcaaccctttgattcatcaaaatatctaataaagatgcatttacttgttgtaggactaagtttttcctatccatgggagctagtgtgaacataacttgtagacccttggggttgcaagtgagctaggtcaactttcctatttgtttacaacttgtatggagtataagtaataaactttgagggtactcagttcaagatgtaggcagtggtcaaaagagcatcccccaaaaggatgtaaaaaggttcgcttgcgccatcatcatctgaatcatacctaaaagcgtgcagttcctcctttttggcagaccattttgttatgaagtccttagaaccatctactgtcattggattcccttggagtccttagcattgtcaactgtctttagattcccttgtcatcagattgactctgaaaactctctaatagatacttgcacccatggtctatccttaatgtttcaatagttctttttgttaggttctcttccacattcatgaaaagcctaaagcaattcaatgcttttaacatgtgggagattaagtagatatagcccaataagcctttcttggttaacttgtttattctatcttgccaaatatggtcaagcctagcatgccatcttacatagtctacggtaatagtcataagggaaaccattataattatctactaaagagccaataccataaaggagtattcccaaaaagagtcttggcattgtttcataaaaaaaaatgaattgaaaacctagatagaatggtagaaagattaacataagcaatgtaacaactgacaaacaagttttgcttgatattagcagtaagccaaacttcgtggagtaatgaagtatgatcaccatgcaagtgtagttggtaggtactgatgctcaacactgacacactagctatagttcccatgaagatccgtggcttcctaccaatacttaatgaatccagaacaatccagcgctacatattcagttactccttagactacaatccaatcaagagacgaatgaacaaccattacatgattagaaacataaacacttctagaatctaagttagggagtaccctcttgggcttaggcaatcacgagtgaaggttaagtttcctcaccatgattaaaacatgctttgctagctttgcacttctcattgtgcttgtgcttggtgttctttgtcttgtcaaacttaagtccctcattattttcctttttggcagttttctgaagttcctacacttagggctaagtcccttgtgtgaaattccctctactacatatgtggagccatgtgcttttgcaacttccaagcacgtactttcaagttcaagatgacatgaaaagtcatcaaacattttgctgttctcattatgtcatgttgatcttcttatgttcccatgagttaggaagggaatgaatgctaacttagaccagttgctcatcagtgagatttttccctattactttcaatttgcaaatcattgttgacatcattctaagatgttgctttataatcctattcgagtgcatcttgtatgggttaaacttaaggctcaacatgagcaacctaaagagaggtttgaccaaacttatccttaaggacaaacaacatatcttaagcagtttgatacctctcaaacaaactgatcaaatcattgtatatgctgcttaacatggtaaaacatgcacaatggtccttgtgccaattttggtaggtaactaattgggtattgtataatgtttccttgctcaagttcaaccatcaactaagttaggatttctagaacctcttgctcatttatgagagattaatctcttgcttttaatatattctctctatttacttatcaaaaaaaaattatgagacatttgatcttgcgatgttaaattagcaattttgtttgttcaagattaaaagaaaaactatatttatatatataaaaaaaaagattaaaagaaaaactatgttctcaaccatctttagtgcacataaatccattactgattttttactaaattatgcaccaaaatgtcatagaaagttattttctatgatctttattttaaaaaaaataaattttcatgtttgcaaataattcttacaataataattcacttaaataaaatgcttgaaaaataaatccaaaaatcatagaataattcccatagtccaaaatatttactaatattctttggaatattaaaaaattgagacaataatttttatactagatttttcttgaaataattaaatttaataattgagaaattgttaaaataaaataaaacacaatacaaacaactcaggaaaaatataagaggtcactaaaatgataaaaaaaactatcttcaaaacatttttgttcaaaagacaaggtcaaaaggctccacatgcgctcccacttatttaaaaagactaagggctacgaaaaatagggaaaaaaaaatcccaaaaagctaaggaaaatgggagttctcatccaccgatgtgtttaaaaaggtcattggagggtgcctcacaagctgccacatgctagcagtgtgcagcaacgtggtgagcttggtaggtgagtaggcaatagcagctcacattgttgtgccctctatgtgcctccttggcacataggtgccatgtgtcactttcctggcgcataggtgtcatgcgtcgtcttcctggtgcataggtgccatgcatcgtcttcatggcacataggtcccatgtgttgtcttcctggcacataggtgccatgcgtcatctccctggtgcataggtgccatgcgtcgtcttcctggcacataggtgtcatttgtaatcttcctggcacataggtgccatttgtcatcttcctaatgcataggtgccatgtgcgccttcctagcatgtaggtgtaaagctcctgcctagcatgtaggtgcaaagtagcttcctaccagccattagaatctcagctgctaccaatctccttctcttaatcttagaattccattgatctatctattttctggttttggtgccttgaactctgtttgaaaagcactcgttctctactaagagcagatccccatttctagaagaaaaaaaaaaaaaaaatcctattttccttcattagtttacttgaatctttgaaaaaatcatgtctttcttaagttttgtcaaaaaattacaagaagtatctagttggaaagtttacaatgagagatatttttttcatttattacttttaaatatgtttgagaaaggatccaaccagtaattaaagttaattttcttttgtaagcaaaaagagaaacaaaatttgcatcggatacaaattgatgcatggaagacaggattagatacaacctgtgctttaataccactattggaaaatttaatattaaaaaaaatatttgtttttgtggtttgaacatcaaacttacaaaaatgagaaatgtacttcaagagcaatttttcattatgaacaacaataataataaaaataatactgcaagacttagatctaggtgaatggaagaagagcatataccctatattcgcaatttaaaagtctcacttaagacacaaagggagagagaaacaacagtttgcatgctttaagtgtagagaaaagaggtgccccatctttatcaacaccaagggagagaaccttgtagaattagaggcaaactcccatcattcatctctagtcaatcacaacgctgattagagaaaacataggaagggcttggtgtcataggactttgcccactttgggtgacttttgtgactcaaactctcaatttcaattcactaaaaagagttagtatattatatcatataaaaatatgtccacttcatgataatcaatataaataaaacagagtatgtgatacatattccttttataattgggtcccaccagatgtaaatctaacatatttgtaatattttttattttttttatgttgtgggttatgtgaagtgtttgtgttattcacctttgagttttcaagtttttataaaacacatttcacttttgttaagaaatttttgaaaacatcagattgatatttttttacattttccctatttcaactcagttttggattcgatgttccaaacaatttttaattttttttttatatttgtctgcaaaaagggaaagggaaatattttaaacaaaaaacaggctaaaaaatcaaaagcactcagcagaaattgttgtactaggcttatttgtgtatagttttttttttggttatgatttatttgagtgtaattgagcacagcttttagttttttcttggtccaaaaattgtctaataaaggatttttttaactttaatttcatctaagttcttatgttttcctgacaatgaaaaagtaatgattgtgagattctatgaaattgttcgtcattagaatttaatttttggattgtgcagactgggcagactgttgccattaagagaattcggct

SEQ ID NO: 11521 - DNA, 8862 bp, Vitis vinifera
  Intron number 3 from transcript GSVIVT01013489001 (locus G SVIVG01013489001) derived from phytozome v7.0 (chr-ID chr1 3_random; pos 1653801 to 1662662 reverse strand)
ggaaactttaccaggtaagtgctttctctttcatcttttcttgtaatgtgtaaactgacacattttgcatatattgctatattttcttggctgactttgataaacctggtttaagtatatcatttcaagtcaattgatgcaactggacaagtgcttgtaggcattcattctctaagtttagaaaggcatggaaaaatattaaataacatgtttattttttttatttttttttattttttttttataggtaaatttttgttcccattgggacttgaacctgtaacctcccacaaaccttctccatccctttaccacttgagctaggcctcaaggacaacatgtttatatctaaccagtcagaccataagtgctggctacttggttagtttttattttgatgtcttttaccactagtaaagaaaaaaatgaaattttaagcacatgcctcttggcttaaactagtggaatcataaaattggatatccttttcgagaaatatttgtttcatcactaccagaggattcatttgtctagccaagactagtagatcaaaacatatgactttattttcacatccacaattttttttttttgattggaaacgacacaaagatttattgatagataaaaataagtacaaaagaaggatgaggaatcctcctgccaaagaaagctaagctatagaaaaatacactgaaaaacaagcaaacactctaaaaagaccactccttatggagtacacgctgctatccaatcaagatgtaacgcattaaggggagtccccttaaaaaccttggagcaataagcccaaagagaagcaaggaaaacaatagagtcccatagaaactctgaattccttgctttatcctcaaaaatcctcgcatttctttccctccacacaatccgaataagagcgatgtttgcagcttgccacaaggctatccccctcttagacgaaccaaatccattgaatttgatgtacatcatgtcaaggatgctcctcggggggacccaatccatcttagctaactgaaataacctgtgccataacccaatcgtcaaggagcaatgaagaaaaatatgatcagctgattccccatgcttcatgcacagaatacaaatatccggactaagggctttgtagggtcttctcacttgtagcatgtcattagtattcaccttcttgtgtgccactaaccagatgaaagactgcactttgaaaggaatttgagaattccaaacgaatttagaaggaaaaacctgaggagatccaaaatattgggataaagctagaaagaaagatttaactgaaaaaagccctgaagaagataagggccaaagatttaactgaaaaaagccctgaagaagataagggccacaatctggcatctggaaccgaaggagataaatgcactccatcaagagatcgcatgaggccttctaagtcctcaatcttagaatctgacaagttacgacgaaaatttaaattccaagagaaaggacgagtaggaccgagaactgaagaaataggtatgtttttatccaagactactctaaatagacttggatattgggatcccaaaggttggtccccccaccacaaatcttcccagaaccgaattctttccccatttcctaccacaaatcgagtaaacgaggaaaactcctgaaagacttgagaaatagccttccaaggacagcgatgtgaccatctgactattgtgttggcatcccaaccattggagtgtgaaccatagatgcttagtatgacctgatgccatagagctgaaccctctctagggtacctccacaaccatttccctaaaagagcgagattcctcagagaaatattcccaaaacccaaaccccctatttccttcggtttacacacgacatcccacctgactaaatgatcttttttgccttccccaatccctgaccataaaaaatccctctgcaacctctcgatttttgcagctactgaagcgggtaacttaaataaagaaagaaagtaacagggtatatgggtaaggcaagattggatgagagttatcctccctccgaaggataggtatgccttttgccaaccatctaatcttcttgaaattctctcaatcacaggatcccaaaatccacctgccctggggttcccacccaaaggaagacccagatagagtataggccaaccagaagccttgcattcaagtgtcttagccaatcttgaaatatgagcttgatccaaattgataccataaatattactcttgtctaaattgaccttaagtccagaaatatgcccaaatgctaacaaaagactcttgatagtctgcaagtcttcctccctagtgttagaaaagaagatggtgtcatcggcaaattgcaattgagataccctagttctgtttctacccaccctgaaaccctccaacatatttctctcctctgctctcaaaagcatcctactcaatacatctgctactaaagtaaacaaaaaaggggataaagggtctctttgtcttaatcctctcgatgccttaacccaacctttagcgctaccattcaccaatactgcataagataccgaggacaaacatccactcatccatttcctccatttaggactgaaccccttcttctccaacacttgatctaaaaaatcccaccttacgtgatcgtaagccttttcaaaatcaattttaaagacgacaccttcctcccctgatcgtcttctctcatctactatctcatttgctatgaggaccgcatccattatttgtctcccttgaacaaaagcgccttgagtagaatggatggtttcatgtaagacccctcttagacgccctgaaagcactttggctattatcttatagagactagtgatcaaactaatgggtctaaaatctgagattttctttgtcgtactctttttgggcagaagaacaatgaaagaggcattagtgctttgattgataactccgctcctatgaaattctgcgaacactctcactaaatcctccttaatcacatcccagcagtcttggaatactgcaatagtaaagccatcaagccccggagccttgtccctatccatctgaaatatggccttagaaatctcttcttcagtgaaaggggcatccaaacttattgcactttcttccgaaataggggaccaatctaatccttcaatactccaagactctcctataggattcgcgtagagtttttcaaagtaaagtaagatctcctttgtgatgctctcggcattattcaacactaagcccctttcattttccaatgtcttgatatacttcctatttctcctgccattagccactttatgaaaaaacttagagttgcaatccccttccttaacccatttcaccctagctttttgtctccaatggatttcctccctcaaaattaattcctctagctccccttttcttaaggctctttgatctaacaattcagaggtgagacccccatcctgctcaatggcgtcaaagttagctaaatccttgaggatactttttttcttttcattaagctctccaaaagaaagcttattccattccttcactttgactttaacaaattgtaatctcctcatgaacttgtggccttcccatccatttccttgaaaacccctccaccaatttctaaagttctccttgaaactaggatgttgcagccacatgttctcaaatctaaaaggagttgggccccacatgaacgggttggtatccaaagcaattggccaatgatccgaggtccttctaataagggtttcttgaatgccttggggaaagagctgcccccactcatttgagtaaagaaaacggtctaatctcttacacacgggagactcttgcatatttgaccaagtgaatgatgcgttccgaagaggtggatcaagcaattcactttctctaataaaactatcaaagtccctcatgcttgaagttagcctagagccccccaatttttctgaacttctccttatgacattaaaatcaccgcccacacaccacaacgggaaagttagaccataaatgtcataaagttccacccaaaaatccttcctaagtgagggactatttggaccataaactgcagaaatccaaagaggtccacagccctccaaggcgaacttgaccgatatcgagaaagagcctaataccacctcctccttgcacaacttttttgagtcccaaatgaacaaaatccctcctgaagccccacacgccgggagaataacccaatccttatttctgaccgtccaaacactgcccactagccttctgtcgcacttcttcttttttgtttcctgaatcatcacaacatccgggttctctaacctaaggaaatctttaatcacccttcgcttattacttgaacccaaacccctaacattccaactgataattttcatggaaaaacactccggccctaaccctccaaaccaaatccacctggattcaaacgcctatggacctctattcttcctcctagagtacaccttaatgtccagagagcataggacctctcgcactttagccattttcctaggggacaggccatctataagaaagtctttcggcggggatgcctcattaacccccggactgcctggcatcaggttagaagacttcccaggggtagatctctcggacatctggttagaaacagctctctgattctcctcctcaacttggacagggatgccaacaaaatttaaggggccaacatcgcctatttcaggaaaaattttaaatttaccttgatttaccgaaggagactgggaaagaatttctgaatatgggagatgaggaccggagggacacggaagattcttttccagattacaggaaggatagggataaggctcgggtggctgagaagaaaaagactgacttacctccaagttttccactcccggaatttcacaatttcctcccaaaatgatttctttacctctggttcttggaatagaaggtgacaccgtgactgaagaaccacaaggatcgtaccccgctcggcccgtaaatcctcctttgtcatctttgagttgggattttcgtgattccatctctcctcttgacgtcgaggtttcttccttcgaccagctgttgcatttccttggcagaagacaacggaagatgggactctctctgatacctcgtatctgttgagatcccatcccgccatccacttccagattgcggacttcgcaaagtgacgctgcgctccttaggggaagagtctcgctgctactccgttgtccatgacggcgagccgcgcttggaaggaagagtttggaccacatctcccttgaatccatcgtcttttccccttgcgtgaagtcttccatctgatccattggagctttcccctttctcgctgcgccttctccctctcgagacctatatctcatgccagacgacatcaatcctccttgaacttggcccaaccccgacgggcctaatgacttacagcccacagcccgacgcccgtaactcacctcttctgtctttgaaggtgggctagggttggatgaagtctgggcttgaaactcattggcccgaccatcctctccaagtattacctcgacgccggccctctcatcgcctgaacgaggctgcgtggtcgcttttgcagaggagcccgctcctcgtggagaagaaagggatgccgctgcgtcatgggcttgagggacgtctgggccagcgtgaagcccacgactccttctccctttttgggcccttactggatgggctttagtagaagactcaggcactatgggcccaagaatgtcttcttctactaagcccaatctgcgcccttcccatcctttctcccttttggccgccatgcttgtactcgaacaccgataacgtgcccggggaagaagctccctactgcagcactcattacccctgatactacctcgtagcccctctgcaaattttggcgtctgagagacgcaacccccttctttcaaccactcgtacctacagtgggatgtctcggacgtgacattgccgtcttcgccttcttctccgatgactgaaactgctactgtatgtttccaagccccgtcttccacctcaagcaacgctggaagcacgacattaggatgcatctccacccacagcttcaccttcgtcaagtccaacagcttcacggcttcccttgctacctccgtcaccctcccccacttcttcaagatgaatttcagctggtcttcctcccacaagtgaaaaggaaggcctttcaatactaaccaaccccttttgaattttccaggaataatcatattttctcttggcgaccatcttcttaggagaacaagccttcctttcactaaaagtctctcctgctcttgtaaccattttgctcttcctgctgtactcacaaagaaacaccccttaaaggcggaaatggggtttatagacaccatacctttcacacccaacatcctcgcaatggccttgccttcatgagtctagtcttgaactttttctttgcattcacatattacggctctggcccattttccagctgataatggaactccactcctaattccatcctctgcaaccacctctgcgtatgaccgaccacctctatatatgcttgtactcatctgattattgccaaacatcttcttcagctcttctccgacttgatcagaataatcttgcactgaaagaatcgccctcctaaggacttcccatccactacctttaacaccctcggggatgacaagaagtagaggtttccttcttgtagcaatctcggtgattttcatgaatcgccctctattgttgaagcaaatctccatcaaatgaatcttattctcgcccctgaactttcgtgtaaatcccctggtattctccaactccacagctttcttcaagtgctccgttaaccaatccacctcctccattccaaatcctactgatacaacaaaaccacggctcctttctgttactgatacccaagttccaccattcgatccttcaaacttcacctgaaaagactttttttccacttcaaacttttcaactttgcacttcatcatgcctcagatcaaagcagaataacttgttctcaggttattttccggcagcagctctttcctctcattgtgatcttacttcttcacatccacaatttgctgagcttgaaactggagatttgcaaaaacatggagattttatacctttaaaggcatacaacttcattgaagtggtttttgacctggagttctgattttattcatttttttttctatccttgatgagttcaaagagaaatttccccccatttatgtctcctttggaagtttatatgattatcttttgtttcaattgaacaagtcagtgtttagagttttctgtgtatcatacatacataaatatatacatacatacatatatatatattgtagaaactgagaatcactctaatattcattcaaaaattgtatttgtttacataatcgggtccctatttaacatatacacagagagcaaaaaatggaaaaaatacaaatatggaaaaaattaaaatcacacaaattacccacaattggggcctcaatctttccctcaatatcctacaaatcaccattcaaattataccggattcacacacacacacacacatatatatatatatatatatcatatcaactttgttagggctttcccctttcctttttctgtaccagattgcttattaatgaaataggaaaaaaaacatccataatctcaatactgcattttttttgccccctttttgttttttgacaactttatagagtttcacactttatcatatctataatctgtgaaaatgggcatggattttagcctcctatagatataaggagttggatgccacaacttcctgaaatcttaaaatgaagacatgatatatacatgtggtagtagtgtaattaaatgctcttgcaaattttaagatgacatttttcctcgctcctcattctattttcataatagcctcatgcattctatttttcattgttcaatatttttacttgtcttttctccaacagcaagcttttgtaatgttattctatctccttttcttagcagtgacaactttctcctatagattctcatctacaactagttgtgccacatttcgcatatttattttttccagtctatgatagtttgtgaggaaaagcttatagcttgtatttgcaattttcgtaggtttttattgacaggctatgttaacctttccatcactgtatctaccaagtttagctcttttttctctctatgtccctagacttctggttgcttggactacctttccatatccagaatcatgcatcaaagaaacaccttgaattttattaaccttttctctcatgagaaaggttcaatttgtgtcattgaccttgatgataatgctttgttgttgctattgaaaaattaggccagatttttccatatactataattatatttcaggttgaactgcagagtaaattctctttggccaagtttgggttgatgtgacccctttaattctcatgctgtgctattattatagaaaatacaaaccaagcatgctgaagttatatttttgaaaaatctggaaattaaggacatctttaacatttttaatctccaatatcttttttttttttggtatataacaaaaattggttttatgggcaagttgaagagtgttttgagatatgtatgttcttcattgatttttctgttctatgatagtactttgatctttacaagtgcccccactatgacttctaatatatatttttttctttctaatggaacagtgccttcgaattggcag

SEQ ID NO: 11522 - DNA, 5182 bp, Vitis vinifera
  Intron number 1 from transcript GSVIVT01027899001 (locus G SVIVG01027899001) derived from phytozome v7.0 (chr-ID chr5 ; pos 9170634 to 9175815 reverse strand)
aacaagctcgtggaagttctcgaatttcaaccaaggtaatgtttgcttgcaaatttaattgtccacatatacttaattatggtaaaaactaccgagaagaaattccgtatgtttccaatttgcttctgaagtggtataaattggctttgcttttagtagtgagtttttccaaaacttgttatcttgttccctagatgggttctcttcaatctgaccgaacaattcattttggtttagaacaaatgggtgtctcttaaaattctgcaatgaacccaactgtggaaggaaagtacttccaaaaataagaaaaaggcaatctaatgtcattcaacatcttaaatgagtaattttttgctgatctgtagctgtggaacaaatacttctaagaggagcgatatgtatgtcatgcaacattcttcatacacctatatacatgtcaggcacggacccaaatgcatccagaatttaaagctaaacctttgatatcctacacatgtcaacactggtcaaaaagtagtggagacattatgacatgaatggttgtttttgcacagaaaatgaatatgggtaaggaaatttaataagatagagatagacagggtagtattagttgtaatgttttatgtattacatttattgagcttcatcttcaaagttatgcaattgctatcttcatataaaagtgtgagtggcttaatccaagtcatatgtttatcaagtaaaatatgactatatgtgaatattattgtgtctcaccttgtatcactattggctttccattttacatgtaaaagtaaccatgttgtgccctttccatgtcctgtttttcttcacatataatgatgattgagcagggatgattgaccctggatataaagaacttaccttttggatcatgtcaaattgtcaattgtgggatggtgagaggacatggctctagatagagctgaatggtgatcaagggtagtttattccaatacacatttctagacctcttcatcataataatcattcctttcagccttgagctgtgacatggataattatcaaagcagacctggaaattcctgtaattcttcatgattctagactttattgatcttttttcattaagtaccaatttgcaatgtgtctttaattccattaagacactctgggcatgataacagcagaactggaacttctttttcaggtggtatcaataatgcagtttgcagcatttctgcgagcataggataaatgagatctggaaccatgccatttgttaatcacatttatagtcagttatgtgtgtagatagatagatagatagatagatagatatgtgtgtagatacatagataagtagatatgtgtatagatagataggtgtgtaggtaggcagatagatagatagatatgtgtgtatagatagatagatagagagagagacagatagacaggtgcagataattatatattttttgttcttatttccccagcagttttatttagtggattcccttagaatgtacaagtattggttttctttttcttgatcctaaaaataatctgactttagaaaagaactatcatgggttttgttatttcatatccgtagaattctttttcccaccctcctagtagttctatcttcagatttggcattttcatcatatgtccctttcatcagtcatctattttcttgctgacactggaattgtctcaaatcaacataatcatgttgcttagttgttgttttgaatctgtattttgatcttcagcaatctcaagctatatctattcatgcctctgttttctcttcattgagaatctggattgtttttcttttggtgtatgctctggctgaatgtgtactgtgcctcatcactgcacactaacattggcaactttatcgagcatcagaaaaggctttgttgctagcattattcatttctatgtccaaaaatgactgggtcaaagaaagaaacagagacattaaatgagaatacaacactggaggggtcatagttactgttgttgtatctatttgtcttttaaatgagggtctgagatcagagattgaaagaatggtaagccattgtggttaggctcctaaaaacaaaccaaagaacaaaagaaaagggcacatgtgatagcttccccaagaatgacacctctctctttgttgtcttgttgtttttttggttaggcaagaatgaaaaagaagagattcagcattttgggaaagaaaaaaaaaagtaattgaaaaaagtaggaaacgacaaaggtgataaaagaagttggagaaaaggaggaacaaactgggtgtttcttattgaccacaattatatgcagatacaatttgttcagccttatatataggcaattgggccctagtttacatggattgtgatcctgatgattattagtaataaaccatgttacttggttatgtgttttaggttgtgacttaagcccatctaggtccaaacctattgagggtgcctgtgtgggactcatttcagttgaatttaggtcaagttatttgctacttttggcctgtgtagggcctaatgttcaaccggggcaaagtttgtgatttgtgagcacttatttcaattaaccttgagagaagctgttaaagatatcaggctgattttgggacagagttgtatattcttggaactaatgtgatgagagttcttttccttctttgttgagcttatcagtcatccatggaagtttattcaacctaagaagttggtttttataagttgcatggtaatctggcatatatctatgcactgtgtcatttttctttgctgcccacccattgagagaatcagaaacaatctgtagctggtgctgttaccattcgctattagcttttgtttgcaaggtccaacttcttaggaactctaggactgaattcaagaccattccattgaagccttcccgatctccatcaaatatacaaattctattatgtcaagtttcccctgttttcatttagggaagtgcttgctaatgcactttcaaagaatggcctttaatgagaaaggaatgtgcagtgatgggtgaaaatctagggaatagcttggtatttgaaatattccttgagggattagagaaattaggaatttaaggcttgttgaagtttcaatataaccagatgcagttgattcaagggagtcccccaatgtcaacatctgcctcctcaaataggctccttttggttacaataaaggtcctgatgtatcagaaagctgcatcagaaactaaattagcttctctacattttattcttggtgtccttggacccaatttcagcatcaatgagacactgcagttgtttttctgctggtaacacataatcatggcagaggtttcttagagtctcttgtcacattcaaagattgctgacaatctgaatcttcccttgacagcgttaaatagctttaattatgttgaagtgtcatgaatagtgagctcttgagcatccatattgattatttgcaggaaacccatcatctttattccaggtatccatgtctttactgcatcttacaatgaaattgggctgttattctcctcggaaacttaagttctagattaaagaaactaggtttaatttatagctttattggaaatcaagattaaaatgaaaagtaagctgttgcaaatctttagctggtcatgaaaaagttagatctcaaattttcatggattctaaccaagccgagaacttatttctctgtaatccatgtgaatttctgaaacaaccgtcaaattacttaaacccaattcatttatactttggtcttctgctcccaattatgctcaatatactttgggtttcttttatctacaaataaagtatgatacttccatagtaagttattccatttacatgtgattatatactttggcaagggaattgttaattctccatgctgattcgtgtcatggtgagatctgtagtgaatttaaaaggtttcatgggaggtgatagtaatttctgagctcatatttaaatgggtctatttgtagtagtaaaggtaattactcattattataatggtcttttttttctactattggtggattaagcagtcaattattatattgacagtttaataatagtaatttattattataataattgacagtttaatccggcaatattaggtgaaataattttaatttattattgtaataattgacagtttaatctgccaatatatatatatatatattaccatgcttgtttaggtgcaatctaagttaatagcttcaaatacttgatctaactacaaacacaaattcttagtatctgaacttatttcatttctttaactgagagtggattatgaaaatcttacacttgaatatttattttgaaaacatgcaaatatatactatttttgagctagactttagttcattgttttccaatataatagctttaagtgtaaaaaatagttttccaaaattgagtcaactctttaattgtacagttgattggtatggggaattgaaactcattctagaaccatagaaacacaaaggttcctacatttttcagttttctagtacaagaattatattatattgcttaatgcactgtagaaggatggattgtgcattcagcttgaaagagtgaagagttttttttcaaaagaatcaccaatagtatttggatttctggtttttatgtatgccagttcacttgtggtgacaagactcagtaattctactaatgctctgtgatagctgttctgtgtgttcaaaattgttggcctgtcaagaaaatatgaatatacctaagatgtaagtggcttttcatatttaacaagttacgaaaacatgccaaagaggctggtggaacacttgttagaaacatgcctttattcagtatggcttacttgtttgctcaaattttagactaacaatctttttaaattcttcaatttgtttagtgccaccagaaataaaataaaaataaccagtaccctttggttatctaaagttgtaaattacaatgcagttgaaattgcaaaacaaaatttctccattggagaatcgcttgaatttgtgatgtgatcaactttggtattgaataactgcaatatatatgaacaattaactttgtatcatgttgtttaaaccactccttattcccccatttgtgcctgcagtg

SEQ ID NO: 11523 - DNA, 4954 bp, Vitis vinifera
  Intron number 14 from transcript GSVIVT01022468001 (locus GSVIVG01022468001) derived from phytozome v7.0 (chr-ID chr 8; pos 3386270 to 3391223 reverse strand)
tcaaaagttcagagagcaacgaagaaaacaaaggagtccctacatgaagggttcttccctgtgaagacatcaagttatgatggaagttaatagctagtctccatggaaagaaaatgagacccataaattggcaaaccaaccggttcaggcacggggacatgttgcctgcctctttggccttacttatgcttattatgcagcaagctcagattgagggtggaggagtttttggtgtacactgcaaattttccctagggttttgtttcagacctgttcattcctttcaatgcttatgaaatatgattgattaacagaaaaaaaaaaaaaaaaaaagagggggaaatttatgcagaagctagaatattgtaaaaacaatcatttagagttgtaagtaaaaatttttgttgttagcttccaaagatgatgaggatgacttgcttggggcttatcaagcactatacaaggaaagcctcaaaatcaagaaagaaaatataaatttgtctaagtatcttgagatcaagagtagattccgatgtactgtctgttttttgtttttaaaaatatgtccaaagaaagatttggatgaagattttgttgttcaaacacatccttatgaggagtatcttcctactggagaaagctaatcctgaaccctcattctttaggattaaactcaagtccatttaggtatggctgtagtgttaactgcaaaggaactgcataattaatactctcttctaacatttcttgtaagtcttgtcggctaaatatatgaaattcaactaccaattggagcacacatcattgatagttcatccatatagctcctttgatcattagtttatacctaaaatcattttctttttatttttattttttattttcataatttccccccttgttttaattagtattagaacatggatgggttggagtaatgtaagtgtgtttggtaaaacttaatagttattacttaataatttaagttgacttaaagttaaattatacttaaatttttaatttaaaacttattatttaattcttactttgagcattaaaattatttgataaaatcatattaaaatttattctaaatcatcaaattgacttaaaagttaaattatacttaaatttgaaatttgaaatttattacttaatttttattttgaacattaaagttatttgttaaaattagattaaaatttattccaaatcattaaattgatatatttatccacataaattataagtaatgcaaaggaagttgagtaacaatagagatcgtgtagtagtaaaagagattgtgaatgtaattagggcaaataagaataaaaaggtaaaatgaagatgtgaacttaaaaataaattaattaattttacttattatttaaaattgttttttattttaaattataccattaagttattttatcaaacatacttaatttatttaatgacttaaatttagttatttagtcattttatgttattaagttgatttaccaaacactcactaagtaggtgttttttttttctttttacttaaatctaaatagaacttaatttaactcaattctaaatacatcttaatagtattaagttgtttgttttttattattttatttatgttaagtattgagtcttaatagggtcaagattatgttgagattttgttctagttattttaaaattttgtttttaatatttagtaaaaaatgtcaagttctatttatcaatgaaaacacaaatactatcttagtttaagaaatctcaatttgacttggagttggattggacttgatagagattttaacaattcaagctcttctgacactcaccccaaatatttaagtaataaatattaagttttagtaaatactcactaaaaaaagtgtttggtaaaaacataatatttattatttaatgatttaagttgaatttaagttaaattattcgtaagttgttaacttaaaactaattacttattttttattttaagtattaaaattgtttgataaagctaacttagaatttattttacatcaccaaattgaaatatttacccttattaattttaacaaatatttatatattcactaattttaagcaataaatttatttgttaaacattcatctttaaagtattattaatacataagataactataaaaaaatataatattcaaaatgagttgtgaatcatcattataaaatatattttcattaaataaaagtaaatgaggtaaaagtgatttgagattaaaaattgtagaatcccagacgttactaactctcctaaaagcaattgttgttaggaatgatgcatactctaaccttatagtgcattcacacaagcgcttacgacattcaaacataagggaagttgatggacgtgaccaactctctgatctaccaataagaataagttaactattttgacttaataaccaggtttttacttctctatcgtgtaagattattgaagtctaattatataattatattggttaagaaaaactagagaaaagaccaccataacttgtagattctaatgttagagttatttatttatttaattttatttagttactatttctctttcttatttagttactatattagaattattcttttttttttttaaggagtaagggtaagtcagtctttattccattttattaggtctatttaaattctaatggtattgtattttttctaagagtgttcataattaataaaaaaaaaaaaccccctaatttttcttttttctctttcaatcttttttggatttcacatcgaagttagtgtcctcagaaaaattgattggattggtaaactgaatttttaattgagaaactaatgataaacaagtttggagaattttacaaatccaatttagatctagaactgaggaataataaatactaattaaagaatttttgtctttttaataccaaatcaccaatatagatctttcacatttggaaccatgttttaaaccatgaaattcattctttaacggtcatcccataaataatttgataacaagttttaacctttaagacatttaacccgatattcatttggtagattctcctaagttatcaaccatataaaatcacattaggtcgacttttgatcataatgtttcatgcatcaaaggacccttaacatgcatcctatgtatctctaacaaagacaaactagcaaaaaatttaacttgcataacaaaactaaagattaataacttactaccatgaaggatatcatattttcttattatctcgctctcccgtatcatctaccttcattgctacatttttaatatagagaaattagcaactcatgcttaaattaacaatgtgcattgaatcaaattgaaccatgaataattttattgataactccaaaataaaattttcaatgaccattcgtttctctcctcctctatggtattgatactattttaaaaataattaacctaaaaacataataaaaattcttaaaatgtcaaaaaaaatatgaaagagagtcgaagggagtaatgtcttgattgagattttggaaatcacaagttgtattgaatattttgatacctccacaatggtatcgaaatgattatgataaatgcctaaccttttgaacctttggcatgcttccaatgtggtatcggattgatgtcgatatgtattacaatgtatcgctatatagtattgaaattctgctccttttatcggaattgtatcacaatgtatcaaaactcatatcaataatcctccaaactttttgtatctttggaatgcttctataatgaaattttcactatatcagaatggtattgaaatttatctcttgttgaaatgccacttctggatgaatcattaatcctcatgggaactgaactttagcatataaaacttcttcatcgggtagatcatttgaaaaataagtgtcatcaaaggctagatgagctgtcaagaaatcaaccaatgcttgtcctctgccttacaacattagggaaacatcatggacacttgaataatccataacctcttagtatttatcctttaaaaaaggttcggtatcgaaatccatttcaataatctcataaactcactagattactaagtaactacaatgggtgatttcaataccttcataatggtatcaaaatgcaatttttatatcaaaatgatactctagtgtcaaatttgtgtatcaatcaatatccaaattcattccaataatactataaactcactgtatctaaattgactctattccattgcatcgaaatggtgtcgaaatccactctcttgtattaaaattccactttttggtgcattcttcaatagatgtagacattagtcctcgatttgggcttaacatatagttaagcaaaataaaataataaaaacctatttttatatatagaaaaacaccaattttgaatactaattacttaatatttaaaattacatttgattttaagttgtgatattaaattattttactaaacatacttaaattaaattaaatcattaaattaatttactaaataccctctaattttgcccatatttttggtgttggtgcaaaccatattgatgacccaagttcgaccaatatcttgatcaaaaaccccgatttcttgggtcaagcagccccctaaaactataaagggagggagagcacttgaaacttgcttttgtctcttgaagtaataaaaatttatttttagtaaataaattaatttcaaatattttagtcctaaatttcttttaagttattattaaaaatgtcaaaactattataataattttttattgaatattttatactcttacataaatttataaacatttgaaaattaaaacaatcttaatacatgtattattattatttagttattttatgagatttttcataatatatttataaattttgatcaatt

SEQ ID NO: 11524 - DNA, 4683 bp, Vitis vinifera
  Intron number 2 from transcript GSVIVT01036800001 (locus G SVIVG01036800001) derived from phytozome v7.0 (chr-ID chr1 9; pos 22386523 to 22391205 reverse strand)
caagctctagttgtgcaatattgcagcttaagtaattgaatgggagaaggaaaaactcattattcatggttttttagggaaaatttctcaaaatcccagttaaaaaaagttaatgtccctcatatttcactagcctacaagcatctcctaacatgtcaaccattttctggctctgttgattgtggataagcacaggattgaagataatatagttttcttcttctctgggggtttcttctattccttggtttatagaaggtttataagagaagaatgataaaaaaaggaaaactgaaaactaatgtatatttctttctcttctttgtttttcttagcaaccaaatggagttctttatcctttacagtttagttttccatctatatgcacttcatcttttatagtccatttttttctcttataacaactccaaaaacgggtaatatatctttatgatgtaccatactccaacaagcaaaaagggaacataaacaacaatcttatatgctaaaatgatgcctataaaaaaataaataaactaaaagaattttattttattttattttattttttttttgataggtaggctaaaagatatgcacaacaattggatgcaaaggtgcaactttgttaacacaaagctcgctcaaataaaatacattattgtgcaggatggaggatgcaaatttcataaaagatgacagaaaatttgttgtagtctatcttaggaaaaaaggcattgtgaatgaaaatactactgaatatctgagaaatttatttaagcacagtcctattttcacttatatcacattcttagatatccttcctcacatattagagaagcaaatggcaaagttcaaatggggcttatctgaaaacaattgccttcataaaggggtcagattggttgctaatttatttaaaaatttccttcgtagaggggtcagattgaaatagtcagtatggtgtgaggaagagaatctctagtttcttccagcagcatttttttgttgaggatttgtcatctttggactattttttttactttcctttattttctcgccaaccaaacattcccagaatttggagaatgatgtagaaactgaccctacaccttcaatctcctagcttaagataaatctggcccttgaaaagtaaagtactcctattttttctatttctataacaaaaatcatcgttttttttacaatggtcccttccattttggtatttttaacaaaaaaaatctatactggccccccattccatatttgttttcttaaccaaaaaaaccattttctttctgctaagctcacaataaaaataaaataaaataaaatcaagcacatctttaccaaacagaaacgaaacacatctacaacaacaacaatgtgaaaaccaaatagaattacaaaaaaaaaattaaaatttacaataaactgaaaaactcataaatcttacctgaccaatgacttccaaattttgaatttgagccaaggatacaacaggaaggacgaaaccctaaagggaagaaagctaactgggaaaggaagaaagctaaatgggaaaggaagaaacctaactaggaaagggacggaaaaggtaaaggattcaaaaccatagttatcaactacggttttgaccgatttaaaaaaatttaaaattgtagttggtgactacggttttatgatgtggcaatctacgtggcccagacgcactagattgggtattattttcaaaattggtttactttatggaattttttttataaaatgttgcattttgggtcaaagctcaaataatagtgcactatcatggaaacaatgttagctcaagtataaaattatcaaatgcatgtcaaagatcaagacaaaaatcaagcaatattcattaagcataacagttgataaccaaaagagaaaattcatatatagggccctcaccaaatcccaaattatttttgcatgaattaatcccatgaattttcattattcggaattacgaaattaaatttacgcttatttcaaaacattttaaaaatcaaggaaaatatgaaaattgtttgtcgaagaaaatggtggcaagtttttattgaaaaacggaactttcgggacttaaaatttctaagaattaaaatttgaagaattaaaattatttgaaaaaactagaatttggaaaattattggcaaactagggtttgggaaattatttttaaaaatcaaggatgaagaaatggaagaaagccacgtggctactatggttgcatgctaaaggtggccatgaaaattggaaacacgtaggagtgggcccagggtggagtgatgctggcaaggacgagggtttattctacatctttcatcatgtttcctctgcttgggtcacaactgttatcactaaatcatatgcctttttttatcaaatgatgaccccactattggtggaaatttggaagatagcttgatgggtccttaaagaaatagcctcatgagtagctctcttgattttcggtcctgaatattccttcgattacccattctcactgtccagaacaaaagagaatcgatcacaatggcagtcaccggaggtttgagctaatccgggagctctccgagtaaggcttgcaagtcacatgcccttgtcgcaaacctaccattcctctagacctggacgacgaacaagttgggggaacttacaggagacatcaactagttcaatagactctccacacctccgtaaaatctcagcaatcgtgacctcatttttaactgaattccttgagcaagtggagtaaaccattctaccaccaactttaagcaaaaatataccttaatgggtatctgaatttgtagacagtgggtccccttgcccattcctacattccacttgcactctccactgagtcactcccatgaatcacattcccgccaatgtcaacaacaaagtcaccacggatgatgcaagagcagagttagatgggtttgtagctccaataatcttactaccagtggtaacaacattcttgcactcccaaatcatggcaacaattgggccataaatgatattctcaaccaacacattgaagaatggctttgacgacaagtcctcatggtgcttctcagcaaaaccacgttccatgctcaaaagcttcaatattttcaaagagaaacccttcctttgtagcacattttcaacatgaccagcttctttcttataccaaacaaaaactatcattgttcctttgggatttgtggtattcccctaacaaagtgagcaaacgttcatcacatgattgattattcaagacctccactatttgcataacatcatggttagtagctagatcctttgaacctattaccaccttaactgggttgggagtcataaattcttaagttgattgatgaatcgatagaggtcatgttgcactgaacctttccatttggcgagtaggacatgtctggcttaatatagagaagaacttctggttcaaacctcatgtccagcatacgatctacttcatctaacaccacaaaagatacctctgtaagccaacacatacccatttcaattagatctttcaaacgtccaggagtttctatgacaatgtcaacactagacttcaaggaacttatttggggtcctttagaagttcttccatgcaaacaaaccgactccactccataacctaaaaccctacagaagtctcttctaagttcatcaatagtttttgctctggtttagcagctacggggtgaagattggaagaaactgtcctacatagtgagccaattgcctacaaatcccaaccaactgcgaaatcaaagctgagaagaagatggcttgaaggatgaagatgataaggcgagcagaggggcgtgcatggtggtgactggaaatgacgtgaggaaatcgaagcatgcaactttcaaatcatttgtcgagtggaagttgtcagatgatgtgctcgagtgttgccgaaatttcacattcgtcattgaagatgcatatttagttggattagacaaaaatgtattcgcttttgttggtgttttctcaagcaaaccctcaaactcggattgagcccatgtcaagcaatggtcaatattttgtgggaaagagtgcaccgtgcacatggagcttgtttcttaggtgggtttctggaggtaccataattttctgtcaggtgaggaattaccatctgcgtgttgcatttgacgcctaaagctcccgtttcaagcaacaatttctggaaataaaagcacccctgatcaacatacaacctcacatagacattgtctagtgcaatggactccatgtacgtgggaaaatgaaggaaatgagccaaaaacgagctaggtagtagggttgggaaggtgatgagctgaacgggatgaggtgttgtggtgactaggttcagtggatatgaaaggcagggactggtgggtatgaaaggtatgggttagtgagagaaataggttagtgggtattggaagatggtggtgaaatgatagatggagatatggacatgtgatgggtaaagcgagtggaatttgaatatatttccattgtccctcttaatgcttgttgctttctccgtacttcgccattaatgaactgaggcctaggcttgagagggtaagttccagggagctttagcgagagaaagtatcagaagattagagaga

SEQ ID NO: 11525 - DNA, 11120 bp, Vitis vinifera
  Intron number 12 from transcript GSVIVT01026340001 (locus GSVIVG01026340001) derived from phytozome v7.0 (chr-ID chr 4; pos 14356243 to 14367362 reverse strand)
ctgtttggagggtatatattttcttcattatcttagattatctggtattatatattttgttggtgttttttctattgcataatcttcttatgatgctcattggattgggtgcatattggataaattatattggtgtatactagataatctagatttgcttggaaggtcacaaagccaagagtaagtgtattggccatctccttgtattctggcaataaacgctagttttccttctgtctttttttctttcttagacaaaaattcaagagttcaaattttatttcaaccatagaaatttgaaagcaatctatagaagaaagcactccttggagtgaacaaagtcatacaatatggacaagtaggaacacaaaaaattcctccctaacaaagtcatacaagatttctcatttctctacctatcaggggaaagaaacagcttcaacagaatcagtttgtattagttctgcaaattcttgaagagcaagtatgaggagactcctagtctagtaaccctttttttgtcaccttgacaatgaactcatttttaaaatcttctattcttccatctggaccatgatgttggtaaaggaatagcctttcttatttggaaatatacatatacagagaaaggaatctacaagggaggatgggatgcttccatttgattcaattttgagaaggaataagaaaagggactctcaagaggaaaagaaacggatgcaaaatccgtagttacgactacgggcttaatttggattcaaaaatttattcaactatctgtcaaaaagaagaatctacttttgccatatggtcccgatggtgtggatgatcctcaacaaatcagaaagaggatgagtttcctatcttggctaacctatttgcttcatggtttgcaatctacacttttttggaaaagaacaatccatatatccagaaatatctgtttccctttagaaccaatgatcttttcttcattgtcctctcctgtccccagccgtgtatgaaaactgttgctaaatccctttctactatagcattagaaatgcctaatgatttggtgtgtgtgtgtgtgttttttttttcgagtctttcagtaatgctaggatttctacctcaagatccagtgcaatactagctagattcaggatattcttataatcatctctatgtctcagagaagttccaatactcatttggtctggattccctaggaagcatccatcacaattatgctttaggctactctctaaaggaggaggtgctcagccacacccttacttggggaacaagtttatcatcaatctagccagatgatgctaaagtgtccagtggtgaattctttggtgatagaaatccaaagagttgtgaggtaacggacattcttgtaagaagatttgaattgtgtgcactcttggatccttgggacaatctgaaataaaagaattgttgtttctttgctttcaagaggttttgaatttcttctcataacttttagataagttggaagccaaggctctcttaaatctaaatagaacttaatttcctgaagtattaagttgtttgttttgagtaatgtttgaatgctattaagtattgggccgtttgtttctattaatatattttttttgataagtaatagtagcgtttgtttctattaatatcttaatattgttgtgtttaatgaacaattcttattcttacaaaaatattttattttttattttttataattaatataaatatatttgaaaactattaattttaataatatagttatttgttccttcttattttgtataataaagattaaaatattttaaaattaataatttttaaaaaaatagtagcaatatatttccaaatatcccaaaatattaaaatttattgcattgttattttatataatttaggtaagatatttgagaacttataattaaaaaaacagtaatttaacatactttctaatatcccaagatggctaagggtttctagttatgttttgttgataagaaaatgttagaaatttctaggttaaatttcattggttactcatttatttgtatttggtgcacatttagatttataaatttatgattgaaatgtgttttcaattgttaagattaatttattaatttttggatttttgtggaattaagaacatcaatcgtaacttttaccttttaaaataagttgaaattgttgattctagtggatatttagatgggtatgagttaggttttggagttctaattggaaaaaattcatttgaactagtgattgttaacttattttggttttgttgtattgtaagagtgaattttgaaaaaaaattagtaaattcatatttgaccccaaattttatgattttagtgttgttttcatttccaaatgaggaattttatgattttagtgttgttttcatttcaaaaacaagagtcctatgggagttactctttactttgtttggggtgtcttgggtgttgccctcttcagttagaaagactctccttagctggcatggttcttttgtgggcaaaaagcgtaggaaggtgtggagagctgctcctctttacatattttggacggtttggaaagcgagaaatagattggccttcaaggatgatgtgttgtcaatctagagattgaaatactcttttgtttattcactttggtctgaggctaagttgtttatagttaaatgccctctaactatgattaattttattgattggttgggatcctattaaggttgttttttgggccagttggatgttgttctcctcctttttctttgacccttttggtggtgggtgtataggtttgtatactttgagtcccttttttggcgtctctttatatatgaaattctctttacttatcaaaaaaaaaaataaaaatttccgagtgaggaatttacaaaaatttacaaaatttgatttttttttttttttttgataagtaaatgatgaggtattataaacatgtgccaaagaaagagtatatcaaggttggacaacaatgagaggagctttgttcagaattgatgtatagcctttagtggactgattttttttgtataggtctcctcacatagtggaggggttttagtcatactttgataagattcttatattttatggggagggccccttttccttcattgtacgtttaatatatctttgtttttgattaaagaaaagagcgcatctaggtacataggaagtgtacaaagagagccaagaaaaaaaacaaaaatccaaggtgggagtaccaaaaaatagcttcatcccttaccaagaatccaaccaatcaatacaattagaaacattgtgccatcacctacatataggtttatccacaaaaggagattactaaggaaaatacttttaagaatttggataaactaatcttcattctcaaagaattttttatttctctctttctagatagtccaagataagtctaagatatgcataagggagcaattgtccaaaccttgctcttcttagtgatgaaggatccatgccaccctaacagagtctctttcattgtggctgatagaaaccaatgaacacccaccaaataaaacgataactacgagaggacccttcccaagggacaatgaaggagaatgtgatcttttgactcctcttctgctttacataaacatctcttagccaatgtccatccccttttttgaagttgaaggagaatgtgtaggggatggttggacccctcttttctcaagggcgcttaatgattgggaaattgagatgatggaacagtttatgcttaaaatccaagcttttagggtgcaaagggagaacgaggataagatggtttggacagcatctagaagtggtgttttctcagtcaagtcgctctactctacgctggagcctggtggttctgctctgttaccttatgttggtatttggagagcatgtgtgcctccaaaggtagcttttttcgcttgggaagcatcctggggcaaaatcttaactttagaccaactccagaggaggggttattctttggcaaataggtgttttctttgtcttgctgaagcagaaacggtggatcatcttttactccattgtgttatgacgagggtattgtggaatcttcttttttctctctttggtgtggagtgggttctctctggtacagttaaggaaactctccttgggtggcatggagtgtttgtggggaaaatccgtataaaggcgtggcaaatggcccccttatgtatattttggtcagtttggaaggaaataaatttgttggcttttgggaatgaggtgttgtcaatccaaaggttgaaacattcttttgtatgtaatttgtggtcatgggtgagggtgtttatagttttgagcccgcggtctctggttagcttttttgagtggctaggctttagttataggtaggggtttctgctcgctaccttggtttagagtcgaggggctgcttttgtatactctttgtatacctagaggacactagtttggtgtctcctctttcattttaatatacttctctttacttatcaaaaaaaaaaaaaatatattagacaaagtgaataagaaagattttactgacaataagcctgaagaagtacccaagcctcttttgaagaggctaaagcatacaaagatggaaattggacatacaaaggctcgtctcttcaccttctatccttccaaaacttcaccctctgctcatttcctacaataaaagacaatattatgttaaaggtatcccaattcttcctgttgatagagagagaaagaagaaaaaccttaattctcattcatgtaatgtctacttacaattgagagatatatatatacaaggctaggagtcctaactaccatacatgtgacctatattaataaggaaagataatatactataaatacattatattcaacactccccctcaagctggagcatatatgtcatatgcaccaagcttgttacaaatatatttaatcctaggacctctgagagatttagtgaagatgtctgctagttgatcatttgaattgacaaaacttgtagcaatacatcctgatgcgatcttctctctaataaaatgacagtcaacttcaatatgcttggtcctttcatgaaagacgggattggatgcaatatgtaatgcggcctggttatcacagatgagtttcatctgttcatcctttccaaatctcaactcctgaagaagatgtctcaaccatatgagttcacatgttgccaaagccatagctcgatactcggcttcagcgctagatctggccactacatcttgtttcttactcttccaagatattagattacctccaataaaaacacagtaccctgaagtggaacgtctatctgtgggtgagccagcccaatctgcatctgtgtaaccaacaacttgagtatgacctctattctggtacaatacaccttggcctggtgtacttttgatatatcgaagaatacggattacggcatcccaatggctatcacatggtgactgtaggaattgactaacaacactcacaggaaaagaaatgtctggacgagtaatggtgagatagttcaatttacctacgagccgtcgatatctcccggggtctcctaaaggctccccctgtcctggtacaagtttgacattcggatccataggtgtgtctaccggtttacagtctaacataccggtttcttccaggatgtctaaagcatacttcctttgggaaaggaccacaccagaactggattaagctatctcaattcccaagaaatacttgagtttccccaagtctttggtctgaaagtgggtaaaaagatgttgctttagtttctgaataccatcctgatcactgcctgtaatgacgatgtcgtccacataaacaaccagataaatacactgccccaaggagttatgatgataaaaaactgaatggtctgctgtactgcgaagcatgccaaactcttgaacaacagaactaaaacggctaaaccatgctcgaggagattgtttcaagccatatagagaacggcgtaacctgcacactaaaccagactccccctgagcaacaaaaccaggaggttgctccatataaacttcctcggcaagatcaccatgaaggaagacatttttaatatccaactgataaagaggccaagaacacatagcagccatggagagaagcaagcggacagaagcaatcttggcaacaggtgagaatgtgtcaccataatcagaaccataaacttgagtatagcctttagcaactaagcgggccttaaggcgatcaacctgaccatcaggaccaaccttaactgcatagacccaacgacaaccaactgtagatttaccagagggtaaaacaacaagatcccaagtgccattagagtgcagagcagccatttcatccaccattgcctgtcgccagcctagatgggaaagagcttcatgggtgctctttggaagagaaacagaggatatagcagaaacaaaagcagaatagggtgaagataatcgatgataactcaaaaaattgtaaataggatgaggattacgagtagagcgagtacctttccgaacagcaatgggtaagtcattaggagaaggcagagccggggcaggtgaagccgaagggataggaagtgagtcagcaggtgcctcaggaaaagggagaggagcaacgacacgagggcgacgatgataaacctgaagtggtcgagggggcatagcatcaggtggggagacaatgggaatgggcaagacttcagaaacaggaagagactcagaagtgggggaaaaaaatggtgagtcctcaaagaaggtgacatcagcggagataaagtatcgatgagtctcaagggaataacaacgatagcccttctgaagtctggaatatcccaagaagaggcacttcatggctttggcggaaagcttgtcctgtccaggagtgagaatatgaacaaagcaagtacaaccaaagacacgaggaggaaggaaataaagtggttggtcagggaaaagaagggagtgaggaatctgatcgtgtaagacagaggagggcatacgattaatcaaataacaagcggtaagaacagcgtccccccaaaaacgaaaaggaacgtgactatggaggaggagagtacgagctgtctcaacaagatgtcgattcttgcgttcagctaccccattttgttgaggagtatgagcacaagaagactgatgaagaatcccatgatgagacataaacgaagtaaattgggctgaaaaatattccctggcattgtcactgcgtaacacacgaatagaaatattgaactgggtttggatttcagtataaaatttctggaaaatagagaataactcagctcgatttttcattaaaaataaccaagtacatcgagaatagtcatcaatgaaagtgacaaaatactgaaatcctaaagtagacgcagtccgacaaggaccccaaacatcagtgtggacaagctcaaaaggagactttgcccgattattcaaacgctttgggaacgagacacgagtatgtttcctaagctgacatgactcacacggaagcgacgacaaagtggaaaaacgaggaaccatcttctggaacttggagagactagggtggcccagacgattgtgaatgaggagaggagcatcagtggaaatgcaaactgcaggagatgaatctgaggtgaggtgatagaggccttgagactcacgtcctatgccaatcgtcttccccgtactccggtcctgcaaggtcacaaatttatcagaaaaggtaatagaacaattaagagtacgagtgattttgctgatggaaataagattaaaaggacattcaggagtataaaggacagaagtgagaggtagagaaggcagaggaagggccaaaccaatacctttaaccacagtttgagaaccgttagctaaggtaacagtaggtaaatcagaggtagtagtaatagaggagaaaagatccttattaccagataggtgatcagatgctccagaatctagaatccagggtccaagagaagatgtgtgggtaaggcaggcagaggcattaccaggctgggcaacagaggcaatagaagcctgagatgtctgagatgcggaggagctcggaggctgaggcagcggagaatcagaggactgggccatatgggcagtgcgaggaggtcttccatgtaactgatagcaacgatcgcgagtgtggccaagtttattgcaataggtgcaatgaggacgttggcctctacctcgggtaccactgcgtcctcctcgagaggtagtttaagaaactaacacagaagaatctgaagcgctatcagatggcaaagtctgagtggacgagatacggaggaggcgagcaaacacatcatccaaggacggaactgatgaactaccaagaatctgatcacgaataggctcaagatccggacggaggccaataagagtaaggaccatgaagaacttgtcaagctgtgtttgttgagccccaacattaggagtaagaggcatcacagtcaagaactgctctttaagagaggcaatctgaccaatataagtagatagatccaagtcctgttggctgagatggacaatagcagaagccaccttataaagacgctggatatcattcgtgtataatcctttggcctgagtccaaaatttaaaacaagttttataggcctgaagatgaagaagaatccggggatcaaccgattgccataatacactacataactgtgcatctatcttcctccactgtacgcggtcaacctcagggatatctgcctcctgggtaaccaagtgatcctcatatccttgacccataaaccaaagttcaacagaggcagaccaggaaagataattttcactgccaaccaatttctctgaggtaatcataggagatccagagataacagaggtaaagatctgatttttggtggtcatattcacgtatttggatcgaagagagccctaatatggcttcagattgcggtgtggcaccaccgaaaaagggagacggcctcagatcgcgacgtggtaccaccagaaaggtagaagaacacttcccaaggcacgtgcagggattggggtggagagaaagtagccggaacttcgccggaaaggctgtttggagggctgacggagacaaaaatccccaaaagaggtacgtgcagggctcggatgggagaaccaggtaggtagggatgctggtcggcggcagacgaggctggaggaggaggcgcgtcgtcggaaaaggcctcacgcgccctcacgcgccggcgcgtgagatgcagtcgccggccggaaaatggcgcgtggccggcgcgtggatcctcttttggtgctggtgccttcacaaaagttggagatctcctccaggcgctccttctggtatggtcggtgtcggaaaaataggtcgccggaaaagttcgccggaaagtttcgccggcggtgagtggtttctaacgacgttccgactgaccggaaagtattgggagatggggaaggtgaccggaatgaaacacggtcaccggaaggttgcccggagttgatgacacgggaaacaggaaagaattaggttttcttccctagctctgataccatgttgagagagagagaaagaagaaaaaccttaattctcattcatgtaatgtctacttacaattgagagatatatatatacaaggctaggagtcctaactaccatacatgtgacctatattaacaaggaaagataatatactataaatacattatattcaacacttcctaaaggctttccataacccaacgccatacccctctctcacatcgtaagaccaccaaacccttcttcctccccatgcttcctacttataatctgtccccaaaaagctcccctttcactagcgaaactccaactccacttaactcaacaacactttattaagaaaagcaaggctcctaacactcaaaaccctttttttttctccatgtagacagaagaccacttcattggatgagtggacatgcaaaggctccatacaaaatttaattttgttgagaattggatgagtacaaaaattgtgcctgcatgttgttatctatttcagtgttagaaaatttttgatttatttaagtctcatttcttctcagaattagttgattcttatgttattggttttgcttttagtgagaatttaatgaaagatcttaaatctaaatttgcttaagaaagaagaaagaaaatggttaagagtagagcctatatcatttatattttatttttcttgatgacttggtcatttatagtaaattcatttctcaatcaaattgcatgaaattttggcagtttgatttatttgtaagtcaacaattaataaaaaattcgaaaagtgaatttggttttattttgattgagaaattggatttagttgttgtaaaagttaaaagttgaaaaataaaaaagaaaaagtgattttttccattaaaagcaaaactaaaaaaaattaactattttcattaaaacgaaatggtctttaggataagtgataagttaaaactaaacagcttcaaaaagttgcaagtcttaaaaccacttgctttaagacttaagtcaaaagaacaagcaaggcttaaagtatcttttggaaaataatataaacattatgttatcagggttatgcttagccttttcctttatgtacgaggcacacattaaggattgtctgctggtttctgttagctatctgatcagtaatctccatgatatgtgccaaaatttctcaacatgttttaacacctcaaaattgattatgaagtttcttaggcctttcgaagatttcatgctaacttgtgattttgttgcaaattgttgaataatatcaatttatgagacattatggtgtgtgtgtgtctggaacggttgaataatatcatttgatgagtgtgcatgttggtattcactcccacacctgctctcactccccttcttatggtaggaaaaatattcacttccttcttgtggtagttgtttcaactttatttttttatctgtccattgccagaggctccagaagggtttgcaaacacgtggttttga

SEQ ID NO: 11526 - DNA, 6690 bp, Vitis vinifera
  Intron number 5 from transcript GSVIVT01013668001 (locus G SVIVG01013668001) derived from phytozome v7.0 (chr-ID chr1 8_random; pos 2280340 to 2287029 reverse strand)
aggtttgtctaagaacagtttatttatattactggctgcatttttccttctgttgtctactgcagatgtgatattttttttaaagctctttctttagaactctcaatttttactgtgtattctttgtttttcaaacactctcctccaaaaatagtaatattattatttcaaatcccaaaaatttatgatgctattattttatctaatcaggatatgatatttgataattaataattcaaaaaaaatttaatctaacttatttcaaatatcccaaaatgccaaaatggattataataacaaaaaatttatgatgattaattatgtaattaatttaggattgttggtgggtagtaattagggtttctaaccatgcttgattgctaagagaatgttaaatgatttttaggttaagtttcattgattgctcattggtgcatcttttaatttatgaatttgtgattaaaatatctattcaattattgagattaatttattaatttttggattttcaatttggaggagaacatcaaatcctaactttttatttttcaaattggaattgttgattctagatgagtgtgaattacattgcggagttctaattggagaaatttcatttgaattaatgatagttgatttaattctgtttttatatattataaggggttgagctttgaaaaatggtagtaaattgatttttgatctaaattttatgatttcagtgttgtttcttttgttttataataaaaaatttaccgaaatttaagtttgattttgttgagaaatggatgagttaggagacaaaaacagtagatgcatgtggttgaatctttgttttgatttttgaaatctttggatttattttagattcatttttcttaatctaaattaagtgattcttatattgttgattttgtttttagtaaggatttctaaaaaacttttatatctaaatttgtttaaacattaagaggcaaaatagtaaaaaatagtacttatgtcagtatattcattttttcttgatgacagttttgataatttatgctaaattcatttctcaatcaaattgcatgaaattttgtgtattttgatttaattttaaatcaagaattaattagttttattttgagtgagaagttgggtttgtgtattgtagaagttaaatgttgaaaagataaaagagaaaaagggcttttccattaaagaaaaattaaaaaatttcatttttttttctattaagacaattttcttatttaaagtaaaaaagatgcaaaaaagaaaaaagaaaaaaaaaaggcccaactaaacacctagagttgagaccataaaatttaggaaagaggtcttttcaccccttatagctctattctcaagacgaccttcctagtcctttgacttgaactcctaggccaactatcaaacacctttgcagttgatctaggcaccactcactcaatggcaattttagagtaaccaatagtgcatctagagatggtttggcatgtttttatcctccttaaatttacaacacaaattcagaagaatcttccttcttttaacagttgattaattgttaaaaccctttccttgcacttcaatattatcacataatagaacttgtaggagaaaatatctcattttgacaccttccatattatgataggagagaatatcttattttgagaccttccatattatgttattattccctccaccttttgtctattgaaattttatggatatatcacaatatgatccatgtttctattgacaatgtattcactttttttttgataaaacaacaaatatagtagtagtgcctagaagacgagtgcactaaagtacacaacatttacaaaaagccccaaaaggcaaataaaaaggaagagagaaaaaagaaacaactccctctccctacttagagctcaatacattaggccttagtagattttggtactaggaggtgaagcagttcacaagtctaaaagaagtcttcaaacacatctctagaacatgaaggaaaacaaacccacttcagcgtaaagtatttatttatttgtttcacaaatgatgctgcaaaactttgattcaaaatgctaatatagttataatacttttaattctaaaacatacttaaaaggttacataaatgttgctccttcttgtggctaggtggtgaaagctctatttatatttgctgaccataataactccaatcctaagttccaaaatgaacttaataaaagaacatttttatttgtgaattttacaaaattgacaaggacaaaaatgtcatcccgaatattaattagttagctggctgcatcagtcatcccttgttgtttttaaattcatcctgaagttgttatcatcttatggtttgaagaaaagtttcccacattgaaagttgctaaagctctgttcaccaggacctgataatatttctatctatgatgctttgttgatctctcataactctatcacaaacatatatgtcttcatatttggttttacttccaaaacaacatcttgtcttgtaagtgatcatgaatgttaaacttgcccaacttcgttttcatgtctattcaagcagtagcaaaactttgcaaagtgatctatgaccaattttctaatgaattattaaagaaatgagttataagaaatgaagttaaaaggatcatcatagggtgatgaacataataaaaaaatgcccttttatttacttcccttgttctcactgtaacttttctcactttttaagattttttttttttgataaataaaagagataaaattgtattgaaaagagccaccaaaacgactcaaagtatacaaagtagaaactcttcccccctccccagctggaacaaacaacagtcaaacatgaaggagtaagaaaaaccccaactcaacgagaacccacccaatcaatgaaaccaactaaagtcgaaggaccatattttatgaataattttgtctctgaccaaagaaagaaaagaaaagaactcttaagtctttggatggacaatacatcatcttcaaatgcaattatgtttcttaccttccaaaccgtctaaaaaatatataaggggtctactctccaaactttctttctcttttttcccacaagggacttgtcttagcccaaaagcattgccttaactgtggctagtagcacccattgcaccccaagagagagaaaaacaatgtccataaagtccttgtcttggcacaatggaggaggatgtgatctatcaattcttcatgcaattggcaaaggtagcatctattcgctaaaggccatcctcttttttgaagttggtccaaagttagagcttttccccacgttgcttcccacctaaaaaaactcactttgggttgcacacaagatttccaaataacattcgatggaaaagagactggagggcttgaaactaaggctttgtagagagacttaacagaaaacttcccacatttagtctctatccaaagcatcctatcttccacatcccgctgagcactcttttcattgaggcccagtaaaaaactgtgcacctcatccacctcccaatcattgaaaggtttagagaattgcaggctccaactcccccctcccttagtggaactctacacatctttcacccaagcgttcttggaaacagctagagcaaataaagttggaaacaaaacacgaaaaggtgcagccccacactatctatcccaaaatttcaccctttgaccattacccaccacaaaagagagcctactaattgctttccacaaccgcacaccatacccatccctcacttccttggaacaccaacccccttgctcctctccatactttcccttatcacttgattccaaaaggcttctctctcatttgcaaacctctaactccatttgcataaaagcaccttatttagagtagagagacactttacccccaatcccctttgcttttgtctaagcaaaccaacgcccacctaacaagatggggtttttgctcaagagccccgcctccctacaaaaaatccctctgaatctgctctaacctcaatttgaccgtcttagataaagaaagcacaaacatgaaataaatgggtaagctagcaaaagtgctctgaatcaaggtgatcctccctcatttggagatgtattggctcttccaccttgccaatttctttcgaaacctctcctccactccatcctaagcagccaaggatttataagaatgcacccaacgacaatccaaaataagaggatggaagactcccattcttgtaaccaagttctgcagctagagcctctgtgttttccacacatcttagtgggattaacttgctcttatccaaattaattctcaaccccgaaatggcctcaaaccacattagtgtccaacttaaatacatcatttgatcctgagaagccccgtagaaaaccaaagtgtcatcggcgaacaagaagtgagacacttgagccccttcaccgcctcgacccttcaccttataggccaacaaaaaacccccatttacatctctccgtagaaggcaactaagtgcctccatagcaatcacaaataagtacggtgagactgcgctctctgccttaaacccctagaactttggaagaaacttgagaaagtcccattaactagaatagaaaaactaggtggagatacaccatcgcatccaccgaagccatttctccctgaaacccatcatacccacaactgaaagcgagaagggccagaccacatgatcactttttaagaaataacttcctcacaactccattattgataatagtttggctatcttgcacaaactttgcgtgtggtgtggaagatgttgattggaagccaatatgccttggtttcttgatttggcagcagcaaacttctttgaataatcagcgcctcactagaactacaatacaaaatgctttcattgccctcctattcactattttctttctaaggatcatataggcatgttgtcttaatcatagttgttattccatgccaaacaaccactagaggcttgcttacagtcccaaagattatgcaggattatacatgaaagatccttttttggctctctttagccctatgtctcttatccctaggaggtcttcctccactagcaagttttttcagaacacatggtcttgatcaccaaaattgaagcaatgaaaattaaacccacttctctggttttgaatcttcactgaaccttgaggcattggtatattttccaactgcagcaactgaataggaaggagcttctggccatatatgaggctgttctactcctcctttgtgtttgagaattactctttggtgtggcaaaagaaattttttgaagtttgcagttcagctcctgcccagatttcatgtctattttgttgcttttctacaatctaaccatgctagtaagcttttgacatcaaccaaaacacacagagattaaggacatttcccttgttttaacattatgtagacattgactaagggttcagacaattaaatgatagaaagttctcctttagtttctgcttcatttttttcccaaccattaatctttgcctttctccttcccatgttaactcgattgttcctggtagtagaaactctacacttcaatttggtgtcaactagcttgactttcttatcatttgagtgtttctttgaagttgaaaattctttcacctatgcttggccaatcactgagttcctcagcttgtggaactctattgaatgttggtgtttcaatcttaatagtcatctcccccatttggtcatcttgtacaaggggccctctacatggggcaaaagcatgaaacaggtcatcaaggtcgccttccaatccttcatcttcctcctctggagtcggggtttctagttgtattatttgctgagtaagaaactcatatccttcattgttccacatcatcattgtctagagagggattgacatggcatgttgtatgcattgattatgtccttgggcctgattcatccgggaagttagtttatcaaccttaaacatgatatcaaactggagcagttcacaagcctaaaacaagacttttgaatacggtttaatactataaaaaagcaagcaaatctaaagaagagttgtggggaaatattctaagattaagctattattattttttattttaaaaaagtttctgcaaaaactttcattcataatgctaatatagctaaagaacaattgtaatttcagaacacacttacaaggtactatagatgctgcttcttttggggttaggaggtcagaagtcttactactagctgaacgcaattaactatagtcctaggtttcaaaatggaattggtgggttgacatgactacttgctacttttagaactgacagagtatccttccgaatataaactaatttgtttcatcaggaggggcctctggagacacttttttggggaaacccttcctgcagtctccttcagctatagaattgtttaataaaggcaatgcatgcactacctatgttactgacaatcattatgttctttttgagaaatatgatcttatgtgtaattttgatttagagttgattttccaattggtgtagttgtttgatgcagaaactaataatttctattctttagagtgaggcattgcggaagttggcttcaattcccaa

SEQ ID NO: 11527 - DNA, 4346 bp, Vitis vinifera
  Intron number 1 from transcript GSVIVT01019009001 (locus G SVIVG01019009001) derived from phytozome v7.0 (chr-ID chr4 ; pos 17832831 to 17837176)
tcttctacctggttcttcagtcgcctttcaaccaggttttactctccatctctctatattcaaaattgttgtttgaataggagattcgaaattcttgttgctcggactgatataattttttattttttattttttatttagccttggggacaattgaggccgagtttatttcttcaaattaaaattcattttggtgtgctcctgaattttcatttatagttctccagctctacttgcaatgaactgcgaattcttgtcgtgcaccttcgttttcgagcctatccgtaggaaatctgtgcctctggacacgtttgaagattttgtccctatataatgatggatttgtgcactgtgtagttaaatgttttccaatggctttgttgctttggcttatgatttgtctattgccatggttcttgcgtatacagtcttttatggaccgaattttgctcttgttagtcgttattacgcatctgacagggattgttaatttaatgtatctgagctagagggatacttaggcaatgtttcatacaactgaaaaaaataaattatggtgttgaactatccgtactggagattttaggctgctgaatttgacgtcactgtgcatttcctgcattcagagttgtttaatgagtttttcttttaaagaacaatcaagtgttgtctatttatgcattaacagtgacactatgctgaaccactagtaggatgtacattctttgaattttcatttggggaatattctaagagatgcataagttgttttgaagtttatgatactaaatatggtggtattaccgttactttgatgaatcatgttagtcaatattctacaaacattaatgctatgtttggttccatgaaagttttaaagaaagaaaataaaaatttggaaagtactaaggaaaggaagaatatcttaaggagaatgattttttcatgtttcgtttacaatgaaaaatacgggaaaaaaaatctaatataattaaaattagttagaaatttatataactttaaattatttaatttttatataaacaacgaaaaataaatgaaatgagtttgaaaaagtatacataaattatttattaactttaaatttatttttcattttcctacatttttttttgtatgtcctctttattttctttttcttgtattttccttcaaatgtttttggaaccaaacatagctaaggaaaatgatttttttatgtttggttttattatgggaaatacaaaataaaatcaaatataattaaaattggttagaaacttatacattttctacttatttaatctttatataaaaaagttcaaataaattcaacgagtttgaagtagtatataaaaataatttattaactttaaatataattttttttccttcgaatttcctttccttttactttttctttttactttatttcctttgcattttccctcaaattttttgggaacaagtatagcctaaagtatatggaattcaaagatatgttatgtcaaatgtattatgtgtataaattatttgactacaaatgataaatatttcagcaaaatcaatgacaaagtttaatagtttttcacaagccaaacctcttaacttgcaaaacctaaaattaattttgatggtttttaggtgggtctttgggttcaagattaatttggacaagagcactttgttgggtatcaatataaaccatgaccaagtttaggctttagctttcttattacattttgtttgttcaaatggcccataacctctttagggaatctaagagtagtttccttttgggatccaatcatagataggatttccaaacaatcaaatagttggaatgaagtatgtctatcttttggggatagaataactcttgtgaactcccttatagattggatttccaaacgatcagatggttagaagaaagtatatctatctttagggatagaataactcttgtgaactcccttatagattggatttccaaacgatcagatgggtggaagaaagtatatccatcttctagctgtcaaacaactcttgtgaactccgttcttgtctcttatttgtacatatttcctttgagtattcaaagttccattctagttcgctaatggtattgagcaattgcgaagagattttcttttgttaggggtggggaaaggtaagagagatcaccttgttgggttgaacttggcatgtaaacctaagtaggggggtttaggtgtaggcaagatctctttgagaaatagagccctcttagtaaagtgaccgtggaggtttcctaggaagaataatgcgttatggcataaggtcattttgactatctatgggccacattctaatggttgggataccagcattgttgtcaagtggccacattgctagaaggctattgcttaaacctttcttgatttttctagtttcatttgtttctctatgggtgatggtaaaaaaattcgcttttagggagatacttggcgtggtgatttactattttgtagtaaatacccaaatcattttaacatggagagattgagagacttctctattttcattgcttttgtaccgtcattacctacccgacttgaaattttaactttcatcgaaatctcaggagtcaagaatttgaggaactagcttgatcaatgtcttatgtagcccatatgtatctatcaccttcgtaccctgatgtgagagtttggtctttgacctcattaggattggtctcaattagttcttcctttagagcccttttacattcattctctattgcttttggtccaactaagctatttggaaatctaaagttccctgtaaagttaaggcttttgtatgacttgtggctagtaagagggttaataccaatgatatgctctagaagcgggggcccctcaagactcttgatccaaagtggtgcattatgtgcaagaagagtggggaatcaattgatcatcttttccttcactatccggtagctttggacttatggtttagattatttaaccttgtgggaatggattgggtgccaccatgttcaatggtggagatgatgcctatctccttcaaaggctttgggaatcatgtaaaagttctatggggtattacaaaccttagtatgatttagtcaatctagtgggaaaggaatatgaggattttttaggatactaggaggatagtggatgctatttgggacttattttactcttcttcctttctttttgtccatactagcaaggcccttagaggcacacccttaagccttatattgctagattggcagcttgtatgcaagtcaaggaggttggtcaggaagacctcacaaatatggtcaatgcccattgaaggagtagttaaattaaatttcgatagacgtgctttgggcaccccaaagcaactttaaattgggattggtggtgtgattagagatcatcaaggttcaattatcaaagcatactctaaacctataggtgatggttttactattgaggtcaagattgtagtgcttttggagggccttatacaaacaaaagctttgggattgttgaattttgtcatagagggagattctactgttgttatctcatgggtggctaaaaaggaaagaggttcatggattcaatatccttatagagttggcatgttgtatttgatgggttcctcacttagctaatcagatgacaaatgagctacttaaaagaggagtaaaacagttggtatgttttgtttcagattatgtgcctccttgagtctgtctaatgtttgtctcaaatgttgcttcacttcttgtaatttctcttgtttgttcaactacatggttttgtgtcaaggaatctattcccttgattcccttgccttgatctaaatttgtacattatggaagggtgtcttgtcctacttgatcttttttaattaatagaaaggatctattgggtctctagtttttttttttttaatttattgttattattattattattatttataattaattaattaattataaaaaaagttaaatagtttttgtccagagggcctattaaaaagaagtctttgtccagagttatttgaggaattgagttgctctccatggcatgtcattattttctctaattgtagtttgagtactaggcggccatattatttgtgggggtgggctctggaggagatcttggttttgcaattttatgtttatatttaatcctaaaattgttgcttctgttcacttgtgaatgttaccgatacttattttttacatgaaaatatgagattttaatatatattatttgatttgatttttttcaggctgaatagaaactactaaagatataagaatctgg

SEQ ID NO: 11528 - DNA, 32568 bp, Vitis vinifera
  Intron number 5 from transcript GSVIVT01029688001 (locus G SVIVG01029688001) derived from phytozome v7.0 (chr-ID chr1 2; pos 13067053 to 13099620)
tggcaacaactgggttcttgaatctctccctgctagtgttaagccctaccggcattcaccatgaattgaatcatatataatttgtttaagcacagattgaaagatacagatagattgtgtaatatcatttttatcttctctaggtttgatctctgctcaataatatatagaatggcctctaatttactttgaaatttgccctttttcctttaatttatttgctttttgtttggttcaaggagattctgtgagttgtttgaggtggtaacattcaataacttatgaaacaaatatttaaccagattttcaactctcatggcacaattgcctagctatatatttttctatagacatgatcataatgatcagccagagatgtgttattaactattaaggctatatgatttgataacatgcatggaaaatatattaattaattaaattcccaaaaccctgctatttttctcatcaaaattcaatgtgaactgatgcaataatctaggggcaggctagctacacatgcatgtttatcagagactttaggcgaaaactgttgtagctgcaatttgtttatcatgggtggaatattattggataatattgaaaagcactatggtgggtgtaaataacatgggctgtttgtccattgagagaaagaggcattttggtgttcatgcatagttcttcagcaactttttctattatggaagattctctctctctctctctctctctctctctctctctctctctctttctcatatccttgatgcatgtattggttattcttgagaatctttcatggtgttggttaatttttaccgtttgcttttaagtacatagaaagctccatacaagttcaatacaataacttattttaaactctaggttaaaatgttttctaatgcttaaaagattatttttttttaataaaaattaaatattgaacaaaatgttaaaaatcacttttaaatatttagagaatgagttgaagtaatttttgaactactatttaaaaaaaacccaattttttttgttatatagtatttatgtttattaaaattactattaaaaatagctttttgatttatattcaaatactaaaatctccataaaattttagtaacaaaaatagtgcaaattaaaaatattttttactaaaattattcccaatgtagctctaaaattacatgatcttttgtctaaaataggaaaacaaaaaaaatatgttgagtatttacgtaagaattaaggtttgtttttggaatgtttcttgaaactattcttaaaaaataatttttaagaaaaataattttctaattttttaaaacaaaagtaagtatgggaacttgaaacatttttagcttgttttttatatttctaaatattttttaaaaataagtttatatatatattgcttcattttgaattattcttcatattcatctcattactttttaaaatagctacgagaaagcaagtgaaaataattaaaaatatatattttttaaatatcttattttatgttttttgattatcagatatgttttctatttttttgctctcaaaacaatatatatacatatatatatttggaaacaattaacaaacaagcccaaagggttttgtcttgaccgcaatatatgataaaatgagagaagatatatatatatatatatatttcaatcattagtaataaggctatagaacaaagacttaagtagagatggacttcctcaaaaatacctaatgatatatttagagcttatttaaagtgactgtgagagggttaaaaatgtttataatgttaaaaaatgtttttctacagaaattaggagtttgtttaataatgtgagttaaaaatggttttttgttttttaaaatagttaagtttttttttaaaaaaaaaaaattaacactgtttaactattattctttgaaaataattttttaaaaacaaaatgaaacagagaataaccaatttttttttttttaaaaaaaaaagtccatgttttatgaaaaaacaatttttagaaaacaagtttcaaaaatatggtcaaacagatctaggtgtttgataaattcatttggaaaaattaagagaacctttgaaataatttctaatcaattacttaaaatgtgatttttttcaaaaaatcatttttctaaatatccttctttttatataacacattattaaaaattatattttaaattttcaaaaatgttaaatatatttggtaactgttttttttaagctttcgatcatttcccataattaatatggtcagtttgatagtacataagaatgagcacaatgagtatcaatgaattaaaccgcgcccccccccccccccaaaaaaaaaaaaggaaagaaagaaatgatgaatgcaatcaccaatacagttttgcatgtgttgtgaatccatgatttcattttcagtccaaatgaatagtgtctatatatgttgggtgagaagcttatggcttttttccgaagtatttcttaaaactgttttgaaaaatagttttaaaactattttttgatattttataaaataaaagtttttttgggatcttaaaattttttaacatggtccttttatgttttttaatatattttaaaaataatcatcatcatagtgtccattttgatatacttcatattttctatttttaaaaataagaaaataatgtagttttatataaaatataaaaacttttaaaagccttatattgaaaaactaacaaatttaaaaaccattttaaaaattaagatataaaaaaaaataccatttgaaattttaaaattttttaaattgatttttaaaagtataaaataaatttatacattttggtataagatactttacttttatacaaaagttcccaattttaaaaataaaaaacatgaaatatattcaaatagagtatttatttattttacttaattttaagtagaacttaaaactaaatagtacttaatacagttaagtattaggttttaaatattttatttttattaaatattaaaaaaattgaaaaaaatcaatatattattttttttcatttagaaaaagccacatatttttatttttctattgaagacaaaaatcgaacggttggccaaggcccattattatgaacttagtttggattcagattcagataaggcccagacttgggttgcaggtggctggagcggcctcaggcccacacatgtaacccaaagttttccccaccccaacgtaacgtgctgtgtgacaataattatgagatccgtagttagagtatgggctggatttgggctataaacagaatcatagatttcagccaggcccaatttttgaggtgctaaaatgtaaagtacgagatttagagtttttttatcataagtagggacaaggcacggcacatcaaatgctagtattacttgccgtcaaggcacggcacggcacggcaaggcaaggctaggcccaattttgaatgtgttacgcatgattcaaaaacaaagctttcattgtaaacaagtgcagtatcccatatgacttgtacaagtaaggaggtgtttgataacacaaaccaatacaaagcatttgtcataaacaattgtagtctcccatatgacttgtacaagtaaggaggtgtttattgattaaacacctccttaacacaaaccaatctaaattgaaaattagttatctctctctcacatacacacatgcgcaggcacacacggacatacacgtacacttaatataacaaaattataatcataaataatctatatttaatttataagaattatttacacggttactacaataaaactatgtataatgcttatagattatttcaataataataataataatgatgatgattttaatataataaaattataatcttaaataatcatatctaatttataagaattatttttttattatatatttttgaattttttggtcattacgtaaataaaggctaatatttaaaagagaaaacacccgagagggggggtaaattgggattaaaaaaaaatcattttaaacacaacaaatttaagcacaagaggagcacataaaaagagataaagttagagaaatcaaactcaaattttataatggttcgacactcccttgcctacgtccactctccttaagctcctaatcgagtgagggttccactaacttgaagcttcaaccaagcttccaatcacctttacacttgaattccggctctaatgggttcttacacaatctcttcaagtttcaactcacttgaaggctttaacactcaattaacaagaatgaatctctcaacctagctcaacaatagcttaaatgcaacttaaggctaggatgaatcacaaaggtgcactaaaggatatgcaaatgaagatttaatgcaccaagaaaggattgagagcttttaaggtaagaacaagtggtagacaaataaatgcaagtgttctcttattcataaatgaagtgaagctctctatttataggcttctaacctcgagagccaagaaaaccaaaaaatcgcctcaatcggtcgagttaagggtcgatcggttcactagccgttggagcatttaatgtttggcaggtgatcgttaccctcgtccagacctcgatcaaaggtcaactggaaaggcaaataccttaaccggaaaggaaagactactagaagagagataatgtgttttttgctcctctcaactgggaagaaggaaccggtcgaccggtaccctggccagttgagctggtttggacagtgccttgatcgattcaccattttttgcctgaaaacctatcttttctggtcttttctcttctaacacttaggcaaggtctttaggtaaattagtatgccaattttgaagtgatttgcctaaggtttatttgataaaactcgagttttgatgaaactgtaactttacataataaaccaagtttttcaaagatgcatgaaatgatatgtaaatcctaagtgcactcattcattcatcttacacatgtttcctatgattaaaggttttctaaatgtcttgatcttgcatccattaagtcatttgatgaatttccaaattaatacctgaaattctttataattcaaaccaattagtaacttaaccatggtttgctatcatcaaaacctaattaggagaacccttggtttaacaatctccctcttttttatgatgacaaaccttggttatctaagaaaagaaaaatctcccctttaaaccaatcatgggtcaacaatcaaaatttacgaagttaaaaccaagataataaagacatgctaaaagaaacaatataagtcatgaaacatataagaatatcatatataagtcaaatgtatcaatatccaatatatacgatccaagtgatgatatgacaatgtaagtacaatgatatgcatgtaaatctcctatactctcctagatcctaaaatatctcccccttttggcaacataaaaaaggaacgaatggggtctctaagaaatcaaggttgaggaggtggaggtggaaacacagagtgcagataagccatcatctcctcatgctaattctccaagcgatcctcaatatgctcaatcctctgttggagatgctcaaactgtgaagtaaagccagcctgatgctgatgtatacgatcctcaatacgctcaaatctctgttgtagatactcaaactgagaagtgaagccaacctaatactgatccatgcgatcctccatggagcagaaccatgtatcactgactacaacaaactcttccatgtgagtgtctaaagagccaatctgagtagataaatccatccaatgagcatggttaggagtgaaaggtgcttgaggaggtggtatctcaatatgaggaggctcagtgaatgatgactgagtagatggacccgttgtataagtcggctcagacatcatcaactcagagaaggtagcctcaaactgaacactctttgactggagtggaaaaatgtcaagctcgggctctctttgctgatagtcactctaagagtctactccactctccatttctcgtatctcaacctctttcattactctgggatgtgcttatccctgtccccaagcctgtgttggtgctttctctactctcctaacccaagaaccatcagggaccttctcaaatttcattatcaccatcgaatgatcatcatatgtgtcataagtgctgggggcctcaaaatctgtctctctatttaagtcaacgtcggcatccttgaacactttggtgaggaagcgaccataagggagtacgtgagtcgagctctcacaacgtgagatcatatgcatcatcatcaagtaccccaagtggatccgtctcccagtcagaacggagttaataaggaatgcctcatagtaagagacctcatcttaatgtctgtcccgtggtagaaatatagaacatatcatatggtgtagcactctgctgatgacgatcaaactgtgggtcgagggtttgcccatcccctaggtgtatgcaagtccgaaaatcctctgaatggcctttctaggctcgaatcccaacataatgagccacatcttggactcatatactctgagtccaaccggagcaatataaaaaatactacagatgctcttcaggtccaaatggatctcgactcctctaacaatggaaatgatagagccacccatgccataagtctcccacgaataaaatgcttacactagagtcgagaaaatcggctctgaaacaatgaccacgggcaaccaacccatcctagtaaataggccctctaatccgaaatgttgaagttggggaaaattaatatttttcctcggaactacttgtttctgagcaaagtgttgcttgtacaactagtagtcctccacggaactgaacaaggtagtgtcaaacctcgtctttcggcatgcctctagctaagacggcttagctgggcgcttgccctgtgccctagaggcaacaaactctcacttaggagccatgagaaagaagaagcaagggagtagtggctggtagagagagaaacactcacaactaaaaccctaggcatgcggaaatagagagagaacagtgttgaagctgattgtgacatgcaggatgaagagaaggcaacccaaatctgaaatcctagcctccaatattcctaaaatccactccaaaagacttcaatcggtccaaaatgcgctcaaatcagtctctaaaagccaaaataagagaaaccctaaagaaatggaggagaacaatgcagaaactgaagcgcgggagtctctttaaaacctcaatctcgacgaaccggtcgactggtcttggtttagttgatcgcctggttaacgcagccaatgttttaacttttcaaatttttgcgcactttctcattttgtgatcctccccttacccttttaagttgaaatccccaattttttatgcccaatgcaaagggaattttgattttttggtagaaatttgaccattatctaagtatacgtctatatgatgcatatgacatgaaattcatgcaatcagaagggatattcatcaagaattcattaaacaatcattagatattaaagaaatcacccctagttgtcttctaatatcaacaaattgttcttcacttagaggttttgtaaaaatgtcagcaagttgatcttttgtgcttacaaattcaagtgttatgtcacccttttgtgcatgatttctaagaaaatgatgtctaatctctatatgcttagtcctagagtgttgcatgggattttttgatatacttatagcactagtatcaccacatttaataggaacatgcttaaaagataaatcaaaatcactaagtgtttgtttcatccaaaggatttgtgcaaaacataaactggttgctatgtattcggcttccactgttgacaaagttaccgaatttttctttttactatgccatcagacaagtgagtatcctaagaaatgacaagtgtcactagtgttttttctttcaaccctacaaccagtaaaatcggcattcaaaaatctaattaattcaaagttatcactcttaggataccataagcctatgtccattgtccctttcaaatatttgaggattatttttacgatacttaagtgagattctttaggacaagattgaaatctaccacacaagcatacactatacataatgtcaggtctactaacggtcaaatatagcaaaaaaactatcatgcctctatacatagtagagtcaatggatttacctttctcattcttaataagcttgatggatgagctcattggagtcttcattgttttggcttcttccatgttgaatcttttgagaagatctcttatacactttgcttgattgatgaaattttcttcctttagttgcttgatttgaagtccaaagaagaagttgagttcttccatcatgctcatttcaaattcactatgcatgcacttagaaaattcttcacaaagagagacattagtagcaccaaaaatgatatcatcaacatatatttgaattaatagcatatcattttatttggtttttatgaaaaaagttgtgttaattttttccattttaaaaccctttttaaaaataaatttactcattctttcatatcatgctctaggtgtttgtttcaaaccataaagtgctttttttagtttaaaaatatggttaggaaagttgaaactttgaaagtcaggtggttgttcaacgtgtttttcttcatttataaaaccatttaaaaaagcacttttcacatccatttgatataaaacaaagtctttaaaacatgcaaatgcaagtaacatcctaatggtttccaacctagccacgggggcaaaggtttcttcataatctattccttcttcttgattaaaaccttgggctactaaccttgctttgtttctaacaattatgtcattttcatccattttatttctaaagacccatatagttctaataacactttgatttgaaggttttgacactaatttccatacttcaattatttcaaattgatttaactcctcttgcatagcaatcatcccattttcatcatctaaagcatcatttatatttttagacttaattagagagataaaagctagattattgcaaatgtttctaagagaggatctagttcttaccccactagatggattacctataattttatcttgtgggtgattgatgacaaacttctattctttaggaatatcttggcttaattcaccttgcacttgttgaggaaggggtagtgtcaatggtgatccttctttcttgggatcctctccattttcttcttgttgtcttctatcttcaattttcaatcttcccatggaggtttccaaacctaaatcatcatcaacactctctctttcttggagagaattgttagatttataaaaaataacatggattgactcctctacaaccatggttttttttgttaaaaactctaaaaattttacttgaagttgagtaaccaaggaaaattccaatatccgattttgcatcaaattttccaagattgtcttttgtgtttaatataaaacatttgcatccaaagacttcgaaataactaatattgggtttcttatttttctaaagctcatagggagttttcttaagaatgagccttaataatattctatttaaaacataacaaaaagtgtgtaaacccccatatgaggctcggtttttgtcatatcccagcaactcattcttactaggtggaggcctctcaatgagccacttgtcaactcatggatggctgctgggaatcagagtagtggatgggagatgcaatcagggagcgacacctgtcaagggaatattctgaggagcgggtctgttatgcaaaggctgcaggccgttagtgagggtaggcgtgcagggattctggcagggagcgagaggagaggtttccattgccaagggtgagaggagagttttcttttggtagagtttgtggtctaagggagggggtctgggctgccgttagagatatttgggcagggaggagatatttgtggaggagagagtgaaagaagagggtttgagagggaaaatcagagaaagaccagattgctttgagaagccttttgaaagggattatgagctgaatatttacccggggcggagcattgagttacaacggaaaaacacccatttgaggaagagacatttcaggtttggttcctacggtttctgcgcatgttgtcactcttcatacttttcatatctcatcctctttgttttttttttttttttttaaattctgtttgttgggttgttgtggttggttgatctttggtttaatatctgagagctttctgtattttgtgctctgttcttgtggatattctctgtttttaactcaccgattgttaaacccatggatgaaatgatgaaatgggttcaacaatgatcgttaaaggcttcatgattctttttccccttgctatgtttttgcccccttgttttccttcctgaatgtaccttcaaggtttcgggattggaagaaactggttatagctaaacctgacattatggtgagatgattgttgggttctgttttcccacattgattcactctagagattgactcgatcactggtgattttgagatgctgtgacgccaatgtgttctaaaatgaagttttgaaggtagccaatatggtggagaatagattgtgttgtggtgacgggtttcagtcatgaggttccataaaggctcagttggttcagggacgctatttggaatttactggtagcctagtcgtgtgtagaagaagtattcagtgggtcttctccttaaatggttttgttaccgagcactcagtcaccagaagttgcatccaaagtggctaccagtggtgatgaagtcaatgataatgtgaagagtctgacagagaaattatcagctgttcttttgaatgtgggtgctaaagatgattttgttaagcagcgtgccaaagttgttgaagaagctgttgcaggctgggaaaatgttgaaaatggggtggtggttttaaagcaacaaattgaggctgaagctaccaattcaaagctaataaagagaggcatctcattgttgagtggagccacttactctaccacacatttcataccggttttttttcaacccttcccacgtgcatgcatgaacccttgcatacatcactccacaaattgctccattaattgatttcatcacccatcactacccatagcaccaatgacgccgacactcttcatgcccgttatacagatcctcacgcccaccttctcacacccatccctacgctttcggcatggccacacatggtcaagctaactttcactactcattccatcaatccatggcccatctcatgcaccacgcatggcaaaccgaaacccttccaaatcattcactcacatgcatagtagactgtgtgaacttggtcatctctcttcattttctctcactagtttttggcttttaattctatctctcctaatcattgtcctcatgcccatttttttagcctattaaacgtattcaccataccactcatccatttcccaagtgcgttttaaaatcctttccttccatatgcctataccatgcaagtccgtcccattaaccccatacccgtggcaatcaccctcatatcctatctccctacattcacgtgcccactactcttctatcttgcatctccattccccaccttcatacatatcatcactcatgcatactcgttcatatctttctctctctacaccgccgcccaaagatccactcaaagcctccatgaaggtcccagcatcaatcattcacgtgtatgaaatcatgcaaagcctggccaccattcctaatacccatttccctcttttcacacccacggctatagctcaccccatatcaccactcccatgcatacatccatggctacgtcaaacccatatttcaacctccctcttctcatgttcagcatctaaagacaagcctaccatttgactatctttgaggttcatcaatccgccaccgtgctcttcgttcctgttccacgttctgaacaaccttttggtagttaaatccacagctatataattcaaggtgatgatccatgactcttttgtcatcgtggcagtctatgatcaaagctaatgaatagggtagttgggaaacttgagcaactcgccaatagtaagcttcacttggaaatctaatttgcaaggaaaagtgaggaccaaactaaagtctaaagcggattaatcctgattttaaaggggttaaacatgagaagcccgtgagtgagttgctgctggattaatttaaacaccagagaagaagccatcagttagaatggctgaacttagctcacccatcaaagcatttgacctagcacgtcaactaagaggttggcaatccaggtgtaagctgtagctgtggaatttagaggataatcagggtcttcatgcacgttgtttatataagagaggcattcacatacatccgcgcgtatattcccacattttcgtgtcataagaagggaataaccatatcaacaatgatgggtatgacttggctagatattcaagggacattttaaaacctgatttacgcccaagagtgcaatggcttctctgaaatagcataatgggacattttcaatctggtttgttgaatgaattagttgaaaagaaaaacacagatgcggccagaatgtctctacttcgccctggttttagaccaaatttagtgggtctgcctaagatgatgcaagtggcgtcctcaagtctgtttggtctcctttccgtaggcgatttcagaagttatgatgggtctctttggctagacaagagtgttgccatgctaaatgcctcggattcatgtgttcagacactcggattcatgccctgtacaatgtcaacagcagttgagcccagaacgttgatggccaaaattgaggaagtcaaggaatgaggaatatgaggatgtgatttctggttcgttgaccgagagaggttccatacttttctgacgcaatgttaggtaacatgctcggtaatattctcattgactcaagcaagtatgattccaaatagcactatttcggtgttcgaatgaggcgtttaaaactgtcattcctgtgagagagacaacagcttatagagagaaattcgagaagaataaccccttgctagattactgaaatcgtaagtaagcctggacttgaattgttgaagggcaatgataactttgtgtgagatgagagagaacaacacttgccatcatcaatctcacagcataacgccatttgcaccccagactcgttccctctctccaacatggcatgcatggccacctttgggccatgtgttctctcttcttatttccttattctttgattttgaaaataactacccggaatcccattttgtaaattcttttaaatcctggtattcaaatagtctcaattgtctcatacttcatccttagagtttctttaggttccaaaatcacatttttaataaagctttgttgccacttttatttctggtaagcaattttcatacttcttctgtttttaaaatgttttgaaataagcaaggaatcaaatttcgtaattccgaacaatggagttatcggaattgattcaggcaagataaaacaggctttggtgggggcccgacatatgaaatttgattgacttaattatcatacatgattgatttattttgctctatgacatgcatgagattattctttaattgtgtactaacccgcctctcttgatagcgcatgatggtttgttgcctaggtacgcactcattctcactctggttagtctatatgcatttttctgactcccgtatgtgcatgatttgctctgagtattcattgtttttcttattgattgccatgcaacttcattttattagtagagacccaactttagggacttagaggggtgctacggtctttaccgtaccttcccgataagtaatctgaccctcgaacttgatccgatttttcgtagatcaccttttccaaaataaggagtcgcacttagggttttctttcttattttgtttacccttttaaaataaaacaaaaataagtggcgactccaagtcatttttctaaacaataaaaatcattttcaaataaaaaatcgagctcgccatcgagtgggaaacgcatgaaccgaaaatgcggggtccacaaagtgttaacaacttcgacccaaaaatattttggtaagttgttttcatttagcatggttcttaccatctcttaaagaattctatttttcctttcaaccacctcattttgttgaggagttctatgagccaaaaaattgtggtcgattccatactcattgcaatattcttcaaaatcaatattttcgaattctctcccatgatcacttcttatataagtaattgcaaaacctttttttattttgaaccttattgcaaaattttgaaaactcataaaagacttcattcttttgacttaaaaacaagactcatgtgtatctagagaagtcatccacaataacatatgcataagatttttttccaaaacttggtgtcctagagggaccaaataaatccatatgcaacaattcaagtggtctagatgtggaaatgaagttttgtttttaaaagagttttttatttactttcccacttgacaagcttcacaaactttatctttttgaaaatttattttgggaaggcctctaacaagtacatctttgttgagttgggaaatgaggtccatgttagtatgtcccaacctcctttgccacaaccaactttaatcatgcatgcttgaaaagcatctatcatggtcatcatattttgaaaaatttatagcgtaaacattatcacatttaaggtccatgaatatggttttatcattttgaatatccttaatgatgcaatgagatgcttcaaaaatcactttaaaacatttgtcacaaagttgactaatgcttaaaaagttatattttaaaccatctactaataaaacactttcaataagagaggatgtgccattaccaatgttgccttgaccaataatccttcttttttttattgtctccaaatgtaacatatcctccatttttctttgtaaagaaagcaaacatggatttatctccagtcatatgtcttgagcatccactatccaataaccacttatccttctttgaaccctacaacataaaactcaagttgatttaggtacccatatctttttgggtccttgagggttagtgacctgggatttttcaatccaaatttttttagtatttacatttaaattcttttgagaaccatttcttaaaggacatgtactactaatgtgctcccctcttccacaaaagttacaagtagtggaaggacttgcacttgtggattcctttacaaaatagtttttaaaatacttttgatttttttaagatttgaatcatagtccttatttgtcaaaaacacatttttggctagctagaatcattttaaaagatttttgtccacaagaaaatattgaaaaagaggaggtcaatcattaatttttttttcttagaatctcattttctttttcaagatgagttttagaaatttcaacatttgaaaatgttttttttacttctccaagttctttttcaagttgttgaactttctatttaagagaaatatttttcaaaatccttatacaattcttcaaatgcatcatgtatatcttcatcgctaaggttagggtttacctcatcaagttcatttattgtcatgaagcacatgtttgtcacttctttcttattttcttcttcagaggattcttcactttcactccaagtggccatcattgccttcttttttctcctattgatttcacttttgtagagaggacaatcatatttaatgtgtcccggtttcttacacttgaaacacaccaagtctcttttctcttcccatctctcattgtcaccatgagatgaagattcctttttagaaaggtctattctagaagtgaaccttcttcctctaaacctttcacccctcatgaatttgttgaactttcttgtgatgagggataaatcttcatcttcttcactttgtttttcttcgtcaactttttctttttccttagttatagctttgagagctatgctcttcttctttttgtcttcaccttcttgttgcttctttgccaaattgatctcatatatcatcaatgaccctatgagctcctccaaaggtagcttggtcaaagtctttggcttcttgaattgtgatgacctttgtatgccactttgatggaagtgacctcaagatctttatcaccttttcggatttcttgtaggtttttcccaaagctttgagaccattgacaatgtcagtgaacctaatgatcatctcaacaatagtctcattatctttcataaaaaataattcatagttatgaacaagtaaattgatttttgactctttcacttgattttttatttcatgagttatttcaaaaaatcttcaaatttctttaaccgatttgcattgacatattctattatattcatttctatccatagagcattgcaaagtataaacggccttagtatttaattgaaaatttattccatcatgttcatcccattcttgcttgggttttggaaccatgactccatcaactagttttgaaggaagttgggtcatcttcaatgacatcccatacatctaaatcggttgattgtaaaaactaagtcattttagttttccaatagggataattggtttccgtaaaaaatggaggtctattggttgcaaaactttcaatgtgagatgagattttcaatgacatcccatacatttaaatcggttgattgtaaaaaccaagtcattttagttttccaatagggataattggtttccgtaaaaaatggaggtctattggttgcaaaactttcaatgtgagatgagcttgatggattagtcatttcatcttaaacgattaagtcttaaacaagaagccttactctaataccaattgagaaaataaatgctaatctttaaaagagaaaacacccaagatgaggggtgaattgggcttaaaaatatatatatttttaaacacaacaaatttaagcacaagatgagcaaataaaaagagataaagctagagaaatcaaactcaaattttatagtggttcaacattcccttgcctacgtccactctcctcaagctcctaaccaagtgagggttccactaacttgaaggtttaactaagcttccaatcacctttatacttggattttggttccaatgggctcttacacaatcttttcaagtttcaactcacttgaaggctttaacactcaattaacaagaatgaatctctcaacctaactcaacaatagctcaaatacaacttaaggctaggatgaatcacaaaggtgtactaaaggatatgcaaatgaagatttaatgcaccaagaaaagaatgagagcttgtaaggcaagaacaagtgggtagacaaataaatgcaggtgttctcttactcataaatgaagtggagctctctatttataagtttctaactcgggatccaagcaaaccaaaaacaacctcaaccggtcaagttgggagttgaccagttcactagccgttggagtatttaatgcttggtaggtgactgttaccctcaactggaggtcgaccgagaaaaaaaatatcttgattaggaaggaaaggttactaaaagagagtgtttttcgctcatctcaaccgggaatagagaatcagtcgatcagtaccctagccggttgagccaatttggacaatgccttgaccggttcaccattttttacttgaaaacctatctttttctggtcttttcttttctaacacttaggcaaggtctttaggtaaattagtatgctagttttgaagtgatttgcctaaggttcatttgataaaactcggattttgatgttattgtaactttaaagaataaattgagtttttcaaagatgcatgaaatgatatgtaaatcctaagtgctctcatgcattcatcttacatatgtttcctatgattaaaggtcttccaaaagtatttatcttgcatccattaagtcatttgatgaattttcaaattaacacctgaaattctttatttattattaatcccttaatataagaaattggaatctaaataaaccctatttgattggcttataaaaatgttatttcatcaaaaggttcgaagacttgttgttgttgttcttatattattattattattattattattattattataataataataataaatctattaatataattacttagttatgtatttctttaatctaacatgtacaatttttttttaagttaaggaatattattgttgtttatctaacaatgcataactaccttcaaattaagatctgaaattactagcaacaataatgagattcgacatctatagaatttagaggatttggaacacagtatgattagatttaaatgcttaatttgttagtataaaactattaaaaacatgacatgatgtagcataataaaatttcattagtatatttatatcttatgattttcctttttatccctgattgtattatttattatttgagcgttcacgcatatatcacttgcattgtatatgactttggtgtcgtaagagttttatagaagatccaagtcatgagcttcttgtaaggtgataagttactcacaattcatttatggaattagacaatccatctaagattgtaatgtgctacctcctaatttgaggtatgacttgtcttgatcatcagcatggatttgtcatggtgagtgcattggtatatatgcttacacattgaataagatctacgatgaatcatgacattaactattgagtgattcactaagctattagttgcatgggctctcaatcttgagagaatattgaactattactagaatgttttttttttccgtctttgctatcaatccacataggacccataagttccatgtaaagaatatataagggcctagatgtattattccccttagtctttttatgaggcactcttacttgttttccattcatacaatcaccatatatggtgttgtgttgtccacttaacttagggatacctcaaactaggtccttattttctacatttgcaagatccctataattaatgtgccctaacctcctatgttataacttattcacattgagtttgacctattgcaatcttgaaaggtgttagaactagaattaattgcatagcaattatccatagttctatgcccaatgaaagtgagttttccttctttatcaaatatttcacaaatatttttaggaaaacttcacacttgttcactatcacaaatttagctaatgataatcaagttacatttaagcccgttaacaaaaacgactttagttaattcagggcatccaatgatagatacacttcctttacctctcactctgatgacactcctatcaccaaaggtgacattacctccattgaaatcttcaaaataagtaaagaaagatttatcatcttccatatgcctatccactataaaaaaaaaaccacttattaagcgtcctagctctaagtgcaacgaataggacctattttttctcaactaaaattgtttaaccttaggaggagtactaagggagcttgtcttagtcctaagcttaatgttagatttctttgctcttttgatatttagaattccatttttaggaagtttgacttattcactaacctatttagatgagacgcatacctatcaaaaagtctattgtagcacctaccttgagtgtttcatgatttcttattttttttaaaaacattaaggaggtgttctagaagaagttacaaggtaaggagtttcctcctccttgccctttacaaagattgtttctccgctagttggagtctcaatcttgtttatgtatccaagacttttcttatcttcataagatttatatttatcaattatttcatttaagatttttgtcttaggatgaaaattctcattttttgaagaaccaacttttatttggtgttcaatctcttaagctagagcattgtttctctcaagaagagatttattctcaatcttaagaaattgaatcttttcaatgtagtttagtttttcgtcatttaacacaccaagcctagttttttttttttttttttttgtgattcataggtagtagtaactttgatgtaattattcaataaaaactaatactcttcacacaaattatcaagtataggtgcattatcatattaattactattacaatctctaccaacattcttatcagaattaactaaagcaatgaaagcaagataatcttgttgatcatacatgtggtctctacgagttaaagaatctctcatttgagtttgtgtcactctaggttccttgcatggactttctaatatcttttggactaggacaattagaacacatgtcctaacccataaaatttaaaacactcaattgttttacccttaaaggatcccttatatatatatatatatatatttgaaggaattttaagatcttttacccttctttgaaatctcatggtgtctttgattcattttgaccctaatgcaagtttttctattcctaaaatcttagagttttcaatttctttttccttcattctttgaaggcttaaacatggtatcttgaggcttctgagaattaggtagggacatctcataagtctgaagaggtttaacaagttcatccactctcatcgaatcaatgtcattacttacctctatggtcatgaccttgggtcttttttccaaaataaacttgttacttttctagtgaataagatttgaatctaaatattcttttgtaaacaaatttgtaaaactcaattctctaagtaaaagcctttttttaataaataaaagtccattttccatataaaagttgttaacatttattcttaaataaattgaattggtttagttttttaaataaaattataaaaatctattgttattattagtaaatgaaaaagttcaactggtaaactcataattttattatattattattattgttattatcttcggcaaagttatctctttaaatatttttttttaaataaatttttaaaaatttttctttagtaaaggtttataaaaattcaatcttttagataaactcataatttttttaaaggtaaatcttttttttttttaaataaaatttaaaaaaatctttttttttttttagtttttattattattatttttactttttatttataaagttaagcaaatatttttttttagactaaattcttttaaaaaaaaatcttcatgaatcttctaagcaatttataagcatctttatttatttatttacttatttttacttgcttatctttaatgataaaaaataaatcaaattcttttcaaataaaattgtcaaaatgtagattttttttttaagcaaataaattccttttaaaagaaaaaaaaaaatcaaatgggggatgatcatttactaatttgtagcattgtggaaaacttgtggatgatcatccataataatgtttatctctttgtgactccctataaaatggagggactcctaatgaagatcaattcaatttctcttcgtgcattctattatctctttcttactttcttcttcttctctcactttgttttacaacatgttatcaacatggatagtctttacaaaataaataaaaatatttttctcttttcaaagaaatagaaagacatttttctcttcagggaaatagaaagacttttttctcttctttctcacaaaaagacaagccatcaaattatatcatgattttctattttatttatatgtatgataaaattacattttgattttctcttttgcttattttatttgaatacataaatatgtgcaagtattacttagagaatatgatttctttctactaaaaaatcatgacaaaaaaaaattcataactagaagtattgaaaaatatgtgcaatccttataacaaaaaattatgagataaattacaaaattatgaagtaaattcataactagaagttatgaaaaatatgtgcaattcttataaccagaagttatagggtaaattacaaaattacaactacatggctagaagttatgtatatgatccctaattatttatttttaatttacagtataattggaagttataccaaacaatattatctagtgagaaaatataaaaataaatagttcataccctgaagctatgtacaaatctacataatgaaagttcataggctgaagatatgcataatattatacaaccaaaagctattagaaatctacataatgaaagttcataccctaaagttatatacaaatttacattaaaatagttcatagcctaaagctatatattaatttgcacatttttgttatgataaaataatcatagcccaaagcaatgaaagatattagattttaatttcttttacttatattgtttaaccgaaagttatataaaacaaaattttatacccaaaatctatacaatgaatatttcataacttgaagttatgtataaatttatacatttttgttatgataaaatagaatgtttagtactatataaaaaatgttttcatggccaaaagccatataagccatactttctacttaagacagaaacttgaaaatattgatatttgaattttgtatagtcagaagctatatagagatattctaattatggtacaactagaagttatacaaactaaattgtcaattaatatttttatgaaattttatagctagaatctatataaagaatattttatagtttgatgctatccaaaaaaaattcattttatcgtaataaaattatgactagaagttctgacaattttattctttagttaatattgccttgttagctagtttcttgaattcatagtaagtattttactttatgataatatgaaaaatattgtttatcatgatcaacctatatagataaggaaagtatatattcctatatattcttataattagaagttatataataatatgtatttggtagcttgaaactacatgaaaaataatttgtatattgttatagcctaaagctatataaataattaatttgcatattcttatagcccgaagctatatgaaaaacttttatatattcttgtaccccaaagcctgaagcaatatagaaattttttgtatatattttatatcttgaaaaaaaatatatgtaaaatattttcatagcttgaagttctatgaaagaaaataggcatttcctataaatgaaaactatagagattattattttgtgtgttattatagctaaaagctatacaaaaaagggttaatattatataatttctcatagctaagatctatgttgaataattaattttataatctttcatggctagaagtgatatcgaaaatttataatttgaagtcatatatgtaaaacaaaatatatgttatacataaatagaaattattataagtattatggcataaacattgttgtttcacttatagcctagaactacaagaagtttatatatttttatagcctgaagttatgaaatatgaatttttttcttttttttaagagttcaattattgaatacttaattttctatgtttttatttgaatgtatcattattattctttctattatatatgaaggtttaaatatctagatctataattttcatacttcatttttaaaatagttgtcatgtttcatgaaaaggcatagttaaatgtttcacatttataaatttatttaaatatttttagtttgttattgtaggtaatttctatgtcattaaaatatgatagcccttttgttctttagaataatataaaagaaagtatacccactaaaagactacgatcctcctttaagttcactataactggatgtaattgagaatagtgagtttttcattcataaccaccaatattttctaatcggattggaattgtttcccgaagtgaatgtaatcaattaggaatacgatcatagaataagatatgagctaaatctagtatacaataacttcttaatccatgagggtcattgttttcccaagaagaaattcaaaccctaccaccaaaagtggcgaaatgaaaaaaaaaaaaaagggttaggcttgtagaataaacctaccatagttgaacaaaaaatgattgttgatgcatactagtcatacgatcaaacatttcattgaattttaccaaaattggaagaaagagattagtaaataaaaggttaacatatctaagctagattattataactttctttagaaatcccaatgataaaatttattgattgattggtgatgaaaatatgtttattcttatgtaggatctttactttcttatgttatgtctttttatctaatatagtatatatcatatttgctaatacaggtttatgttttatttacacataatattaattgcctaataagtatattctaagatgtttgtctcattaattgtacaatatgtaataattgatgttattaccatatcaatttatggaaacttgattaaaagctcttgaagagctcatactatgtcactagttgattgatgccattactaaatatatgaatttttgaaaacatgattgaaagctccagacaagctcatactatgtcattagtggcacacaaatccacatgaatgatacttgacattctatcaaatctagaagaatttgagatgaccaacttggttccttggggtgaacaattatgcgtcaactccttgaaatgtcaaatggatattcattaaagaaccagaagtttcttcaactagtgactagtatatttgaacctttgaaggatattattacaagttatgcaaatttctagtttaaagagacaattttcccgccattaagggtaggtaagttaattccagaagaatggcaagacactacatgatatgtaacctccttgtctcatctttatccccatacaaagcagtgtgaactagaagttaaaaggattattcacttgtaagaacttgcaatcagttacctaatgttttcacaaatataaagaaagtaacaaagtcacacatgccaactgtgaataccctaacacatattgatgtccctggaggacaattgaagaatgtcacaacaagtgaatctaagacatgcttgaagcgtggtagacctattggctcaaaggatccagttcctaggtaaagaaaatgaataacaaatgaaaagcttggtactcttgaagagttcacaaatatgaaatggtcaaataatgaaacccaacttgataaatagttagtccccgaagagacacaaattgatcaaatactagtatctagaactaaagagatctcaatgagtcacacgagagaaacgtagtgacattattatagacaatatatttgcattccaagtggcaatagacatcatgagaaacaatgaagatcaagaaccaaaaattgtggatgaatgttaaaaaatgaatgattggccaaaatggaaataagcaatccaaatagagctgaacccattaacaaaacgagaggtagttagacccataattcaaacacctagaaacataaagcctgttggatataaatgggtcattgtgagaaagcaaaatgagaatgatgaaatcataatatataaagcacgacttgttactcaaggtttctcttaaagacctggtatagactataaggaaacttattcccctataatggacacaatcacattttgatacttgacaagtttaataatctctgaaggactagatatgcgtctcatggatgttgttacagcctatttatatgggtctatagatattgacatatatgtgaaaatctctaaaggattcaaattgcctgaagcaactaatccaaaacctcgaaagatgtactcaatcaaactataaagatctctatacgaattaacacgcatatagtataatcttttgagtgagtatttgttaaaagaaagatatgtaaataatctaattttcccatgtgtttttatcaagaaattggaaattctgcttacaataattgcagtatatgtggatgatttgaaccttatagggactcctgaagagctcacaaaaacaaccaattatttaaagaataaatttgaaatgaaagatttggggaaaataaaatattgtcttggcttgcagatcgagcattgttcaaatgacatattagtccatcaatcgacatatatagagaaagtattaaaacaattttatatagacaaatcacatccaatgaattcccccacagtttttcattcacctaaagtgaacaaagactcatttcatcctaaagaagaaaatgaagaattgtttggtccaaaagtaccatatctcagtgaaatcggtacattagtatcttgcaaattgtacaagtccaaacatagcattctctgtcaacttactagcaaggtatagttctaccccaattaaaaggtattggaatagaattaaacatatattgtgatatctttcagatccttataaaactcgatctcaaacaagatatgtctttacttatggtggtatgacaatatcttagagatcagtcaaacaaacaatagtagccacatcttcaaatcattcagaaattcttgcaattcatgaagtagtgaatgtgtttggctaaggtcaatgattcaacatattcaagaaacatgtggactaccttccattagaggcaatgcaaccaagttacatgaagattatgttgtttgtattgcacaaattaaaggaggattcataaaaagtgacaaaactaagcatatctttcctaaattctactatactcacgagttccaagagaaatgtgagattgatgtttaacatattcggtcatgcaataatctagtagatctattcacaaaggcgttaccttcgaccacattgaaaaagttaaggtataacattgaaatacaaagattgagagatctaccaattgaagtgttgaagaaatcataatcatgtttacatgagaggaaaaatactgatatggatatattgcactcttttttccttcatccaggttttgtcccacttggttttactagcaaggtttttaacgaagtagttatcatattcttatgataatccaagggggagtgttataaaatgtgagaatttgtagcattgtgaaaacttgtggatgatcatccataataatgtttatctctttatgactctctataaaagggaaggacccttaatgaaaatcaaatcaatttctctctatgcattctattctctctttcgtactttcttcttcttctatcactttgttttacaacaatttacttatttttacttgtttatctttaatgataaaaaataaatcaaattattttcaaataaaattgtcaaaacgtagatttccttttttttaagcaaataaattcttttaaaagaaaacaaaaatcaaattgaaatatcaaataagaaaatcaatttagaatgtttttgtgaataaaatatgaaaaaaaaaatggataaactctttattgtaatttatttattatttatttatttttacaatttccaaatctttgaagacaagtaataaatttgaaatccccttttttatagagtcaaagataagttcttttaagctttaataagtttataaaacttttccaataaaacctttattttcaataattttttttaaaaaaaattggagggtggtttggggttccattaataatcttttaattaaaatatcttttgcatataaacttataaaatattttttaaaatgatttgcataaatcacttttctttaataaaaatgaattgaaatactttggtaaataagattataaaaatcataatttttccaaataaataaataaaagtctttttttttttttttttgcaaacaaaatcaaattgatttttttttttagaattaattttttttaatatattcttttaattgtaataagtgttaataactttcttgaaaattgaacacaaataaaataaaaccaaataattaattgaaaataaattgaaactttttttttgtaaataaataaattgaaatcattaatttgaaattgtttttaataaactcctttgaaattccttgaaaaaaattttttttttttgaaacattttttttaacaagatcaataaatcattttgcataattctcttgtcatttattttatacatttttgtaattagtttttttcgtcatctttatgcatattgatttgtctccttaatattggtattcatggttagttaattaatcgtcacaattccctcaattcattttgtagaaacaatacgtgtacgggtttagagaggtactacagttcatcatcgtaccttcccgataggtaatctgatccccaaattttgactcaatttttacaaacacatcttttctatataatgagtcacataagattttctttcttattttgttttccctttaaaataaagggtgactccaaatatttaaaaaaaaaaatcaattttttacaaattaaagcaagtctcattgtcaagtgggagcacatgtgaaaaatgtgggtccatagtttattattactttttttattattattttttaaaagttttcccaatatttttttcatgagttttgatcaatttttatctcactaatattttgtgtcataatattcatcgatatttccttatatatcccaatatattagtaaaatcgagttattgatatattcatcaaaatcgatattttcattcttagttttaaaaaccttaaaccacatcataccttattaaacaccaacttgcctttctcggacctttctatatttacttgtgttatcctaattgatcaagtagtaaccttgaatcttcaatggagagtaagacacgaactagaagagtcctaatgttagaatgaatagaataaaattgtcaactttaaactacaaagtctaatatacaaacacttctctctatttgattattgatatttttgctcatataatttaatttgtttcttgcatttttaatttttaaatttgtaaaaataaaaaaactcaacttccaattcacctcatctttaagtcttaggtgttatagtgaagacaataagactagtttaggaagggtcactatgatcccaacgccttcttatttatttatatctattcccattttttgtcaaaaaaaaaaaaaaaacaacaacaataataaattaaatgggttggggcgagtcaagtatgagaatactcaccccgcctcgccccttttactttatttttttaatttttaaaatttttaatttttaaaatttttaattttatttagaataaatattatttataaataaaaatattataaatatttatatttatttttttgaaaagtaatattttatttatgttaaaaaaagtttaaaatgaaaaaataaattaaagttatttttatttaaaattatatataattggagtgagatagaacaaagtcatacccgaacttgcttcaaattcatctcaggtttttaaaaacttcttgaacccgtctcaactttttaaaaactttccaaagccacccttaacatgtttatattcatctcaaacccttcccattaggggtggggtgaagcggagtggaatctcggaaaaaccaccccattgtcatccctaggtgattactttagattaaattaaaatataaatctaacaaatatatatatatatatatatatatatatatatatatatataataaaatgataattcttctaacatataaatcacttattatcttaaaaatgataatttatctcctcttataaaataaaatgtgttaatcttttttagtggtgcaactctaaggagagtggcttttccttattagatttttatctaagagatcttgtatatcatttttttagtattccaacatttcttgattcatttgagttagtctttccttaatatggatttgatttgcattaaatctttcaatgtttagaagggagaccttatgttcttttctatcccaaaaagtaatgggaatagagtaacacaatttttcttctttttgaattttgattttatttattctatcatgtatttctttttggaaaaggttttcttccattctttgatattgtctttatttctccaagtatttgatatgttatttcttcttttaaattaaatataactgtttagtttcttcactattttagaggacattgagttcttttaattggattggactaataaattcaaaacaaattaattgtccatcatgtttagttttgattccttctttgtccactttaaaattataaagtagggtaaaaaaaatagggtttgtagcacaatttcttgttgcatatttttttagggagaattgtgttttgtgtccaacttgacccaaattttgacaaaagatccttatatcatgcatatttaagcccaagatccaaataaagggtaaaaattaagttaaaggatattatccttcattaatccctaaaatactcttaacccctacataggcacagtgagtgttaatttcaacattttttttttgtatttttttcccttttctattcccaattaagtagtactcatttctaacttttttttcttttttaaatatattgaatctttttactcttattataaataaggataaaaaaatttatataaaatttaatggataatcaatgaatgaaatttaattctttttattattttcatattaaaaattagtactaaacaaggttttgaatttttatttttaaaaatagttttcattttttaattaaatgttttttcaaaaagaaaatataaaaaatataaatcatattaccattttttagaaagtgttttttaaaatagtttttgaatcgtaatttttctttatttataatttaaaatagaaaataatgctaattttcaattatttataaaaaaggttttaaaaaacaatgaaaaatccaaatagttaaaatagaattattatggttgcatgaatagtggtgcaataaagaccaaaaaaacttttgtgaaaggtgaatgggtattttggtcttttgatatcttatatcatttccctcaattatgtaagttatatggaccaaatcttaattttttgtagcaaatattttgattacatatatatgcatttgaaattttgtaacttatttgaagtctttgaagatttgcatcatacattctttgagtaattttttcatagtatactataggaattaatatttcttgtatacaatttagatttgcacttgaatctattaatgctgcaattttgagttgaaaatgaagttttatttgaagtgttatttttacataccatttttgagtatttattctagaaatcctttttataaatgagtcgaaattttcttcttctattttgactaagaagtttcttcaataagaagaatttatttatcttttatcgcttgtttgttttgattttgtttcttcagatgaatttgagttgatcaaattcatcatctatcttttgagagttttttctatgtctaaatcttaattatttcttttattttacaatccgtagataaatgcccttttttttaaccacacttgaagcatgttatctctcttagcaaatactcaaggaagaccatgtaaaaacctctctttctagttaagttgattagtatatgtcctagtaccttggataggtatacgtctttataccatctaaaatctcctaatttattacatcttaactttgcgaggatttcaaaggttttttcttggagaatagttggttctcctcgaaaatgtttggttattgcatatgcaagggtgggtatcgtattttgatttccattttcatcaatagaatgaaagactaatctcttttcttcctcaaataagactttgtcctaccatccttttagttgacttgtgaaaccaactactagatgttttgctattaaatgattgtaatttccttttgacttgtaagccatagaggccatgatcatctcttagagtatgttcagtttttggtgttcactatctccatctgtgttccattcactattataatttgattggatcatttgatttccttcttcgtattgaagatcaagaagaattagcttagaataataatttttagtctttggtcttggattattttaacaagtaatcttattaattatcatcatctttgaatatattcttaatttctttgaggctaatttttttttcatcttctattacattaatagttttgatatttgaagaagaaggttgtaaatctaatctcttgtacaaaaaaaatatatgttaatatttttcaattaaaaaagtgaaatgaatgattctacaatattaattaaaaaaaaatgagacccatcaattttttttttccatttttcaa

SEQ ID NO: 11529 - DNA, 5607 bp, Vitis vinifera
  Intron number 1 from transcript GSVIVT01031378001 (locus G SVIVG01031378001) derived from phytozome v7.0 (chr-ID chr6 ; pos 19354631 to 19360237 reverse strand)
ttggtagggattttgggttttgtagcatgaaaggcctaattataattataaataaaaactaatttagttttatattattttttatttataatatatataataattgtttgatttttcaaacaaaattttatttattctcaatattttaaattgattgaaaataattgttagtgaaagcaatattaagaagtaatgtggaagtgaaagaaaaaacaataagaaataaaatttaaatactaaaatatttattatttatagtagaaagaaaaaagagtataaaattaaattaatatatgttttttataataattaattaaattaattgaaagataaaattcaagataaagaccaaaatattttttttaatgtaaacataatttatacttttataaatattataattataaataatatatcaataataataaacataaaatcaattaattttacaatatatatatatatatgtatattattaaaatataagaaaacatctcttaaaatattattaagaaaacatgaaaacattttgttttctttaaaattaatgttttgaaattgtctctcaagaaatgatttctcccccatagattttttttccccttttaaagaatcatctctttgagagatgattttagcctataattttttttaaaagaattttaaaaaaatgtattttctagagataatttttacctataattttttttttaaaagaaattatttctttaagaaatgattttttgcttcaaatctaaagtctctttcctagttgggaaaaactatggtaaatttggaaacattatttcccttaacatagtttacgaattattttttaaaactacggtgcacttatgaaaaatcttgagaaagttgaagaaacccattcttatacccaagacacccattcttatatttgtaaccctaacaattcctcgtactttttcttttctataaatttagttcctatgagggagtggagacttaccatcaatgaaacacctaagccattagatatatagagaggtcccaaggagtttggaggcacctttcctttcaaaattaaaataattttgaaaaaattggctttgtttagaagtgggttgagtagactaaatggtgcatccctatagttaggttcttggtgctagtgaatagtactcccacaaacttcttttagaactgcaagggctttagcaagagggtcctttgcctcttaacttattttgtagtagcaatggatacactcggttgtatttaaaaaagaatagaggaagatggtcctaattcatgttttaaggtgcaagggaggggtgacgaggagtagaggtgtttcacctcttgtttgtagatgagatttttttttttttttttttttttttttgcctatgaggagttgatttacttgagaggtggtagctttgttaggttatagggtggggtaataataataataataataaagataataataatcataataataataataaagatttaacaaatgatataaaaaacctaacatatcttaaatatttaaatgaatacgaagtagctatacaaaaagttttgaaatttttgggtttttaaagcaatcagttggttttgaaaatgttgggctaaagttgactaataattataatgatgatgctgatgatgataatgatgatgctgatgatgatgataataataataataataataatcatcatcatctaaatattacatcatgtatactaacacaatcaatattaatacaaataaatactataagtattatggcactaacattatattttaataataataataataataataataatcataataatcatgatcatcatctaaatattacatgtatactaacataatcaatattaatacaaataaatactatgagtattatgacgctaacattatattttaatataatatattaaagtttcagagtttatagataataattttaaagataatatatacgtttacttagcaataattaaaataggaagaagagagatagtaaataataaagaacaaataatgatgctacaaccaataagaagaagacgactttgaagatttattataggtattaggcgtcagtaagttggtaactagttgttgaggtttttgtggatcatactcgtcaacttatataaagcaatgcagatgttactaaaataaaaaaattgttacaaagaatgaaatgtactatgtgtatttcattaatatcaatttattttcatgagttagttaaatatatttatatgataaatggacacgataaaacaaaaaactattgttcttttgtgtttttgatatgaaaaggcctatacgtccatacctacaataacacatgggtcttttgtccatcttacttttatacttataaattgaatttataagcaatatttaatcattatcaattacaacatacatcacataacattaatgacaactattaaatcatgtgttgtaggacccaactcaacacaattaaggaatgagatgttggtttaccaaccttctcatagccatacaacctctatacaacttctacaggtttgaaaccatcaacttttggccacttatttgatttatataaacacaatccttcgttcgaaatgtctaaaatcttataaagttcaaccacatcaaactttatttctacaccattaacgtttatggtaatgggtccttcatcttcgagagtcatattgtagtagaagcatttgataaccctaggataaacaagctctttcatggacacaataggtagccatcccattctcaaaaaaaggctatcaaatcataaataacctagctttgcaaaattaatgttcttacttgggatcactgttctattagtgaaataaaaattacatctttgtgccaactctaaggttgtgaacatatctttatcaaaggtggcctttttatgggcctcaacattttccttcacaatcgacctcttccctttgtcgatgttggttgttgttgttgtcgaagctcttttgggtgtcatggattggggtttcggctatagggttttcattctaggaatggggtgtcgggatgttgaagggaagggaagagagaagggttgagggttttacgtgggtgccccaaatcgatcaaccatggatcttaatcatttaattgcaatgtttgttttaattgaaatgcatatagtttcaaattataataaataattaataaaatatgtgttaaatgggcaaatttaatttatttaaatgtccccatacttataattgcaattattggaaatggtgaattgaaatttttttatatgaatttacacatagatttacatttaaattggaatacttaggcataggttgtaaataggaaattttaaataattttatttttctcaaaatttcaattggaatgatgggcaatggtagattgattattttatacaatttcccatatagtattagatttaaattggaatacttaggcataggttgtaaatgggaaatttaaaataatttcaattttcctatatttttaattggaattttgggaaatggtagatttattatttaatgcaaatttgcatatagtttcatatttatattggattacttaggcatagttgtaaataggaaatttaataaattgattgatttatatatgaatttggatatactatgacttctttatttatttaattaggcaatattattaattaattcaatattataatttacctatagctccaacttaggatattattaaggtcaattgattgatttttataagaatttggatattgtatgagttcttaatttaattatttaagcaatactttgaaatgagatatttcaatattataaattggaaccctgtatttccaatgcatgaaattcataaggttattatttatttatttatttattttaccacttaccatttggacgactcaaattaaaaaatctctcatccaatggctgaaattgcacggaggcatgataccttcagtgacaccgtagaatttttattgtgtagagaataaaaatactatttttaactcttaaaacttggaagagttgggtcttggtcatgtgtcaatgatatgaccataattataaaaaaagaaaaaaccttattttcaaactttgaattattaagcttgattgtcggcaatgaaattcttcttctctaccaatttcatatttcaatacttttttattgataaaatcagttatatttgaatactattccctaaattatgaacattaatgtgaattcacgtctactacttttcttaatatattaaaccatttatttatggatcttcttgaattattaaaatattttcatttttttaaatggaaaattcatataatatttttaaaaactattggtgcaaaaggtaacttaggagatatttgataaaatttattatttaatttaagttgactttaagttgttgatttaaaacttattatttaattattactttaagtattaaggttatttaataaaattaacttaaaactaattctaaattatcaaattaatatatttatccttataaattataattagggtaaaagagtttaagtaagagtgggtattgtggagtaataaaagagattctggagataacgaaggaaaaaatgtaaaataaatatgtaaacttaagaataagttaattgtttttactgttacttaaaattatttgtgactttaaatcataccattaaatcattttactaaacatacttaatgacttaaattaagttattaagttattaaattggtttaccaaatacctatttagtctatgaaagtttttttttttttttaaatatttcaattttatttcattaaattacaaatatttatatgacgatgtggacatagatatttgacgaatcaattaaattttgaatgatccttttgtgttttagcttctcatattataagatcttaagctataggttttgaaagttgttcggttcaaccaaattgactttagaagcttccaagtctaactgactttctaatattggttttaaaatttttggaaaacatttataaataatatttaataatgtgttttattattattatttttattattttgaaaatattgactcctaaatatgtccaaaaatacgttagatgttgttttaaggaccaatcaactcaccctcccatttcttcatcccatctattaataacgactaagcaaagggaaaaatgtgtggtgtttcacacggtcgaaccggtcagcaatatgaacacaagattaaccattgattcccgcatccgtcggtatccaactcccccaaacagaccccacgtttaccccatctagaatgcgatacagttgacttatcgacgtccatggagaaaagtacacaaacgacgcatgctcgtcaccttcatgtatgatatctctctctgtgtaaagtcttcactactgaaagctacttcagcttcatctccgcgctggttttcagagcgaaacgctgcgttttgaatctacacctgtaaattctagttctattccttcactccacttctcgacccaaaagcagagtttttcactgacggttacaagca

SEQ ID NO: 11530 - DNA, 6422 bp, Vitis vinifera
  Intron number 19 from transcript GSVIVT01034690001 (locus GSVIVG01034690001) derived from phytozome v7.0 (chr-ID chr 13; pos 7802655 to 7809076)
gccgagaagttctctgaactgaaaaaggtaacagatctttagtctgttttctgtttaccaaacttcatctcaaatcataaaccacacctaccccttcgtggggggcctaacccaatcaacccaaaaccattaaaagggaaaggaagtcactctttgtattctggacttgatgatatgctggaaaatttgaatttaaaactgagtggttttgccctttctgtttgtgaactatgttctgcctcaacttcatcatcagggatcttggttgttcaccttgttgtcaggatgcactgaaattttacttcctgagccaatataggatgcactgacatttggctgtatttgacattagagtgtgaaattaatgagcctactatgaaattcaatttaacatttttataatatctataatcatggttgaaatattggtaaacatagacatatcggtacatcttggttgttcaccttgttgtcaggtcctgatttgtgcattatcaaactaggtatgtctgatgccaccccaaatcttgatatgtgatccagagccatctctaattccttcctcactaatatataaaccaataatgtgtcatagtgtgtttgttaatacattactaacatcatctacgctttgaattatctgaaaagggttgatcatcaaatgacatgtcgagtagattgcatttaaaactcacaactgaaaaaaataactaaaaaggaaaaacttgctttagattaattaaaatgctcaaataattttaagaggtgtttagtaaatcaactcttgatataacttaataacttaatttaagtcattaaatagattaattatgtttggtaaaataatttaataagtcaaagtagttaacttattcttaatctcaatttatttttttgccttatttgccgatatctagtaagagtgtattttataaccgtaattccatgcctactaattttttataataaatattttgtgggtctctataaaagaagaagaattggaaggtaaatagaatacatttcttccttgatttcaatatgtacatctccacatacaactattcctagaccaaaaaatggaaactttcctaacctaattctatcaaatcccctagattacgagattgtcttgattctctccttaattacaaaaatacacagctataatatttcctaattacattcttccacacttcccctcaagctagtgaatatatgtttttcattcccagcttggatacaattgcttgaaacgttgtactacttaaacctttggtgagtgaatctacaagttggcggtcagtctgtctatctatatgtgcttcgttcgatcatgttgtattggattgtgtgcaatattgattgcagattttttgttgtagtaaaatcttattgggccattccattgaatcttcaaatcttccaaaatgatcttcaaccatagtagttcacactccttgagccattgtgagaaattctacttctgcactagaccttagcaccaaactttgtttcttacttctccatttttttttataggtaatttcttacttctccatgttacggaattcccaccaagaaaggtgcaatacctagtggttgattttctatcaaccatagatccaatataatttgcatctgtgtatgcttcaagtaccagtagtgagttttgtttaaataatatgccctttcctggagacccgttaaggtacggtagcactcggttagcagcttgtagatgaacctcttttggattgtgtatgaattggctaatcatactcacaatatacgttatatccggtcttgtgtgagagagataaatgagcctttctaccaaacattgatacatctctctatctactgcaacatcttcctcaactccttcaagtttatgattaggatctattggtgtgtttgctggtttatacgccaactttcccatttctttgagaaggttcgttacacatttttactgagaaataaaaattctctgcttagaatgaacaactttaactctttaatctcaaactccttggttaagcattgcctcaaagtttgtatcttcttttcatcatttcccgtcacaatgatgtcgtctacatataccagaagagttgtaactctccctaaatttgaatgtttgatgaacaacgtatgatctctctgactttgtttgtatcccatgtttttcatcactttggcaaacattccaaatcacgcccttagagatgttttagcccatatagtgttttcttaagtttacatacttttttagctgctaggtcacttccaaatccaggagaaactttcatataaatttctccttccaagtctccatgaagaaatgcatttttaacgatgaactgttgtagatcctagttatagtttgttttcaatgacaacaaaactccgactgtgttcatcttggcaactggggcaaatgtctctagataatccacgccatatatctgagtatatcctttagccaccaatctcgccttgtacctctctaatgtcccatctactctatacttaacaatatagacccacttacatctcattggtctttttcctacaggcaaatctaccaactctcaaatgtttttttttttctagggcctccatttttgcattcatggcttgtttccaattttcattagataaactctcggatagagtggtaggaatatgaatattgtttaaacttgtaagaaaactcttataggatggagataatttttcaaatgacacaacatgggaaagtggatataaggggcgttttcccttgttcccttcttggtggcaatagggaggttttggtttataggttttttagactgaagttttgacttggtttgtaagagaggatgaaagattgttaccttatttccaaaagtcggttcggattcttggacttgtataagtcaaggaactatagctttcttccttgagtatactttgtcggtcattcgattcttaggagcagactcaatgggtgacaactcaagtttagagataggctcaatgggtgacaactcatgtttagaaataggctcaatgcatgacgacttaggttcaagggagggtacatatacagaattagagactttaggagggtcaacgagaaagagataaatgaaatagaaatcccgatctttgtcttccttgatggaattctccctttgaagataagtagcgggaaaataggattcactttcattgaaagtaacatccgcggagacaaactttttggttggtgaatggtaacacttatatcccttttgagtcgaggaatatcctacaaaaatatatttgattgctcttgggtccaattttcctctgtttgaaccatgaacattcacaaatgacacacccaaatatcttaggagtaagatggcttgtggttctcatattaggataaaatgatgagagaatttccatgagacttttgaaacctaagactctagaaggtgattggtttatgagatgtgtgatagttaggacaacttccccctaataagatttaggcacatgtttttggaacaaaaaagcttgtgttgtatcaacgaggtgaccatttttcctctcagcaactccattttgttgtggggtatttacacacaatgactcatgaattatacctttcataatgaaagtatggagttaggacttaattgaaataatctttggtattgttagatcaaaactcttaagcgtgacaccaaactggttttttatcatgttatgagaatttgggagaacaatactcacatcagatttgtgtttaagtaaaaagatccaagagaccctagaacaatcatcgatgaaagacacaaactagcatgccctagatatatttgggataggggaaggaccccaaatatcactatgaattaaatggaaaggctttgaacttcttttattactagttgaaaaggttgactgcttatgtttggctagttcacatgcttcacaataaaagctctcaacatctaattgcctaaacaaagaaggaaacaagatcttaaaagttctaaacaatggatgtccaagcctacaatgatgacgctaaattttttctttaaaaaaggtggtgcttagaaagaagagatacaaatgatttgtttggtgtctcaaggtagtatagcttgttccgtttcttagcaagtccaatcatcttccctaaatgttggtcctaaaatacacaatgagtagggtaaaaaatcacattgcaacctaaatcttgtgtaagtttttgtatagagatagattagtagacaacttaagaacgtgaagcacatttctaagtatgagtgtaggactaatttggatatctcctacaccagtaacggtggttaatgaaccatcggttgtggctattttcttattgcttggacaagggttatagttgttaaattggtatgatgaatgagtcatgtaatctgtggcacctgaatctataacctatgagttgacaaaggtttcatctgagactttttatccaatgggaataggagacttacttgaaagtgccaatgagtaggtacttgaagatttctcaagatttcccaataaaattcttagttttcaatctcctcccaattgaatccgcttgatttcaaggatcattccttaattggttgaacaggagacaagtgtgcttgtccaatattcttctgctgccctccactgtaattggttgtcattctttcaaattgagaagtggtttttgatttggaccaaaaaaaaggtttttacttcttactttactataaggctttaaatagccaaacctaaacacttgtgttggagttgttgttggcaataagaggtgttgttgcaaggtgaggcaaagtcaacggcaatgatgagaggtgatggcaatggggacgacataactgagaaaggcaaaagcaaaggatgacgcacagtggaggagaatgatgttgagatgatgacgaggcacgaggatagcaacgacggcgcaatggtgaggggtcctttttgcaatctttataggttatgcaagctgtgtcgaagatggcctgaagacaattacgacatgatctaggtttgtgaaggccacccgtagaggcttatgctggcgacaacgtgggaaagcagccacaacagcgtaacgaaggtctggctctctcggcgatcatatagtagtgacatcgaaccacgattttcaatgatatcaacaacatgggaatgacttgtagtcactaggtcttctgttgcgcacgtaaggtgttaacaatcttggtttgtagtgagggtgagggctctgtttcttgatcagtgatgacaatggtggatctttgccggtgtaaggagattgagagcgatggggcgaccttagtggggcgacgatggggcgaggtagagatgagggtagcgacactgaagacttgtgttcgctacgacacacttgctattgtagaaagggcacgattcaaacaaaaagaagcctttaaaggtcgacaatgaaggtcaacactaaactcagcaatgaaggccaaagaaaattccttctcctagattcacgagcctagggctttagtaccatgtagaagaaaaagaagaattggaaggtaaatagaataaatttcttccttgatttcaatctatacatctccacatatttatacaaatattcctagactaaaaaacaggaactttcctaacctgattctatcaaatcccctagattacgagattgtcttgattctctccttaattacaaaaatacacaactataatgtttcctaattacatttttccatggtttcttatataacaatacacaaacaaatttattgcttaaaactaatgaaaataaatataagttaaaataggataaatattagttaaaaataatgagggtaaatatatgaatttaatgatttagaataaatttaaaattaatttaagcaaacaattttagtaattaaaataaaaatcaaagaataagttttaagttgacaaattcataataatttgacttaaagtcgatttaagtcgttttgtaataagcattaaattttaccaaataccctcttagtcttgtctcattgacggtgtagagaggtttctcatttaacaaacatcacgatcatgcaatattgcatccaaatgagctgctcagtcatgattgtaaaaactagtgaaatttaaggcaaaatttttaaggtgaatgtgcttggcttagaagatcatgtgttatacttatatctatccatctatatatgttgcattgcagtgatggagtgttagtgatagttgttgttcctctataaaaaaaaatgatagtttttgtattatgaatgttttaaaacattgttgcttaatgcgtttctggattttaactgtttcttacaggaaaaagaggtggcagaaaggaaagctaaagaaat

SEQ ID NO: 11531 - DNA, 4077 bp, Vitis vinifera
  Intron number 1 from transcript GSVIVT01018558001 (locus G SVIVG01018558001) derived from phytozome v7.0 (chr-ID chr1 6; pos 13400742 to 13404818)
cattcttgtggagggcattgttcttgctgcttctggtacgctttcttatcttggatttgttgggagttaatgaaatttagatgctaattctgcattctgggttctgggttttatttgctttgattgtgtggtttctctttctaggaccaaatctaaatgaagaacggaaggggaaaggaaataaaaggatatgcgtttcatttcctttctaatttagcaaattgtttcaggaaaaatgaaatgtcaaacaatttttttatccaccctgttgcccttggtgtgatcagaaaaagacagatggtaagattaaattttagagaagtttttatatgctgaagcgatttcaacccaagttccaccacttttaggcaatttgaacatgaataatgcattcagattcatcctaattgtcttttcttagttccaaattatggaattttttggttttttttttcaagtctgtcatttaattttataagggaagaatagagcacttatgagatgtgaataagaacatgatggtcatttagttggcaaaatgaaaaatgatacaaatattaatctcacagacaaaaaatttgattagcaaaatatatctctatagcattgtcctttttgtgaacttaagaaatgatatggtttagaagctctgttgatttgttttagttttatattatcttacatttaggaatctgcaaataccaatttttgtggagttatgaagttgattcgggtttttccctcccttgattagtggtttttaaggtcaacctttcaattgttgtcattgaataagtttcaactcattaacaccactgacttacacatgaggaaacatggctgaatttacttgctttagcatagttaattaattttggcttgcttgtaattaaacagtttttagtaccttgaactgcacttatgaatggaattggaaactaggagatttgaggcttgcaggtttagtcagttgtggaggtgtgctcttagggtatttcttgattgttgacttgtgattgaaataaatggaaatattcatgcatgtctactgaggaacgtcaaatgccaccaccctaaaatggaaaaagaaagtgtttatgactataatactctggaaaacataaagcaaaaatatacagagatgaggatgtgaaatgactaaatggaagactaagagagacctgctaagatggactaaaataccatcaatatacctgtgagattgcacccaagaaactactcttgcaagatctgagtgaattctagctgaaggtttctgaaggaatgatgagcagggatgtgagtatgcttcattggcaaaagatacacttatgatgcttcaatgcctttgtctgtaataggtaggtgcttggtttgtaacaggtcggtatgcttgaatagagtttatttggttgctatgagtagttgggttggatcacttggataatgttaattagagtttgactggggacacggacatgtacttaacatttttttggttttgtcttatcaatggcatcctatatctaaagaaaacagaaaaaaattaaaaaaaaaaaaagaaaaaaagaaaaaagggaaactaattgacaattttcatcaattgtgttttccatagaatgtgaaaatttctgaacttgtttatgttaaaagatgagctacattgtatcgttagatgattccatagtttcactagtgggaagtaggctgtcggaaaggcttggactagatcctgctgactatctataaatgtaccctactagcttcaattgttatatgattcacccatctcaaccttttggtttagaatctatattgctgcttaggctatttggttaaatcttcatctaccatcctttcattataagatttggattggactcttaatatatgatctaggccttctacaaccatatgactatttgcaactttgtctcacatttaagacccaggtgtatttatggtgcttcaaggctcagatttgacaggcttgtccaccagaatagagttcatttggctgctgtagatagttggattggatgatttggatcattctaactaggatttggagagggacattgacagaatctaccattcttttccttgatttgtttggtaaaaagctagtgtctgattagttctactgtgataatagtttctttagttcttaagatggaccttaggaaaagcttggagtaggtctttttgattagttgtgaatgtactgctacttgcttccttgttatgtcattcacccatccaacaagaacctttcaacttaaaatctatgttcccacttgggctatttgatttaagctttatccagatctgaacagggcccttaatctgtgttctgggccttctacagccggatgaccttttccagctatattctcacatctagaccccaggtatcatgtgccacatgtttgtggtcattgacttattcataatctcctccagccagttgccttttgcatgttctttaactttttattcttcgatatagggggtttgtaccgctgagtttcctctttggatgaaaatttttttttttttttgccttatttttttctttacctgaaaggaataggtaaaacctacctgcagcctagcttaactaccaaaaatattgtttcatgtcagatgtcttgttggattacaatattctttaccctagtcaagaggatttaaggtaaatcctctgaactatactcataaacccactgaaaagattccacatggctgctttctgccatactactatgccaaaacatccttatggcttcatcaataatgaatgatttcaatgaaataaatgattatccagtactcagacataaaatgcacgatagcatgggtactgccccaataagagcaaataaacataatcattgaatttggcttgggtttttccttcagctcctcctgcttaagaagattgaccagaaccaagatgaatttgcatcctataattagcaagtgttccaagtagctccctaacttgactatggagctttaacagggcttattttgattttcaaatttgttggttagacctcatgttgccacagattcatcttactattgcttagtattgaccagagagggttcaaatgctggtgaatggcagaggttgtgttaattgcataaccttgttgtgatggtttgggcttacatattattattagtatcactatttaaatattatattacatcacattttaatatggcatggatccacataaactacccaaactagtctgatataattcaaataaccaatcattcctgcccactaatcagggttgcagatggggatagatgacatactcaaacccaagttgggctcaggtgtgatctgggtttgggttgcttatcagttaagatcatatacccaaacacacaatgagctcttttaattgcacaacttgtcacaaacccacctagttcccatccctacatgctgcctttatcaaaccgtgggtgagaaaacatataatgagttaagaaagggatggaatgcacatatgtggtcatcgcttggtggcaaaacacatgcatatgatgcctaggcattatctgggtctattgatggttgtgaaagcaacttccaggaagagtaacttcattcacatggaagatgtgtatacttttaagaaaaactgtggtgatgaagctaacagtgtggacaccaaacatctgtaaaaatacattcccctcttttaaaccacaactacatgcagaatgattctcatttttcctttacacttgtcccatccacatcctatgtaagtcgaatgtcatttcctcttttaaagcacattatattctcagctgtaatgtggctgacaaccgtatggcattagccctgactttgcgaccaccacataccagacaaattaatatctcgtccagcatgattcctatagaatcagaactgatttgatataaaggaaagaataacaaacaagtgatgtatgtttcaatttggaagacttatgttgttcagattttaactttgttatttttacatccacaggcttcctaccagaagagtgggataaattctttgtg

SEQ ID NO: 11532 - DNA, 10683 bp, Vitis vinifera
  Intron number 9 from transcript GSVIVT01020854001 (locus G SVIVG01020854001) derived from phytozome v7.0 (chr-ID chr1 2; pos 1026451 to 1037133)
catttgctatattttccataatgtaagtctccttgtattttcagtctctctgatctggacattgttgtttcctgagctttgctaattttatcaaattttctgataatattttcccttgcaacattgaatttcttttatcttggagtgctcttaccaatgggcaatcatcatattattttcataataaggtgttttccctttattattatatttcattactgtgcaagccttattcttacattcattttagattatgaactatttcaacttttctaaaattgtttgttatatttttatttattaataatgatgactgaacatatcctttcttcacatgcatcttatgtattcttgtttccaatttcatttgtgattagcatcagggtatcattcatggtatttgttgttctgttaagggttgcttgatttgatgtaaagatgaggtatttgatctccaataaagaaggttaaggttcatgtaagctttgaggaaaataaatttttattaatcctcttttctaaaaaaaagtatgaaggatacaatataagtttatatagagactcctctagttagaaaataggaacttccctaaaagatagagaatcctctagcaagaaaataagaacttccctaaaaattagaaaaggaaactcactataactaaatctgaatttaaaaataaatttcaggataaaatcctaatttaaaaataaatattagatttgatcattttcattaaaaaataacaacaatattcctagattttcaacactccccctcaagttggtgcataaatatctatctgaagaaaaaaaatatttgtttcttttctaagatggtatttacacagctatacagtttccttcttataagaaagtctaatgtacaaaattaggaaagaataattactgtccaactaatatccctaatttacggggtggactaaacaacataaatacaaagatgtatactatagttatcatatccctcaaatctctattaattgaaccaaatcttcaatttctcaatactcccccttaagttggtttaaaaatatcttccatagccatcttgctaactaagctgtcaaattgcttcccatgtagtccctttgtcagtatatcggcaacttcttcaattgttggaatgtatgtcatgcaaatcaagcctttgtcaagcttttctttgataaagtgcttatccacttctacatgcttatttctatcatgaagagctagattgtgtgatattgagatagttgctttattatcacggtaagctttcatgggagatggactaggaatcttcaactcttcaagtatccttttgatccacattacttcacaaatcccatgtgagagatctaaattttgccttagcactacttctagccactacattctgttttttacttcgccatgtgactaggttacctccaacaaaggtacaataacctaatgttgatcttctatccataatattttctgcccaatttgcatcaatatagactttagcttgtaaatgaccacattttctaaataataaccctcttcatggtgtactttttaagtatcttgaaatcatgtaaacaacatcaaaatgttctggtcctggagagtgcataaattggctcaccatactaactgcaaaggctatgtccgagcgtgtatgagacaagtaaattaaccttccgactagtctttggtattgttctatacttttcacatccttagatttggcagtttgtaactacaagttaggcttaatgggagtttcaactgctttacaaccaagtaagcctgtctcaccaagcggatcaagtacatatttcctctgattaacaaagataccttccttagatcgcgtaaactccattctaaggaaatatttcaacatatctaagtccttgatctcaaagtcttttgcaagtctcttcttgagcctttctagttgtcaatatcatcaccagaatcatgtcatcaacataaacaattaaaattgcaactttttcttcctttgagtgtttatagaatagagtatgatttgcttgacttggctgaaaaccatagctggtcacagtttttccaaagtgttcaaaccaagctctcggggattacttaagcccatacaaagactttcttaatttgcagactttgtcacttccaagtttctcctcaaagcctggtggtaaactcatgaacacttctttttctaaatcgccattgagaaagacattttttacatctagttggtacaagggccaactggagttaactgctaaagacaataaaactctaatagagtttatttttgcaacatgagcaagtgtttcctgatagtcaatcccataagtctgtataaagccttttgccacaagtcttgccttgtacctctctatgcttccatcagatttgcactttacggtaaacacccatttgcagcccactgtctttttgtctcttggcaaatttacaatttcccatgtaccacttcttctaagaccattcatctcttccataactgccaatttccaattcggatcatcaaggtcttcctgtatatttcttggaacaaacaactgagagatcttagatagaaaggctctatgattttttgacagttttgtgtaagagagatatttggcgatagtatgcatagtataggagctagttcattttctaattgctatgggcacatctagatccaaaggtatggtattagaaggaataggaggatttagagtaccttaaatatttagataaccatctctcggagtgtttgacttatcttatgctagtatgatagttgggttttgtgtttgatgatgaagtttccttcgagtataaacttgaaactcagaattcaaacgatttacattcttctgtagtacttctccctttgtttgtgaaacatctatactaggcaaggacaagctaggattttctatatttccaatatttggaacatttaattccttagtttgagtttctaaattattatgagaagaatactctagtaaaatagtattcggtaaagggacataaaaatcccaaaaattatcttcaactccttgattctctccctggagaaattttttgtgaaagtaaggttgattttctaaacaagaaacatcaatattaacatgaaattttccggtttgtggattataacacttgtatccttttttgtttggagcatagcccatagaaacacatttttcagcccgagggtcaagtttggattgaaatttattgggtatgtgaacaaaaacaatacaaccgaagacttttataggtaaactagagtatatttgtgttttaggaaaaaaaatttggaacacccgagaggtgtcatgtactttaaaacacgagtcgacatcttgttaatcaaataacaagcggttaaaacaacatcacctcataaatattttggaacattcatataaaacattatggcgcatgctactttgagtaaatgtttgtttttatgcttagcaatgccattttgttgaggggtatctcgacatgtagattgatgctgaattcctttttctttcaaaaagtttcccaagagctcatttaaatatttagatccattatttgaacaaagaatacatatttttctttgaaattggttttcaacgatagtgtaaaaatccttaaataatttcttaacttcagatttttcacttatcaaatatatccagtacaaacgagtgtgatcattaataaacgtcacaagccatttttttccagtactattagtagcccgagatggtccctaaagatcactatgtattaaataaactggtttggtggcaaaatagggtttgaataaatatgtagcacgctggctctttgataaataacaactttcacaatgaaaaaatgaacaatcaatatctttaaataaagcaggaaataagtgtttaaaataagagaaactaggatgtcctagtctataatgccatcgcattatttgttcacaaataaaatttgaactagtactactaaggctctgagtttttttattactagaggaaagttcatcaaaatagtaaagcccttcgatcattctagcactaccaatcatcctcctcgagctctagtcctgaaattcaccatgagattcaaagaaggtgacacgacaattagcatctttggatagtttactcacaaacaaaagattacaagcaagttttggaatgtgaagaatagatttaagagttatattcttagaaattttatcattccttttcctgcaataggtgagaaattgccatcaacaatacggattttttcactactagaacaaggtgagtaagaactaaaaagataagaaaaacttgtcatatggtcagactttccagaatctatgatctagggagcagaattttaacatgatagggcattagaattagtacttgtttgtgccaaagaaacacttggaataccagatgaggaattagattttaacagtttttgaaggtgatccatctgctttttgttgaatgttccatggtctgcttcattggctgatggagttacacgagaagtcctcccttccaattttttgtttttccaatttgcaggcttgccatgaattttccagcaagtttcttgagtatggcgtggctgattatagtgatcacaccaaacccgaggcttctcatccatcctgtgctgataattgctggccttgttggcagcaatatctgtagtagccaaagcagaattttcgaatggctcatcagtagtttttttttctgagcatgacaagtctacaactttcctctcttcgaacttcagaaaaaacattactgatagagggaagaggagatctgccaataattctgccttgcacttcgtcaaactcgacattgagtccaacaagaaacttgtaaatccgattgtcctccattgttttcttatgttggttacaattttctggggatttccattcataatcgttgtataaattcaagtcttgccacaaccttttcagtgagttgaagtacttagtgacagagtcatttccttgtcgaatttctccaagtttcagtgttaactcaaaaatttgagactgatttcccagatcagagtacatcaggttaatgttatcccataattctttggccgtgggataacataaataattggagctaatgtcttcatccatggaattaacaagccacatcatgaccatagatttcttggcatcccaggtagcataagtcagatactcctttcctggtgccttcttgtcttcggttaggtaacctatcttcccttgcccctgtatatacataggaaccgattgagaccaatgcagaaaattatctccattcaggtggatggtggtaatttggactaaatgcgaggtgtgggttgattgtgtctcagaaattttaataggggctggttgagatgcagtcgaattttcagacatggctatagtgaaacagatgaaggaaaaaacgaagaaaagacaaagaattctagggtttttgaaaggagaaaacaaagacccaacctgtctctggtaccatgaagaaaaagaatatttttttcttttctaagatggtatttacacaactatacagtttccttcttataggaaagtttaatatacaaaattaggaaaaaataattactgttcaactaatatccctaatttacagggttgactaaacaacataaatacaaaaatgcatactacaactatcatatccctcaaatctcaacactatcatgtccaatttgtttgttagatgttcaaaaactggtctttgaagtctcttggttaggatgtcagctagttgttgtgtagttggaacaaatggcgtgcatataatacctgcttcgaatttttcttttatgaaatgtctatcaatctccacatgtttagtcctatcatgctaaactagattatatgcaatactgattataactttattatcgcaataaagcttcaaagtgtagattgttggttgtctcagctcttttaggacatgactaagccacaacacttcacaaaccccatgcgtcatcactctaaattctgcctcccactactcctgactatcacactctgtttttgactctaagcaaccaaatttctccagataaatgtgcaataccctgaggttgatctcctatcagtcattgaattagcctagtttgcatctaggtatacttcaacttcttgttttttattctacttaaaaaaatagttattttcttagtgtattcttcaagtaccttaaaattttataagttgcttcgagatgcatttcaaaaggtgaaggcatatattgacttaccatactaactgtaaaggcaatatccggtcgagtatgagataagcatagttgtgaaagacatgtttcaagcatgcttaggtgcaaggcggcccaatgcgaaccgtagacgcctcgccttactctaggcgatgcttgttgaaggaggcgcgacttaggcgtgcaaggcaaactatggtatatgggaaaaataatttttcaaggtttcaatgggagttttgaagtcaagggcttttgaaggcatatggtttattaaataggctgtactaaggatggcatccccccaaaaagtcattggaatatttcttgcaaacacaagtgcccgagctacttcaaggaggtgtctattctttcgttcagccatccccacacatgtaaattggtggatattgtcattttgagagaagaacgtagttagactttcattgaagtactcagttcgattatcaaatttaatcactcgtacttggacaccaaatcgtgtttgtatcattttgtagaagttttgcaaaatattaatagtttcagatttcctttttaatagatatacccaagtagtcctgctgcaatcatcaatgaaactgataaaccacctagctccagaaagacaagttactcgtgaaggtccccacacatccgtatgtataatagagaaagaaacttcacttctcttattattactcaaaggatagggaacccagtggtgtttttccaattcacacacttcacacttgagcttagagttatctaggttgatacaaagtttaggatacacccgttgtaggtaagcaaaacttggatgtcctaatctctcatgcatcagccaatagctttcaaaaaatccttcaacagtcctctttatttgataaccctaaacttttcctccttcctcggtgtctaggtagtataggccatttctctccttagcactgacaatcatcttccttgaactaaggtcctggaaaacacaatgatttgggaaaaaagttactgaacaattggaggttttggtaagttttttgattgacaataggttacaagacatttttggaacatgcagtacacaagtgagggtaatctttggtgaaagagacacattttctctaccaataattggagtaaaagtttaatcaacaacctgcaccttttgtttgccaaaacaaggtatatatgataagaaaaaattggattctttggtcatatgatcactagctcttgaatcaatgatccatgagttagaattaggtacaacagtggttgtaagaggtttatggagtgtacctgatcgtgcaaaagcataagaagtggaagtgggagtaacctctgactttcccatgatcttatacaaaagatcaagttgttttttcataaaaggcagattctcctcagctgatacaaatccattaacagtagaggtgaggccttatactgtctcagcttgaaaactcttgctaggcttggaaaattttccattcttattcccttgtggccttccattcggtttccaacatgtctctcttgtgtttaggtcttttgcaataatcataccatcttatatctttctctcctcccctgtttgtgtttggattgttctcctcagccacattgagagcatagttatcatgatatggtgttttcatcgtaacaccaattctggattcttcactactcacaagggaacacacttcattcaatgaagggaagcttttgcaaggatttgattccttacctgatctagctctggatttaagccagcaaggaattcaaagatcctttgtctttccaataaatcagcaagctttgcaacatcctttggtgattccatttcaatgtgttgataaatgtccaccttatgccataataccttcaattcaatgaagggaaacttttgcaaggatttgattccttacctgatctagctccggatttaagctagcaaggaattcaaagatcctttgtctttccaataaatcagcaagctttgcaacatcctttggtgattccatttcaatgtgttgataaatgtccacctcatgccataataccttcaatgtattttagtatgttgtgactgtgaattctccttgtttggttgcatgaatcttgttcatcaattcaaatacttgggcagcatcttcttgctttgaatagttatgtgtaacaacatcccaaatctcctttgcagtagagagaaataagaaaggcttagctacttctggctgcattgaattcagtaaccaggacattattaaagagttttagcttcccataattcaaagttaggatccgaagtttctggttctgttattatcccacgtagatacctcatctttcccttgacttaatagaaagagtttggttgaccgagaccactcaaggaaaatatgatcattgagtttttgggtagcgatttggagagtaggattatcaaattgattggagactttagggactatgaaagtctgattagaggtttgttaaaccatgaggacaattgaaaatgaagagaaaaaaaattcagaaggggcgaaaggaggagcagacaccaaaatttggagaaagaacgacggagacgacaaaaaatggaggaaaaaagtaaggcgaagtcgctagaaaaaattgagcccaagaaactacagtgactccgataccatattgtttcaaaaaactactctgatatttgattaaacaaataatacaaatatataatagtgtctaagaggcaaacacccaatttatagctgtcctaatcactaatttacagctatcctagtcaatagttgactgttacagttatcctaatttgtacattgattgactaattctactaagctaatattaagagctaatatataccatatataggttctttatagctgatcagaccctatgattaggggattttgttgatttcccacatgagatatcgggtctatttagggggagcaaccaaatttgtctggccatcctctgtcataatcgaagaggatgaattttcgctggccccaatcatagtcgtcttgaccatgggaattttttgataaatagcctatgctttgataccatgtagcctttgaggaaaatagatttttattaatcctcttttcaaaaaaataaaatacaaaggatacaatataagtttagagactcctctaattagaaaataggaacttccctaaaaaatagaataggaaactaattataactaaatcggaatttaaaaaataaatatcaagataaaatccaaatttaaaaataaatatcatatttttttcccttttactaaaaaataacaataatattcctagattctcgacagttctctttggggaacatggattgtgattgtttcatgggtataattgcataataaacaagaaacagaatgtggcagccaagaagatgaatgtaaagactgtaaatgtagctaatgctatttgggatagaatgttgtaacagggctttgatctgcggaagttctgatatgctgttttttttttcataactgaatgtcatcttaaattttggaataaactccttagaattctctatttggattatttgttcttatttcatttgaggttttttgtgcttgtcaattctaaagcactggctttgaatgcacccagcctatattttcatggtcaagtatcacaatagaatcctaattctattacagtgaaatcagattcacatgaaatggacgcctatgtctgattttgatatttggatgtgttgcaggagcaaccaagaggcttactgtggccaaattctgtagtcatctttgcttgggcctctagttagctggaaatttcagttttttattatttttttaatttttttattctgatttattttttaaattggagagggtgtggggcgcatggttggttttggtgtggccttatggtggggtgtgacacacaggtagcagtttgaaagtagtcctgactgctaaatactaggttaataggtcagttgaaggctaggtgatgtttgatgtacaaatttggttttttttttggttctttttaaacgatggtccttataatttactattaggttgatgactgttaaatttcggtagtccaatgcaactcttacttgttcaggcatgttgaagggtgaactaagtcttgttttcaacctgcacttattttgtgtggaaaaagctgaagctccatggtgtaattctttacagaattctgttaacttgcagaataagtatatttttgctgtcaagtataatgccctgaatttcaaatgatcatgcaccacctttgatgtgtacaagtgtttttgtttgttttgttttgtacttaataattgaaataaccaatcccttgtttcctgatataataag

SEQ ID NO: 11533 - DNA, 1934 bp, Vitis vinifera
  Intron number 3 from transcript GSVIVT01020733001 (locus G SVIVG01020733001) derived from phytozome v7.0 (chr-ID chr1 2; pos 2544006 to 2545939 reverse strand)
agtcgaacacaacttggagaacatcaaggtattaatagaattttggacaccttgtgatgaattatctaattgtcctaattctgatttaatttttcatatcttcttctttatttatttctttcgaatacattagaataggttgggtgtggacaaatcgggccacacatgagtgttattcgatttgacatttgggaatttgtttgattgaatgttgattgtttgataaattatgattgagattgggttaatttttcttcaaactcttttatttgaataagcattggaaaattgcatgacaatgggctttgaataaatgcattaattaggttttatgcctccttgatttttcattttcggctaatgcaagttttcggcttacctatcataattcacatacgtttggcaccaatagatgattgcttgtctaggcttaattaggcacacacttaggatacttttgtatcataatttaagacccaaattaagacataattagtcttaaatgtagctgcaccttaggttaatatttaggacacttgagtttcatcatggcacactagagaattcacatatacacatttacattttttcttgatagtttgtgtttgagattctatgtgttttaatattttttaaaatttgttttaactttttttatatagccaaattaatcttctaacttcattttaaaattaatcttagatcaattaggtaaagaaatgtcaattttccaaaattcatgcaaccaaatttattcggtatgcatatttgaaaaattttgatattaattggaatatattctgatcatttgctgatttttttgtgaagtaacccacttgtgaataaatttgatattaattggaatataattgattaatttggtctattgggtgttaatctggacatgttaaagatgttacctactttttattttggtaagataacatttcttgatatttatttggagtttattttgtgaaccgatattctacctattaatgataattcctttgcttttgataatttggtcccttttgaacatgcttgtgaactttccttgacttgagacatgctaagtatatatatatataggtttagttttttattattcattaatcttattattatcatttgtgaattaacctcatttttataaaaacgctaatgtttgctactcaggtacgctctctatcttctcatttcaaagttctatgaatatgtatgtcattggaaactatatccatgtgttgatattgactttgggtgccttgatgacttcctatgataaaatgcatgttgagtgagataataactgaactaactttgatattttgtgatagcatttaagttgcaaatccaagtacgcatattatcctttctttatgattgtggtttgaatccttgtttgacatactagagttagtagacttttaaaatcaccttaacctatctaggtattcataatcatttgattaattattgtatttcccttaactcagctagtagagattattttagggcttaaaggggtgttacctccttgatgtacctttccaataagtaatttgatccccgaacccaaactcgagttttccatatacaacttttctaaataaactaggagtcatttttatttttattttgttattacttgatttctttttacaaaataaataaaagtaagtgacaactctaagtttttatatatgtacaatttttcactttaatcaaaagcgaatctcaccaatcgagtggggagcgcatgatgaaaatgaaggtccatagggatcgtttcaaatacacaggcctgcccatgcataaccctcccaaaattgtatttctcgtaatttctaagcctcgtttactacaacttcttacatttcctttttctttttcaaatgcaggtcgcccttcctcctttattccctacttaa

SEQ ID NO: 11534 - DNA, 4042 bp, Vitis vinifera
  Intron number 10 from transcript GSVIVT01001406001 (locus GSVIVG01001406001) derived from phytozome v7.0 (chr-ID chr 18; pos 18681384 to 18685425 reverse strand)
agggtaagttctattatctccactgcaacgacttaaatatgttctgttgctatgccagtaaactcaaattgaattcagcatttgcattctttaattcttttggtattccccttttcttcattgggaattctgtaaattggagtttgacttttccatatatacgagggacctgactctactagttgctaagtttaaactgtgcactttgtgttactggttacatctctagttggtatttttcttttgatcagaaacaaacatatccattgcatggaattgtaaatacaaagacggatgaacaaccctttcaagatgtataattgttgataagaaagcacaaaaaatatattgctctacaaaaattaaaaatatctgcacaaactttaggcaaaaaaaggcaatgtgctcacaataaaaacactctatacatacaaggaggaaaaaggttgccaacaaaagaaattaagtgttctccttgtgtggctaactggtctatggcttgaataactaaactagggttccaagggaaggagtcttcccaactcactagaaatatctataattttgtggacctaactatcgaacttccatgaacctctctcgttattaaacacccaagaaataacaacaaaatctccctctacatctaggtaggacaaaaagtcttagcctgcagcaagtcttcctatatgctctattatttccaccgcaatcactgaacttactctagcaggtttagactaagccctcagtaccatacccaagggatctccaatctcatctcctatacctaattatccaggattacccagagaacacccatcaaaatttaactttactgaacctaccggaagatgtaacaaatctagcatagtgttcctatctaatctcctaaagtagcaaaaaattttataacctagcaatagtaccagaaaacggatttgtgataggggcccaaagggagaaagaagtaaaccaaatcctaaatagcctccattaattgccgtttctcctcaagatcctagcatttttctccttctcatgaaaatcatgttgaggataagatagttgataaagtacccttcctttaagttgatggccaacgctcttgaaagaaattaccaacatatttgtcatgcctccaaggggtacctaatcaattttggcaagactgaacaaactacatcagagtcccagtttcatcttatgtttgcaggagatcctttggtcttttcaataacagtgagttaattgtctactcaagggaaaagaataagtcacaagaagatatagagcaacaaacacatccgggctagtacatgaaattgaactgaattcggtcccaaaagagacacgcttaggtaacattgattctaatcctaatgagtcaaaagatgatgaacttaattttccaattgccaaaagaaaaggagtaagatattgcacaaatcatccgatttattactttatctcctataagagtttgttaccaggtcatcgggcttttgttaccagattcggatattcggatattcggattcccaacaatatccaagaagccctacaaatacttgaatggaaaacaaccattgagaaagagatcagaactcttgaaaagaatgggacatgggagcttgctgaacttccagaaggaaagaatccagttgggagtaagtggatcttcatagtcaagtacaaagcaaatgtgagtgttgatagggctggttgctaagggatttatgcagtcctacggaattgacaaacttttgctcaagttgctaaattgatacaattcgtattctgttgtcattaagcgttaactgagattgacatcttcatcaactggatgtcaagaatgtcttcctcaatggtgacttagaagaagtgtacatggaaattccttcaggtcttgagattaagacaaacattaacaaagtacgcagactaaaaactatggtctcaagtaggctccaaagcttggtttgattgttttaccaaggctataaagaataacccgaacagatttaagtatagcaactaacaaaaatgtctcaaaatagtccactgcataagtttgtctatatcccttggctaaagtcaagctttcagccactcaacagacccatcgggttggtattttatggtaacgacccatctacatccaacaacttccttaccattaggaagagcttgtaattcccaggtgccacgatcacataaggctttcatttgttcttccataactaccctccatccaggatttgcaagtactttcctgataggttttttaggaacaaagatggtagaaagagaaaaggcaaaggagcgaaatgatggtgaaagattatcaaaggaaacatgttcagcttgtggataccttgtggtagtgcacttacctttccctgtgctataaaataaaattcaactccttttgaccaaagaatgtagttagagtcattaagtttatcagcagtgatagaagtaccagccccaggaggtgagaaagtagccatgctagagagaaattagattattgcaaatggttgagaaataccagaaatcaaatactggagaacacaaatgcccagatctgatcagataaaactgtagcattagattagtggcagcatcagtagagggcagaatcaaagcttccaaagcatgagcaccaatgtcaacatccaataggacagatcatgattttctaagttctggattttctagtataggatgatgagcaatggttaagaacagtgattaaggtttcataacgagggtttcagaaccttgctctgatgccatgataaaagaagggaaaatcttcctatatccacattgaaagtattagaaaacaatacaaatatatagagtggattcctatatcaacaagggaagtctgcctcataaatatatagggaaggatttctatttcaacaaggaaattccaactcatggaaaaaaaaaatactttaaagaaaataatatcatcttctgtccttttttaacaacatgaattttttttgctctcaaggaactcaaatatttgttggctgcatcatcctacctttcagacattctctctccacagacatgaactggagaagcatcaaaaggatactgtttaattaagaaaggccacaaacatccaccaaatggctttagaaaaatccagaaaaacccagaaaagtcttaataacaaagggtctagatcaagctgaatgatttacaggttctgggattctatctcatgctgaaattagtgatttacattttaacttgagtgaagaacccttgattgctgctcctttcttttggtctgggcttccctaatgaaaaaatgaagaaaaagaagaatgaaaaaaatgctttatttattggtatctagcatccactaatacaaatattttggttgttttgatgtaaatgtttcaaaattcaaaaccatgttaagagttttaagagttagtgtccattcaatgtgtctgcactgcacaatgtttatgctcaaacatttattatcaatgctttacttttctgaggttttcagtagtgtaacatccttttctcaaacaatcatgcatataatttgtggcattatgaatctgatgttgtactcttacacatacacgcacacttatttaaactagcagatgtgcttatgctaataacattgtagaactgtacgcgtaaattgaataagaatagactattagtgcagactctgctgtaaagaaagcaaaagaaaaaaaataactaagatgtggactgagcttctaaaaatagccattcaggtgagatgatggaaagttatcttaaaaattgaactgtgctaatagatataaaacggatgatatgtaatcaatagaatgaggaggtagatttgttgtggaatgcagtattaatgaactcattcatgttgtttactgtgaatgaaattgtggatttagaacagatttagacattgttcaactaatgaattcagttgtcatcaatgctcatatctaaattgcttttcttattgatatagctcccaaggaactgg

SEQ ID NO: 11535 - DNA, 10760 bp, Vitis vinifera
  Intron number 4 from transcript GSVIVT01036567001 (locus G SVIVG01036567001) derived from phytozome v7.0 (chr-ID chr1 4; pos 23556313 to 23567072)
gacacaattaaaactcgcttacaggtacagttaaatctagttggatcaaattttctggattatcttatcttttcccttttttttcagttttcttttaccaagatggatccgaaattaaccctcaattctgtttaacaagtttttttgtattgcaatttttgttctactataaaaatgaattctaaagctttatcattcatgaaggttttattcctgtatttcaatataagtgaacttcagtttttaatttaatgatggttagtatcagcaaatgaaggagttttgcatccaaagtctccataaatgcatgacttatatatatgctttaatttgtagaatttcaatatccatgtttcacagttataagtcatgttctcttgaaaacggggagtaaaaatgggtgagagagagcgagagagagagaggggtcgcggcagtgatcgagaggaaggaaaatggcaagacgacgatggcgagggggatgacgataaagtggggaatcgaaggcggcgaagagggttcgcagtcgaatccaagatgtttgtgctggatctattagtgagaagaggaaaaccccaaatagttatagaggaaagcaaagggggagtctcgtcttgggtcagaatgggtttggtgagcttagggttcctaatggagggcctaaaccactgcataagggaggagaaggaagatcggtgggtgaaggagtggaaagaataggggagatccttctcgctgctgcgaagtgcaaatcaagcgggatgttttctcaggctaggggtaacagattcggaaagaaaacaataccggatctttatcccaaaaggtagaaaggaaaaaatgggatgggctgcaatgatggaaaatctacaggtcctacgcatgtcaatcgacagaaagaaccaaatgcaaggtgaaaagtttaggaaaaacatggatctgaagagatcttttgcggaagtggtgaagaaaccgacgtatagaggtataagcccagttcaagtgaaggtagggaggaaggaaatacaaagtaatttggaaaaattggagtactgtgtcgtcgggagttggaaccctagttttggggatgaagaagatttggaaaaatgggggaggtttctggcgagttcttggggtctgaaagggagcctagggttggcaaaattggaagagagtagagttttgttggagtttgaacacttggaagaagctaaacgggcctccctctcaggtgaaaaaaggatgggagcgataaggctggggttcgataaatggagaccatgggatggatgcagagtggagaaggaagaaagcaacgagatgtgggtcagaatttttgggctaccagtgctactgtggaatccgactgtgttgagaagggtgggggaggaatgtggaggcttcatcgacatcgactcgaagacgaagaagctggaagagcttcaatgggctcggatcctggttagatcgaccggaggtaacaagccgagtacgctggagattgagatcgaggaggaagtcctcacgcttgcactctggtgggagttcaggccgacagtcaagaagctaagggttgctagccacagatgggaggaggtcagggacgagagtagctcacgcgccggctcgcgtgtggagatggaatcggtcgttgataggactgaggctctggtaccgtcagaggaggggacagggagacagacgagggacaggggatgggaggggacagaggattgggcccaacagtcagggcccatggggcataggggctgtaagtcggatctatcgggcctaaaattgaagggtgtgctgaaagagggggtggggctacaggctgggccatccaagacttgggctgatgaaggttatatgaatgaagccaccctagttaagccccaggcccacttcaaacggcccatgggtttattaaatccagaaaacagaatgggctggaaggctagtaacttgggctgggtttcaaaaggatatcaggcccaggtgacaagtgtaggggcaatagaaaagggcccagatgggctgaatgcagagagggtccaattattaattgagaggacgtccagtcctagtggtccagaagctagccagcccaaaagatgggctcagattgggagtggcccaaaggttgttttggaagaggtcaacttaaatcaacccacagcccggaataaaggtaaagaatccatggagagaagaaggcttttggattgcaaaagtgccagcaatgggagctctttagagggggaacacctaatcatatgggagtcagaggaagcaagaacgtcaagggagaaagtcataccttcagcaacagataaggcgttggcagaggaggccatgaggtatgattctggtctaaggatagagagggaaaggggttacgggtcttcccatctcatcttgtattcttttgatcggactccggtgggggagtctttcgatcattctggggtcttgaaggaaagcagtgatggtgggcccggaatggatgataagggatgctgggatatggtcgaattcaataaggacccaaatttggctaggggggtggagtggaacacagagaggatagaatttctacaagccagaggagagaaagaggatagatgggaagaaagtagcttggccaagttcagtcattttttgggcttttccacagaagggttggagaaggaaattttgaatttcttggtcaaaataaggaagagacgggagaaaattcatagcaaagtattgatggagaagtcaaaatttgagagggaattgaagagactggagtgctcagttaattatgagaaagggggtaagcaaagaagccttctacagggcaaaggggatcagcttgcagtagatacatgaagctgaagctattaagttggaatgtgaggggggctaatgacaggtccaagaggaaaatcatcaagacttttataaggaatcaaaaagtggatttactgtgtattcaggagacaaaaattcagccaatgtcggagggggtggtgagaagtttaggctcgggtagattcttagattggagggccttggatgcggatggggcagcgggaggtttgttgatttgttgggataaaagattgatggaagttgtggactgggaggaaggacagtactcactgtcgtgtagattcaagaatgtggaggatgggactgtttgggtgtttacgggagtctatggtcctttcaccagagaggcaagagagggactgtgggaagagctgggggctgtaagaggaatctgggacgagccttggtgcctaggaggtgactttaacagcaccctttatcaaggagaaagaaaccgccaaggaaggataacttcgaatatgaggaggtttgctcatatcattgatgatttagggctggtagaccttcccttgcaagggggagagtttacttggagtgggggcctgaataaccagtcctgggcaaggttggataggttcttggtgtctcctagatggctagacaaattcagtggggtgattcaaaggaggctgccccgtcctgtttcggaccatttccctattctgctagaaggaggtgggttaaggagaggtccttctcctttcaggttcgaaaatatgtggctaaaggttgagggctttcttgaccttgtccggggttggtggagggaaatagaggtcaggggtacagctagttacagactggcagcaaagacgaaggagctcaaacagaaactgaaagtttggaacagagaggtctttggtaacctggaagataacaaaagagcagccttgcagcaagtggaccattgggatggtgtggaatgtgaaagaagctcgtccttggaagagacagaattaaaaaaggaagcaaaggaaagctataaaaaatgggttatgttggaagaaagtcattggagacaactatcaagggaggtgtggcttaaggaaggggacaagaatacgggcttttttcatcgaatggcgaatgcccaccgtaacaacaatatgttggatagagtaaaaattgatggggtttggttggaagagaatcaggaagtaagggaggggattgcaaatgcttttcatcagaggctctcagaagaagtggggtggaaggcggatattgaggggatccaattagaccggattagtcaccaagaagcagagagtctggttccattctctgaaaatgagatccattctgctttaatggatatgagtggggataaagcccctgggccggatggttttactatggcgttttggcaaagctcttgggatttcgtgaaagaggagatcttggagatgtttaaggagtttcatgagcaaggatccttcctcaagagcctcaataacactttcctggttctgattcctaagaaagggggagcggatgacttgggtgattttagacccattagcctcctgggggggctatacaaattgatggctaaagtgttagctaatagactcaagagagtgctaaacaaagtggtagcccctactcagaatgcgtttgtgatggggaggcaaatccttgatgcttctcttattgcaaatgaggtgatagactcatggcagaaaagaaaagagaaagggctcatatgcaagttggatattgagaaagcgtatgacagcattaattggaacttcttgctgaagactctacacaaaatgggttttggtcctaggtggttggggtggatgtggagttgtatttctacagccaagttctcagttcttgttaatggggtcccaactggcttcttcccgagttctaaagggcttcgtcaaggggatccattgtccccttacctcttcgtcttgggaatggaagtgctagatgccctaattaggagggcggttgtggggggctacctttcaggttgcagtatcaagggtgataggaggcacaatctaaaaatttcccatcttttctttgctgatgatacaatcgtgttctgtgaggctaacaaagagcacctaacacacttgggttggattctcttgtggttcgaagcagcatcaggcctaaggatcaacttggacaaaagtgaaatcatcccagttggtgtggtggaggagattgaggagatggcagtggaattaggatgtagggtgggatctcttccttctcagtatttgggattgcccttaggggctccgcataaagcctcctcagtttgggatggggtggaagagaaagtgagaaggagactatcacggtggaaacgtcaatatatttcaaaaggggggagaatcactcttataagaagcgtgttggctagcatgccaatctatcacatgtctttgttccgaatgcctaagtcagtggctaagaggttagataaagttcaaagagatttcttatggggagggggaagtgaggaaaagaaagctcatctcatcaagtgggaggcgatctgtgaggataaaagcaagggaggactaggcctaaggaagctggtgttcctgaacaaagctctgcttggtaaatgggtctggagatttgctattgatagagatgatctatggaagcaagtgatagtagcgaaatatgggcaagagggccttggatggagagcaaagaaggcttatggaactatcggtgtgggggtttggaaggaaatatggaaggaatttgactggtgctgggataacatggggttcatagttgggaaaggaaacaaaatcaacttttggactgatgtttggtgtgaggatacaaggctggcccaaagtttcccccacctatatgctatggcttcgcataggaatgcgactgtggaggagatgtgggatcagaattttggccaaggggggtggaatctaagatttttgagggactttaatgattgggagatggagatgatagggaacttgttgcatgtgttgagggatttcaagccttctatggaggaagactcagtccgttggaagggaggaaggaatggtaaatttagggtgaaagaagcctatagattggtgaccagaccgaatgatattggttttcctgctagatgcatttgggtggattcagttccaaccaaggttgcattctacgcttgggaggctacttgggggagggtgctcactcttgatagacttcagcaaagaggatggcagcttcctaactgctgttttctatgtggttgtgaagaagaaactgtaaatcacattcttattcattgtatagtagtcagagttttgtgggatattgttcttgggttatcaggtgtgcagtgggtttttccagaaactgtaaaggaggttctaactagttggaggggccctttcgtgggaaagaaaaggaaaaagatatggaaatccattccgttgtgtattttttggacggtttggaaggaaagaaataagttagcttttaggggaggagagcttaatatccaaaagcttaagaattcttttgtgtgtagtttgtggagttggactagattgtatattggtaaggagcgtatgtcccttatagggttcctagaatggttggcgtccaactaagggatggtgaggctcgttgtttttttggctttttgaggggtttgttgctttgtataccccctgtatacttgtaactctttgcccttcattaatatatcttgttttacttatcaaaaaaagtcatgttctcttgaaaaccaagtagcaagctattagtaaggagttggtgaggtatgtgtggtcggagaaatagtattaatgacgtggggttaggagggtggtagagtgagagggtggattggaaggagaatttctttgtgatatcttcaaaattttgacgataacatcaggtggattttcattgtgtttatggttctgataagggtggggctacatggtttctgaaaagagctgggtagggttttgagtcaaatggggttggcattggtgcttggggtggtattccaatgtgctttgatacccttgggagaacatctttacagttatgagatccttttcctactttgttaaagatacaataaaatctcaataaataaatattcaataaattaatagccttgtttaaataataaaatcttatgtctcaattcgagccgatgtactaaattaataacctcactaaatgcgtaagatgatagtttatttaaaggacctaaggaaatacaaattaataattgaagaagtatataaaacacgataaatttataaaaaaaaaacaatgaacaaaaattcatataatagtattgaataactttttataacttctatttttctcacttcaactttttcttggaaccatcacatccttgaaacatttttattttttagactatttgacatcacatctcttccttttaggagttttttctatctcctaaaattaatatttatctcttattttttagtcttttagacttttatgtattaacttttgaccacttatattgtttttggatttatgagcaatatatgtgcgagtataatatagtagatacatgatactctttccaaattaataaatattcttttatcaataaatcaataaccccactaagataatagtttcacttggtccctagagcattattttattggggttttactattatcttttggtggatcttccattaaagtcggtattttacatttggtttaacagtaaagagatttctttccttccatgtctctagaacatatcatgcttctgatcattatttggcccatttgccttttctttcaaatgcaagagatttgagagtaggaaggagttctttcttgtttgagaatggtaaggagttgagtcggtgatgcaggagattcttgatttgaggagttgcaaggactaaaaaaggtgcgacatattgttaaactaccaactttcctagaagttttaagctattaggatttaaattatgaagttgagttggggatgaggtgaggacttcaaccttagttaattagacctttggtaccatgttgagtaatcaacttctttataagcttaatctattaggatttgagcctaccatgtatgttttgctctaaatttacacactggagggggaagtttttgtggagttggggacatggtggttggatggtttcaactttgaagcttgtctaatttcattttggcaaaggtttgagggcaccaaaggtagaattgaacaagtggaaattatgaggttttgataagggttgaggcattgcgatgattgagaaggggaaaagtgaaaagatgaaattaagttggaggagagataggggggtttaaacttgattaattaacatatggagtattacaaaggggacattgacaaagcttggattaggagtagagatcttttggaggcaagatttgatgattctttgcttgaagcctcaaggaaagggacagaagaaaaaaaaaaaactgaagttctttgttagggttgctaactttcaggatactctaatcatatcaataaattgttattaatggaatctaggtactatggtggaagatatagaattgggcattgtgcaattctatgagaggctttattgagaggattagaggtggagacggggcatagatgagggttaggctttgaggcaattgagagaggactttctaattggtggaggcgttactagtgttgagagtttgtaatggtgataaggcattgggtttgagttactttaacatgaccttttttatggtcatgggggttgtgatgaagatgtttgttgctttctaggaaggggggtggggttgttcaagagaaatttgaatattagtttgaatacattggttccaaagctatggggagtggaagaactacatttaacctattagttctgctgggactatttagctctttgctatattatagtgtgttacttagaggaagtagtggataagttggtctgtagcattgaaagaccttgataggaggaaggaaaattttaaatgcagctcttatgggaaatgaatgtaagaatttcaagatcgaagagttgggaccttgtcatagcataaaagaggatactgagatgcgctctgccaattggagctttcttctatctcttttggatcacatgaattcatggcatgaggtaaaactgggtattcgcttgcattttgtggtgaaagatgccttgttaaggttttccaatagccctaggtgccgatgaagattgacccttccccatctccctatctctcagtaactgattgatttttatggtcgtcaagggagttaatgttgtgattttggatatcaacttatatttcctcttattgcaatttcaatttcagtgagataccttgttctggtttttggtagaactaggtgactgaggaagggtcctgacactgcagagggagggttacggttgagtgatgacaaaaggtgttatcttatcttcatactccagggctgcagcagtgttccccatcccatctccctatctgttctgaattttgatgtgttcacttgtgcagatgggtgtgggaaggaagaaaggaaacagaggaagctatttaatgcttatggtacacaaatggtactgtaattttcacattcacaatcattcaatgtggatggtattagtaattttctatgagactaattaattgaagctgagaaatctagtgttattctttattttgagactgccacaactatgggtaaatctttaaaaggcattctgatatccttgtcagtcggttctgctccctactactaatttgggacttccatggcaaggccaggatagttcataattctggactggagcattttgataggaggtttgctagagggaagagaaagctgtatttacgaaaaggtggtcacttgtcttatccaaaagtgtcttggcatgcttgccaacctattgcatgtttctgttcttgattccatgctcagtgttggtgagctttgggtttaaggcatcttggattgtctgccaatgctttgtcgggaaagtgacaatttggaagataggtaaaatggctatttgccagcattttatggtcctctctttttctgtctctaaagtttgatagagatctgttttaaagagtctaatgcaaacattctttatttaaaacatcacaaagagtctaatgtgagcattctttatttaaaacatcacaacatcttggccacgcattaaattcagatgatctccacaagttactgcattcaatcccttttaaactagcatagcatagcatgaattttctagaatctaaagaacaagtaggttgaaccttacaaaatttgagcccaaggattgctacaccatttgaagtacagagacttggtgtctaaaccagagtcaacttatccaaatgaaagatttttaattattcttggaaaattagttgaagaatgaggaattggcataacatagtttgaaagttttgactaatttaattattgttttttagaatgcatattttaggttagaaacttacagaattaagaaattaaaaaaaaaaagacagattttctgctacagaagatggcagaaaggcccatttgttgatattggaaattttgaaaggccaactttactggaattaagtctctggtgttgctatatctcctgcatcagaccctaagcttagaaaattttttcaattgagattcacatttatgttcataagtagctttttaatttgattatgttgttttgttggcctgccattctatgtttgaccaagtaatggtttttttttttggttgatttctttaactaagttgtttgtgcactcataggtcttggaac

SEQ ID NO: 11536 - DNA, 3949 bp, Vitis vinifera
  Intron number 2 from transcript GSVIVT01030773001 (locus G SVIVG01030773001) derived from phytozome v7.0 (chr-ID chr1 4; pos 15727429 to 15731377 reverse strand)
aatcttaggccttcttccaatcttcctgctttggagcatcctgcaatgagaagattaaatgtttcatcatacggcatcagacctgcattttccatatcttgcatcaattcatttgcttcttcaatcctcccctctacacaatgagatcctatgaacaaagtatatacaaaagcatttggatgaaatcctctattcagcatttcttcatatacctcccatgcagagtctaaggttccatacttaactttagcataagcaatcaaagaataagagattgtatcaagaatcatattcttctgcaacaatctcttcaatatcaacattccttgttcaactcttccctcctccaacatcctaaaaatcatacaggtattaacaatcactattggggagcatctcttcccatggattctatctagcatgtccacaaatttttgcaatgccccttctttgcacaatgcactaatcatcacactaactgacacttcatttgggtattttctcactcggatcatatgctcatagatcttccaaaccagagggtagttatcagatttttgaacaacatgcaacaaagtgttgaaactgatgagacttaaagaaaagccatgctcctccaaataacaacaaacatcaaaacaaatctcaaacatcctcaacttagaataagactgtaccaataaatcaaacacacgtgggttggacccagtaatattataactactgagtaacgaatccaccaccaaaaatcttgaccctgcattctttttaagtgttgattcaagcaaagattgagcatccatgagcagttgggctccaacaagaatatggatcgtgatgcaataagaggcaagcccatgttccaaattcttgcactgagctgaccagtgaaaaaaccccaaagcctgttttgcatctatcggtttcttcaattctagcaaaaccctaccaacaaatgattcagtcaactcaagtgagccaaatctttgattcaatgcatcccaattcaagcctcttctcaatgaatcacataacatgttgactttagaattgctatttgtttcacccaatgttaattgaggaacgtgaagatgtatggtacgggtgggattgttggtggatatagaaattaaagacggaatcactcgacgcaagagagccatgcccattcacagatcaacccattatcatttgtttgagacccaatccaaacctgcgaaactagcatggccgttcaaagagaaaccctagaattcaaaacttccagcaataacattcccaatttataaagcactcagtgaaactcgagccccgcgtttggtcaccaagaaaatgaaggaaaaaaaaaaagaaaaagatttctatgccctttctgagtttgtttgatgccaaaaatccaaaaaaaaaaagaactctgagatcaactaagccaaggagttcgtctgagaaaatggtgaaaaatttacgactcgaaattttgtttcgttttctcattattatctcagcatccaagaaagattgcatgtaacctaggaggaatcgattgaactgggaatagggattggagccgtaccttcaagtcttcgacttcaactcagatgagatgcaaacgcagcatttgtagatgaaatgattgaaagcttatttgtgtttatcactctcttcagatgataatgggcttcacctgggccggcccaatcttttactattggacgcccatttctaattcatgacatgtacatgaaagcccatgtggcatgtccaacccaccctcacttcgcttgctaaatttcatcccatttggagtgtcgtaagttaaataccttaacccatatgggaatcttatgttttgggcaagtcatttgaaaataaatgggttttcaaaccccaagattcccctactaatgggaaaaaatattagaactttgtgctaattgtcttttttgggatttttgataaatgtacatattttttttaaaattattgttttaaataccgtagattggaaaataattccaattctatggcacttttggacatgtagatgctaaggtggaagaaaatattttatattttaacttttctaatgtaaacccatttcccagctcttaaatttgattttatattgaaggtgtctcttgaatgaacagacaccttcttcaattccaaaaaaaatgaatttatactaaaggtgtagagacaccttccacaattctgaaaaatccaatatatactataagtgtctcttgaatttgattttatattaaaagtgtctctttaagagacaccttttacaattcccaaaaaattagatttatactaagagtgtctctttaagagacaccttctacaattccacaaaatccaatatatgttataagtgtttcttgaatttgattttatattgaaagcatcttttaaagaaacaccatctacaattccaaaaaaattggatttatactaaaagtgtctcttgaagagacatcttccacaatctcaccaaattcaatatatgctacacgtgtctattgaatttgactttatattgaaggtgtctcttgaagagacaccatctacaattccaaaaaaaattgaatttatactaaagatgtccttccacaatttcacaaaatccaatatatgcgacaagtgtcttttgaatttgattttatattaaaggtgtctattgaagagaccttttacaattccaaaaaaaaaaatggatttatactaaaggcctaaaggtatttttccaagagacattttccacaattccacaaaattcaatatatatagttcaaaaaaaaaaaaaggatttatactaaaggtgtatcttcaagagacaccttccacaattccacaaaatccacacctttagtataaatccaatttttttggaagtttagaaggtgtctcttgaatagacatcttcaatataaaatcaaattcaagacacttgtagtataaattaaaatttgtgaaattatggaaagagacaccttcaatacaaatccaattttttttttgaattgtagaaggtatctcttgaaagacacgttcaatataaaatcaaattcaagagacacttgtagtacaaattaaaatttgtgaaattatggaaagtgtctcttggagagacacctttagcagatattgattttctagaattgtggaaggtgtctatttaaaaggcacatttagtataaatccttttttttttttttaattatataaggtgtctcttcaagtgacaccttcaggataatatcaaattcaagaaacacttgtagtataaattaaaatttatgaaattgtggaagatgtctcttggagagacatctttagtatatattggattttgtggaattgtggaaaatgtctctttaaaagacacctttagtataaatccaatttttttgaattgtagatctctcttcaagagatacctttagtttaaattcaattgttttaagcgtatatcatgaatttgaaaattatgaaagatgtttcttcaaaagacacttttaatgtggcaaaagatttcgtaaatctatcaatattttttcaactaccattttttaaaaattattttttaaagtggatgtagaagttaaaaaaccccgtttttttgtgtccaatttacccttacctagtctccatgtcaacattcatgttgtatagctagcagaagggttaaaaaataataataataattataatttaaaatttctcaaacatctctctcttgacttcctcaccactcacactgaagctaaagacccccaaatctaaaaccgtaaactctccctgatcttcctcaaaatcctaacaacctaaatgccatgaaatcatatctatgattttcccatatatccccaaaatccctagaatactcagaaacgaaccctaatctctcatttgcttatgtcgacactatagatttaagaac

SEQ ID NO: 11537 - DNA, 12439 bp, Vitis vinifera
  Intron number 1 from transcript GSVIVT01036262001 (locus G SVIVG01036262001) derived from phytozome v7.0 (chr-ID chr1 4; pos 7841322 to 7853760 reverse strand)
accccagcaacgtcaccactgatcacattcagcaggttcctcttctcttctctctctttcttctccttctctctcttttttttttgccttttttttgggggagggttctttgttcctgtttttccctttcttcctgtttggttgctgagaaaaaggatatggaggaaaagagaagaaaaatgaaaacctgggttttgtatttctagtttgtttgttacttctttgtttttgttttgattttcctgatgagaagctaaacccaactgggctaagtagtcgtgtagcttctgttagggtcagatgagcgggggcagttattttcttgggtatatccatcctcaaatgtgaaaaacttagaacttacctagttctgatttctttttgtttcttgcattttctcagcaaccaaacgttgcctttggcttaacttctggttcgttcttgattttctctatttttctgagttttgccaattattgtttaatgggtatttatagttttggttcttcctcatggccctggaatgcccttttccaatttttttgaagttttcatgagtgctaataaatgggtattgatggttttgatgtttgctcatcatccttagttgtgatgtttcgtcaccatcaccaaatgggtttctttttccctttttccaattggtgtttattgttgaaaatttttgttatttggtttaatttggtgcttctttcagatccttgtctctttcttagattttggtttgagggagagattagtagttcctttggattttgctcatcttttgcccactggttactgtattttgttttgggtatgcactctttgttaattattttttattgttggtgaatgtcatgagcattatctcgatattttatgtcatccctcctttatcatttgtagcttattttaataggatgtaatgttattgtctcgaccagcttttttgcttagtgtcattttgattcacttcctactcttgttttttgtttttaaaatctgaaaatagtagtaacttttatataatatatacgaattcttaaaggtttatattgaaaaagtaatggttttaaatgctctgtaaaaaagttgaggttactacctcaaattttaaatgtgtcaggaaatgatttttaagaacataaggtaaatccatactttttgtacaataagttttcctttcatatagaatttgttaatactttttcctactaactgagctgggaagtgcttagttttaataagttaattttttttaggcttttatttttacaattttcatcacaaagcattttccttccataaatgaaaaagacaaaaaaagtggcctttccatggatattgtttcattcattgtgtcctacgtaacatttgaatctacatgttggcacttggcaatacctatcaaaaaaaaacatgttggcacttagctatgtattggcaactcattccaattattagatgagaatagatgaagttcatttgctgatatcctaagaatgctcttaatttaagcaagtgtcatggaagtggattcatctaaatgcaataaactgaaatacacaatgaagttgattcagatcctgtgctactcaatagacacaatttaaattgtcatggaatttccagtccccatgaatgaatgcgtatacaatcaacctcaagcagcacctgcagtttcatggcttaagcttggtagtttatataagattgtccctagactctggcatggctgatgaggcatgtgtatgatgagccaaatagttctgaaagtaaaagtagcctgagttacaactgtaagcaaaggtgtttcttggtcttgtctggtgagattctgaggcttttggagggatcaaatattgaccttgtgaactgatttggaccttccactggttgaacactattgtcaattttttaattttttttcttcattaccatatgaaaatttagtgaaaacataacttaaatcttcattgccttgtgaattacccttttaacaacctaaactttttttttacttccagtgatggatgaacatgtttgctaacgtgaaaatggtcttctacctcttcatctttgttcctttcctaggctgggacaacaatggaggttattcctcagttccatgagtttgaattgtgtatgacgaatagaataagtactcttacctgtcaactggtcttctcaagactcatggtagccttctctcctgctaccagttggcctaccaggaatgttggatcatttctcaggtgacaatttaagtaaaatagtttcatactttttaattcataaagttaatgccagacagtcaggacaaatttggtagttctggttctagtcaaggatttaaacgggagattttggattgtcaaatgtatattagatgttgcaaaatctatgaatagaagattaggtcatgcaattacccttcccatctaagatataccaatcaggatgatttcataattttagaccatttgattctgtaaaaaagctcatctgctttcaaccctacaccatgctgtgggctacatgcatggttaagagtgcttaggacttatgttttaggtctaatcttagatatgatatactttctaaaagataaaactagaattataattaatttgataaacatctataatcattaacatttctaaaaaggtttcatttggtatgcttgtccatagttttctgtatgtgacatttatatcttcctcaaagttaagtgaagcttgatggaatttttttatgttttgttatatctgcagtggaagcctcacttataccctcgtgtgaacctagcaatagtaatccacagttaggcggttgtaaaattgtcttttctactttccctcaaatcacttccctgtgtgtaagctcccaaatctcatccagatccaaaatattgtgtctcaaggaaaaattgtcaattttaaggctgcagtttatcaaacagaatctcaagataccaaggagatatcatatatgtctatgttctcctctatttctctcctagacagcaataattgaaaattttgtcaatatatggatgtgaagggcatgttttttgtctttattcagctgctttccaaccctttttcagcgctctttggtagctctttcctcttgttgtttcctctatttgaggaaatgaatattatgtaatattttagtgctaattcatatgttactttttattgattgatttctatatatgcttgttggcatgaattttgactgtttccattttttttttcataggcagcatcaatttttgactctaaataatgcactgttgtctctattgacacttcctgaaattttattagatattgtgatactaatttttgtcaactttttccaattcaatcactatcaagaaattgtcattcctctcgtgctatctccatgttgagatcctgatacctctttaaatatgagatttaagtcttttcctcggtcctaattaataagcaggctatagtaattgattgggtcttgtaaaataagttaatgtaaaagtgcatatcttaaactaacaactacctttttgtgaagcttcaatcatcgctatgcattattcaattcaccctttgattccttgtacatgctgagaataactgtaaatgctactacagtttaggtgtgatgaatgacctagcattgaaataggcatttctctactgttacctcatgtttcctggaggctatcttttagagaagtttgagccatggtaggtgtttcctttaaaagactaattgtggcttatgctctgatgctcacctctagatgagacactattaattacccagaggctgtagcctcactacagggtaattgaggcttaagctttaacaccctgttgaggcttaggcatcaacaccctgttgcgacttacagcattgaggctatagccttgaggctgttaagacttaagcctcaaatattcaatgaattttaacaggtgttgagcttttgtgggcctttggtatatcttttataaaagacttaatgtcttaaccttctatttttaactgattttaagcttttattctatagctcttgggtcttggttctaggatttgttgggtaaactttttatgaaataagggcttagttagcccacctttgaaaaaaaaaaaggaaaagttcagaataagaaatagaggagttagctgttgtagtggatcgattaatatgtaatctttgtcttactattgatataaaacaatagcagaaatgaaattaaaaactattgaaaatgataaaaaaattaattttcttactatgaattttatggttttcttattattctattttatgtggttttataagtatttttctgattttttgagggttttttttttttttttttttttttgtgggttttgtttgtttgtttaagttgaggcttatgccttgttttgtctcaagacttatgctttacctcatttgggcaaaatgtgtggaagttgtcttttgccttttaaaacattgcttggaagggggaggactgaaatctctgacctctctctcagctgaggggagtattcaaccacggatgggtggaacgcggggagaagatggagctgtcaggggtggaagaagttggtttgtggtggagtccaaatcctttgagattttggttgaggatttgggagggaagctgaaaggctgcatttgggagagaagcagaggtgtttcttcatggattagattcggggaggttagtttacgatgcttactggaaggagtagaagcttgttgtagagaggttgataaccgaagttgggttattggctgggaggaggggagtaggaagtataggttggaacgtcgtttaaatgaggcaggaaggttcattctctgctctatccgtgatcttgaataaaaaaaatacagcattatctttccagaagggaagggacagtctattgggtggaattctctggccgagaggttgagaagccttggagtggtcccggtaggaggcttaaaggaaatcagagttccagaggttctgttgagggtgaaggggggcccgaaggttctgtggagggagaagggggtggagatgaagtcatatgcaggtgctgttaagttgagcccgggaagagtaggcgagtcagtttgcttagaggtgggggaaagagaagtgcgaggaagattagaacagatgagacaatgtctggtgggttggtggggtattaattcaactcctttacctgagttggaatatgtaaggagttggacgtatcaatattgggctttaaaggggaacttaggggttgttgtgttaggcagaggacacttgctgtttgattttgagtcgccaagtgaggctgagcgtgttctagcaagaggcaaaagaactattaaggagaattttattattttggatagatggaacccagaggtggggtgcctttgcaaggactccattgttgatgaggcttgggtaagggtggtcaggctcttgcttcatttgtggagtcatgaggtgtttaaaagaatcggcgatgggtgtggaggctttgttgcagtggatgaagatactatttctttgtctgagctgcagtgggcttggatcatgaagcgcgcggaaagggatttacctaactttgctcatgttgttatggggtcggggtgctattctcttcatctgtggtgggagtctccaccttggttcaagcaagtggtgctggcgggaagaatctgcggggaggacagtccaagggtaggagaagaagatggtggaacttcacgcgctgtttgttgtgggagtcaaagagagaaggtggagcagttaagtttgcagctgggggtacaagacgtgtcgtttgttgaaggtaacccgcctacccttcctgttgaggtctctggtaagggactgatgtgaggggtagggtaggtatttctgttggacttgggagagggggtagggagtcttcattaaacagttcaggtagttttgatttagggtcgaatggcttttgttgtgggtctaatggattgggacttggggaggcccagggactattaaaggagctgcaagtgggcttgggtcgagtcttaaggcccatcaacctaaatggtttgaaaggctgcaacgagggggtgacgggtgtgggctttgggcccgaaggggatgagtcaaagggaggaggggttttatttagggaagagcctccaattcctctctctggagcacaaagtgagattttgattagcaaggtgagaggcgtaagcagagacgacgaccctcttgttgtgataacgagggttgcgatgccattggaggcccttgaggtggtggaaagggcgtcgatgactgacgaagcattgtgtgaagaagcttctaggtacgtcaaaactctttcgttctctgtggggggttgggagctctcttcttctactctttcttctgggttcgattgggtggtgttgaaggggggctttcgatggattggcctccgtgaatgatggagaggagcagattcctttgagtattattctggctgatggcagcactagggagatggcctctgagggggataagactatggctggagaaggagtggggggtgagtttgaggagttgttgcaggatctggaggggaaaggctgtcgatgggacgatagctatctggcgaggttcaacaagtttctgggtttttctacggaaggatttgaaggtgaaattttgaatttgcttctaaggaccaagaaaagaagagagcaaaataataagggaaccacaatgtctactaagtttgatcgtgaaatgaaaaaattagagtagtccattaattataatggtgcgagaaatgagaactctttggttagagaaggtggggctagactctcgaccattagatgaagttacaaaattttatcttggaatgttagaggggccaatgacaaaaataaaaggaagataatcaaggccttgatcaggtcgcaaagagtggatttggtgtgtttgcaggagactaaaattcaagacatgacccaggggataatacacggtcttggagtgggaagatttttaggttggggtgcagtgtgtgcaaggggggcagctggtggggtggtagttatttgggataatagagttttggagttagtaggtatggaagtgggcctcttctcaatctcgtgtcgttttaaaaattgcgaggatggcttcttgtggatctttacgggggtttacggacctacattgaaaagatacagagaactgttttgggaagagttaggtgccatttgagggttgtggattgatccttggtgtattggaggggactttaatgtgatcggatttcccagtgagcgtagtagagaaggaagaataactgggtccatgagaaggttttcagaggtgattgatgagttggttttaagagatttgcctctttagggggggccctttacgtggagtggagggctgaatggtcaatccaggtcaagactggatcgctttcggatatcaaaggattgggagaatcattttagcggggtgactcagtgtactctcccaaggccggtatctgatcatttcccaattctgttagatgggggtggtgtgaggagaggtccaattttcgtttcgttatgagaatgtggttaaaggaggaggtttttaaggagctgctaaagggctggtggcaaggtttcaactttagtgggtctatagctttatcctgacaaaaaaattaaaggctttaaaaaacaatttgaagatttggaataaggaagtgtttggtaaagtggaggtgaacaaaaggctggctctggacatagtatctttttgggatgatcaggagcggctaagagctttaaacgagtaggagttagaggcttgaaaggatttcaagaagtgggcgcttatggaggaaatttcgtagagacaaaaatcaagagaaacgtggttgaaggaagacgataagaacacaagattctttcataggatgacaaattctaacagaaggaggaattgtttgaaaaagattaaagttaatggtatctggctgtcagaagatcaagaaattcagaggggtgtggttagggcctatcagaatttgttatcggatcctggtggctgacaccctagtatgaatagtttagagtttaatggaattggggttgagaaggcagccaggttggaggagatgttctctatggaagaggtgtatttagccatttcagagctgaatggggacaaggcgcctggtcctaacgggtttccccttgctttctagcagttctgctaggattttgttaaagatgagttaatgggttttttcaaagatttttttgagagggaaaaatttgtcaaaagcctgaacaccacgtttctggttttagtcccaaaaaaaggtggggttgatgatttgagtgattttagactcatcagtttggtgggaggtctgtacaagctgcttgcaaaggtcctagctaataggctaaagaaggtagtgggaaaggtggtgtcatctacccaaaatgcatttgttgaaggaagacaaatcctcaatgctgcgttaattgctaatgaggccataaactctttgttgaaaaggaatgaaagtggtgtgttgtgtaaattagacttagagaaggcttacgatcatattaattgggattttctattgatagtgatgcaaaaaatgggttttggggaaaaatgggctggttggattagttggtgtatatccactgctttgtttttagttttgattaatggctcgccaacgtatttttttcaaagcactagggggttaagtcaaggggactccctttccccttacttatttgtgatagggatggaggccttaagttgtctcattaacagagcaatcagggggggtttcctaacaggctgcaggataaggggaaggggtgccaatgggatccaagtttcccacttgctgtttgctgacgatacgctggttttttgtgaggcttcccaacaaaaaatgacttttttaagttggttgttaatgtggtttgaagccatttcagggttgagtttcaatttgaataagagtgaaattttgccagtgggaagagtagagaatgtagagttattggcttttgagcttgattgcaaagtgggagctcttccttccacttatttggggctcccattggttgctccgcacaagtcagtggtggtttgggatggtgtggaagagaggatgcggaagagactagccttgtggaagaggcagttcatttctaagggagggataactactctcattcggaacactctggttagcatgccaatctatctcatgtccttgatgcgaatgccaagagttgttaaattgagactagagaaaatccaaagggactttctttggggcgggggagggttggagaagaggccccatcttgtaaagtgggctgttgtttgttcagataaaaagaatggtggattggggattagaaatctttctatcctcaatagggcccttttgtgcaaagagagttggcgctatgcggttgaaagggagtccttatggaagcttgtaattagtaggaagtttggggaagaaggtggagggtggagttcccatgaagttagggagggctatggggtggggttttggaaggaaattagaaaggaaggttccttgttgcttaaaaaatattactttctctgtgggggatggtagaagggtgagattttggaaggacatttggtgcgggaataattcccttcgtgaggcttttccctctttgtttgccttagtggattctaaagatgcgtgggtagcggattgttgggattctttggggcaagaggggggagtggaatccccatttctctatatctttcaatgattgggaggtggaggcggtggagaggctcctttcgacccttcaaggaaagagtctagctgttggtttggaggacagggtggtgtggaaagagacgaagaatgagtttttttgttaaatccctttataatactcttgatactagctgtgcagtcccgtttccgtggagcatcatttggagcccttgtgttcctacaaaggtgggtttttttgcttgggaagcttcataggggaaggtcctaacccaagatcaactcaagaggaggggctggaacttagctaacagatgcttcctgtgttgtgctgaagaggagacgataaatcacatccttgttcattgctccaaggcgagggttttgtgggatctcgtgtttactttgtttggtgttaattaggtccttccgcttacggttagagacactcttttaggttggtttgcttcctttttggacaagaagggtagaaaggcttggctgacagctcctctctatttattttggatgatttggaaggaaagaaacatgatagtttttgataatgaggatttggtgattcaaagaatgaaaaattcgtttgtttgtaatctttggtcttgggctgagtcttgtttagatgtaggacccgtttctttaattaactttgttgattggttgggttcttgttgagggccggtgagtgtttgccttttttgtttttgccttttggtgactcatgtatactccttgtatgcttcaggttgccttttaagcaccctttatctaatatattttctgtaggtttatctatcaaaaaaaaaaaacattgcttggaagtggaagttgataaaggtatcattcactaattgattatagcatgttatgaaaatcaggatacttttttttttttttgataagtaaaagagataaaattgtattgaaaagagccgccaaaacagcaactcaaaatgaggatactaatatgcaaaacaatttaacttcaccggtttgtttgatgaaacatccaacttcttgggggattagtattccttttctctttaaatacatttaaaaatattgtcgtgtcaaaatgcaaggttaaatgcattattgtaaaatccatcaatgttgtggttaaatgcatttttgtgaaattcataactattcagataaacatgagaaaattgacatgaacgatttcatttttcttcacttagcaaagtgagctatgtaggtcaacaatttctggtggttttattcggaaaagaaccaatatttctgttccaaagggatagactactctggtacatgtctttctgaatgaagttctgttgaaaactcatcttatgagagtgataagttgtaacacaatccagccacttgcatgtgttgctgtagtttgtgaggaattattgagttcatccagttatgaaatcaattctgatgctttgatcctttactgcttgtttgatattgttggtggagttccatcaagggttttcttagggtccttttgaagtgccttggcctgggctttgtcataagtaaattgtttcattgtggtttaccacttcatatctttgtaacttggttgcataattgaagttaataactagaatctatccctctatccatattctgcaaaattaaaataattagctgcataacaaaataaggaacttcattttttaactgttctgggattaaaattaactaactagggacatctattcaatgaatgattctggctaatatgttagaaatgctgctgtgtggtttgggcagtcccttgcttcaagatcttaaggtggctgataaggctgctacctcactaatgcttttcctaatccaccattttatctattgaaagatatgatagagataatattcttttacaggtatggcaggacaatagcaattagattacttacaaaatggaatagctagtggctgatgtgcttcttctctttgttgaaaaacaattgttggaaacaccttgtgtcccctttcttaggaaaaagttcctccaagttgatggacaattggccttcttttgtaaattttatgttatttttcggcaaaaccctctgaaaatttcccatcaaattttccatagcagctgagcataagcaataaaacatgttatagaatttacattttttgtaatttcatatacctgctgttatattgagttgaacggtatgatttgcctgagtagaataatgacctgagtgtttaaactattgaagttaaggcatggactaaggtaaatcattcaattttactaagggatttgtgacttttcatgttttgcactattaatttaagattttcaatttgaatattttgttaacatggggaagaaaaaaaaaaagctctattgctgcattagtatgattgatgttttgggggatttttcagttagttctaatatagtcacatctttcctccaaagataaatatctgtctaaatcttttctgccacataacacccatttaatccattattaactctaccattgtatatgtcttctagcctcattttaatttaatttttttaatattggcttgcaatttatttatttatttttttttgtgtagtatcttg

SEQ ID NO: 11538 - DNA, 2774 bp, Vitis vinifera
  Intron number 9 from transcript GSVIVT01011157001 (locus G SVIVG01011157001) derived from phytozome v7.0 (chr-ID chr8 ; pos 7446264 to 7449037)
tccggttttctttacttgcttatttaggagttcaggtagcaatcctagcttacagaatagattaatcatattctgaagtgcttgttaaattctttatcagttggttagttgattaatatcgatgattcttaatattctattttcaattttagttttatatggtttcataattttgttacttcatggacttagcattctttttgagttttgtcaatttgaattaacttcttacaagtttatgtcatttcttgttttatcactttttctgtctgatacctcattctgactactttttttatggacatgttgcatgggttgtctggtatcttttactgccagatagactttcttaggacctttctttctcatatatttttttgatatacttttttttcttaatcagaacaaaatattcattgataaggatttaacagtacatgggaaggctgagtaatccttcccaaatatacaaactctgataaaaagaataggtggataagttttctccaatatacaaacatgacatatgccttgatgtaataccacatgaaacaatacaaaggaaaagtgactctactctctatagggatcaatacatctcttacaaaaagagaccaaagctttgctccacattttgttatttttttaactcttttgatttacacaccaaattccaattgagctaaataacattgggaaggtgcccttaaaagctgtagttgttgaagctcaaaaggaggattagaaataaattaggtcttgtatcgactctatagttctctacttgtcctcaagaatccttgatgtaggtaaaccctcaaatggatgtctacaatgaagctagtgggctagggtttatatcttttaggggttgaggagaggaacaaggaatataatttatggtagcaaaaaaatgaaataaaagtatagaggaagaagataagaagaagggataaaaaccttagaatctaccaaggccttcttggaatttcacttagaagaaaaacaatggagtgtcaccattgagaattgcaacatttgcaaaaaataaaataaaatgcgcctaatattatttaatcactcttatcttggtttacattagttaacctcatttatatgtttctgtaagaagtttaaattctattaggattttaagattatgactctaattctaattctcctattatactatccaaatcagaatgaggaaagcaaatgcaataaaattttgtctctaattatactccccaaacccttaaaaggaaataaccatcatgtcacttatgctccttggaggagccaaatcgggcctagctagtttgaatagcttgtgctattgccccaaaatcattagataatataaaaaaaatggtcaattgattctcaactccctatacacataatgcaatggtcaagactaagcatttcatgagatcttctcccctatagcaagtcattggtattaactttcttattagccactaaccaagcataagccttggccttatatgaggctttagattttgatatgaattttgttagagagaaatgcataggaggtcatagattggataagtttaaaaggaaagatttttctgcgaataggcctatagaagataatgaccagactcttacataaaggacaaagggtgacaagtgcacgtgagagagaaatgacacgggtctttcaagattctctatccccaaattagtgaggttatgatgaaagttaaggttccaagaaaaagataccaaggattgatggaataggagaatttgtagttttcacaactctgaaaagatttgaaaattgagggcatagaggttgttttccctgccacaagccttccaaaaaatgaatctttgcctcatcacccatcatccatcacaaaatgagtatgcccagaaatatcatagaaaacctatgcaatggccctctaagggcacctatgcaaccacctggctagaatgttggcaccccaaccattgaatgtgtcccataaatggtgtcccataaatggtgtcccataaatggtcaatattaccttatgctaaagagcagcacttttcctaggaaaccttgaaagccactttcctaagaggctctatcccttaatgaaaacttctcaaaccctaagcccccttccaccttaggtttccacactaggtccaactaatgagatgatctctctcccctctccaatgctggaccaaaaaaattccctttgtattttctcagtctttgttgtcattgctaatggaattttgtacaaagagaagaacacttttgctttgtcccaactttaattctctgggtaatgttcctttctatctctagttctgcatggaaatttaaacctagtttatttatttatttatttttcaataaaagaaaaattgtgatatggttgctctttggcattccctggacatcaatcttctactctccttttttgccaaatatatagatttgtatttatattctcataccatctgtatctatctattatcctgtttatgttccatatcttgtgattaatatttatatctgcaggtttctttttcccttaacatgccttagagattattgagaaaagttgtataatgcaaatttggtgcatgatctcataatatgtactcaacctcaccgattattgagaggattatctggttacattatttcttattcactcaacaattgtttttgtttatatttatatttatattttctatttatgttcttttttttttcagtttcctttggagttagaccc

SEQ ID NO: 11539 - DNA, 4118 bp, Vitis vinifera
  Intron number 11 from transcript GSVIVT01009564001 (locus GSVIVG01009564001) derived from phytozome v7.0 (chr-ID chr 18; pos 9449064 to 9453181 reverse strand)
agaagaaaggcctccattattattaaaaagccgtacattgtgttttctttttgtcgttatttcttttcctcattacaagattgatcccctgtaatataattcttgatcaactcaagaaatcacagggaaacaaaaggaggagaacaactgttttcttaactctttatgatttaagcttcagaactacctcatgacataaacccatttacttatataaagaacctcaaacctaaagaactcctgaacttactaaaactcaagcagctgaaatttaaaaaagattttaaaaattctttaatgttattgtagccaacagaaaccggaaactttatggcattttcctccaatcatgactttcgaagagattgtctcaagtcatcctaaatcttgcaaaaaataaataattttcaactactgagttgtttaattgcaattgaatcatgaggctgtttgctgaacttgccaagtcaagatccatgattagctttagaaattgcgaggaggattttgtttgggttttctctgggttatatggcccgctcaaaggaagggagagaagggagttgtgggaggagctaaccgctgttaaggggctttggaatgaaccttggtgtattgcaggggactttaacgtggtgcggtttccaattgaaacgagcaatggcagatagatgtcaaccacgatgagagattttccaggctttattgacaagtttgaattagtagacccaccactgggaggtggagcattcacttggagtggagaggaaggaggttccctaaaggctcggttagaccgctttttgttttcaggagattgggaggaccttgtgtcggcggcaatgcaaattcttcttccaagacttgtttctgaccattgctcgattttgttagactgcggtgggataagaataagtaaaagcctgtttagatttgaaaacatgtggctaagggtggacggttttatggataagattaaagaatggtggcagtcttacaattttagggggaaacccaattttgtgcttgcgaagaagctacaggctttgaaatacgacttgaagatgcggtataaagggacctttggcaatgtgtcagctaggaaggatgcagccttggagaagttaaactattgggatagcttataaaggcttggatctctatctgatgaagataggagtagtcaacggatagccagagatgaatttagtcattgtgccatccttgaagaaatctcttggaagcaaaagtcaagggctctttggctgaaggaaggagatagcaataccaagttctttcatcgtatggctaatgcaaggagaaggggaaattttatcagtagcctgacagttatgggtgttcggttggataaaaatgaggagcttaaagaagggattgaatcctactttaaatccttgtttgaagaatctctagtgagaagacctgctgtggagtcaggtctttttagaactcttgactcattggataatgagactttggagaggccatttttggaggaggaggtttccaaagctctctcagatttggggggagataaggcgccaaggtcggatggttttacgctggtgttctggaatttttgttggcctatagttggggggaaagtgatacaggtgtttaaggagctccattcgcaaaacgttgttttttgaagtcttaatgcaaccttcttagtgcttatcccgaagaaagagggggctagtgatgtgcaggattttaggttcattagtcttgtggggaatttttataaaattattgcaaaagtcctagaaaataggctgaaaagagtgatgggaaaagtggtttcgaatagtcagaatgcgtttgtgggaggtaggcaaattttggatgcagttttggtagctaatgaggtgattgactcaaggaaacgaagcgccgatgcaggtttagtgtgtaaattggacattgaaaaggcttacgatcacgtaaattggaggttccttctttcaattttagagaaaatgggttttggacccaagtggcgaaactggattttattctgcatttcaattgtgagaatgacagttttagtgaatggcactcccacaaagttcttctcaatgtttagaggcctaaggcagggagacccactctcaccttatctgtttgtgctaattatggaagtttttagcaatttaatatcaagagctaaggagaaaggtttcattaggggtttcaaggtaatggggagacgtggagaaggggtttcagtttcccatctgttgtttgtagatgacactcttcttttttgcgaggataacaaggatcagttggatttttggaagtgggttgttatttgttttgaagtggtatcaggcctaaaaataaacatgcagaaaagtgaaattattccagttgggggagtggagaatgtggacagagcagctgcggtttttgggtgtaaagtagggaatctccctactgcttatctaggtttacctcttggagctcctcataattcgtgtagagtttgggatgttgtagaggaaagattcaagaggaaattggctatgtggaaaaaacaatatctttctaagggaggtcgacttaccctcattaagagcactctctcaaatctccccatctattttatgtcgctttttgtaatcccaaggaaagtgagacttagattggagaaaattttcaaatggagtttttgtggggagatttggaggagagaaggaagatccacttggtaagatgggcggttatttgcaaagataagaggcatggagggttggggttaaggcacttgaaggttttcaatcatgctttgctaggaaaatggctttggagatttcctctagagaggaagagtttttggaggagagtcattgttggtaaatttggagaggaggaagggggttggaccactagagaggtgagggagtcttatgggatgggcctttggaaagaaattagaaagggttgggaggagtttcttcttagaactagtattcgtattggaaatggtagacgcacaagattttggtgggacatttgggtaggagattctaagctgaaggatcttttccctttgctgttcagaattgcaacccataattctgttgtagtggctgatctttaggggagacaaggaggtggaggcgggggttgggaggtgcactttagaagatccttccaagattgggaattggaggaggtgactcgttttttggatcatatttctgtagtaaaggttcaagaaggggaggattctttattttggaagatagagaggaggggaaagtttaatgttaaatcttattataggtctttaagggatgagaatagccccttatttccagccaaagaggtttaggattcgtatgcccctttgagaactcgtttttttgcatgggaagcagtttggggtaaaatttctattgtagatatgttaatgaggaggggttgatctatggttaataggtgtagtctttgtaaagagaatgaggaattggcggaccacatcctaattcattgtggtaagacaagggagttttggactttgttgctttcttcttttggggtggtgtgggtgttcccggcttcagtgagaaatctgcttctagaatggaaagttaaagggctagggaagaaaaggagaacagtttggagattgacgcctatttgtcttttttggtgtatttggggagagcgaaaccgaagaacgttccaagaggaagagatgtcagatacttgcttgaggaacctctttttttggtctcttcttgagtggtctcaacagtttttggacttggactctctctcttttctgaattttttaggtgattggcttgttggttagctttttcctctctaggttttttctttcttttgttgccttgttttggctttctttgtatattgcctgtgtacatagggagtgccccctgttttggcgtgttttaatttatttttctctttgtctatcaaaaaaaaaagatccatgattagctttatacattctctgaaatgaaaaggtagaatttcttctaatattgaattgggatagcatatgtgatgtgtgaaatattgcaggagggcctacaagtgaaacacgtggaattttaaat

SEQ ID NO: 11540 - DNA, 3747 bp, Vitis vinifera
  Intron number 1 from transcript GSVIVT01031792001 (locus G SVIVG01031792001) derived from phytozome v7.0 (chr-ID chr3 ; pos 4416020 to 4419766 reverse strand)
ctttccgtatgtttcaccatccctcctttgcttctttctattttctccactaaccccactacccaattctgcaaatttcgtatttggtttgggacaaaaaaattaaaattttattggaaaattgtcggagattggatttggggattggagttttcaattgggtgtaagtttgctgcctgtaaagcatgtttgaactgtggtcttgtggggtttttatgtttgattcctgatacggaaaataatggtggataacaatcttggaaaatatgagaaatggaaaaacaatgcctgaacccagagggcgtattgggacttggagaataaccctaaatttaaaactccatgagttcttgaatgctagtcgtagcttttctcttgaaggatcattccagttaaaatgcaaataaattagaaaaggtcacatgtctaataccaagatatctagctagggctattagtctagagttgttgtcaatggcagttgacatcatagggttcagttaggttgcaatcatattgaattcttgttcagaattgcgttggacaggcttctaattgactactttgaggattgttcttagtttgtctatggcttgaatagagggtaatgagctagagaggaagcttattgtttcttctactttggaggcctgctttattgtatatattttgaaattcagattaggttggtgttgatggcaaaattcccccactgcaatagtgatcaccagcaacggaatctcgatcaacgcgttacagtgattcctccttcctcctgtaaaaagatgtccggatgggttgtccgaacacaccctccgatgattaagttagtcttttggaagttggtggaaaatagagttttcctttgggagtgttgctttcgtcaaggatgcttaccttcctgagagtctccttagagtttatatatgagtcaaaaagtatagtcccgctgtgctaacgggtcccatcgtcatgattgcggctcatagggtggcgaagcaatcatgacgtttctgatgcgagacggcggttgtcagaagggtatttaggcggcagttgtcgcctcaatttatgattttaggtaccggggatgcgtcaggcaatctgagacgatttgggaatgtcttgtcgagcgtatcttgcattaaagatgagtgacagttcaggagacttggtagtcaatattgtcggagtttgctttttaattgtgggcggaaatggattcggcgaatcgcgagtgtctgacgagccaagctgtccggggaatctgaattgtcggctgcggatgttctccgggtaagcgttaccagaagatccgaacatgtttgaccggggaagttgaatcgccctcctctctcatccggcggtaggcgctgactgtgaaatacccggagatagcggaacgtcggccgtacagaattttcgtctgggtggaatgagcaatgccacgtgtcgcaaggggggccgtctgcgtgtccaagggagagggagccacgtgacactttttagggaggaacccatagttgggtgtagaatatatgatttgtctgttaatgtgacatgcttagaataaagcttgatagttggagtttctaaccagttaaaaagtgacttgaaatcgaatgtgattgtaaagtgtcacacttgaaatcgggggtttccaaccattcatttcatagaatagaacaattgttgcagcaaaattatcccaccttttgttgagggagtgacacaatcaattttattactttgtaaatgtatgtgttggcgtgccgaagaacctgctaccataatggtgccagctgggtcctaccaccactgttcctgaattttagcactcttgcttggaggttgctgatggacaaataatgctgtccattctgactttatcaagcaaatgtatgcaagagtcaggaactttgcatgtgctggattctttccttgccttgggacaaagacttccaattcactgcgacctggaatgcagtaggaataactaaggatttgctggaacaattcttttcttgtcttctagtggctttgaccagtcccatgatttaattggaactgcactgcaatctgcccttgatctttgtttgatcccaatagaacctattccattggtcagtccataattttaccccttttggagcagggtgctaaatacacaagtattggagcatggccatgctggatgatggaacgatagtctttcatgtttacttcttattggggattcacactagctttcatttctgagatgagcccattggccaattgtattcatcttggagatgaatttttttttttggcccctattgggacttgaacctgaaaaatcccacaaactctcccaaccatttactacttaagtcaggcctcaaggccttgatcttggagatactttgttgttggctaggacaacaccactgtctccccacagatatttcactggatgctaatatctctctggaaacaaattggatggtgcaacaatactcgagggttgccttagttgtaatctccttcccatgatattaagacatcaagatgtattgatcaaattccttgcttcaactttgattatttattcttcttccaaggtctggatactagtgaaggtaactcattaatttgaaggaaggtgatgagaacccacggctaaaggccctttcattgatgactcatggatgacctacattggcccaactcctaaagatataggagaatatcatgtttagcagagaaaagatatagctaagaagctgactgaaatgtgactaagatgttctttgtgtttctccattcttttctttcctcttatttataatagcccatctgcctttctctacccttaaatgcaccacatttctttaaattgtatgctctgtttctggattggatgcgatggccacacaattttagtttttatttcttattgattccattatgacaggtcacatctccaagtcattttttgcataaaattctttgattttcatcctttttccccctttacttcccattcttttatttgtccagcagctcattaggttccataaaatggggatggttacccaatataactccccaaaaacttctcataatctgcatttactaggcgacatgtccccttcccatttctctttatatttttctttctcatccatttgtatcaggcaacatgggtggtcactttaccgccttaacaacaatacaagaaggataagttagccttcagaaaggagaacaacatcaaaatgaaacagggacagagaagtaatctcatcaggacaaaaagtagaactcaaggtggcaaaaggtcccctgcagagactctcaatgtgaaacctttcattcagataaaagatctgctatgtagttggccagatagggatccaaaagaaaggattgggaattcagaaagaaagcttacagattttgagctgcattcttgtttttttggacggggtagcctgttgaggtgaggatgggaggcaatcattcttcgatttcgttcttagtctggactgtggtggtctataaaagtctgtcattttgtttggttaggtggaaattgttactcatttacatccagtgtacttggattacacccccctttggtgtctctagtacgtgcttacttatgttctctatttccattgagtgttttctgttgatgctttccggtgcagaagtttcttccttcaatgttagtctttgattgaaaagtcattttgcatgcag

SEQ ID NO: 11541 - DNA, 11815 bp, Vitis vinifera
  Intron number 4 from transcript GSVIVT01038082001 (locus G SVIVG01038082001) derived from phytozome v7.0 (chr-ID chr1 9; pos 17687215 to 17699029 reverse strand)
aacaaagcaagccaggtttgttaagttgtgaacctcctgttttcacctatcttgtcatctttggcttgttatcttggaatttcattgctttttcctatatgccttcattgataggtgaatagtttatgagcttgatctctctaataaatattggaatgaatttggtcagtattcttcattttcaaaccttcactagtttgttggcagtttttaattttgtggagtcgctgtccaagttgttgaaattaaatacatattatgatctatagagggatttcatggttccataaattagggtataagcttcctctttttctcccctcatttttggatgttagttgatgttcatgtgtgatgctattagtttcaagtttccaatttccaaaatggtgcttgaggaattctagaaccttccaggctgtaaggttgtaaacttgcatctataacccactagcttggaggagataagttaaaggcaaaggtttatagtcttatgacttaagaaaggggatgagatggtaattcctattttattttatttatataatttttctaacaggatggctaacacctgtagaagggtaatagcattagtaagttaggacccaggggaagtgaaatttagagaaaaggacaaagtgggattttctcaaaattttcaggttttatatttggataaggggtgtgtcacccaagactcaagggggctagctttatgtctatttagggggtggactgagaacggttggacagggcctcttcaggagaatattgatttttgaaagatcttgggttggataaggtgccatgatcagattgttttactacaacattctggaactgggcaatggttggggaggatgacatggcttttatacctgatttccattatgcactgattttttgaaagaacttaaatgtaacctatattgtgttaattccaaagaaagacttgtgaaaaaaaaagtgttaattccaaagaaaggtggggtggagtggaggatagaagggacgttttggatagaagggatgtttttcctataaaaaaggattttggggattttacaccaaacagtttttggtgggtggaaaatatgagtcaattggtaatattttgatcgaacaacttgggaggtgattggattgttggtgtttgagtcttaatgctcgtaagtggaaagaagatagattttatttctaattttaattgctaacgagacatttggttccagatggaagagtaccaaagttggagtgcagtgtaagcggtataatctagatatgaaaaacacctattgccatgtcaattgggactctcttggtatatttgtcaataatttggttttggaaggaggtgcataggtgtgttaaacattgtatgtctttagactaacttctaaaaatatttatactactctttgataatcacttaaactaggatccaaattatagtctataaaactaatacaatacataagaaagcaaagcaatagaaaaaataaaattttaaaattagacttcacactaactagtgaacccagctaagtcaattggtgggccccctttgccttggtaagcctattggatattcttgtatcaaatacacttcatcgctcattgtctatagtaatgaattgaccacatattatcctcaaagtcctttaaggtaaatccttgctcaccattggattgttgactttttgcatataattttttttttttttttttgataagtaaatgaatttcattaaaaaaggcgctaaaatagcgactcaaagaatacaaacctatacacccgccatcaaaggccaaagaacaaaaaagaaaaccgattgccacagcctacttagaccctaaccaatcaataaaattagctatagttatagggcaatcgtctatgaacaacttagcctcagcccataaggtaagaataagagagtgtttcaatctttgaattgacaacgcttcatccttgaaagctaatttattcctctccttccaaaccgtccaaaaaatgtgaagaggggtagctctccataccttcctgcgatttttgcccagaaaataaccattccaacttaggagggtttctctaactgaaaaaggcataacccaagacaccccaaataaagcaaaaagaagatcccataacaccctcgtcctggtacaatgaagaagaaggtggtttatgttctcctttttctcaagacacataaaacatctattcgccaaggcccatcctcttttctggactaaatccaatgttaaggcttttccccacgtagcctcccatgcgaagaagcttatcttgggctgcacattcacgttccaaataaatcttgaaggaaacaaagatgaaccacccgcctcaagagctatgaatagggacttgactgagaatttactgcttttggtttcagtccaagataccgtatcctccacatcctcaaaaactcttttactctgaatcctctccataaatctttccgcctcctcaatctcccagtcattgaaagctctgaaaaaacaggggttccaacccccccttcccccctcaaccaagggatcccaaatatctgccacccacgcttccttctcaatcgtcaaagcaaaaatagagggaaaggtcatacacagaggagactccccacaccatctatccctccaaaaactcacccttctcccattaccaactatgaaggccagcctatcactcaccaacttccaacccatcctaattcctttccacaaacccaacccatgagcctctctcacttcccgcgagcaccatccccctctggcttctccatacttgcctctaaccacttgattccacaaggcctctctttcatttgcgaaacgccaattccactttgcaagaagagtcttgttaaggagggaaaggcttttgacccccaaacctctttttgccttacttaaacacaccagctcccatcttactaaatgaggcttatgatccagattgcccccaccccatagaaaatccctttggattttctctaatctccgtctaactgagcttggtaaacacaataaagacattaagtagatgggtaaattcgatagtgtactacgaatgagagtcgcccttcctcccttggataaatattgtctcttccacatagatagccttcttcgaaagcgctcttccacaccatcccaaactgtaactgacttaaaagaagcacccaggggcatccccaaataggtggttggaagactacccagactacaaccaaaatctccagcaagatcatccatactctccaccctccctactggaattagttcacttttttccaagtttatcctcaatcctgaaaccgcctcaaaccacataagaagccaactgagataagtcaactgatcttgtgaaggtttgcaaaacaccagagtgtcatcagcaaacaacaagtgggaaattaggaccccttcttcgcttcgacctttcaccctacagccagatagaaaatctccctctactgcccttttaatgaacacactaaagacctccatagcaatgacaaagaggtagggggaaaggggatcgccctgcctcaaacccctggagctttgaaaaaaacccgtaggggttccattgatcatcactgagaaactagcagtggatatgcaccactgaatccatctaatccatttctccccaaatcccattttcttcatgattgtgagaataaaattccagtccactttatcatacgccttctctatatccaatttgcataaaatgccgctctcattattcttaagggttgaatcaatggcttcattagctatcaacactgcatctaggatttgtctaccttccacaaacgccccttgagctttggagaccacctttccaaccactttttttagcctattggctaaaaccttggccagccacttgtacaagcttcccaccaagcttataggcctataatcccctaaagcttcagcccctactttttttgggattaagaccaagaatgtagcatttaggcttttaacaaatttgccgttttcgtaaaattccttaaagaagtccatcacatcagcctttacgaaatcccaagcaaagagccaaaaagccatagagaatccatctggccctggggctttgtccccattgcatcccactagagcatcatatacctcctcttccataaaaggagtctccaatgcattagcatccaactgctccaacatctcaaactgcagcccagaaacagaaggcctccagtcccccgggttagacaacagtgtcttaaacgcattggcaatcccttccctaatatcattctcctccgtaagccaagcttcgttaatcttaattctgtccacattgttcctcctcctatgtgcattggccattttgtggaaaaagccggtatttctatctccctctttcagccacacttccctagatttttgcctccacgtgatttcttcaagtaagacccatttcttatattcttccctcgcttcgtttcttgcttctagctcttccaatgacagcctgctggttttctcctttgcatcccaatactccatctgctccaaggccatattctttctatattcaacccttccaaaactgtttctgttccactccttcagcttaaccttcataaattttagtctttcagccaatttaaaacttgcggatccgctgaacttgccttcctcccaccatagcttcaatagatcctttacaccttccgctttcagccacatattctcgaatctaaacgggatagggcctcttctcagacccccaccatccataagaatcggaaagtgatcggacacaggtcttggaagaagaaactgcctcgcatctccaaaatggctatcccactcctcattaaccataaaacgatccaaccttgaaaaagactggttatccgttcctccagtccaagtaaaagggccccccaccatgggcagatcttttaactccaactcttctattacttctgcgaaccttctcataattgagttcaaactcgctcctctgctgctttcttccggtctcagaatggcattaaagtcccctgccacgcaccacggcccattccacagccccttaatggcccccagctcttcccaaaaactctccctcttcctccttaaagttggcccataaacccctataaacgtccatataaagccatcctcgcagctcttaaaagtgcatgaaatggaaaacaatcctttttgcatgtcaaccaactccaacatcctgttgtcccaaatcaccactattcctccggctgcaccccttgagtctacagctccccaatcaaggaatctacccactcctaagcttctaacaatgcccattgacatttcctgaatcttggtttcctgaaggcaaaccaagtccaccttatttttcctaatcaaggctttgatcaccttccttttgtcgcaattattggcccctcttacattccaggtgatcattcgtagcttcatttagacctgctcatgcttccccctccttctcctcctcctccacctcccatatagttcacagtccactccaattttctcaattctctttcgaattttgacaactctaatttcctcctttttctaccatccaacttgcctttttgaagcttcctctctttcattcttttgagcaggaacaatatttccccttcaaatccctccgtcggcatccctagatagcggctaaatttagccaaactactggactgccaacacagatccccctctttgcccctctcctcctcgtcctcttggaaagctctttccaaagcccctactgataattcctcggtattcccagaccctctacccaccaaaaccgaaaccacatcctccctaccatctgccgaaatcattcttagcggatccattactgttccaagagagtaggtgcaacatagtgcattgaacctcttggaacacaatgaaacagatgcatgaaaacaagcttgtgatctacaatgtgagccaccaatgagaggtgaagagaaagagaaagaaggaagacaagcaagaatagagaggcaaccaatcctagttcttccaaacaatattaaaaaaagttttctaactagggttaagttgaatgttttatagtggagtagacccaaccacaaaaacccattaagataatgagagtaaaaccttaagattacctagatccatggtggtatggaaggtgtactatagttgttgtgcaaagcatatgataatttaaattaggatgtgctcccttatcatgatgtgtaacttaatagactatgtaatagaagagtcattaaaacaactcaatacactagctagaccaaaagtgaatggtgtttccaaaaggtgaagttttctagatagagtctaatacttgagttattaattattaggggaaaagccttgtctcctaactttagattgacatgtgttgtccaatctaatgggcctttcagagctctccctgatcaaatctaacctgagggcctatgaacagtgtccctcaaggggtttgaagcttgaaccaatatgacaaaagctttgttggttgccttagaaaatgttatgtcttctttccaagtccactaaaaagcatggctaggcctctatgagagcttgcagagctttgctaggaattttctcaacatattcaaagaatccaacctctaagcttagttaggaaatttttactttgacaaagtctctgagctcacaaaggagttcttttaggaaatcccttaaccccaaccttttttttcatctggattagtttttgagttttggttggattggttagtttttatctaattttacagtggtctatttttattatttaattttagttaaatcaattagtttctttgctagaatttgttgttagcttgactgtttttctcattctattcggatttgtcaaattggtggactacatttaagcttgtgagcctttctttaaaagggaggacacattatggttgacggtttagcaactttggatagtgtaaaggattgtatgatacaaaactaacttcacctgttgtttggcatcaaatgtattcattgtgtactttgtagtgcctttggttcatgtgctttacatacttttatatttatagattttcttatttcctatcaaaaagtatgacacaaaactaactcttggtgtgatacctaaggattgaaggtgtagttcttttggattaccaatgcgatgtgagtagttttctctttcttatcaattcttcctatttcattatttcttttctgcaactacaacccattttttaaaaccataaccacccataacaatttaagcttgaaataagtattggcatgaccaacaaatcttaaatcatctattatattatcttatttactataccaaacaagccttatttctaaaacctgatcaagccccaatttaccccaatttaccccaatttttttagcacttatggtcctaaatgtaatgacccactccttcccatgcaaatattgtttgctctggatccaatgaattctcacgactttaaaatgcatctacatagttgagagaaaccctatatatatatatatatatatatatatatatatatagtgttaggaacttcttctcctattcgatgtgagatatcataatcaccttcccatgtagacagaacatccttgtcatgtctctcgggattgttgtgccaaacaaatagacactcatgtgagcccaaagggttatcacaactttaaaacatgtctatatggttaaatggagtttatacatatatagtgttagaaatttttttcctatctgacatgggatatcacaatcaccttccatgtagacatgatgtgctataccgtgcaggcttgaacaaatagaggctcatattggggttggagattagttttaataccatttgtaacaatctactctcaattgtgtagatattgtccgctttgggcttaaagaactcttacgactttaaaatacgtttacatagttaagcagaaccattgtatatataatgtcagaacctctttcccttattagatgtgagatatataatcttaggtctgcaaattttagttgaaaggaaaagaatcggcggttgcaaatattgtacctcaaaattgatgaatttgacggagaaaactatttttctttagtgctttctctcagatggctacaagagaatttcagcttctgaaatctgatttaggttaagtgcaattctgcactttacttttttgtcctcaccgtttaatcactgctatgccccaaggcttgatttactagtttaggcctcttatcaaatgtttttttttttcttttacatgaatgcctattaattccccacttaattaaatcaaggtaaattacaaaggggtggataatttggtttgtggtgttacacttccccctcctattttcttctttttgttttttttgaggtaccctagtggaggctacgccattacatatggggcaaaaggtaaaagatgtaggtactcagaatttagtaaaatgagaagggaatttagtgaaaagaagacaacaaggtgacaactaaaaggtttgaggtgcatgacttaatagaaggcaccaaattcaagtcggttgcacttctttctgaaaagtgaaatggatgttgtttggcagttgtgacactgctttttcttctattctgttgctttttggtgagtttggctggtatctatatagatgtttccacatgcatttaaattgcatggaagagaaggttatggaggtcaatgtgcttcttcactaatcagaatggctgatttattctagaatgcccaaaaatgtgactttacttattagagcaaagtccttgaaggagcgtcaaggatgccaaaggtgtgtatattttggtggatttaaaagggagtgaagaatgagctaaaagaatggttgtgaaaggtggttagtgctagtttgtagtggattaaaaaacttttgacctttttgtagaggaggttggggggaaattgggaggtgttattgtggaaaagggcagaggtttttcaggttggattaggtttggggatttgagtttgtgttacttgttggaaggggtagaagcttgttgcagggatgaagacttggaaagatggagcaaaggttgggtggaagggggtaggaggttcaagttggaacgacgcttgaatggggcagggaggtttttactttgctctgttgtggttgaaggggtgaagagattctcgttggttttccttgaagggaggttttcatgatggatggttggttttggtggagaagctgcattctttaggagttgtcccctcatttgaggctaggagagtgggctcccttgctagggtaggagtgtcttaagggaggagacaacccttgggtcttttgctgatgttgtgaggatgggtcgtggagtagtaggcgaagctatctgggtttagcttggagaaagtgaggtgtgaggcagggaggattcattgtgtagatgcttggtcgattggtttggtgaggtttcaaagcaaccacctcaattatcctctttgaaaacctttgtgaccactctttggtctttgaaggggagggggtggtttgaaaatttcaggttttggagataccttgctcttgttttattttgaggatcttgttgaggcagaaagggtgtttgcaagaggtttgcgaagagttaaggagagaatgttgcacttggtaaggtggactcccaaggttggatgcctgggtaaggggggtcatgccgaggagatgtgggtgagggtgttgggtttcctgttacacctgtggagttgggtggtgtttaagaagattttggatgaatgctgaggttttgttgttgtggatgaagacattgctttaatgtctaatctacattgggctaggattttggtgcatcatgttgggagaattttgcctagctcactacaagtagtagtgggcaactctaacttctccttacaattgtggtgggaaactttgctaagcttttcgcttatggagccgagaagaagagcccaacaagcatgaagatgggggtggagtggagttttcacacgttgactaagggagttgaagagggttgcaacccttgagtcttgtagtcattgtcaagttgctttgggtggctagtgagggtgcaataggctatgatgcaaaagctaatgctggtgggttgacttgctgcaggccaaagttggtaggagagtgtatagtttccattgtagctaaagctgcttgggggagggggaattcctaggtggtgaaaagatgaacataactagcatgggagaaggtggtgtagttgggttgtgcttcaatgtggaggttggtggggtggtgcttgggccgataggggttaggataggcccactcaaaaggcagtgttgaaactggggttgcctctacctcttcaggtttaagtgagaagggtccactaagtttgggcctggcctaagtttgttccaggggaaatgagggggtggccttagaggaggataggcctttaagtgaagcttcaaaaggagatgtgggcttattaaggcttgctctctctgtagaggggaaagtgaaggcataggaggggtgtgttctttgcaaggcggggagaagacaaggggatagaaatggaatttcagtcgagagacgagggcagggcacaacattggcacaagaggcacttagagtcgagtcatcctgtggttctaatgtccttttcctagtgactgagaggtgtgaggggggtagtgagccttgtctagtggcatcattaacatcttgtctagggtcgaggatttggaacaaccaagggactttggttataccctagagggggaggattttaattgccttcctagtagatttgtcaagtttagtaattgtttggggatgccaattgcgagctttgagaaggaaatttgttctcttgtcagaagattagattcaagaaaaggacgtggggtgagggtgttagggggtaagaaaaggtcttcttcctgttttgagagggaaatctaaaagctagagtgttcagttaattataatagctctttgttcacttctaagggaaaggggagtggtgccagggtttggtagaaggggttgcatttggaatcagagtttttctattgtttagccttttagttagggttgtttttgtttctccttctgttggttggggttgcttgttgttagggtggtgggtttttctcctcttttccttctctggcttgcttttaggcctaatttgtatgctctgtgtttacttttttgtgccttcttgcaagcaccttaacgtatttcttttacctataaaaaaaaggtgatttattatattgtacaaataatctgataaactatgccaatctcaaacattggttcattaatagtacctcaatgactttgatttgtgaattttccattggtacatccataaaggacttgggtttgtaattcttttagatctatcctttacatatatgctttcatgtttgaataaggagaaacacaatttttttatatttttattttttatcttttgtgttatcaaatttatggctgttttactgcttttattgtcatgcttttgttttttacctgctagaaaatccactgctttcttgtgagagaacttcagttccactctagttgccagggcattgctatggaacacttgcttgtttgttattgtttatgtatggctcattaccttgttctattttggtactgtctttggcaggattcacatcccgagtataacctttttgctactat

SEQ ID NO: 11542 - DNA, 793 bp, Vitis vinifera
  Intron number 1 from transcript GSVIVT01008121001 (locus G SVIVG01008121001) derived from phytozome v7.0 (chr-ID chr1 7; pos 5620242 to 5621034)
gcggtggtgagagggttcctcttttgggtagagaagtaagctcttcaatgacccatctgctgggtttttttttcactttgtatgtcgcatttcagttcttcggtttgttcaattttttatttcttcgattgcccatgtgagttttctattttagtgttcagagttttgatattcgtagggttttgattattgggttatgtttaatctgtattatttgaataaagcaacccatgttttgatcacatgccagaatttaccttttgtttgaatgctcttagctgtgtttttagttttgcttgattttggtggcctgagttgcccatgcaggatttcttgatgtattttcaatttccagtgatggattctttcaattaaactgcttgaataagtcatatatgcatttgatgcattttcagaattccagtttggagtgatggattctgttcaatttgaactgtttgaatcagccatatagtctcttgtttgagtgcttttggatttattttcaccatgtgagcgaagatgattctttcaattgtgttcaccttttcaactggggaatctgatggaacaaagaattgggttgcttggtgcttaccagtggtttgaatttaagatatgtaattgggtttgattttggacttgtccattttggcatcttttcatcttttgtagagctatcaagaattaagaaatttttcagtggtatgttgtgaattcagtttcttcccattgtagtcacaattctttaattatgttttcttttttcttacatagggaggaagaaagagaa

SEQ ID NO: 11543 - DNA, 6024 bp, Vitis vinifera
  Intron number 1 from transcript GSVIVT01009924001 (locus G SVIVG01009924001) derived from phytozome v7.0 (chr-ID chr1 8; pos 12432571 to 12438594)
cgtcatcgagctccatcttcgacttgttttgtctggtgcctatcatatcttcgttgaatccttgttctcggtgaagaaccgaccttcttagttcggttagagtttatgcgtaggaagcataaattcaatcaaaagtaacacaaaagttcagagtcttggttcacaagtatcaaaagactagtgtggagataattggcagatttgagagaaatggtttctctttgaaaggattaaagcttttgagcatggaatgtggttttacttagaagcaccacaagaacctgttgccaaagttgtgcttcaatgggtcggttgagtacatcatttatggcccaattattgtcatgatttagggaatgagatatgattcttgggagtgactcaatggagagtgcaaggaagtggaatgtaagaataggaaaggggacccaccgtctacaagtttagataaccattgaggtatatttttgcttaaggttggtagtagaatggtttactccacttgctcattaaatccagttaaaaatgaagccgcggtttctgagattttatggaggtgtggaaagcctattaaactggttgatgtctcttgtaagttccctcgacttgtttgcaatctaggtctaaaggaatggtaggttcgtggcaagggcacgggacttgcaagtcttagttggagagcttcctaatcggctcaaacccttggtgactgccattgtgactaattctctttcattccgaacattgagaatgggcaattgaaggaatattcaagaccgaaaaccgagaaagctactcatgaggctatttctttaaagacccatcaagttgtcttccaaattttcataagcaatggggtcattttttgaccaaaaggcccatggtttggtgactgcagttgtgacacgaacagaggagataagatgaaagaccaaacttaagagaataagcccacatctttgccaacatcactccaccctgggcccacccctgcatgcatccagttgcatggccacctttaggccacgtgccatctcctagttcattatctttgatttttgaaaataattttctaaattcttttcttcaaataattttttggattatggtttttttaataatcccaactccacaattcttcatccttagaatttttagattccaaaaatccttcaatttttaataaaattttgctatcatttttctttttggcaagcaatttttacatcttccatatttttttaaaatgttttaaaataagcataaattcaatttcgtaattccaagtgatggaatttacggaattgattcatgcaaaaataaattgggctttggtgggggcgcaacattggtgaagttttatttaaaataaaaataaatttgagtgaagtgcaatgttttcttttggcgatttcttatcttgtttagtgatgcatgtgacatattttatgctgattattgcgcactaaccccttctcttgacaatgcattgacatttgctgctaaggtatgcactcgctctcactcttgaccactctccttgtatgtttgacttctagtataatatcatttcaggtattttttgatctactaaccaattgtcttgcttgcttcatctcattaatagagacccatttttagggatttagaggggcactacggtctttatcgtatcttcccaatgagtaacctgacccccggacccgtatttggtttttcacagaccacatttttcaaataaggagtcacatttatggttttcttttttattttgtttatcctttaaaaataaaacaaaaataagtggcgactccaagtcattttctaaaaaaaatcaatcatttttaaataaaaagcgagttcgccatcgagtgaaagcacatgagcgaaaatacgaggttcacaatatgacttaggtaatattaccttagttatacatgtctgaatatctgatgatggtgaatcaattactttgttacaaggatgaaaatatcgataattatgaatatatcgatacttccattttacggatatatcgaaaatttatcagaaatatatcaatggatattgtaacacaaaattttgatagacgattagaacttataaaaatgtaagaaaaaactcttaaaaataaaattagaaatataataaatattttaaaattattttgtttaaagaattaatacatgtatgatatagtttatcatatttgataataatattgtatgtgcggataaaaatatatgcattttataaatgtatatttattattaaattatatcaaatattattcgatataatattgcaatatttgattataatatgtttaattaaaaaatatatttaatattaaaattaaatttataatttatttaattcaattgtattaaatgatataaaataaataataatctatgtatgatttttaatatttaaatgattaaaaacactatgaagatttatatttttggtaattaattaaatgaaattttttcatttaattataaaataattataattaatttactttttaaaacattcttttaagattatgtttatatatatatatatatatatatatatatatatatatatatatatatatatatatatatatatatagtgtcaattatataataaggggcaaacttggtgagttaatatattatgattggttaaagtgatagaaaatttgaaattttttagaattttgatcggtcacagaagaaaatttgattgtcccgtcagtgatcgatcaaaatatcgatatttctttcctatggtgtcaagatccctcaatacatgatatatggacgaatattttaatcactactttgttgtcacattatggatgcaagtttgtttttagtttttagtttttacagcaaagaaaaagacaaaccgaaaaagaaaaaaaaaaaatcagtgtaaaatgcaccacagatcactttgtattgagacacagatctgcaacgggacaatttcgacctgtttctgcgtcacggctttaaaaaaaaaaaaaagaattcagtaagtcctcgttacctcatattactgtcctttattatcggcttcagtcgctgtgatccaccgaccattatcttagctctgaacgcggcttaattttaaaaaggtccaaatgagactgaaaattaatgttttttcaacttatcccctgcataaagaagcccgtccaaatgtccatgtgtcgacaaataccggcaccgatcatccatatcacatatatatcaggaaaggatcagacaccacgtggaccacagtggtcccgcacactactcgatgcaaccacagaattaagattcgctcttgccacgtgttggactcccttcaaaacagctggctggtattgggtgactcatcttttctccgctgtccccctcaggaaggacacctctccaacagtgagagttttcagtctgagccgttgattcaagggttctgtgaaacaagaggccagagacattgaaaggaaatcaaggttctgaccaaaactaacagcggagctacagttacggattcaaccttaaagaacatagaattgaatggaccccaccttagttaatacgaatgtgcttttagtggccacatgaatgcccctcaacttcccgttctcaatggcccaccccaaccttatccctagcttcgagattctccatccttttttattttaataattttttattcatgttaaggtcagcggttaagtgaactatcgagaaagacggacagaagggtaaaagacacggttgcttacgaagaagtgattccgaatccagtcagtcttccattttcattgaatctgtggctccagttcctcatggtttttctttttcattttttcatttttacttccttcaaacaatgatgaagaaatttacactggaactgccaaagctgaggcctacaacagttggttcgtattcccactactttcctttatttgtagtaatttttcatatatcatatatgccatcactaatcaaatatacataaataaaataaaaaaatatttatttttatcatttttaatatattcgttttataaaataaaaaaatttactataaattaaatttatgattaaattttttttaaatatttataaaataatattaatatatgatatataaattattttatatattaaataacagaaaataaaaaaaatatttataaaatttaaatattttaatgataaatatgattaaacataaataaaattttattttttaaaataaaacatatttaaaaaataatatatattttaaattatttttttatttatttcacaaactaaatataaatataatatataaaatatatatattaaaatcatatcataatagatctatttaaaaagatataatatcctattatatagaaaactatcctaccttatcctgtgaatcaaacctagtttaaaactaaaactaatcacatttatttccttgctgcgtttcagattttcaatgcctaccaacaacctacataagagtccggcgttagccgttaggaaagtcagcttggcagttggttctcgccggccttactcccgtgaacgtgcagtccatgaaaaattgggcacccatgggattagccccacacgcttccgtaccataaggtgacatgaaattcttatctcctttacttctttgtcgacgtatttcttggctctagctttaaaatgattaattatttcatccacagaaaagcaaaaaaatttaaggtattccaaagaaatgtaaggctatcttttaaatttgcaccgacctttgtttgaaaggtactacaagatgggatgcacatggaaatctgcgcccaaatgggcattttcaagggcgatctactttggatcgtagacagctcattaacttcaaatgttatctaaacattctgttgagtaggatgtatcacaattgcctcaatccgttctccaccctccgcaaagtttgccaaaaaaaattcaaccttcccctatttcattatgactactcctgctcctgtaatcatcagtcctggagggttgagatttgagcccttgagatggtctctcaaattctcaatttggatatcggcacaagccaatcattaattaatcgacatgtaatatttggagacactgaaatcgtttgccacaaccagaacaagcatcactcttcttgaaaatttgtttaaactttaaagattgtaaaatattaaggacaaaaaaattaagaatagagattttctcgtatttggttgtattataaaaaaaataaaatataattaaaattaataaaaaaattatatatttttaaataatttaatttttagataaaaaattaaaataagtgaaatgaatttaatataatatataaaaatgatttattactttttatttgttatattttttctttttgttgtctttcctaacatttgggaaaaattaaacataacaaaaatgtttttaatataccttctctattttcaaatatttcttaaattaatttttatttggagggatttatttttaattatttttatatttatttatataattatttttaaaataatcctaaataccagtgaaaataaaatgaaaataatgaaaatatattttcaaaaaattaatattcaaaacatttttagtattttttttgacaaaaaaaattagtttttaaaaatttgttcaattttttataaatgttctgaaaaataaaatatttttataaaaatcatcaaatcaagttgagaatatttcacaaataaaattttattttgaaaaaacatcgtacgtttgtttttaaaaaccctaccattcagaccacaatttccaagtctcgtacaaaaattaaatagagggtataggacaaacaaaaccttactggtttgggtcagagactgcaaaactttattggcatggaagcaatacaccgacgggttgctgctcatcgctgagtcagcattagatggatccatggataagcctagtcacttaacccaaccatcttaaccatagttaagcc

SEQ ID NO: 11544 - DNA, 7101 bp, Vitis vinifera
  Intron number 1 from transcript GSVIVT01003632001 (locus G SVIVG01003632001) derived from phytozome v7.0 (chr-ID chr1 6_random; pos 546481 to 553581)
gggaaaacgtgtttttacacactcatgtgaagattaaaaaaacactcttggagagatttcttcaagacttgaaaatttcttgaagaattgaagatttttttacgacttcaataaaaaaaaataaaaaaaatcaagtgtttgtttagacccctatttatccaaagttaaacataacaaattttgaaggtgatttcattttttttaagaagaattggagaataatatcaagattgtcgttcttaaattaaccaagtttataattttatccataattttgttaaaccataaaatcaataactaccactaggctacaaaagctcttttgtatcattgtacccccaccccaactaactttcatatatatcttgccccttttatctacttctttggctccaccacttgttggacctatatcttcgggatgttgctatgcatcaacttggtggacttaaatcataccgttgaattaatatttttttttttaacaacttagatacttcaacttaatagttataattaagttcaagaaagagggagtgttacataacattcaattccataaaattttagaattataaatgacaagtgactatacataaaaatgccttgcaaaagaaaatcaaatcaaattacaagaaaaaaaaaagaggatgaattctcttgttggcattagtaaaatttcatttgaaaaaaaaaaccaaattaatggaatcaaggaattaaaattttcaaatcaataaaatcaaatataaggatgtcaaataaagtatccaaactccacctataaatattgttctcttcaggaaaataaaaaagagacctaaaaaactccaaaatctaggataacttgaaatgttcttcaatgagtttttggaaggatatgacataagttaaacttgtattgagcaacatcacaaagttaaacataattataagtgctactttttcacctttgatgatccactcctaaccgtgtagatattatgcgctttggatccaaaggaactcttatgactttaaaatatatctatatggttaaaatgagctcatacttatatagcattaagaactttctcttcatctgatgtgagatatcataatgattacctttaacctttaattcctccatttcaagggcatatgcttcacttcttggatctacatcaagacaataaaatcaaatgaagttatgattttatcaaaaatacattaagattgtatccgcacattatttttaaaaaccaatatgctagccttttttttcccctaattttcatgttcgtttcattgtgggaaataaagtttgtggactttatgtttgagtgataagaaataatttgaaaataaaagtattgagaactacttagccaatctactaggaaagttaaaattttaaaatactctactaacttataaattgtacctcaactttctttttttcattttttttcttccaaattttaattttgtcccacttatgtagataaaatatagtaagttcttgttctccaagcaaataaaattttctataagactaaggagattcgaatgttattttggattttatttcttttttgaaactaaaaattcctttttaatcttagtaagagagtagtgttattaataaaaattctaacaaagaaaaagtatccggaggtaggaaagaataatgaaacttccctgttttctctaatattgtcatgtaccgaaggaaattattataattccaaatactaagccactaaaatataacttatcttccacttctaattaatgctaaaagtaaaagagttaccccaaatcgggcttgaaaaactctatttattaaaacaagatgatgactaatttttaaatattatttttatttttatattatattatttaatattttaatgcatttccataacaaattatgtcattatccttcattttgtttccatgtatattttatgttagttactagctctagttcttcccccgtaaacttctttactcattttatggattattgtataatattgtaactactagatttattgagctagtggacgttatgaatttacatattgatagtttgttatatattaaatataaattgatattgaaatgaatgttagatttattatgaatttaatataattttttttaataatgagttttttatttgaaattttattttgatataacttttcaatgaatttcagtcatatattgctttatttttatattattttttataaatttgacaattaattccttgttacatgtatatcaaccgcaaaagttaataagttcatttaatgtgattttaatataataggaaattccttattaaattgatgtaaaagttaatcataacttactgcctagctcaatccaatttgacctaacttgattcaatgacccaccaacctatcaaactgacatgtatatttactaacattagtaaattcttattcgaactcaaatataattgttatttaatttgtttagaggcttagatacatatatggtggttatgataatttatattgtaaagaatggaggaataaaggtagaatttccaaaaccataaacttgtataacccaagtatggtgagcaatgatttcttggtggagaatctgcctatgtccaaaatgttgcaacaaacaatgggaatgcaacaccccatctcaaaccccaatttttttaaccaaccttgtacttgattatgggttgtgatgtggtgtgatgtggaatgagctgataatacgtaggtaaatgggttgcaccagaccaagctaaggttgtttggcttgggctcaggttggccataacaaggcctaacaagttatatatctagttagaaatttaatttttagcttgagtttaatccttagcctaacttagcttactctttgagttggacttttaaatcaacccaactttgggttggttataattaattgttttgagaaaagctcaaattcatgttgagtggactttggctaatctgtttttggcaaacctcaacttagcttcaatgaatatgtcaaatttgtatccttaattatctaatccaacatatatacaagatgggttcaatcttgcctaggccaaacttacatgcataggcaatccaccatatacatgtgtgaatatgttcttaatgactaaaactaattagagtaaagattaataggaagtttaaagattacaagttaaattcaacattttcttttgtttaaatatttatattagttcattcacaagaatatgttgaataaggaaaaatatgaataataaatggacaacccataaaagaatgcaatgtgtgattaacgtgaaaactatctatagaacattaataggcttacaaccatggaccttagtcaaccataaataaaatatactaaacataaaagagactacaaagatttacttgatagaaaagctactttaattcgaaagacttatattagttatcatctatatttgtcttttatgtcaatgtaataccttgagctctttagtagattacatcaaaactctatttagattagcaaatcaccaacttttctttccatccaaaagggtttcaaacataattttgaaaagttttttatagtattgggaaagttttaaatataaatgcacaatagggaagttttcaataaattaaaataaagaaacttgtatttaattttttttttcctaaaagtccatccaatgcttgattttcatccaagggcgcccaataatctctttatattgctttagtgcccaagcctctttctttgtttttcatgcctttttatactgttaaacactttttagctctttttaaaacttcaatctatcttttatattgtcattatcttatccaatctttttttcatttgtcttcaacattgcttttagactaataataagtcccttagttgtttctagcaaggctaagaaagtttacttatatatatatatatatatatagagagagagagagagagagagagaaagttatccaaagtagttgggattaaaggatttgatttcacttgaatgagtgaatcatgagttcgcactaacgaggttggagaagttgcagatccattctttatatgccctttcaagatagtggttcaattggaaacacctatcttggatcaaagtaaaataaggcgttgacaagataatggtttggtgagaacatcaactagttggtactgagtggaaatatgagagatatgaagttgtctaggaaaaactttatcttgaacaaagtgaaaatcaatagcaatatgcttcatatgagagtgaaaaaccgaatgtagatggtatcgatattattatgatagatagttggagaatgtttgagagacatatcaagttgaagaacaagtgattggacccatcccaactttgtagtattataagcaacaactttatattttgcttcaatggaagatcgagcaacataccattgctttttggaactctaagaaattgggttgcagccaaagtagagaacatatgcatttgttaaggttttatcatttggattttttgtctaatttgcatcaaagaatgcatgcaaaagcagtggagagccacatttgaggaaaaaaaacatgatatatggtgcatttgaggtaccaatgcacttgcttgacagttatctaatgtgtttgagttagtttaggcaattctacatgtgtttaaggctttaaggtacatgtatctaagatcctaggcataatggaaatgataaaaaaaaacacaactttgggcatataggatgagttagaaatcataattagggcttgattgttcccaaacccaaatccttctgcaaaagtgatatcaaaatctcatctttcacctaatggctccctcttgtacatgtgacgatggtggaatcccctccatagggatgcaggctaaggctctttctctctggaagacaaaatggccgaaggttacaggtcttaaaccctatgtgggtttaagtgacttgagtccatcctgggcttggaccacttaatctaacctatcggattctaattaattaattaaccttattgtgctttaattaattaattagtcatgactcatattatgctttaattaattaattagaccaatccaaaaagaccattcgtatataattagtcatatttgtgcatgaattaattccataaactctattttcctaatgatcatggaggaaagatcacatgaatttagagaaaattccattattttgaaattatagaatttattcatgttattaaaataaaaaaaattagaaaatcatttaaaattgagaaaagttatggaaggtgcatgccaaaaggaaaataattgcagcaagcgatttattaaaatccggattttattaacctacgagaaattctaagaattttaaaaggcaaagttagggaattaaatttatttgaaaaccagaattttgaaaatcaatttttggaagcaaggatgacgaataagggatgaatcacttgggccttacaaaagatcaaatgagggtcaccatgcaagcaagggcggagcaacataaggcttaaggtggaaatgagcttgattgattgcagttgtaggtgttggtggttgcatgaaaaggccttccatttccattaaaaagttccttcatccctttattcacttgcatgacatcactctgagtagaatccaagatcatgccaaacctggttagtgaagtttccaacatcccaatcctgtgttcaaggtcttcaccaatcttgattgctctaaggtttctctagctgcagaacccgtttctggagcaggtccaagggatattcctccttaaataatatgcatccatgtgatattttcaagtttcagatccccatgcaaccagattacaaactgagagaactcaattgcggagttcaccacgataaaatcttctaatatgcctgattgagcgcctgaggagaggtaccccaaccacatcgatcatttgggtcagaccataagagatcgcatatgggcccttcagttggtttcgcaggtggttggttggaagatggcgacctagaaggtggagacggtggttatgggggtgtcaatggggatgactctattggtgaggaacttagatggagtcatctccatacattgctaagcgaaaatcaaaggatcttttgccaatctaagctactattccctgtctagcttccccaattccactatggttctttatttcttgttattaaacgcaactgagctgtcaattctgtctggcgcaccaaactctgccagactattttacttttcatggtaagacacttgaacctgatgatgcttaccaatttggaatactgaggctccttcactgtcatggaattcttaagctgaaaatattagagattgcgaccatggtaggtttcattttggacttcaaaaatgggataatgcacatgttgtgatgaatgggattacccaacattaaggtgtcagtctcccccaaagatctcaacaaaccatccatcatgaactgagtaccattcatctccacgaagctcatcttcgtttctttagacaaattgatcttcaagtctccaaaagacatgtgaatgaatgctaagattgatgcaaagtcaataatggtaaaacaatccattttcgaccaccattctgtctttggagttacacacataggttccaatgattgatgtctgtctcaaattcaaacaccaccaactttttggtgataccttttgaaatgtatggtaggtggacagagccaagagtgtctttcatatcttcctgtttattgcttaggaatgaactatctaaaagtgacttctggttaatagagttgtctaatgatattctactggcaccttgaccgctatcagttaaaggaacaatttacatttttggttgcttcacttgagcggaagggatattccgaagctactgattcaatgattttacaaagacaatatgttacatcctccatgtaacctgaaaaattggatgccttagaaggtgaaccaaggtcatagtacaactcaacaagaaaaagactacattcaggtgctctatccaggcccctaagcctcatttattct

SEQ ID NO: 11545 - DNA, 2778 bp, Vitis vinifera
  Intron number 3 from transcript GSVIVT01018296001 (locus G SVIVG01018296001) derived from phytozome v7.0 (chr-ID chr1 5; pos 11592250 to 11595027 reverse strand)
ctcgtccctcattcgatttaacccctgcccaggtgttattcttgtgatctgattaattttcactttaatacttttgttactcaaatgcatatgttccttcattatgctctttgaattttaatatccatccaatttgatatcatgtttgtattctctggtgattgctcaaaagtactgataactccgaaatcatgttcaaataatgcatgaaaatagcaattcatatgtaagactgtaccttgataatattagatatatatattttttgatagataaacacagaatatattagaaaaagggcgttaaagaggcaacccaaagcatacagggagtatacaagagtcaccaaaaggcaagaacaaatatcaaacctcaaattgaattgcaaacaaaactaggacgagtctgcagcaattttaacatgaactgaacttatgaatattgacaaggttgtatggatattcaaggataaaccagttcaatcaggcccatccaaaaaaacaaaaaaaaaaccagttcaacaaggtgtaggccggagacgctttttttaaaattaactattttgctagttttatcaaccatgggctccctgatgcacagctgtattttttcttaacccatgcagaaaatatgaactggtttatcaatttagaaccgtcaaccactatatcagcagaattagatcttctgatggtctacattgaagaaagtgactagtcaagcctcctcatggttcttggttttggctgtggtgattaggcaagtttattttgctttgtttccctggtcaacaagactgctatatatagttcagcggccttcctctttagggccagtttttcctaccataattaatatccaaagatccagattgtggcactctaataccccaccccatccatctggaaatcttggttcaagcccttcgttactaggtgaaagatgccccatttctttgttccgaaccattcttttctttgaattcttcgtgcaagagtatcatacaagatccttaaattaaatactgtactgcgattagaaatatagttatagttagaaatcattgtattacttattatttactattactctattgatattgattacaacgaaatccttcatatcataatgtgctcctctgaattaatatattcactctcttacttataaaaaaaaaataatgtgctcctctgaagaagtaccactggagcataacccattccagtgaaataagcaaatcccttgcctgcaatgtcttgaagggtttggttgcttatcaaaagttaagcactcctttaaatatttcttataaaaaatgtttatcagtcttttacgtctacagcatctctgtcacctgtgatccagctttagtttatcgaaactaatcactttcagaactaaaagctttgcagcagtagggaactgatgattgaaatgtgattattaatgtggcagaaaggttcctggtaggtagaaactgatcttattaaaataaaaatactgtttcctgatatagtttaaggcatcacatttttaaaagaacctgaaccaggaagtctcatcccatcattttggggtccactttggtaggttttatgcatttggcatccatgtggatcaggccccagttttataagttggtacttcttctttttcttcctcttcttcttcttcttttaaattttactcctcctttttattttattttatttattttttattataatttttttataattttataattataattataattttatttaatttatttttttccactttttgcttcccaaaagttttcctcgctccaaggtgaatttttgttttttcttttatcaaaaacaacaaatgtattaaattaaagataaagaaatataaaagaaagataaagaaatgcaaaagaaatacaaggtgagtaatctatctcttcttcttcttttatttatatttttatatttaaattttttcattcttcccaaaagttttctttcttccaaggtgaatagtctatctgtgcaattttttcttttaactcttaggctggccatgtttgttgaactattcagaaactccaagtttccatttgaatctttgaaactacgaagaaaatggaaaaacgttccttctatctcagtttaaaaacctgatatttttctcctccattttcttctgtttattgtttctctatcctcattgtttccttcacagtaccgttgtaaatgtttataagaagtgtgacaattatttctctgataaaaaatggttatttatcttgataataaggaagttcctatgcacctatatgtatgctctaggatttcttttcatgagaaatttatttaattattattcttttaaagtatatttatttatttatttattgatcagaaacgaagaaaaatatattaaaagaagaaaagatacaagagaaggaagagatacaagagaaagagaagaaacaagagaaggatgagaggtccttcccacaaaaacaaaaactgaacaaaagagaaaacacccgactttagaaaactaaatacaaagaaaaaccccaactcacttgtttatcattctatagtatctttcatcatgcttgagactggaaattcaaattgctttgtaactggttccttataaggagtagttaccaataaagccaggaaaattgtgcttctcaactcactttcagttctgtcttgttttgttttctgcgagttgcaaataataccacaaaaatccataatcttttccttggctttggtgttgtcaggagga

SEQ ID NO: 11546 - DNA, 11899 bp, Vitis vinifera
  Intron number 4 from transcript GSVIVT01030885001 (locus G SVIVG01030885001) derived from phytozome v7.0 (chr-ID chr1 4; pos 18331353 to 18343251 reverse strand)
aggtatagtgtttcaaccatctgtaagttatgctacattttttaattggtttttttccctttgattatgcatgcttctggtggggtttcagctgttacttgttgagaaagggaaattgagcattgaataaaaaataactgttttgtgggatacacatgtgttttggctctaagttgggactgctaatctatctccagtcagtgtgttcacatgatgatatagaaaggcttgttattacttgaaaggcaaaagaatggactacttaatgccgttaactttttggttaaattttgggtacacatgttgtagggagatttagtaatatggtgcattttattgctgatgagttcatgtctgacaaatacaaaaaatagttaagataaaataaaatatggaagagcctgactttatgagattactagttgctgtaacagattgaaaaaggcattatttggttaggaaagcaaaaaattctcatatagaatattgatggggtgatgaaagttatagattgaaaaatcataaagaaaagggattcttttgtaatatttttcaaggaagtttggatgagattatcaagattgtcagtttgaccttttaattgttagataacaggtcaacaatctatctcaagttgacttgggcttaaatcttaaaacccaacctaatgggcagccttcaatgtatgggcaaaataaatagctctgaggtttaaactcatgatcgtacataaatcaagactttggcaccgtattatgaccatcggtttgatccacaagtatcaaattggtgatcttaactagggcatacttaaaagaaatatgggaatgtgggagaagaatcagaaatggtagttagtgaggttaagcataagccagatgctgatgccatggaggaagactaaggtctactttctaaagttgataatttgtggtaggagaagtggtttctattaagattgagggataattttaacttgagggatgaccattctagtattagatgaaagactttatggcatgtttactttgattcctaggatatcaaaagaaggcatgtttattagagctaccatttcttgatattcttgtaaatgtttcaatattcctgacttataattcctttcattccccttccttcccattctaatttcgtttctttccattccctttgatctcataggcctagtgtttaagggcattcctctcaatgttgtccaacttgactgacatttggtgtataagtcataagggttagtttagagaggagttttgtttcgatttctatttgaaggagctgtgttaatcctcatggatggatgagaggttttatgttgtatatcatcatatggttctatatgaatgtataggtctttttagtttttttggacaatgttttatcttccattttttgatcagttttttgtaaatctagggaggattccctatccttcttatatacttgctttaccctattctaatacattttgtttcttattaaaaaaaggtagagaagttttgaattacttgtacaaaaatgttagatatgtataattgcaatgaaatttaggttaaaaatatttatattttgttaaatatttatattttattgattaagaagaaaatgttcttaatcttctttataacaatttaataaatattaatatttagataaacgaaataaaatgaacataaaatagtttttattaatttacctttcatgtgctaaagtctcatttttatattgtttattatatgaataccctcaatttatataaaagaaaaatatttaatgttatactaaataaattaaaatgtttaggtgtatgaatatgaacctacgctatcatatataaaatcgcttaattttaaaatttaataattaaatgtctttatgccaatttaaaataattacaataacacattatctttaatgtcattatgttattatttttaatttttaaaagatatcattgtttataatgtgtcattgtgtcaaattaatgttcaagtttaatataattaaatatatatttaccttaatttaaaataattacattaatccttagtgtcatttttgctttaactttctttcgtctaagaaacataatgggtttcctagggggcttaaggaaatcgattcttcattttgaagaatgagattccttaaaattaggtggatcttatatctttgattaattcctagttggagttaacaccaaaaatgaaaggaaagggaatgactccctttattgaattcctcgagaatcacgtaaacatccaatgaaaggagtcattcactttccttccattcctagtgtttgcttcaacttggaaaacttattatctttaatgtcattgtgctattattattaatttttgaaaaatgtcattgtatataatgtgttgtaatgtcaaattaatatttaagtttaatataactaaatatatcattcgagtagcagtcgaaccaccaaagagcataggaatgagtacaaaaggaaaaaccatacgtgtaccatacgaggacacaaggtgtagagtatctaacaataaaatcaagacacatgctacgagctcatagagctatatcttgcataaaagatgagaagaaactttagaatatcataatgaagtgagaaagacatgcaatgaagagagaagtaaaatgaaatgtgaaactgtgagaacaaagcatgtaatgctaatgatcatatcaggagcagtggctctgaatgaaaaaactaaccttaaacactaaactaagaaaagaatgactttagaagccaaaccaaaaagctaactctaaaagctaaatcagaaagcttacatatgaagtcttacggtggtgatacaactgaaatcatagttcaaagtcgcggtatcggtcattgacttgggaggtcttgaggtacatctgtctcggtatctcggatcggtatcgggtgatacgcaaaaaattataatttaaaagcttaaaataattttaaaaaattgttaaaattatttaaaaaattaaatacaaataagtagagtgaaaaattaataaaataaacttctattatattaaaattattcaaattataataaaagcatacttttgggatgatttaaaataatattaaaaatctctaaaaatattttaatttaatcacttgataataaatgtttcttgttgaagatgaaaataataaaaagtaatttttttttataaaaaattgtttaaattaaatattttgaatttaaaaaaaaatatttttaactattaaaaaaataaaaccatgattcatctttaaaaaaataaatataatttttcttataaaatatattcattaattttaatttttatataaatattcatttcctatttatttgatataagtctaatattcattattaattttttatcattataattttcatcaaattatttaaaactcaaattcccactaaatactcattatctacttaaaaaataaatacatattatttaaaacctaaatcctcacttatttattaaaaaaaaaaaaaaaaaaaacctaaatccatatctgttaaatactcataaccaccattgactggtcaaagacccatttctccccacaaccagctcctccgcaggccactttctctcttctcccacttccatcagccacctcaccgttgttctccgtcgataatagcggtgctggagtctgacgactcagcctcctcatcatgtcgctcagttccatctccggcaagaacttgggggatccgaccggcgactacaagatgcagtccatctctgtaatctgtatttttcattttcgtgggttttgatcctctcatcttctccaccatatctactccaatattacctttttttccattaccaataacccaaatagcttagtctcaacatgatcttggagttgtctcaacgtttccatgggattcactctttcaattcaactgagtttgttcgacaaaatatccaactcgggtatcggtctggtatcggccatggtcgaggcggatacgactcggccgagtcgtaccggtattgaccgagattttgaaccctgactgaaatgcccatagatgtttgatttatggtggtgaaattgaaatgcccatagatgtttgatctatgttggtgaatctgaaatgcccatagatgtttgatctatggtggtgaaaactgatcaaagcccatagatgaaaatctatggtggtgaatctgaaatgcccataaatgtctgatcttggtggtgaaataattgaaacaaatgctcatagatgaaaatatatgatggtgagataactaaaataaatgctcatagatgaaaatctatgatggtgagataactgtaacaaatgcccatagatatacaatctatggtggtgaatttgaaatgctcatagatgtttgatccatagtggtgataaactaatcaaggtccatagatgaaaatctatggtggtgaatgtaaaagacccatagatatccaatctatggtggtaaaactgaaatgcccatagatgtttgatctatggtggtgaaaaatgatcaaggcccatagatgaaaatctatggtggtaaaaactgatcgaggctcatagatgataatttatggtggtgaaactaaaatgcccatagatgtctgatctatggtggtgaatttgaaatacccatagatgtctgatctatggtggtgaaaattgatcgaggcccatagatgataatctatggtggtgaaactgaaatgtccatagatgtctgatttatggtggtgaatcttaaatgtccatagatgtatgatctatggtggtgaatcaattgaaacaaatgctcatagatgaaaatctatgatggtgaatctaacatgctcatagatgtctgatctatggtagtgaaaactgaaagaagggggatgccctaaacaaagtgaaaaaaatgggtgtcctaaacaaactggggaaagaggaatgcttgaaacaaattagaagaaaatgggatgccttgaacaaactgacggtagggggatgccctaaacaaactgacggttttaaatgcttacattaatcctcaatgacatttttgcataactttcctttttataagaagcaaaatgtatttcctcggggccctaaagaaacacattctccattttgaagaatgtggttcctcaattaggtgggctttatagctttggttgatttcaagttgaagtaaacactaaaaatgaaaggaaatggaatgacttccttcattttattcttcaagaatcaagtaaacatgccatgaatcattcactttccttccattccttatgtttgctttagcttggtaacaataggtatggggcccatgtaattttgaggaatatcatttcccaaaataaagaataggcctccttgaggtccccatggaaagtcatttcatttccttcttgaatgaaagttagccaaatgctcttagagactaatgtaattattttaaattaatgtaatgtttagttgtgttattaaagctaataacattaaaaatgttgttagagatattaatttgatataatgacttattaaaaattttgatataatgaaattaaaaatagtaatatattttttaaatattaaaaataacaacattatgatattaaaaataatgagttattgtaattatttttaatgacatagtaagatattttaattatcaaaattgtaaattgtaatacaggctttatgtagccaatacatattttagtttatttggttcaatatcacatatttttttataaattgagggcatccatgcattgaagaatatcaaattagtgaggctttagcacatggaaggtgttggttcaaaatactagagggttgaaactaagtggaattaaactaagctctaaacaccaacaaacaaggaaaaggaaaaacgtgtttagagactaatcaaattagggtggttgaggcatgatataacaatgtcctaaaagtagatctgacctcctcagcgatcaatctcagtgttgtagggaactgacatcctatcttcaggattcaatagctaaaattgtcgtataagttgcactctttgggcaaggtaaggatagaaggttggttgtaggaaggttgtaatagtgggtatggttgtaggaagattgtagtagtaggtatggttgcagggcaaaggactggagacattcaatggtagattaccatggtcgtctatggtcggttagattacaacaatgagttgtactcattagaaacagagaaacataaaggccaatatgatggattgcagtagtcagtggaaatagagaagtaaagagatcagtatgatggactacattgatctttgaaaacagaaaaacagagagatatggagataatggaaacagtagattagaattcaacgaaacttcatttttaaattttttaactcaaaggaagggcttttataggcagagttctagtgggactctcctataaaagttgaacaactcaacaaatttaaattaaattaattaaaatgtgggttaacatacctaaatcgttaaaagctttaatagggaatgacttagtctaactttaatctgaaatgattccttcaaactcagaggtttaaaaattaaaaattaaattaataatatcgaattaatttcaactatgaaaaatttggttggaatcgtttgcttacgcaaggggatcctcctgcgtgtgatgtacaggaacgacatgcattaaggtttcttggattgagttgcttggaatcccattggatgggcttggaccttatgagtgtgcaaggctttcacttccctctacacaagcccaagaggctaaggaagtgaaacacgatacaagttataaaaagttttaatcccttttcaaggtggaattaacaactttatgcacatgcatttcaacatgcacatatatgcactcttccaacagttggaaatttatttttacctagtttttgtaactcaaaacttatttattatcctatggctagttcatagcctatggacactaatactcaagccaatctgaattgatcttataagagatctgctacatgacgaatacttttctttttcaaatgattcatagcgttaagtagctttggattctattgttcctttagttgtgttttttcattctcttcctcacttatgcactctatggggaatttttggaagagtgcatgtgtgtgtgtgtgtttgagtgcatatgcataaagttttcaatcccatattggaaagggattgcatttttacatcttatatcatgtgccacttccatagactcttgggcttttggagggagaagtggaagcctcatgcgcccatgggacctaagcctattgaatgggatttcaggtggtttgatttggaaaccttaatgcgtattgtctgtgtgcatcaagcataagggaaccccctttttcacatatgcacgattccaaccaaaattttcatagttcaacattaattaatattattaatttaatttttaattttttgaactcttagtttgatggagtcattctcggttagagttagactgagttattcctagttagagcttttagtgatgtcgatctatgaaacccatgctttaattaatttcatttaaatatgttatgttgttctgcttttataggagagtcttgttagaatcctgtctatgaaagccctccctcaaagtctcaaaaaaaaaaaaaaaaaacccgatttttcattgaatcctgatctgttgcttccatcgtctccacatctctttgttgctctattttcaacgactattgcattccatcatattgctttgcctacttctttgtttttgacaagtacaactcattgctgaagtgtaactgaccatagacaactatagtgatctaccattgcctacctgcactcctttattatttactttgttaccatcttcttgtagtcatacttattgtagttgtcttccaacaaccatacccatcggtagagccttcctacaatcgagcttctatccttacatcttctgaaggaatttctaattgttcaagttgtattgtacctcacctaaggagtacatgttagacgagacttttggctattgaatgttggaggtaggacatcgattcttcgctgcattgagatggatttctgaggagggtagatttactttaaggacagtgttttgtcatgccttgaccaccctaacccgataagtgtctaaacttctttttcctttacctggtttgttggtgttttagacttagttaattttgacatagtttcaactctagttttttaaactaacaatcttaaagtaaatctaaattaatggagacttcttccttagttcacacttgtcttgacccttgaagattgatcctttcaataggaccttcttcaagagatggcaggaaagagtcttttttgtaattgacattatgaacttggaacatattttgatgaacccaaaacccaaggacaactctaaaaatttacctacatgagaaattgtaaataaacaagctaggcatgccatccttggcatactttctaatatattgctttaatgtatactaccaacacaagataactaagaatatttgggatatcatgaataagaaatatgttaggaaagatacatgaacccataaatattctctaaggaattttaggaaattcaaaatgaccaaggatagagatgtatcatcttgaaatccacgattcacttgctttactaactttgctcatgaggatgtaaaattggctgaaccttttgtagttgggtatttgatagaaattctctagattcttggaagatttcaaaaccaacataaagcacaaaagaaaacaaatgtctctagaagatgttataatctatatacagattgaagaataaaaaaggaatagagacaagattgagaaagctaaagaattgtcctctaaggctaatgtggtagataaaaaacttaggcacaaaaataataggtctaggaaacaaaactcaaagaccaaacccaatttagtaaacaaggtctagaacttaacaattaaaaagagaggtaactgctttgtgtgtgacaagcttagacatcatgcaacttagggctatcataagaagagatttgagaagtccaacctcaagagcaaacctgatagagacggaggtgatagttgttgtagtgtcatctaaggtgagcatggtcactggtgtgaaggattgagtggtagactttggggctattgggcacatctatggtgatagaagtgtgtttactttgtatacctctataaaggaaggagaggaacaagcattcacggggcaattctagatcgcccacggtgattagcaaagggaaagttctccttaagtttgacctcaggcaaagtgcttgccctaagcaatgtccttcatgtgccaaatattcattggaacttggtgtcagtatctctacccggaaaggcaagagtggggatcttgttcgacttagataaaattgtgttcactaagatgtatttgttgggaagagatattgtaatcaaaatctcttcatgttggatgtttatgagattattactaagaacaatgcatcttcttctactaatttagtttactcttgtgatttgtggcatggtagactaggaaggatatgtgaacttttcttatataaagaaaatggttgatctatgtctaatcctaaattgtcctaataaaccacgaaaaagtgtagaatctaaaaccacaaagaaatcatgcaaaattgtagaaagagaatttgaactactaagtttaaatcaaagtgacttaggagatcttaaaaatataatgacaagaggtggtaaaaaattctacatcactttcatagatgaccactcggggtatacatgggtatatcttttgagaaacaaagatgaagtaagagatgctttcatcaaatacaagaatgaagtagaaaatcaactaagcaagaaaataaagaaacttagaaatagtaggggaggagagtatgagtccaactcctttaactccttttcttaagatcatgaaatcatacacaagactactccttattccctataatatggagtagtagagaggaaaaataggaccctaaaagacatgatgaatgcaatgttggcaagtttaggagcacccttgtatctatggggggaagttatcctctcaaaaagcttaggagggtatgaaaatggaacacgatataagttgcaaaaagtttcaatccctttctaatgtgatattgacaactttatgcacatgcattccaacacacatacatacctacaggcatgaactcttccaacaaaaggtaagttaataaacaatatttttatatttattttattttatttatgtaaattttaacaatcatttatcaaattgttgtaaaaaaggattaagaatatcatttaaataagaattaattttaatcaataaaatgtaaatattctttatttaaatttcattttaattatatatagctaacattttttttttttttttgtgactaattctaaatctcacgcaaccttttttgttttttttttaaatgaagatataatcattttcaaaatataatattgaaatgaggataatgactaagaagaataattcatcttaatttttaataaatcagtacatgatatatatatatatatatatatatatatataggactcctctacactaaaaaggaaggaattgccatccctagctgtacaattcctaaaatttagggttagatttcttagatttatagtaaaggaaaaaatatcacaatattagaaaccggcctaaattaaatacaaaatatacaattcattcctaactttgtgttatgttgactttccaacataggattatttaaaaaatgattaatattaattttttatctttttgtatgagggcattatagtaattagcttcattatctttttatttcttgatattcttgtgaataatctagtgaattcttattctcattagtcttctattgacttcctctctattttgattccctttatttccattccttttcttctgaagtttagtaaatatgtcatttggtcattatgatattcttgctgtgaaatgcaaaagaatgagactagatggtttggcttgattggctaagtgattgaattggatgaaagagtatcaaaatgcaaaaacttgtaaaaatttatggtgctttacctttatgtgttctcatacttgtaactcaccttgattccaactattagtgcggctgacttgtatgaactctcatgtcttaagaaagtatgaattttggaggttatttctgcaacagggtttgtttttgttgacacttgacaattgacaacaaggataagaccaagtttttggagagacttgaccatttaatctctccagaagttttctatcttttttttttctttttctttttctttttcctccacattttagtttatttaacagttggttaaatattggcacatgttttccttggaaattgttgtatttttttattttattacttttacagcttatacttttatgttctgctaagatgctaagatgctaatggtgcaatggtggcttcttcatacttcaagtatgaaagcatgggttatggggtttcattcagccaccttgtgccagaatgctgaaagatagatccataaattgaaattatattgatggcaatttttgagcacatggttttattcccagtatctaaatagctttgcagcatggactgaaaattcagagaatcatcttcataatcttcttttggcacaaggtataatttttctgtaagattctctcatgactgaccacttgtttgtggtaacatgtactgtagacgggagttgcgcttggaatagaagttg

SEQ ID NO: 11547 - DNA, 3150 bp, Vitis vinifera
  Intron number 8 from transcript GSVIVT01011838001 (locus G SVIVG01011838001) derived from phytozome v7.0 (chr-ID chr1 ; pos 3731622 to 3734771 reverse strand)
caagttgttgaaaaaacttgtcttaaacaacttttgtaagtgcaaacgtactttccctttatttttttgtggtcccagttttataggtagccttgcttgtagatatttgatatcatgtgaggtaagatgtaaacctcaaagtatatataacatgtagctatgagttctctttcaaaaattatgcatttaaaaaggaattgaaacctttgatatgaaaccaaaataacagtgaataacatttctttagggccatgtgggtagcatttaattgtggaagaagtagaagcagaatatttgggggattatatattaaaagtactttgtttaaaaataaggataattttgatatgtttaaaatttaaatgaacaacaatccgtttcctttttagaaggaatccacacttgaatgttttatccaaacatcttaaaaattacattttatgttcttacattcaaacattgcatttaatatttaagaagctctttgaaatagaggtgtagggcccatatatgatagcagtttacttgtgtttgacttttgcatttagcaataataaaagaagtagaagtaaatattattgaaactgtatttaaaaatacttttatcaaagataaaggctaactttgatatttaaaaattaataattaaataaaaacatgcttctggcacatttgaagaagaacatggctctagataaaggtaaattttgacatatttaaatgttttagttaaataaaaatctttttcggcataagctctctcaaacgggggctttaatcaatttcagcattttatggttgagtgataaaccatgtttagcccttttttcctttgacaaagaaccaaatccaatatggtttctatggaatggaaatgggaagataaaaactttactctaaaagtaaatgctatttcacattaactttaaaaaacctaatatgcaaagggtcactgttccttcaattcaaaattttataggttgttggaattaatcaaaactcttatttttactattcttatcattgctagttgttcgaatataaaatcacccttttgtttcttttcccagtttttctcatactaactttggttcagattttttgttatgttttttttatttttttatttttttgctttacttgtttagttaatttgaatttttaaatgttgttgaagttaattcacactctttgtctcatggttaatggaagataggtattgcattattcatttgttgttttctctattttgaaagtatttgtatattatcaaagactaacaaaatgaatccataaccttttaaattacttaaaccagcttccatgacctgcaggaaagttgatggtgggacatttacctattgtttcaaaaaaattttgctagaatcctattagatgatttatggaaggaacaaagaaacaggaccaccatgtgggcattaagatgctgacatgacaacatttttgtttcctgatataagtttttattttttattttttaagttatataattttgaaagcaaactatgtaattaacttgatttttttaattggaaaaaaggcattttggtacagtgaaagaggtattcatgactgtaacatttatcacaataacaatcattcaagtcctatgaatttttggggcagattgatttaatgaaaagtgatacttgaaacaaaagcactggaaagtctatttgggtcatggatcctgagagaaatttctttcttaggctacttatggaatatatggagaaagagtgatctgagcgtggtttttatggacttacggagaacatttagtgggctcctagaaagttaatgagcaagatgctataggaggaacacatgctaaatgggtaaactcacaatcttaagaatgtctatgatgtgtgcacggagacaaagatgagtgagtggaactgaaacacaagcagcttctatcatggattagcattgagcccctggctttttgttgattatgattattcacaaggcatgtagaagaggaagtacagcatggttttaattgaaaactagaggtggtattaggtatatttataatttaaaaccatggggagattctttgaagtggaagggtttgtagatgagttggtgtatgataatatattggtgtaaactttgtaaaattagaactagaaggtatatttaagaaagatgattatggatttatgggtacccaagagttatcatttccaattgcattggttcagttaacagtaagatgggcgaactaaaaatgttgttaatcatagactgtggttagactggttgaggtaagtgatgcatgaatagtgttgaatagggttgtatgattgatggaagcattttttataaaaatataagaccaactggtcactttgtataggatgatggccacttaagtaacatatccatatctggagatgaactgaaaatgcttagatgcatgagtagagagatgagcagatatttaattttgaacatcttagcagatgattaggtgcaacaccattagctgcaagctgaagggaagttgactgaaatgtctgggcacttggggcaaaagccaccaacaataggatgaagtgctctgggtccagaccagaattagaaggcattgtgaggacatgagaaaggttaaggatctgggttgatgttatgtgcaaaaacctggttgcctggttgcctatatgatttaattgaagtatggttctaaatagagaaatggtgattcaaaggttatcttgtgaagccaaaagatctgcattgcatgaattgatttcagttgaattatttacttttggaattcaagccactttcttgaccagttaatttgtctatgcattgtgattaatttgagtgcattatgttgctgaaacctaacaatcctaaattgatctttctgtgctcagggtttttgctccatcaatttaatggttttaatttatgatttaataccctgatctttcagagttagcaacaagctagcatccttttagcataaggctgctcttgaaattcctggttgttattctgcctttggcatggttaactgcactcctccagatttgcccttctatgatgggatctgatctaaaatcatgactggcaggtacaattcctgctaaactcctcttgcagttaaca

SEQ ID NO: 11548 - DNA, 11344 bp, Vitis vinifera
  Intron number 2 from transcript GSVIVT01020636001 (locus G SVIVG01020636001) derived from phytozome v7.0 (chr-ID chr1 2; pos 3598812 to 3610155)
tccaccagaaaccaagagaaggctttgtgtgtagggtcgaagacccacaaaataatgaactagcaaggatgatggattggctactaccagaaaaagctctagttataagatttgagtagttgggaagggcgacctggccataaacctcatgtgcatgcggtctctgtttgcatggtcacccttgcataatagagagagaggatgggtggcagtatggttttaaaaatggctccactggttggactaaccaatgagaagctgcaaatgaagaacttccttggacatttgttgaaagatgaacttattgttcttaataaatttggaaagaccccactaaagttgataggagcggagcttacatcgttggataacttgtgaagagcattgtggccagcggacttgctaggaggtgcatcgtgcaggtatcttatgctaatggcaagcttgaacccttattagttttcgtggacacctatggtattagaaagactcccaaccagaggacactcaagatcgtgaggtggcccatactttagaacagacataaaacaaatacgtgaatgcgaatagcttaatcataaattatgctccatatgtgagtccatagttattttaacaagctcccacttggaccacatatattacagaacaatgttcatgatagtactttattgagttcatctttgctattctatctaattatccttaaacaatcaggtctactaattatgctaacacaggattaaagcggtcttcattaatcataattataattagacccatcaatgatcacaacattaacaaaattagcaacagagatcaagtatgaatgtgtagcatggaaattacatataatgtgatctttaatatgtctatttccaattagtctttctttatgactaaaaatagtcaaatttcacttttaatacttgatgctaaactgcttctgaaagtcatcatttcaatttaaagtattcaaacacaatagtctttaaaaccaaggtctatacagataacacaaacataataacacatcaagaaaacaaacacaaaatctaaatacaaactcccactatactagcacatcattaatatgtacaacacccatatgtgtgacatgctcatgatatactttgggttgtaaacccttaatgagcggattcgcaatcatggagtttgtgcttatgtgttcaattgatacttgaagactctaaactctttctttcacaaccaagaacttgatgtcaatgtgtttggactttgacgaactttagttgtccttagaatataattttacggccttattatcacagttgattctcaatggtttctcaatcccatcaacgattcgcaactgagtgataaaatttcgcagccatatcccatggtttgatgcctcatagcaggctataaattttgccttcatagtggaagaaacaataagtgtttgtttaacacttttccatgaaactgctcctccatctaacatgaagatgtagcctgaagtggatttcctgttgtcaagacatcccgcaaaatcggagtccgaatatcccacgatctctaaatgactggatttatgatatgtgagcatataatctttagttctttgtaaataccacataacccgttttgcctttttccagtgatccatacctgggttattcaaatatctgcccaacattccaaaaatgtacgcaatattcggacgcgtacaaacttgtgcatacatgagacttcctactgccgaggcatagggaaacctctccatatccttattctcaagttcattttgtggacattggtgcaaactaaatttattgccctttgccacagacgtgtctcctagtgtacaattgctcatgccaaacctacttaacactttatcgatgtaggacttttgtgacaacccaagtatacctcttgaatgatccctatagatctgtatacccaacacaaaagatgcattaccaagatccttcatgtcaaatttactggatataaatcgcttggtttcatgcaaaagttctacatcactactggcaagtagaatatcatctacatataacaccaagataatgaatttgctcccattgaacttgagatatatgcattgatcaatggtgttctctttaaaaccaaatgaagtaatcacttgatcaaactttcggtaccattgtcggaatgcctgctttaaaccatatatcaacctttttaatttgcatacaagttgctttgaatcattagactcaaagttctctagttgcaccatgtatattgtctcatcaatgttaccattaagaaaagtagttttaacgtccatttgatgtagctctaaatcataatgagccacaagtgccatgatgattctaaaggggtcatttgacgaaactagtgaaaatgtctccttataatcaatgccttcttttttagtgaaaccttttacgactaggcgtgccttatacctaacaatgttgccttttgaatctcgcttggtcttaaaaatccatttacaaccaatcaaatttacaccttcaggcaactctactaggtcccaaacaccattgtctttcattgatttcacctcatccttcatggcttctatccacttttcagagtcaaaactttgtttgacttgactaactgaaattggattgtcttctagacccatgtcaaactcatgttcctggagatatacaacataatcatctgaaattgtactttttctttctctagtggatcttctcagtggcacttgtacttgaggttcttgagttatctcttcatgaacttgaactggttccacagctttagtaggaagaatttcaggtatgtctacaatctctgttattggttgtacattctggatagtgttatcaaacataatatgaccatgtccagttgcaataataggaatactaatagattcctcttcaaagaccacctctctcccatttaactcaacatcctcaatgagcttagcattgttcgcttcaaagaaagatctagttgaggggtcataaaacttgaaatctcttaacctttcataataccctacaaagtagcagctcactgttctagagtccaatttcttttcatttggcttctaaggcctaggcttagctggacaaccctagacatgcaaatgcctaatactaggtttcttgctagtccataactcatatggggttttggttactactttacttaggactctattcaaaatgtaaactacagttttgacattttcacccaaaagtgattatggtaaggtggaatgactgatcatacttcttatcatatccttaagagtacagtttcgcctctctactacaccattttggcttggagtccccgacatggtgtactaaggaacaatatcacactccatcaaatatttgaagaatggcactagacgttattcaccggatccgtcatatctaagataatattcacctccacggtcagatctaacgacttttattttcttgcttagttgattctcaacttcaactttaaaattcttgaacacatccaatgattgagacttctcatgaatcaaataaagatagtaataacgtgagtaattgttaatgaaagtgataaaatattgttgtccattccaagaaggggtaggaaatggatcacaaatgtctgtatgtatcaattccaagacgtcaccgcacctgttggcattttttcccttatatttgtttgtttgcccttaatacactctatacagacttgaaagtctaggaaatcaagtgaatcaagaattccttctgatacaagcctttgaatacattgatttgaaatatgacccaaatgtctatgccataacattgatgaattctcatttgttaatttctgcttaatgccataattgcttgaatgcaaggtttcatttccattagaggcctttatgttcaatttgtataatttgtctattagactacttgtaccaataacatttgaatttagacaaagactaaccattccatttctatatgaacaataatatccatatttgtccaaacatgaaatagaaattaaattccgtctaaacgacagtactacaaaagtctcttccaaatccaaggttcatctaaagtctaattgtaacctaaaaagaccaataaccttcattgcaaccttgttgctatttcccacatagatgtatattttaccatcagttggcattcgactctttaggcaaccctgcatcgtgacacttatgtgagtagttgcacccgtatctatccaccaagtgtcaatagacactatagctaaattaatttctaaacaaacaaggttgagaagtgtaccttttttttcacgccaagcagcgtatttggtacatgtcttcttcatatgactagccttcttgcaaaagaaacaagtgatctccttatcttatttcttttgcaccttttgcttagatgttctagaaaatgtagtttattttcctttattgtccctcttttttttcttgctggtaccaaatccttgagatgtgaaggccaagtgagcactttctatctttttttatttcaatctctcctcctattgtatacactgaataaactcattcagagtccatttttcattttgtgtgttgtaactgatcttgaatggactaaattgtgtaggtagagagatcaagaccaagtgcacgagtatatcttctaataactctaactttagtgccttgagtctagttacaagattagacatttccattatgtactcccttatattctctttccctttgtactgcatggagataagcttactaagaatagtgcttgtctcaaccttttcgtttgcagtgaattggtttactatctggtccaagaatgtcttggctcgggtttcctcaagtattgcaccccttatagcttctagaattgagtgcttcattatcattagactcatgcgattggatcgctcccatttttccatagcagtcctttgctcagcagtgctggcactagtaaggtctagaggacgatcctctcttaatgcatagtgattactacttaaaaagtgctatttgatagcttgtaattaactcttttaaacacttttgagtagtagttattgccttttaacccaattaacatgttaaggacccttgcaatcaattctaatcactttatgcaagttttggtgtttttgttagtaatttgatcaccaaaacaatccaagagtgaggagagttatttggaatccatggcaaagcttatggaagctcaaatttatgaagaaccaagctttggagctccatagccctttgccaaagtcgttcaaagtatgcaaggagagaagcaaggagaaaggaaaaacagagtgaagaaaacagaggacaagcagctgcagtcttcatgagcacttttggagcacttcccgaagtccattttctacattctatataccatttcaaagctcaggaagtcaagaatccaatgcttcaaacggcgcgcgattcagagttgaaacgaataagttacagccactgcaagaagatcactccaaagtgttgcgaaatcagccttttgttgcgagaatttcgcagcctttttgtacagtgctatggaattcctcctgaagctacccgatacatgccgcaagctggaacgctgagaacctcaaggtggaagccaatttcgcagccctgcgagttcaacttgttgttgcgaaaatatttcgcagccctcttggatgtctgcgaaatctcgcagacctcattttcacctgcgaaatggttcctgaagcaccccgatattttccaccgactcttttggatatttttcttcagatatttttgtataaatttccattttctccttgtattcagccactcatgtaattccttagctaggaagtatccaaggaagggtaaattaccttcctatataaactctcttgtaaacactctcaggagacgctcggagaagtatgtaatatagatatatcatatatagaatcaaagaacagagcacttgctctgtttttcatatatattcttgttttctcattagttttatttctagccaaccaaactctgaggatttttcctcagaggatgagaggctaagctttttgtctcttggagtgaggaaagccgggtaagtttccacatgcataatttggaagttttgttgttttagtttttaatgaagagaaagtgtgacccgttagtgatttctatgtttttagttaacttaaaacgccttagagtcacctgggccaacacttggtaaggcaagtgatttccaaccatggaaatgcactagtttaccccttgcgagcctttgggaggtgacttgaaggtaggattttctagaatagccaacacttggtaagcttttggactccaaggagacatccattagttatctcttgcgagcttttgacgggtaatccaaggttaaagatcatcttgaatggtaagtgctcgtgagaggcatgaaccattgcaagttgcatcagtgagagggatttagtgtttgaacccattaatggaaagcatctgtacaacaccggttggagaaggaactatatgttaattctctaatgcgaggaaaagaaacaagtgaccggaactctcctttttgtatgaggaatctgagcctagtgatctgaactccaagaaacacttttctttgtaagtaaaatcagttgctatttgtggttagtttaaaaccaaaccctttttcattcaagcatctttatgttttcttttaaagctaaccttgaaatgaaaaggcaccaattcagctttgaattgatatcgtttgtgaagtgaaaatccatcccagtgaacgatcctagagccactatactatagtagctttttctttgctaccctagtatatggtgttataggttataaattttgttgatcactccctcaatcaaggagcaccagctggacacgaatcagctgagacaccaattgggcacgaatcaaatggcgccgttgccggggatcaaaccccgaatcaaatggtgtcgttgccactgccgctgctagggacgaatcacatagtccaaatccatgcacccgagcacaattataacatgtttcttccatttcttgaggtttgtgccattaagcacaggaatgttattaacattagcagatatagaagatgctgaattcataacaataaagctcacaatcagtcacaaaaatatcatacatatatgaacaaataatatatatatatatatatatatatgcatgtgggcctattacaagatacctagcacaaacattaatattcagtatttgaacaaaaatatcaatttgtaattggtatcccttttattttttatttatttatttattttttaaattattattattattattattattatttaattaattcataaatattgacaataaaatcgaagcaatatgcctgtcttcaaactgacatacaacaagtaagatagactttataagtcacatatttatgactactttatttattattatattaaaataatcttcctttggactgattattttatacaataataacatgtttacatatttcaaaataaataaattatataatataagttactttggcaataaatatatatatatatatatatatatatatatatatatatatatatatataactcatttatttaaaaaatattaaacataaatgtaacaaaaaaatgataaattcctatatttaatgtggtatagaaaagagaatacataaatttatcagaatcataattttttatgatacagaatcataaataaacataaggatcctatagctcagttggttgagcacaaggttcttaaccttgtggtcattggttcgagccccatggtggatgtttttttattcccaaatattgtattaactggtcccaagcattccattaaaaatggaatgggttatttccttaaaaaaggaaaaaactcaaaatataaaatctatttatttatttaaaactgaaaatgaggttacataagcgccaaacgacgctaagggacatcggtagccgcaccatcattgaaacgacaccagaacggcatttctccgctccccaaacgatgccaagatggcatctcagagaacgcaaggcggaggacgcctatagtggtgccctaaaacaatcatctccttttgctaaatgacgccgaaaaaaggcgttgtagggaatgccgaacgtggactgccacaagactcttacagggaagaaaaatgaacaacatggggagacttcaaaaaaagaaaaagtgaaaaaaaaaacttggacaacacaggagaaagtgctttacaaaagaaattcacataaattgttgtcttattcccaaggttatataataaatatatttaagtcaaaaaagtaaaatgggttatagttccaagaatatgcaatgaacctattccatagccatagtctctacacacttttcaactattattaaatcatatcctcaaaagtggtgcctatctattcaagagccatgtgctcaaacacagttagagaaccatgcaatcgacactataagcaccgccaaggtttgctggtgcaatcgctggttgtttatatatatatatatatatatatatatatatattcagaaaatgaacccaaaaattcccatattctgtcaagtgatttcttgccctaatatgccatatgggagaaaaatcatgtatctttgaatcaccaggcatttcttaatgattcaacatgtgtggctctgataccaatcgtgatattctccatgatcacccaaaaacagaaatatatatatatatatatcaaacatagaaaaaaaacatgccttttttgtccatggattgggaacaaacctgagtccattttgtgttgaatgaggtatggattttttaagattgtagagaggaaaccacatttcttatgatctctttggcgatgagaaatgggagaaactgcattctttctgttttaaaaaactgtctcaaattatgaacagacaccaatctcatatattctctatgccttagggaccatttcctttaaatattgggtcatatgtgtcttaggcccatcatctgagacacatatggaatcggactctacacatgaggtgacccatactttagaacaaatagaaaataaatatgtgaatgcgaataacttaatcataaactatgttccatatgtgtgtccatagttattttaacatatcatacttattacttgaatccttcgtttgcaagaattcctgaaggaaattggtactgttatttctgcattgctggtaccagtagggttaatgtctttagacatactcatatcatcgcgcaacgcctaggtaaaaattgtgaaggagacatttctcatgcttatctagaatcatttgcacacctagctgctgcaatggaaggtagcgagtcgcggggagcaagaacctagagtatactggaaagtctatgttttcttcaagccactctcaacaaaaccaacagaataatcccacttgcgtccctagcctacatgcatgattgcaatttacatgaccacctttcatacccctcaataccgtttctctcactacccaaccttcgtccttcccatacccatcacatacctacacctccacctatattttcaatctcttttccattcaaacccattttcttaatcccttgcgcgtaaccaccttcaatggtccctacacgactatttacttataccccgccttctacccgatctccatgtcactttttctattaccttatttgcatggcgcacatgccattttccagcatggaccgaaatgaatgaatacatctggaagcctcgctgttgtgtcattttctcctccacatccccattacttcgttattcttcggacaccaccatgaaacctactgccacaaagcattggatagctttgtctacggagtcctttgttgcgtgtaagctaaaatggtaatgatgagcaatgaagttgcagtgtagtttgaaattttaaaggaaattccagagtcaactttctacttcagccaatagcaaggttcaataaacactcttcatcctggtgatgtttgttctgggtaagttgtagattgtgccctaagctgagaatatgtactgccaatccgagaatgaatagcccagtatggctcaagccttcaagatcattcaacactatttctgccatttccatatgcaaagtatttgtggctctgtgtcttccatttttcatatgacgggcctaggtttgagtttgaagactaaatggccttcctacgccatgctgttgtttgggttttatatgacccagaatatcggagtcattgacgtgaccaatgtcatgaggacagtgccacagataaccaacttgccattcttttgactgtttctattgctagcagttatacttcgtcgcggaatccatttcacccaatgcataaacaccataagaatgtgtacgccttagttgtttacgtgccttacatcagcttgcaacccactatttagagaataaaaaaaaaaatctaagcttgggttcactgtctatcgatcaccataggtttcaacctctgtggtgaagccccacaacagtgttctctacacactctctatgggcaacacactttattgctccagatccaattcgtaggacagagaagttctttgctgctacagttgctgggaaacggatccttaagatagattatttaactgctagcagtcaaacagggaaattcttgataaaggagccttgcgaatggcacaaaaatggctttagtgaagatgatacattgcccaacaactcccatggatcatatttgtagatatctatatgcttaatcagctcaacgggtagagacctctgctgaatcttcctctttaggtagaacctcacaagctcctcatctgtaggatgaaacctgaagccatgcaatatgacatcatccattttatcagcattattcatctcatccatcatccatcttcttccctgatttcctcaaacccggataggaatcagaatcaatgaactctctaagctgatatggtacttgagccgggttttatggtggctgtaagggggagtgtttattagcaaagatcacgatgacttggtgatgggaacaactgaaggaaagctctgcgaagaacaactagctataagggagtgcaatttttaatggagttcattgttacctgcttctcctcattctcatttggcttccatttgggcgcccaagcaatgaggacctgcgaagtatagtgaaaatgtggtatccagaatggaagcctcttaccagaaaactcatagaaacctttgaggaggttcact

SEQ ID NO: 11549 - DNA, 6023 bp, Vitis vinifera
  Intron number 5 from transcript GSVIVT01037112001 (locus G SVIVG01037112001) derived from phytozome v7.0 (chr-ID chr1 8; pos 29049624 to 29055646 reverse strand)
gtagaacgagaattgctactgtagatggagagagagagagtacatgcatggtggagagaaaaacttgagatatttcaagtttcgggtttatgttgtagatatagtgtttttattagaaatgcttctcttataaaggctttcaagaaagatcatttaggtggtatttatttttttacttaattctaaatagaactttaatgcttaataatattaagtattagaccctttatttttgtaatattttatttttattaaacattaaaaggtaaaaaaaaatcaatatgttattttttttttattaaaaaaaggtcaaatattttgactttttttattcagtaaaaaatttataataaatcatgaaaaagtaaaaaaacaaactacctaagtttaaaagtaaattacttttagtaaaaaattaaaaaaacaaacaccctcttagtgtttggatattgaaaaaaagttacttttaataatgctttttgtaatgtattatataatatgaaagtgacttttgcattatgtttaaaactagatgggattggttggtccaaccggtcggaccgcggacccagagagtctagtttgatggaatgggccacttgggagttgaaccgttcgtccaaccggatgagctggctagtttccaatgacccggtcaatctgtgtttgacccaaaacacatgggcctttttttaccctcattctggcccaatctatcaacatttaacctgtgtttgacccaaaaacacatgggccttttttgccctcattctggcccaatctatcaacatgcagcccatccgtctgagcctcctgccagcttgcaagaatagtttatgtggaatgtatttattctgcatacggagttcatgatattcaattgtgggataacaaaatgagcatgtgactgctaagctacttaaccaccttattaaataaccagtaaagctttatattaatgttctttattaatttttatcatataaaatatttaaacaaatataaatatttacatttatttttatttttataatagttattaatgaaaagtatgaaaatattataaattcattaatataataatttaaaattctaaaataataaattatataaatatatagataaaattaaatattataattattttcatcttaaatatgtcttcatatttaaatattatacatattccatttaataaaataaaatatattaatacatccatatttatctttaacatttaattttccagatcaattacacaaaataaaatattatgtaaaatttgaattatatctatatatttttttatttttcaaaattatttttaataaaatataaattacatatttatgatgttattggatccactatctgttcgaccattgaaccgtgaaccgataactttttcagttcaataaccggttcgatttttaaaacattgaatttttgaaagaattaccttattatgtgattgtataaatttttaaaagattttaaaaattttgttaaacacttaattctttttttttttaaaaaaaacgctttcaaatattaataagtacttttaactctctcaaaattacttccaaacagatgctttgagtgagaaaaagatgaaattctttcaatgtgagtctttcatctatgattctaactcctttgtaaggctatctatatagcttaatggttcctcttcttaatggctatgcgactacgattcatgaccaaaggatcatattatacaagatctccaactatacttgatgagttgaatgatgcaaattggatataagatatagaggacatcaaatccatcggtggatatgtattcaaaatagaaagtggagttgtgtcatgaaagtcctcaaaacaaacaatattgctagatccttttatggaatatgaatttgtagctttggacaaaataggagaagtagaatagcttcacaattttctagaggatataccatgttggctaaaacctgtgcttgcaataagcataaattatgataatcaatgatctatgagaaggacacaaaataacatatacaatggtaagtcttagcatatatattgaagacacaatactataagacaattacttttaaatagagtaatttctattgattatatcaaatcaaagaacaaccttgtgaattctcttattaaaggtttgtcagaagatcaaattaactaattattgattaaagggaattagattatagtctatgaccaaagagttttcataataataacataacctacttgactaaaaatatcaagattaggttcaaagggacaattaacttataaatgactaagagaagcattagagagataatctctcttacctgttcttatgatatgaaatagtgttatttgtagcatgaactggtttaaactttgcttttgataaatcctatagctttgaaaaccaaatgaggtatgacacgatgctcttaataagaatcacatatttgagtgtgaatgaggctatttctatgacaattaaggttgaaattctattgagaacttgtaaaaccatgatttgtgcaattaaggctgaaattctcttactaactcaaaactaagatttgtgcattgccaaaatgaacacaaccatgagaatcaatgattttcaaaaatggttgtgtgaagattattgtcttaatttatatcaacaattgaacaattcaagatattacattcatttattaactagtaaatctaataatatttcactaataaaagtttaaagtcacaaatgatctattctaatgcaattactttccaagttgtactcttttaattactagcatgtcatttgcataaattaagtcaatttcttttcatgtaggggattgttggaaaaatggctttaagaacatgactcaaaaccatttagaggtgaatgaaagattgagcttaaggtaacatcactttaaaaaagatatatccttaaaaagatatgtctagcattttaagacacaagtcttccaacaaacatacttaatgtgtcaatctcccatagaaatgtctaatgtcttaaagatacaacctcactactagctaccatctatgactctaaataagggactccctcctcataaaatttctaattcattcaataatcctctcaattccctttccatttagtcactcatatttcaagtctaataagacatctttctagcattcaagtattagtcaaacattcattcaactaagtattcaagggagtacaaattataaagtgattcattgtttcttgtaatttggagtattgctattataagaaaatgattcattcaactacatttggagtacaaatgtagttgtgaccatagtttcaatacttttagtcatgcttttacatgtggcaacatctatcacatttctctatatcctctatggctatgccttgctacggtctcttttgtccgcacccaaatcttataatcgcattgaagcttccttttagccgaggttggtggttaagaccaaaaacctgccttctagcttgtagtgttagtaaacgtagaaatattaacatagttatttaaagtaaatatttcttttcaaagtgtcttttctcattttttttttttagagttttattcaaacacatatacaactatatttaagtgtaaaattctgtttgttgaaatagaaactgttgccgttgttctttttttttttttttgatcttttttaataaacaatttacttaaaagattcttattattagtctattctataatcttatctgctatcatcttattgaggtataacataatacaaagtttagtaaagtatgaggattagagtgtctcactcatcatatttgattgttgtatcttttcatatataatattcttcctagtattaatgtttgtgatacatatttaggttctgttgtaaggtgcaatttcttagatagtctaaggaacaatacacatgtgcttagtgaatccaatacattggaccctaaatgagttgattcaatttgggtgtgtttggtagatgagaatgggaatgaaaatatgataatagaatgaatgttgatcacaacatcatatagaggaaatgaatcgacatcctaataaatatgtattttgaattcatggtaataatttttttttaatttctattcccatttttaaaagaaatctaattatagatataataaaaaagatatggaatgaatttctcattctcattttctagttagggcttgataaacataaatggtcttatacattgtgatttaagcttttgaactaaattagtactttaatacaatatcaaacccttatttttagatgaagactataatcttattcacctaaatcctacaaatatccatcttttttttttttttttttgtgaaatccaagaagttgaatatgaaagggtaaaaatatcctcttcttcacacactcaaatactaaacttgctggtttccttctcatccctttctccttctcttcctttcctcctttcctctccctttcccttcttttcctctatcatttctcgtttcttcctttggcaactaattggcaaagcaaggtggggcaagtccactgtatataattgatccaacaaatgatgccttggtcccgcaatagctttcatccaccccatattattaaggggtgtaagtgataattgaaaaactgatagaatcaatccaactcaatcaaaatatatccaatcagttaggttttcaatcaccatataagggcattttggattaagaattgtagaaaccgatttaatgagtttggttttcagttaaccggaaaaaaccaaatcaaaccaatattctatgacttatatatttgttatgatttataacaatttgatgttagatgaattcttctatatttatttattactatgtatattttgtaagctttattggatttattcattgttattaggttatggttaaataaattttgaaataatatcattatattttgggctaaaaatttgaaatatatatatattttttgtttttttgtttttaaagtctaactcttaaacacagataatatgattgccttaaatacttaatttcgccttattcactggccgcagctttgccataaattaaaatcctctttgccatatatatcaccatactttactggcaatacttaaggatccatttagggcatcaaaaagtagcttttaggtgacatacaaaaaatatcgatgataaattacaaatggtagcatgaaaatggccggtcagacttgtcaaaagacggataaaggaaaggaggagaatcatgcatgcatgataaggcgaagggacttgcttttttggtgttctgcaaatggtttaagatgagacctcgtggtccatagaaataaacttaatttcttttttagaatgcaaaaccccacatggttatgttgtctgccaaggaagggtttgatggaatcaattaaagacccgcactaaaataaagcaaacccttttccttggcttgagtgtggacgagagaggggtatggccttttgtggtggagacaccatcctcatccccgtgtctgggcgccatatcctcatcctgatcactagtacaaatgtaggcatcaggtggaaaggcaaattaagttgatagagatgaggatgaaaatgcggccgccattgttgttgctcttaagcctcttatgcctcttatgcccatgcataccaaaaccaataattgaaatgcctgggccaattgcaaagccacactgtccagataaatgtgggaacatatcaattccttacccatttgggattggagatgtgaaatgcgccaaggatgacaagttccttctgcagtgcaacaatggccagccattgttacttggttcccttcctgttcgccatttatcgataaagggcaccgtgaatgttaccatgaagaccaaacggcaatgcttttctaatggagtatccgaggtaaacttttatggtggcattaagctggcaggcagcccattcacgttcttccacaatcg

SEQ ID NO: 11550 - DNA, 1897 bp, Vitis vinifera
  Intron number 8 from transcript GSVIVT01008152001 (locus G SVIVG01008152001) derived from phytozome v7.0 (chr-ID chr1 7; pos 5278674 to 5280570 reverse strand)
ccaggcggagaagttctagcacaccttgatcagaagttagtaatttctgtcaaagaatctttgcttaatctgaatattgcatacattgacaaccaagtttaccttaatgcttgatttcattgctgagattttttgaggaaagaacactggggatgttataagacacaattcaatctctacccataatgagatctcaaccttatgttcttttcaaagaaatccttataagtttttttaaataggtaataagagcttgtattagaaatgcctagaaacggcgaaaacaatacacacgaagtatacaaacaaatcgcccctgaaataattagacaaacagccattctttaaaatcaatccttataagtttatgagagcacaattttttttttcatcttttttcaaagaaagacactacaatcaaataaagcataaatacagctagtgcctgaatctatataaatagagaaatcctatgaaaatgtgattgggagtcaaggtccccctaaaatacaagaaggataatttagaaaattttgttaggtgtattttcttgacagaagtgtgttacatacattccattgctctccttttggataatgaactagtttttagatctggcctattttaggaaattttgtacatttgcagtatcggatagtaatgtgagtagcatacttattttttaagtaattacatactatgaaataaatgagaaagcagcatcccagaagtgaagttgggacaaatactcaaggaatcacacagaacctacttggctaaacaaagctattctagttttttggttggctaccctgtcaatctgttcgaacaatatggaatctgtctctcagcagattgattgcaagggtctcagttgctgtagaaatgtgtcttcaaggaaaacataacatgcattccaatcgattcttcttttctgctttcgaggagcattatcatttattatataaactttaactgctagagcatctccttccccttcaaaaaaagagttgtagagaacaagaagcatacatgaaatgattcaaaccatctccccaactgtgtttactgaacttgttttccttaatcaaattctggtaagttcactcacctcttttgaattcctataagaaaaactgccatattctgtgaacacatttgtttttaatgatcaccagtctagatttttgtagttttcatctgcaaccaaaagccttatgaggaaaaaggaaaaccaatagaaaaaattcattcccaaggcaactgtgagtttgagttttctagtaccgtaactccattgatgagagggtataaaattttctgtaactaaggaaagctgctttattacttttaaatgggtatcacatttttgtacaatggggtgggcataaatgcctcttggaccggtgagtgtttgccccttttgtttcctgtttttaggtgatgcttgtatactccctatatgctctgggtcgcctttcaagcaccctttatctaatatatccttgtgtgtttatctatcaaaaaaaaaataaaaatgcctcttggaccatatcctgcaacctcttctcccaaatacctgtagataatccacactgaggatgtgaacagttccaacttactgaaagataggcttcccaggtcccaggattggtataaagattgcaagttatcatgatcctatttatcccacaggtttaagaacgatctttcactatgaccaagttctaacattttagtttttgggtttttggggtttttgtggttgggttgggagacaatgattggttgtttttgtttttgatataggttctttttttatcagttttcgtgtgttctctcacagatattgccaatcttattggtgagtgcaggagtttcaaaagctggcagaaaa

SEQ ID NO: 11551 - DNA, 37571 bp, Vitis vinifera
  Intron number 1 from transcript GSVIVT01010721001 (locus G SVIVG01010721001) derived from phytozome v7.0 (chr-ID chr1 3; pos 12753369 to 12790939 reverse strand)
cctgaaaggatataaggttggaaagagaatcttgtgtgattataaacaataagactagtcctcaaatcaagaacgggtactaggccaaattacttataaggaaggtacgacaaattgtcagacatcctccctttaagcttataagtggagggcattatgacattttactaattaataaatgagtatggtcaattaattaataagaaatataacgtgaaatatatatgatggttaaagcatttaggataaaagaatgagaaaatacatgagtgttaagtatatttttatttgcatgcctaaattattacttttaggttcctcaaaatagtcattttatccttacataatttttggaacaaatgccaattattaactgaaaatatcaaaagaatccatttttatgctaatttctttttttctttttctttttttttaaaaaaaatcctattgaaatttacaaattataattttatgtctacattatttaagaaaacttcaaccaatgacaattttacccctaaatttattttaaaacaaatctcaattatttattttaacaatgcgaaaaaaaattgtcctaatttattttaagaaaattttcagtagatatgaaactctattttctctgcattaaccatttcctctattttctctacattaaccatttcctaaggagatgcaattttgtaggagttatgatgccaactcatcttggtagttgttagcaacttgtaacttcaactataaacgagattttctctcttttgagttttattgcaattttcattttccttttctaacttacaaaacatatagtgttggatgattcttctctccatgagtggctaggcattcctttagattcaatagtgttgtgtggatagtgttgtgtggattcattatataaactacaagataatttgagttaaaattatgacttaattgagtaaattgacaattagaatgatgaattatatcttaagggtatgtatgatgctctctaccgtccaacatgactcacgttgagacagtagccgtgtaacactatccgtccaccccaaggtgcatatagacgcaaactattcgggcactatacattcccgcctgtcaagcatttagtatgtctgatattaagtgcattgattgttgcaaccgttactaagcataaaacattagacttcaaggctcatcaaggtgcaacaatcgttacgagccgacaatcattggcattaatgacaataaaagcgcaatcaaaggcataattaaggcaggtctattgccacttttctaaaaaatcttttgctcaagtcttccacatttgacttaagctttagaggggtgtatttggaaaacccatccgaacattcctttgtgtaggtgcaatcatcgcctatgtcacgtggaggctagttggatacctcattgttggttctacaccaatcgggtagatgacaacctagacttaaactaaatctaacattggtttagggagatttttagctctttccctattttgatgaacaatatattgaatttaagatttatctccaccaataagaaccaattgttttattgaattcaaatccaatataattttgaattgattatttcttcttaaaatttcagttattgtttgactcaaattcactcttaattttttaaaaatggttatttttcattattcactcaattgcaactttatcagctttattctatccacttttcagcttaaattataaaatacactatcattggggacaatacttgatccactcattggagtgtagcttacttgctatatttgattaggccaagtgctatactctttgagtaaggttcatttctcttgttagaagaagtacaagactaatccaattagctggtgataattaaatagtagcaaacttttgtttttaggaaatggtgatcactttgttggggtgcaacattactcttaagtttggggatggattacccaaatgatggctcttagaagaggctcacaaggtgtgatgtcaaatgctataaaaaatttgacctacctttattgaacaccaattgattttcaaataagatggtcaaagccaatactacacacttttattatattcaatcataatcatatggtaaaaatagtagtaaaaaaggtgatttgtgtgtcactatctttttttttttttttttctagtgaggacaaccttattatttgtttattatttttaaatttttgaaaaccccttacaaggaattttgttttttaattttattgcccatagtcaaccaacatttgctctaggagtgtacccaacaatatggggttaagaggcaaaatgaattattttggaccttgtaaaaggaatctaccctttgatattcatctcatgttgaggtacacaaaaggaaaaattaccaaatctcatgggaggaggatgttatctgcgtagttgtaaaaaataaacaacaataagaggaataaatcaagaataaaatatcttgaataagaaacagatttcaaagtatattttgcataactttgaattaaaatgaggtatcccctacttaggtattattgtctaacaattgtgactattgcacatcacttatgagtcatactaacttggcaaataaggatcaacctagcataacataaaaaccaaaatccaacctatcatttctcaagttaggcccctatattacatccaaataggaatgtttggtgtgcaactatagaataaggatgatattattgacccacatttttcacttttttccccacttaacgacaagactcacgttttagtaaaaactattttttataaaagttggagttgctacttatttatgtttatctttaaaagaaaaaaaaccctaaaaataactccttgtttggaaaaacatgtctttaaaaatcaagttcaagtctaagggttaggttttcaggaaggtaccttaaggtaacacccctctaagccctaaaacaggtttctactaatcaagttaaggtgattatgacaattgatttgtaaattaattgatacctaatagagggatatacaacaagtcaatgatatgagcataattaagagtcattccaacaagccatatgcattcaaagaatcaataatcaaggaaaggaaagagtgtaccttaatatcatgttaagtgctttcataaaacaatagtattagttcacaagcaatataacatgacaaatgtcctataatacacaacatgcatttcacccacattaagaaacaaagaaataataatatataaacaaaatcaaagcaagatgtaacaatcatgcgaacaaaacatgcatattaatagaaacaagtagataagaaaaagaggaagcataccttgatagcatatagaacgctttcataaaacaataacttacaaataataatgatggatataaaattataggtcaaactccataacatatataacatatctcaaatgatgaattaaaaagatgacaaaggatgaacaaaaggaaacaagatacaataaatatgtttgaaaatttagaattagctaatatgtattcactcacaaaaattagcctaaataaaatactaaatgaaattttttttatccaaagaaaggttcaattaacatctacaatgtgaatcaacaatcaaaacagctcataagcatgcacaagggggatcaaatcataaataaaaaaaaaacaaaaaaaacaaaaaacaaaaaaaaaacatacaaaatgtcatcaacaaggcaaaacaggggtatttgcaaaataaatcctaaataaatacctagaggtgtatttcatcaaaataaaaaaatggtgaacatcttcaatatatctagatcacaatagaaaagtccaaattatcaaattaagagttaattagtaccagattaaatcacaataaggacaccatacaaaacaatccgcatatgattagacaaagatatttacaaaataaatcctaaaaaatatctaaaaatggaatttcttcatcaaaaaattggaatacattttcaatgtgtctagattataatctaaaaggtgaaattatttaattatgtctcatttaatactagatttaatcacaatcacattggtaaaaaataaaacaaatataaaaaaatactaaaatgaatttatttgactaacctaaaagcaaggtaaaatcaattaaaaatacattcaatgtctattttacaagaaaaataacatgattaaattgcataagaaacatatttaaattaagccaatcaatccctacctacttaatggggttgatgtaataggtgtaagaaaaagaatttttttctccttgttgaggaattggttttcaatgaaacaagatcctaaaattggctttaagaagtaagattaagagaaaaatatcaacaagaattaagaaagtcaagaaataatttaatttgaaaaaatctatttgggtgtccagaatagggttaaaattagacttgtgtaaaaaaccgatttatatctatctctcaattgaacaatgattttgagcccaaattaaatttttttttgacaagcttggaaagttgggaacatcatacaatcatcaaaataattttaaaagaactctaagtcccttgattctaattttccacttgaaaggtcaatgagtcgagcaaagtgatagtaggcttttatttagaagaactgaatgtatgttgggcttcaccaaggtccaaattaatgtccacaaatttaatctacgtttctcaatcatccataatcatgatggagcttatgaagaccaagaattactccattatttggagccatgaattttattcatgtaagaacaacgaaaaatcaacaaaaatcaatgagaaaagtacatagcgattgaaacataattgcatgtttttaaaataattttttataatctagagatctaaggtgaatttggaaaatagagaatcaagtttttatagaaaaacatttgagaaatattttaaaataattgattcagataaaagctcaagttgaggacaagataacaaaactcatgggaagaaaaggtgtgtgaactaagtgtgaccattctatggtaatcttaatggtgtgtgtgtgtgtgtgtgtatgtgtatgtgtatgtgtgaatataagaatggtagtagctaaacctaatcttaaacatcttaaaaaaacaatccaacaaaatagaattagaagctaagatatcaaatggtataaggcctcatctcatgtgatatcaaagagactcaatttaagtgaaaaaaaattaagaaaaataatgagtgaaataaatcatatgcataaacaatcaaccatcctcaacaattatccactaatgtgatattaaccattaacatcatagttgcacattgattcgtgcccaattagtgtgccagctgattcgtgtccagctgatgctccttgaatgagggagtaatcaacaaaatttataacctataacaccatatactaaggtagcaaagaaaaagctactatagcatagtggctctaggatcgttcactgggaaggattaacaagctatcaatgataccaattccaagtgaattggtcttgtttcatttcaaggttagcttaagaaataaaacacaaactttgattggtgaagatttagacttaaactaactaacacaataagtaatgggaataacttaggaagaaaaacattccttggagagttaggttcactggggtggttcctcatgcaaaagacatagctccagttagatggttcttttcctcgtgttagagattcaacatatagtcaattctctaaccggtgttgtacagatacatccttcaattagatttcactttaattctctcactgatgcaacttgcaatggtttaagcctctcactaagccttaatcgttcaaggtgatctttaaccttggattacccgtcaaaagctcgcaagagataactaatggatgtctccttggagtccaaaagcttaccaagtgttggctattctagaaaatcctaccctaaagtcacctcccagaggctcgcaaggggtaaactagtgcatttccatggttggaaatcacttgccttaccaagtgttggcccaggtgactctaaggtgttttaagttaactaaaaacataaaaatcactaaaggatttcacttcctcttcattacttgctaaaaccacaaagctttgcattcttgcacttggaaccttccccggcaaccttagctccaaggaattagaggtttagttactcattctctggggaaaactcctcagagagttcataacttagtaagaaaataaaaatacaaagtgagaaggtaaggcaatacaaagaactgaactttacttgcttacccaaaacttttcaaaaagatctcctctctgagaacaggctctcgagaggtatttatatgaacataatataaaactaattattacatagatattttctcttttttactaacttaaaagctaaggaatcttgtaattggtggcttataaggagtattttgggatttagacaacaaaaatctgatgtaaaatatctcccaatgtcggtagcaaatatcggggtgcttcaggaaccatttcacaagagaaaatggtgtctgcgagatttcgcaaacactcaagagggctgcgaaatcacttcgcaacaacatgctatcttcgcagggctgcgaagttggcttccaccttgaggttctcagcttccagcttgcggcatatatcgggcaacttcagaaggaaatacaccctactgtacaaaaaggctgtggaatcacttcgcaacaaaatggtgattttgcagcaccttgcaaaatgcttccttcagctcggagtgattggcttgcaatggctgcaacttcttcgtttcaactccaaattgcgcaccgtttgaagcattggattgttgacttcctaagatttgaaatggtatatagcatgcatcaattggacctcagaaagtgctccaaaagtggctgctacgactgtcatcaagaatatgcttcatggcagattctctttactttttctccttgcattccggatttactcttggcaaatgacttctaagctttgcccaagattcctcataattctcctcattcttgacttgctttggtgatcaaaatactaacaaaaacaccaaaacttacacaaagtgattaaaattgctttcaagggtccttaacatgccaattgagttaaaaggccaaaactactactcaaaagtgtttaaaaggattaattataagctatcaaatagcactttttgagtagtaatcactccccccaaccgacatattgctagtcccttagcaatataggagagaaaaaaagaaaaaaaatgaaaataaatagcaaactaacctatattgtacaacatcatgctgaaagaaaaaaataattctcaagtggcatgatgatctaattctcccatgaagcattaaagaaataaaaatccaaatttcaacaagagttataacaaactatgctaaacactgtcaaacaagggagtgcattatgcaaactgaagttttaaaatcatttctactttcaaagaaccaaactttattcttccacaaaaatctatgtgtattggttccttagcttccgagaataatatgctaaactaatctttccccccaacctatctcttttcaacacctagcaaattgaccaaaatcaataaagaaagaacacaccttttttttttttttttttaaggaggctttatggggtactctttctgacttgtccatgtaatgggggtccatcgatgactcccaaccaattaaggtttagggcaccaagctttaaggatcttccaaccactaactcctcggatttttccccagacttttgagaatgaatttctaatacccatgcacctaccatatgctaactctacctatccacccttataacgagcattgaggtcggtgactcccaaccaattaaggcttagggcaccaggctttaaagattttcaccatatacctctcaaaccttgctcggatttcaaggcaaacaaacaactttctttatttcaaaggctcattggccttttgcagggtgtttcaattttatcaaatgaggtcaaatataccaagtcccaaaattatcctaagtcaagagggaaataacttttcatcttataatcggaatctaatgtgcacagtgtgtgaatagcttaaagtggaagaactaaattcaatttcaatagaagcttcaacaattgaaccactttagtgagcataatccatactctaagtcaagtgaaaaacaacagttcaatttctcttggtttaatttgaaaatttttcctcaaaattcatggagaatagagtaaaaagtgtaaaaagcaaaaattacaactaatttaccaaaataattacattaccaaaaagatttagcatacttccttcctcattccccccaaccgaactgagcattgtcctcaatgtgatatgagtgactgtaattaaagggaggaagtggtacctcctggctgatatcaaattcgaatattgattggggaaaccacatgtttcaaaaagaatagaatatttgagaaaaggaaataaggataacttaatgctaactgttaacaagaaatattaaacttgtattactttaaatgcagttgagtacaatgcaaaagaaaagtaatacaagcaatcccaattatagtaccaaaataatgggatttctttccaactaaaaaaaacgaaatacataaaacaaaaatagtagatatatgatagtctgatgagtgggtggtgctggggctaggcagatgggtctgcctcttcagtaggtgcttcaattggggcttggggctctggaggatgagagtgtggctctgctggagtagaagtggagggctcaacagctggtggcagatcgaaatgaagctggagctgccttaagatgacagcttgttgagcctgagtggccaacatctgctcttggcatgctctaatggctgccatatcttgagcaagattgctctgagaagttgtgagagtctccaatgcacgacacaactctcgatattcagatataggaatgaccatcctcggttcagctgaagtggatggctgagatgaagctggtgcagctggtggagctctaggaatggcaggagcagcaactgttataccctcaggtatgtgtcgtggggatgctctccttgcagcaggctgaggctgctcaggctgatcaactttgtaagctgtcatgttgttccatttgtcaagagtaaaaagctcacggcaaatgcgctttctctccagctgaggcttagaaggatatcccaagcgctctagaatttggcataacagccttggaaagaggaggggaatgcaatcagctctctgaagcttctttttgtgaaccttctcttcgaaatagagaagggctgccagaatcagatgatgagacccaaagaaaaatccttcagacatcttgtacagggcttctaagaggactccccttctttgagtccaatgctgcaatgggtagaggttatgacgcaaaaatgcatcaatcaaaaacataattggaggaagctcccccctcaatagatgtgatcgattggcagcttctctggatagggtgcgcaccatctccagctcagtaggattggtccaagctctaaaattatcgaattgggttggctcatagggaatttgcaaggcttcagctatatggcgtgctcccaatatgccatgcctcccatcaatagtgaaatgaattaaagttggatctctgacctgtttggttgtcgtggattgatagaaatccatgacaacccgggggtataaaaagtctctcggagctagcagatgctccatatggtaccttctcagcaggttgaatgtctgtgtaagctccggcctcactctgaatgccgctatgttaaagcatagctcggaatggaatggccgagttctacagtccaaatttccctcaattgggggctgaggtagcattggccgcctgattacttcttccagagctgtttcggatggaatttggggcttgggaagtggcgcttgaggctcctgagatttttcttgcggcgccggagatggcaccggcgacagaattggcatgggaatcgacgagggaactggagttggaaccagtgatggaattggtgaaggctctggagattgctccgtcaaatcgatgggttctgagctctacaccctgggtctcttttgcagtggccgaccccctaacctggtaaggtaacgtttcgccggaggttttggcagcgctggcttcactggaggaggaattgctttcggctgcggagggtcatgaataggatctggaactgactcctttcgcaagcttctcttgcggtttgaaggggaggaagacttggcccctttggttcgtgccatttcgggttgccgaaagttggccggaacggatggtcggagaaaatgactggaggcttgcgtagtgaggctcgaggaaggagatggacggtttgcgagaatggggtgctctgattttgaaacccttttcgcagctcaaatgaccggtataaataggaataacggaagactaagggtcagtttgagtttcgcagcaaaatgccaatttcgcagcaaaatgctattttcacagcaacttcgcaatgcatttcacagctgcgaaattaatgtcactgtgctgcgaagtggcacacgtgtgccaaaatcgcttttgcaatttcgaaataccctgcggaatgagacttttgttgcgaaatctgggctttaccacttcgcaatgcgtttcgcagctgccaaatgagggctcctgtgctgcgaagtggcactcgtgtgccaaaatcgccttcgcagctgcaaaaattctcgcagagaacaccaaagtgttgcggaatggtttggcaacaaaatgctcatttcgcagaagttttcttcagcctgcgaaatttcgcggagctttgtttttcctctgtttttgctccgatttcttcccgatttttttctttcaatttccttgaaatttattccacctgagatcattcaaaaagattaaaacacacctaaaaacatgatttaagatcaaaaactaagatcaaatgtatggaaaaaaaacttgaaaatttacaaaatttacaaaaattttggactgtggtaaaaccacgtctagcaaacccttctttgcttagactttttgaggctcaaggaggttgattgcctccttttctggtttgaatggctccatgaatggcttgagacgatatccattgactttgaaggtgtccttgccatttgaattcaataattccaccactccattggaacatactcggtgaataatgaacgggcctatccaccttgacttgagcttcccaggaaagatatggagtcttgtgtcatacagtaaaactctttgcccttcctgaaattccttgttggagatgagttggtcatgccacttcttcatcctctgttttgcaactttggaattgatataagcattatttcttaattcctccatctcattaaggtctagatatctcttttctccggccctgatcaagtccatgttcagcttctttattgcccaccaagctttgtattcaatttccacagggagatggcatgctttgccatagacaagacgataaggagacatcccaagaatagtcttataagctgttctatatgcccacaatgaatcatgaagcctaatagaccaatcctttctgctggaattcaccactttcatcaatatgttctttatttccctgttagctagctcaacttgcccggaagtttgaggatgataaggtgtagccaccttatgcttcactccatacttggataacagagcttcaaaaggtttgttgcaaaaatgagcacctcatcactgattatggctttgggcaccccaaatcttgagaaaatgttctctttaagaaacttgagaaccaccctgtgatcattttgtttacaggggattgcctcaacccatttagaaacataatccacccccaccaggatgtaagaattaccaaaagacattgggaaaggtcccatgaagtcaatgccccatacatcaaatagctcaactattagaatggggttcataggcatttgatttctttttgtcagctttccaagcctttggcatctgtcacaacttctacacatgatgtgggcatctttgaaaagagatggccaggtaaaccctgattgcaacaccttcatagctgttttctgagaggcaaagtggcctccacatgcattctcatgacaatgatataaaatcccttgctgctcatcttcagggacacatttccttatgatccgatctgcacaatacttaaaaagaaagggttcttcccaataataagcatgaatttttgcaaaaaagtgcttcctgtcctgtgcattccactcacttggaatttcaccagttactaaataattagcaatatgagcataccaaggagttttcactaggaacatgagtgattcttcaggaaaatcatcattaataggcaagggatgggaattatgtgctataactaacctcgaaaggtggtcagctactacattctccactcatttcttatctttgatttgaagatcgaattcttgtaacaaaagaatccatctaattaaccttgcttttgcatcttgctttgtcaataaatacttcaaggctgaatggtcagtgaagacaatgatgaaagaccccactaaataagcacgaaatttgtccaaagcaaataccacaactaacaattctttctttgtagttgtgtagttcctttgagcttcattcagtgttttgcttgcatagtaaatcacatagggcttcccattttctctttggccaagcacaactcctatagcaaagtcactggcatcacacatcagttcaaaaggtaattgccaattaggggctctcactattggagttgttgttaaaaatttcttcagtagatcaaagctattttgacacctttcatcccatataaacttagcatccttagctaacagctcacaaagaggttttgaaagacttgaaaaaccttttataaaccgcctatagaaccttgcatggccaaggaactgccttactccttttacagttgttggggatggtaatttgacaataagctccacctttgctttatcaacttcaatgcctttttcagagatgatatggccaaggacaattccttgacgtaccataaaatggcatttctcccagttgagcaccaggtctttttcaatgcatctgtgaagaactgcttccaaattaactaagcattcctcaaatgtacctccatatacggtgatgtcatccatgaaaacctccataattcgctccaccatatcaccgaaaatactcaacatacatctttgaaatgtagcaggtgcattgcataaaccaaaaggcattctcctataagcatatgttccaaatggacatgtaaaagtggtcttttcttgatctgccaaatcaatttcaatctgaaaataccctgaatacccatccaagaaacaatagaatggatgtccagagactctctccagcacttggtcaataaatggcaatggaaaatgatatttcctggttacagcattcagcattctataatcaatacacaccctccaacttgaagtgaggcgtgtagtaacttcttctcctttttcattctgaaccactgtgatccctgacttctttggtaccacttgagtaggactcacccaagggctatcagatatagggtaaatgattcctgcttgaagtagcttcagcacctcagctcgcaccacctcttgtaaatgaggattcaatcttctttgaagtcgacgaattggctttgcttcctcctccatatatatatgatgagtacaaactaaaggactaatgcctttcaagtcggatatttgccatcctattgccttcttacacctcttgagaacttccattaaacaattctcttgatgactggtcagagatgaagatatcacaacaggacattgattattttcttcaagatatgtatatttcatctccacaggtagaggcttcagattgagttttggagtttcttttttagtagttgcctcttcttcttcattgaacaaaggtagaatctcttctatttttctccaactttgtagagtagcaagcatagtaggagattcagacaagccttcctcaaaatccacaagactttcattcaacttgtcttgcatattttgattacagtgctcctccaccaaagtatcaataatgcacagctcttctggaccttcttcttcttccggagtgatttgctttttatacatatagaaaatatttagatccagtgtcatgttgccaaaagtgagttgcatcagcccattcctgcagttgatgattgcatttgaagtagcaagaaatggccttccatggatgataggaactaaattagcttcctttacagtaggatctgtatcaaaaacaataaaatctactggatagtagaaattatccacttgaaccaatacatcctcaattacccctcttggaattttcactgatctatctgctagagatagagtgattgctgttggcttcaactttccaagccccaattgcttgtagacggaatatggaagaaaattcacacttgctcccaagtctaacaaagctttctccactacctttcctccaatcatgactgaaatggtaggacttcccgggtctttgtacttcaaaggagacttacattgtaagattgcacttacttgcttagtcaagaaggctttcttatttacagtcaaccctcttttgatagtacataagtccttaaggaattttgcatacgttggaacttgtttaatcatatccagcaatggaatattgactttcacttgtctcaatacttcaaggatttcagctgcatttctaatcccctttttcccatgtaatgcttgaggaaaaggaggagaagttgatttcttcagcatttcttccttcataagttccttctctggaattgcattcattgttgaatcagagtccttcttttcttcactgatctcactctctttatcttccatttccttccctttctttatctcttcttctttctcaacatgtggcttgggtgttggctgctcaatttttttaccactccttagagtgatcaaggctttgacctcttttgtctgcgatgattctccctcttggctttccacttcatggacacctttgggattttggtgaggttgagaaggaaatcttcccttttcttgcagtgtattcaaatttgtaagccttgaaattgaatattggatgttatcaaacttttagttcatatcattttgcattccatccatccttttattcaacatactctccactctattgattctttaatagatttgagcatttgttgcttcttgctttccaacaaaatctcccactaccttgctgagattagccattgcttgttcaagacttgaagattgttgagatggtggatccggctgttggtattgagttgctctggccttccatgagaaatttggatgattcctccaacttgagttgtaggtatttccataaggcgcattgttattgggcctgaattgtccaacaacatttgcttgatctctaaacatctccctttcagctgaaattgcagggcattcctccaccaaatgttcatatgattgacaattgggacacagcttcacttgcactggtgcttcagcaacaacttgcacatcatgaattcttttcagctccagctcctccaatcttcttgtcatagctgccaactttactttcatatcatcatcttctttcaaggtatacatcccagcctttgcattgtaagcattcaactgagacttcatctttcccacttctcctttggttggttcatcccatccccttgaaacatcagctacatagctcaagaaatccatagcttcctctggatttttgctcatgaaatctcctccacacattgtctcgaggagttgcttcattgaggaggacataccatcattaaaatagctcaccaatagccaagtatcaaagccatggtgagggcaagcatttatagcttccatgtatctttcccaacactcatagaatttttcattctctttagctgagaagtttgaaatttgccttttcaagccatttgttctatgagtgggaaaaaatttcttgaggaattcagcttgtaagtcaatccaagaacggatactccttggccttaaagaattaagccaaattttgaagctcatcaaatcaattgaagctccaccctcttggaatgtattacaaacatcttcaaattccttgatgtgtgcatacggattctcactttccatcccatggaaagttggtagaagtggaacaagatacggtctgatcactagctgctctgtagggggcactatgcatgatggtgcactcatacgaggtggatgcatgcggtccctcattgatctgaattcattgagattgtcttgacgaccttggtgactatgctgatcttcaggtgtagcttccatgatattcaagctcaattcgaattctcttctctgaggtgtatcacacttaacaagccttcctccactgtctcgtatccactttgacatacacaactagtatctctctgcaacttaaatgaaaataaaggacaacaaaaggaaaacagggctacaacaacaaaattaaactaggctaaattttaaaatataaacttagattatgaataaataaagaaagaatgagaattagtaaagtgaaagaaacgttaccaacttgtgatgaaaatcacaagtgctcaaaaatggtatcactataaatttgacaccttccccggcaacggcgccatttgattcgtgcccaattggtgtgccagctgattcgtgtccagctggtgctccttgaatgagggagtaatcaacaaaatttataacctataacaccatatactagggtagcaaagaaaaagctactatagcatagtggctctaggatcgttcactgggaaggattaacaagctatcaatgataccaattccaagtgaattggtcttgtttcatttcaaggttagcttaagaaataaaacacaaactttgattggtgaagatttagacttaaactaactaacacaataagtaatgggaataacttaggaagaaaaacattccttggagagttaggttcactggggtggttcctcatgcaaaagacatagctccggttagatggttcttttcctcgtgttagagattcaacatatagtcaattctctaaccggtgttgtacagatacatccttcaattagatttcactttaattctctcactgatgcagcttgcaatggtttaagcctctcactaagccttaaccgttcaaggtgatctttaaccttggattacccgtcaaaagctcgcaagagataactaatggatgtctccttggagttcaaaagcttaccaagtgttggctattctagaaaatcctaccctaaagtcacctcccagaggctcgcaaggggtaaactagtgcatttccatggttggaaatcacttgccttaccaagtgttggcccaggtgactctaaggtgttttaagttaactaaaaacatagaaatcactaaaggatttcatttcctcttcattacttgctaaaaccacaaagctttgcattcttgcacttggaaccttccccgacaaccttagctccaaggaattagaggtttagttactcattctctggggaaaactcctcagagagttcataacttagtaagaaaataaaaatacaaagtgagaaggtaaggcaatacaaagaactgaactttatttgcttacccaaaacttttcaaaaagatctcctctctgagaacaggctcccgagaggtatttatatgaacataatataaaactaattattacatagatattttctcttttttactaacttaaaagctaaggaatcttgtaattggtggcttacaaggagtattttgggattttgacaacaaaaatctgatgtaaaatatctcccaatgtcggtagcaaatatcggggtgcttcaggaaccatttcgcaagagaaaatggtgtctacgagatttcgcagacacttaagagggctgcgaaatcacttcgcaacaacatgctatcttcgcagggctgtgaagttggcttccaccttaaggttctcagcttccagcttgaggcatatatcgggcaacttcagaaggaaatacaccctactgtacaaaaaggctgcggaatcacttcgcaacaaaatggtgattttgcagcaccttgcaaaatgcttccttcaactcggagtgattggcttgcaatggctgcaacttcttcgtttcaactccaaattgcgcaccgtttgaagcattggatttttgacttcctgagatttgaaatggtatatagcatgcatcaattggacctcagcaagtgctccaaaagtggctgctacgactatcatcaagaatatgcttcatggcagattctctttactttttctccttgcattccggatttactcttggcaaatgacttctaagctttgcccaagattcctcataattctccttattcttgacttgctttggtgatcaaaatactaacaaaaacaccaaaacttacacaaagtgattaaaattgctttcaagggtccttaacatgccaattgagttaaaaggccaaaactactactcaaaagtgtttaaaaggattaattataagctatcaaatagcactttttgagtagtaatcacacattattctacattctcatattattgattttaaaaattcaaatacaaaacactaacactcattcaaaaatcgactgcattattgttctttattattttttattttaaaattcaaacctcaagccattaacatgattccattcacatggctgcaacattcatttaaaaaaattaaacatcaaggccaccaatatacataaattgcccatacatttttcttatttgatttttttttatttgaagaaaaaaccattaacacacacatagattgaccatacatgaatctcattttatttttttattcaagcaacaaaccattaaaacatacataaatgaccacatgattctcatatacttatttcgttgattttaattcaaacaagagcctttaacatcaacactcaataatcagtgatatatcatcccacattccactttatttttcattcaaacaaaagtcattaacatcaacatggtcaattgcatattcatgttcactatctcattttttattcttaaacctcaagccactaacatttcaaatagttgactacatattcatatttactatctcatttttttttattcaaacccaagcattgacatccataaacacaacaatatgatttcattcttcatattttaaaattcaaactcaagtagtaacattctctcatagtcggcaacatgatttcattctttatattttaaaattcaacaacattaatacattctctcataatcgacaacattcaatccacattcatttgattttaaatttcaaacaaacacaagccattaacattctcacacaattggacataatttccataatacattgacatttttaaattcaacaaacaaaagtcattaacacttctcacaatcaaccatattattataatccatttgatttttaagttcaacaaacacaagctattagcactaacatggttggccataatctttataatatattgatctttttaattcaaataatattaaagaccacttatcttttctcacaactacacctcttatttatggattcaagtggttgtctctatcttctcataacttcaagcactaattccttctttgaattcatcacagctgcaaccatgaagaattgaacactctcccctccctcaaaattctctcaaagtttctctactctcaaagctctctctcaaatttttctctccaaacttttcctaaaaaaatccaaaagccctagagaaatccttaagtttcccttttatagttatccccttaagtcttcaaaattttgaagatttctaaattttccaattcactcaaaattccctccaaaaaatattctcatcctagagacttctaagttctccaattcactctccctctaaaaaaaaatcatattatgtcatgcactcaaaagacaaaataagaattaaaaaaaacacatgcatccagtccctcaaaattaatcatgtactaaaatattaaaaaattaatcatgcaatcacaaatcaaaaatcaattatgaactcaaaattaaagccatatgcaatcacaatcaataatcaaacatgaactcaaaattaaaatcaagtatacatttcaaatcaagattcaaaaattaaaatcactcttgcactaaaaatatcaaaaatcaatctcatgcactcatagtatcaaaagtcaatctcatgcactcaaaatatcaaaaatcaatcacatactcaacatcaaaatcaatcacatactaaaaatcaaacatgcactaaaaatataaaaaatcactcatgcactcagaataaaaatcaatcacacacaaaatcaaataacaagttaaagttcatctaacctaaaaccatgcaataagaatcaaaatcaaacctaatgcactaaaaggacaaaaactgaacaaaaaaaaaaaaaaaaaagacttatagaaaacagactcctaaataaaaacttgagccactaaaaaatcatactagggatccatgtaatccctccaagatatatctctaaaagaggtccaaaattagtgataatatgaataacagtgaaccactaatggagtcacaataaaagtttagaaatggattgtaagtgtgcactaagggaatataagatgaaggaaggcaaacactagataatatatgccaagaggacaaaatgaagggtttatagacatgtacatcatagataaaatatttaggaacaaacctccatgttctagtagtgacttgtattatagactatataaaggaaattcaaaaggtgaaagaatataaaacaacattttttgtactcttggaatttttgtctcttaaattaacttaatgtatgttgtttataggaaaataatgagaaattatgtcacagtaaggagatttggcaaaggttaggagtaccaagctaactagagagaaaagtatattaaaaggctatcaagcataatcagagtggcaacaaaaccaatttaattagaaacttcaggccttgatctagcaaaatgaaattttgactataaacaataaggtactaccagaataagttcattttcaataatatccatttcttaccttattaactatgatgactcatcatctagcatcgtgttctcaatgtggagactcttttccttccttagagaaggagaagttgtttagaaatgggataacttggttacttaattaaagaggtatcttacaaatgcaacttaatcagttgaagactagagtggactataagagaagaaagacttcttttcacctggttgatataatagtctaatgattgttgaactctctactttctttcaaaatcctagatgttgagctacccaagggatttgtcttccctaaatttcaaaactatgatggcttagggcacttggtgaatcatctcatgcattatcatcaactaatgagacttgtgtaaggaaatgaccctttgatgtgcaatttcccttccaatctttagtttacattagattggtttcacaatctattgagaggatccatttcaatttttttagaacttcacactatatttgtctcttggtgcatgtgctcttcgcaatatggacctacttttcaatattagaatgaatatgagggagaaactttaaaagaatatgtatgacattttttagcatactagtgaaagtagaagcttatgatgatgtcataacttgaattgacttcaagcatagtctacctcctaactatgatttgtatgaattattgaacaagaagaagcttgcaagtatggaagagttcttctctaagttttacaaacatgacaacttagatgaatttcctactatgtaattatgataagaatgacctaattgcttgttgggtcactaatgtgccatattgattatttgtcttagcttttttttaggttgtcttgattcaatgacttgacaatctatattttaagcttagcaataccgaattaatcgagtaaaaatttgttaagcttgtagaaagatgagtccagtatcattctaaaaggttgatgaaataaaatttcatcaacaagcatctatggccttttcattgtaaaaatgcactaaaaagtgtcaatgcataaatagttatcaaaaaagttaaaagagaaaaaaatcatcatgagaaaggaaccaactatagttggttatatacagttgacaagacaggattattataaggtgaacaaaaaagaatgtgtgataagtatccaaagggaatttacacaccctgtttcaatcaacttaagaaaaacaaaagactaatggatcgtgttaacttgtgacatagaaagttatcctacataagggatgtacaaagaaggtagtttcatgattgatgcaaagtgaagtcaatatcatacttcagttgacatcttgatttcctccatggtctcactacttgctagtgcccttagtagtagcctcatccgattcttctccttccaccactttcttagaaactaccaacttgttctcgacctaatgcctcttgaagcaacgatgacataattatgaaaaattgcctttgagtgaaagctttacatgtgtaatgcaagagtatgaaagtatcaaaattaccattacaatctatacatatgtcattctattgaaaaaagaggggtagttttgtatcttttactttgtagtgattagtcttcaacaattctaactattgtccaacaactatgaccaatactaacttagggaataagaattgacctggcacaaccaaggagccaacaacatgactggctatttcttaaggtgactccctttggtgtgtccaaatagggaatattaggtgtgcaactataagataggaaaaacatgtgactcatacatagaatatttagggaaaaaaaaacctccatgttctaatcatggattttattatagtcaatataaagaaaattcaaaagtagaaagcacatatgatattaacaatatttttgtatcattaaaattatatggtgtgtttgggaacattttcaaaaaatgttttaaaaaaataatttttgagaatagttttcaaaaacaattttctatttttttttttagaggaaaagttgtctcaatttattttatgtttttattcaaatattttataaaaaataaattttatctattatgttttattttcaattatcctccatgaatctacaattgttttttaaaaaccattccaaaaaaaggtgaaaacaatataaaacaactaaattatattataaaaatatgtttatttttaataattctcaaaaatctattcttgaaaaccattaataactaaacatttttatttttcatttaaaaaaaaaaaaaaaacaactcctgaggacaattgccaaacatagccatagtgtagaccccaaaatttgtcctaaatttatttttacattagttttgagcataattttatccttaaatttaaatcctgattataactgaattttttggcctactaacaccctttaatttttcagttgttattattttgttttatttatttttgtatattttattattattattattattattattttcttttcttctcttttcttacttattttcttttcttttttctttttcctctctcctctcttctcccacttaccccacctacccacattctctctcctaccaatttctccctccctcccctcctactctctctctctaacttctttcctcttctaccatttcttttcccactcaccgacacgaccctttccccctctccatcttccctttcctttttcattttttttctcttttttcccctcatatccatttattcccttgcccaaagaaaccgtccatcctcttcgccacctatagcaccatcaactagtcgacagcgccactgccaactggtgacccccctttccacccatctcacttctcaccattttctttaatttgggtaagtttatttccttttatttttattatttcggtttaatttttacagtaatttgttattgtttgtatgagctaatttatgccatttttgagtttgcatttgcttgattgggatattgtttgtaagctttgggttaagtttgaataatttgggtattattttaaaccttgtattttgattcgcgtctctaattcgggcttgttaatttatgttttatttggatttagtgataattgggttgtgaatttgggtttgtttattaaattaggtgtggattatgagatatttaaatttaggcctaattgtatttattttgatttgttatatttgagtttgactaattgtacttgaattttggttattaatttggagattttagattagggctataatatatgggatatttttgttgggttatatttattaatttaggtccatttttattggcaaaaatctattgaaccaatttaaagtttgaatttgggtttgaataattattttggactctacatatttttggatatttacctttgacctcatttttgttttgcataggccaattccactactggtattatgttgggtgggcatggatttgtgacgcgtggagaaccaaatttaatggaagaaaaagaggctcaagaaagctgtaaatgagacattgagtttgttgtaagcttgtttgggtacattttattttcctaatttctatttagtctcatttatattggatcctttaaatattctcttttatatatttattagttgtatgcagaattgaatagttgataactccaaaattttgttttaataaaagaaatagttcaatagttttattttaataaaaaatattgtttataaaatatttttgttaataaatgaaagtttttttaataaaaatctaggaaaaagtttgtaggaaaatccatttttttaaaacaaatttttaaaaaaaaatgtttttggcaaccattgttcataaatttatttgtttaataaaaatagtcccaaaacaatgattttgtaaataaaattgaccaaaaggttattatttttttaataaaattgtccaaaaaaagtttttttttttttaaaaaaaaaaatctatttctccaattataataagattaaaagtatcttctttatagataaaggtcttaaataattttttaataagaatggaattttcaaattgaagttgtagaaatatatatatatttttaataaaattgggttgaaaatattttcgtaaacaaaatttgtaaagaaattaattcttttgtaaataaagttgtaaaatttcttttctttttttttggtaaaagtaagtgaaaatatttttattgtcaaattgagattttgtaataaattcttttgataaaatgagtgtaaataactttttttgaaaaatgaacacaaataaaattgaatcaaatcacttatggaccccgaattttgcacgatgcgttcctactcgatggtgcaactcactttttatttatttgtgaaaattttgattttttttaaaaaagacttggagtcaccacttatttttgttttatttttaaagggggaaacaaaataagaaagaaaaaccataaatgtgactcctaaaagaaaaacaggtctgtaaaaaatcaagtttggctctgagggtcaggttacctattggaaaggtacggtggtgagccgtagcacccttctaagcctgtaaaaattggtcaataaggtgaagcaagtgtgacaattgataaggaaatcaatggataccaatgaaatgatcaaaataataaaacgaatcatgcataagaataagcaaagtgggagggagatcataccttagcaacaagtaatagtgcgttatcaatgaaaacaaggttagttcaagtataaaattattacatgcatatcaaagagcaagccaaagatcaagcaatattcattaagcaaaacaattgacaatcagaagagaaaacttatatgtaaggcccccaccaaagcccaaatgattttgcataaattaatcccacaaattccattgttttggaattatgaaaatcatattcatgcttatttaaaaccaagagaaataaaaaattatttgaaaatcgaagaaaatttgtacaagtgcataccaaaatgagaatgacagcagatttattaaaatcaggattttttgcgacctaaaaccctaataaaggatgaaaaattgtacagttaaaaaatatttgaaaactgaagtgaaattaaaactattcgaaagaaaactagagttttgaactctcgaaaattatttgaaaattggagtcttgaaaattaaatttaaaaattggaaattttgaaattaaattttaaagaaattaaaattttgaaaattatttgagaattggagttttgaaaattaaatttaagaattgaagttttgaaaattaaatttgaaagaaattggaattttgaaaattatttgggaattggatttttgaaaattaaatttaaaaattggagttttggaaattaaatttaagaattggaattttggaaattaaatttgaaagaaattggaattttgaaaattatttgagaattggagttttggaaaattatttgagaatgggagttttgaaaattaaatttgaaaattgaagttttgaaaattagttttaagaattggagttttgaaaattaattttgaaggaatcatagttttgaaaattagagttttaaaaaaattaaatttaagaattggagttttaaaaattaattttgaaagaaattggagttttgaaaattatttgagaattggtgttttgaaaattaaattgaaaatttgaattttggaaaattaaatttgaaagaaattgaagttttgaaaatcaaatttgaaaattaaagtttggaaaattaaacttaaagaatggagttttgaaaattaaattggaatttggaattttggaaaattattgaaaattggagttttggaaattatttgaaaattaaaatcttgaaaattaaatttaaaaattggaaattatttaaaatttaaggttttgaaaattatttgaaaattgagagttttgaaaattatttgaaaattgagagttttaaaaattaaatttcaaaaattggagttttggaaactatttgaaaattgaagttttttaaaattaatatttgaaagcatgaatggggaattaggaaataaatgagggcattgagtaaaaggctcaccaaaaggtggccatgcatggttgtaatggctgcaccaatgaagggcccaacccaaaagatccactagtcatcctaggccttttcattgttgtagatgacaacaacttccaaattcgtggcattgccttcagcacatcgcaccagaaaattcccctcaaagcaagagcattttttttctcagacctagaaactctttccggatcaatgcccaaccccatgcatctatgctccaccttgagcatgttttcatcttgacaaacatccaaatggaacctacagactacttttgtaaatgataatccagatttccaaattttataccaagccatgcatgggggctgccgggatggagagccatttctgtgtctgataatgagacagctggacttcctcagattcttgtgggtctagctgaaatggcctccaaatgggtataggatgggcatggtgttggagagaggttgaagatggtggtgagtttgtcatggagtgacaagctggaggtggtgtggtgatcggtgtttatggtgagcttgtcgagttgttcatttcctgaagttgtgtaacattgatacagtttaccatcagccaaggggttttcatttcatggggtgatggaagccactagaatcctcactaaactcactcatatcaattctgatcagcatgagtgaaattgtacacattagccacatccatctaaaaattgtggtgaactcatttcatgtttttcttcttgtccaaaattgagtttcattctcttaaatcccctttctaatttcttatgccttagaatgaactcacagatagacatgctaagaaaacctttctctggaacacccttacgataaaaaactggaagcatgcaccaacccccaagtcgctagtttgcaaatataatttccaccaaaggacaccttggtgggtttccaattttcatggatgatcgacggcttgttggagtgaagatagataagggcagaacatatctctatagctaagtatcattcaacaccaaaggagtttgtatggagctttaaagaagttgaatccataatgggcataatgttctctttctagtcatcacgaacaagtgccttattttctttcaccaccttgtggagctcaatcccacaaagaaatgaatccatctcagcttcagttgacaagggaggagagatggtcatccctttcatatcctccatctatagcatcaactatatttccaccattttatttgatacaagatcacaaatttcaccattgaactgagggagagcattcgacaatttccttgtttcaaaaggtgtagtcttagataacaaatcagaatcccaaatccacccagaagtcactccgacatcatcaatcgttgaggcttatactcatgcacgctagaaaaattaccaataacaggggaagacaaaagaatgggaaggaaaacatggagataaaatatagaactaagtaaagaaaacaccaaatgaagctctctttcatgggtcatcagtgagcttgctaactggtgggagagaccaaaatgaactttaaatacaaattgaaaacaaggtcgtaggtgtcttacagagcaaaaaaaacaaagcgagatttcagattctatagaaaaaaaacccaaacagaaagtgtttgcaaatgatctcatatatgcatgttttctaatgtttgcactcaatcattagaagcgaacccaaatgtcagcaagaaaagagaaaaatgatgcaaaaatgggataacagagcatgcagtgattgtacctaaacgactcccttgagcaagaattgcttggcatcaagcacttgattcggtagcttctcccaactccgccaaagcctccctcctctgttttttccccccaagacccactgtctcagtctagttttcttctcttatctctatcaactttcttaaagatgtctccatccctaaccaccaccatggcaaggtggtgatgtccttggccatgtgtccatgcatgcagctcttagcacttgaagaagtcggcccctcctgttgatacctcgcgctcctggtgctccacgtagttgccaaatggatggatgcgcgacctcaaccaatataggttcttgattcagtcgttatacctgcaaaagacgtccggacagggtgtctggacgcaccctccgatggttttgtcagccatggttagagagagataatcagttggcttttactaggtattgcaagcttaccttcctctttgtgtgaaggttgatatatatagtatcagaagctttgattccctctttaatgacagggagatattttgtgttgttatgatgacattaggtggtggcagggctatcaccaccctacgggtggcttacagagatcatggtaggtgatgcggctgtcagagatcatgggaagtgaccatgtggaatgatcataggaagtgacttgttgtcacttcatcttatcctctcaccctgcaggcggcggaatgtgggccatgacaggctgttgtggtaacgtgtgagacttgcttacttcagtcaatgatccgaaccattgtatccggatggcctatgttgatcatccagatgtattgtgtaagccgtctggatgatatgtttataagcgttgtttgatcttccttgaggtagtccggaaaagcgtgtcatgtgtgctttataggaagatccggatgagggtgactcggatgacaatgcatgtcatgtgtcactgtaagatgcgtgccacgtgtcactgtaagatgcgtgccacgtgtcactgtaagatgcgtgccacgtgtcactgtaagatgcgtgccacgtgtcactgtaagatgcgtgccacgtgtcactgtaagatgcgtgccacgtgttctcgaagggaggggtccctacacctcccactcctcgaagatgccgccagctctcccgggaggtgatatgaaaatagtgctccaaaaataaccaaaaaaaccataccaaaatgagggtctacaaatatgcccctcttcagtagagatcacaagtgtaatgaatggatcatagatacgtgagagatgaatgaaatgaagtaaattgcaccgaagaacataaaagatctcaaattttggtctaaacacataacgtgataaacttaagatcaaaggcacatactagggaggtgagactctaaacaaagaaatgtggacgatgcgatgagtgtatacgcaatgaacaacactagaccatgatacaatgaacgactcaaagataagcaagataaggaatgatcaattttcaaaaagaatgaactcgaaagatgtgacttaagatcgaacaagactcaactgggcaagcgcgactcgaagatgaacaatagtcaactcaactgacaagacaatgactgatcgatattggtgtggtctcaaaaactgaactgacaagatgaatgatagatcgatataggtttggtcttaaaaaacctcaaactaaactcaaactaacatggataatgaccgatcgatataggtgcggtcccaaaaactaaaatctaacacaatatgataggaagatgacttatcgatataggtgcggccccaagacaaagcatgcacagatgcgaatatatttagcaagacaaacatacagccttagatacctatgttagtcaacaaaataatacagaaaatcataaaagaaaaggtataaaatcataagaggatgagaggatatgaattttatgtgaccatacctggaagagtttccccttaagaaataatgcttgacttcaaagagctgcgtccttttccaaaaatcctgaaaagttctccccccaaagtctagaaaagttcctcttctctttctttgcgctcttctttcttttctctttctgaaaaataatctccgaaaatccccccatcaaatttccaccagcctgtgtttttatagcaattggagtcgtccccactaaggactcctctctccaaattttacgtctcatccaccagaaaaactctttcaatttaaaaaaaatgaattcatgcatatcacctaaagagtcctaccttttccaaaaacttctccattggtggatttttctataaaaacttcaaattataaataaatgaataaaaaataaaataataataataaataaataaaataataaataaatcggagaatgataaaataataataatagataaacaaataaataacaagacaatgaacaaataaataaaacaataaaaaaggataagataactaaataaataaaagtaattgataacaattaaaataaattaaaataaataaataaataatataataaatgattaaataaaaggattggtaataataataaaaataaaaataaataaataagtaaatgagataactgagtcatgcaaccatacaagtcatgctaaaaatgtctagtgggccaagtgtgcgtaagtgggcctaaggtggcatctaatggcctaaggtagtgtctaatgggtcgggtatacctatacaggccaagggtgagactaggtgggcctaattaagtctaacctaaagtgcacttaagtgaagcctaatctaaacttgaaggacaaccaatgtcataatgtggaaccggataaacccctcaaccaaagtctccaaagtggttcagaaaagataagctacacgagtagtaataggccatcaaagaaacactgtggaacattagaagttgattactactcaaaaagtgctatttgatagcttgtaattaacttttttaaacacttttgagtagtagttattaccttttaactcaattaacatattaagaacctttgcaatcatttctaatcaaattgtgtaagtttttgtgtttttgttagtaatttgatcaccaaagcaatccaagattgaggagagttctatcgaatccatggcaaagcaatggaaagcttagtaacatgaagagccaaagctttgaagctttaaattcctttgccataagcaaatcatgaatgcaaggaggggaagcaaagagagaaatctaacatgaagcattcaagaggacatcaactgtcagccacttttggagcactttctggactcaaatcatgcatactatatgtcgtttcgaagcttgggaagtcatcaatccaacgcttcaaacggtgcgcaattcggagttgaaatgaaggagttagagccattggaagtcgatcacaccaagctgaaggccaatttcgcgggctgcgaaattagcctttggctgcgaaattagcctttggctgcgaaatcagcctttggctgcgaaatggtgtccttcatgctgcgaaatttcgcagccatcttgcacgcctgcgaaaatctcctgagtgcttcctgatatttgtgactgacatttttagattttttgcttaagctatttgatgtctaaatccccaaactctccttgtaatccacctatcataggattccttagtctttaagcaagaacaaagggtaaatagcctcatatataatgtttgtaatttccattacagaaagatgtcaaggagcttgttctcagagacatcctttgtatagtttttgaaagaagtaaaatacagagcttttgctctgccgtaccttctcgttttgattgtattgtatttatttatttttttcttactagccaaacaagctctgaggatgtttcctcagagaatgagtggctagacttttagttccttggagctaaggtagccgggaaaggccccaaatgcaaaaattggtagttttgttgttccaactgttaatgaagagaaagtgtgacccattaacgatttctatgtttatgtttcttagagtcgcaccctaactgtccgacctttactgtttatgtttctcagagccacaccctaactgtccaatctttcccgtttatgtttctttgagttatgccctgattgtccaacatttcttgtttatgtttcttaaagccacgccctggctgtctagcctttcctgtttatgttttcttagagccacaccttaattgtttgaccttttctatttatttttcttagagtcgctctctgaccgtccgacctttactgtttatgtttcttagagtcacaccctgactgtccgacttttgctgtttatgtttcttaaagttgtgccttgactatcgggccttcccgtgtgtttttcgtgccccgccctaattgtccgaccttcctgtttttcttttgtgttgcactcaaactatctgttcttctcgtgtttttttcatgtcgcactctaactgtctgacctttcctgtttatgctttcttatagtcacgtcctgattgttcagccttctcgtgttcctttagagccacgcctcaactcttcaacctctttatgtttcctttagtgtcacgtcgtgaccgtttgacctctttatttaacattgggtcacttccctagtcattagtttactttcctttctttcttcttttttttgctcacctattcacctcttttgataacttggtccctgatgtttcacatagatattgtcactacctcattcagtcgagcccttcatgagatccacgtggattttgtatgttcccttattggcatatcaatgagcatattttgtgaccttagagagcccatgtcgcattgggacaaatttagtggtttttcttgttcttcgacagaacccacttcgttttgcttgtatatacacttactttacttgtggactttactgaagatgagcatatttgtagaccccaaaatttgtttcaagtttatttttacattagttttgaacgcaattttatctttaaatttaaatcttgattatatttgaattttttggcctactcacaccatttaatttttttagtttttattattttgttttatttttgttttgtatatatatatatatatatcttttcttttcttttttctttttcctctctcatctctcctcccaattaccccacctaccttttttttttttctctcattttctctcttgccatttcttttcccactcaccgacataacccttccctctttccatcttccctttcctttttttttttcccctcttttttcccctcatatccatttattcccttgcccaaagaaaccgtccatcttgttcgctgcttgtagcaccgtcaaccagttggcgacgccactacttgctggcaacccccctttccacccacctcacttctttcatttttctctaatttgggtaagtttatttccttttatttttattatttcggtttactttttacaataatttgttattgtttgtttaaactaatttcaactatttttgagttcgcatttgcttgattgggatattgtttgtaagctttgggttaagtttggataatttgagtattattttaagccttgtattttgattcgggtctctaatttgggcttgttaatttatgttttatttggatttagtgataattgggttgtgaatttgggtttgtttattaaattaggtgtgaattatgagatttttaaatttaggtctaattgaatttattttgatttgttatatttgggtttgactaattgtgcttgaattttggttattaatttagagattttggattagggctataagatgtgggatatttttgttgggttatatttattaatttgggtccattttattggcaaaaatctatgggaccaatttaaagtttgaatttgggtttgaataattattttggactctacatattttttgatatttacttttgggctcatttttgttttgcataggtcaattccactattagtattatgttgggtgaacacggatttgtgacatgtagaaaaccaaatttaatggaagaaaaggaggttcaaaaaagctataaatgagacattgagtttgttgtaagtttgtttggatacattttattttccttatttctatttagtctcgtttctattgaatcgtttaaatgttatcttttatatatttattgagtatatgcagatttgaaccgtcaataactccaaaattttgttttaataaaagaaatagttcaataattttattttaatgaaaaaaattgtttagaaaatatttttgttaataatgaaatttcttttaataaaaattcagaaaaatgcttttaggaaaatccaaattttttttaaacaaaatttagaaaaaattgtttttagcaactattgttcataaatttatttttttaataaaaattatccaaaaaaaaattattttgtaaataaaattgcccaaaaggttatttttttaataaaattgttcaaaaaaatgttttgtttttaattctgtttctctaattagaataggattaaaagtattttctttatagataaaggtcttaaataatttttaataagaatggaatttgcaaattgaagctatagaaatatatatatataaaaaggttatttttttaataaaattgttcaaaaaaatgttttgtttttaattctgtttctctaattagaataggattaaaagtattttctttatagataaaggtcttaaataatttttaataagaatggaatttgcaaattgaagctatagaaatatatatatatatatatatatatatatatatatatatatgtatatatattaaaataaatttgggttgaaaatatatttgtaaacaaaatttgtaaagaaattaatttgtttgtaaataaagttgtaaaatttcattcttttttttttatatagtaaaagtaagtgaaattttttttattgtcaaattgagatttttgtaataaattcttttcataaaatgagtgtagataacttttttgaaaaatgaacacaaataaaattgaatcaaatcacttattggaaatgaattgggatctttttgtaaataaataaattgaaattattaattcgaaattatttttaataaactcctatggaatttcttgaaaaagtaatttttgaaatatttcttttaattagttaactcaatgtgcataattctgctactatttaccttgtatattatgcttttatgattattttctttacattgatttgtgtttgtaatcttggtatccagatcaattaattaattgtcataattctctcaatttgcttagtagacttaaaggggtgctacgacttttcactataccttcccgatatgtaacctgatccttaaatctaaattcggttttttttgcagacacatattttctaaataaggagtcacattgagttttttttcttattttattttctcttttaaaaataaattagaataagtagtgactctaattatttttcaaaaaatcaatttttcataattgaataaaaagcgagtcttgccatttcaagtggggacacacgtgaaaaatgcagttcacgcatagtcttctatgaaaaaggataaagtattaattaagaattttgaatttaaaaaaacaaatcaaaaatagaatttaacaaaatggattctcttcaaatatatttttagccctaattttttaattttctagaagtagcatttttatatggcatgacattgcaatagttaacttcgtaggcaatagagtttggagtctgcaatcaaggcaagcttcttcaaaaaaaaatttcaatccagatttgctttgaaaatattcacaaaagtaatgcatccctatacattttattattattattattatttttcgccttaaagttaaaatcacggtaatcaaatatggtttgtaatcaaatatgattttaaaagtcataatcgttttcaacttaaagctaaaaccacaattaaaccgtaattaataattatgatctttagataaaaaaagttaagaaaaataataacctagatctaagaattttttttttcaaacaggattatttttccacaaaactctagagtttgtccggatagttaccgtggtttgcaacattcaacttggttggcaatggatttattcagaacatggatacacttatccgagttattccccaatcctattcccaaacacattctttcgttcccccctcaaaaccctagctttatatgttttcactgaggctactcccatcttcctccattttctgaaactccg

SEQ ID NO: 11552 - DNA, 750 bp, Vitis vinifera
  Intron number 7 from transcript GSVIVT01008982001 (locus G SVIVG01008982001) derived from phytozome v7.0 (chr-ID chr1 8; pos 4038718 to 4039467)
tggaaaaattcagagccaggtaatcatcatctccacctactaaaccaaattctccccttccacattgagaaaatgaataaataaataaatgctgcaaggcagttattacccaagtaatgaatgagggataacgacctgcaatcacttaatgaaggaaaattttgttactagatgaatgattgcatgcatactacctatcatagatcccttctgtttgacataaaatttccaatgctcaaaagattctgttgatttagacaaaggtgattgtatttgtgcgttgagtttggtgtaagtgttctagaacagtgccaagttggttggcggatggactatccagacccaccatatggattttttgcagatctccatgaaaagaatttcactaaagaatatatcctgacattccactttggtaatccttagatggttcaagactatgcaaaattattttccaaggtcctatatatgggactttatgattataatcgagcagtttcttaaactgatttctgatggtaagtgctacctgcatgtgtgtgggatacattcctagagtgaaatctctccttgtggttacttaatttggcctaagttgtgctgtctgtaattactggtctgaactcaggttatcctcccaagtcagattgtgttttgagtctgctaccatgcaatgcaagttttagttgtttcagtatgtgtcttgtggtttcaggtcacctcaggtgctagcagcatttcacagaaagc

SEQ ID NO: 11553 - DNA, 13073 bp, Vitis vinifera
  Intron number 6 from transcript GSVIVT01019162001 (locus G SVIVG01019162001) derived from phytozome v7.0 (chr-ID chr4 ; pos 15848023 to 15861095)
caataattgctaatcccccggcatgttagatctagtcactttttgattttcctttttccaatattatttcttattttaccaactataatgcttattattctgttgttaagcatttgaaagaaaaattgtttgtttaatcacaaaactccaaactatatatcagttgaatagaagttcttcaatgaaaagacttatatttttcccttatttctgaactataatggttgactgttacttagttattgagccattttaatggaagatggtttgattggttgtgagagtataaaggttatatcagctgaataccattgtaagtgcatgtcgcacctaggggccttagagaagttggcttctaaaggagcttttacagctactgatccaatcttaggctttgttgaggccaaatcctaaggtgggtattcaatggaagtagggacactcaaatagggaaattaaaagcattttcatttatagaatttcggtttgatggattctaaagtatcctttcagtccaagggcaactgttaggccagccaatatgtaagggtaccaattctagaatttgaattggattctcaaagtaaaaggaaatagggtatctttgtatctcaaaaggaagtgttttaatatgttgaatgggatggggtgctggggtgttagccagctaatatctcttctgatttgaaacgtcgtttaagtgaagagtttttttttgataaatgagcacaaaatatattaaagggcaaaaagccacaaagcatacaggtagtatacatagcagcctaaaaacaaaaaacacatgaacaatcgacctcactagcccttaaggagccgctagccactccaacaagcctaaaagcgaagaggacttctctcccatatacacccttagcccaactccacaaattacatacaaaagaatttttgagtttttttatagctaaagagccccccctaaaagctaatctatttctttccttccataccgtccaaaaaatacacaatgggatagagttccaaatctttttcctctttttccccacaaaagggcccctccaactaaataacacctctttgactgtctttgggatcacccactgagccctaaacaaggcaaggacgatctcccagaggaccctgaccactatacaatgtaaaagaatatgatttacattttcctcttcacagccacacaaaaagcaacgattagggaggtgccacccctgtttttggagcctatccaaagtgaggatcttctcccacgtggcctcccaagcaaaaaaagcaactttggttggaaccttatccacccaaatgctctttttggggaaggcgatggcactaggagcagccaacaaattataagcatccctaatccgaaaagcaccatgaccccctcctttccataacactgagtcctcttctgaagaaatcttgaagtcccttagcatatgaaacaactctcctatcaaatccagctcccagtcattagaatctctagaaaatctaagattccaacctccttgaccaaggcttgagtcccacacttcattaactgttgcgttcctatggaccgccaaggcaaataactggggaaaattttgggatagcgccgcgttgccacaccaatgatcagtccagaacttaaccttagtcccctcacccaccttgaaccctatgttattacaacaccagtttgcctccttgagaatctccttccaaacccccactccaaacgttccgcgagcttcattagtccgccatccaaatccctcttggccgtacttcacctcaatcaccttcttccaaaggatttccttttcaaaggcaaatctccaaatccatttacccaacatgattagtaattgagagatctttataggaaaattttagatactagtgggacaaacctttttttttgataagtaaaaagaagtatatttaacgaaaatcggaaacaccaaaaaccggtgccctctaagtatacagggagtatacacaccaccttccctaactaggagcctatccagtctacaaaacttacaagagaagaatgactctctgctagggaacccttgacccatgaccaaagattacatacaaaagaatatttcaacctttgaagcgaaagatcctcattcccaaacgctagcctatttctctccttccaaactgaccaaaaaatacataaaggcgccatttgtcaagcctttttgcgtcttttccccacaaaccctccattccacccaagaagggttgtcttcactgtacacgaaagagtttatttattgcttacaccctatcatggcatatggagttagcatgattagtaaatttatgcatggttcattggaggtttatgtagaggttgcctacaagattgttaggtgctgctcatatctaatattatgctgaaatgtgaacttacaaatattttccatgcgatccatcatcacatgtaggattaattagtgacatgtggacgcaccctaggggccatgccattagtagccctagactatgcaaagttgttgacgacatacaatgtcattttattccatgtgactccgataaacatggttttctagtctacttcctatatgatagtatagtgactacctagtgcagatgctcacaaaatgtggatgctcacctatggaaaaggctaaaagcaagttactttgcacctctggggatggaagagtgatattaaaaggtgaatgaatgaagtgccaatcctaacgtgctaagccaggagatgagagacttccccacgtttgttggctctatttagcacttttttagcctattaagaaggggtgggtgaagggaggaataatccctactaaaaccttaagagatctagcacatttttagtagattcatcaacgtatgattaataatctatgccttcatgaaagctaggttgtgaaatcattcaacaatgatcatatcctttttgacaatagataagaacctcctgtctccaaagaaatgcaagaaataagccatgtagaatcaccttccactagaatcaagattctagaagaagcacctcaaaacaagataagaattcctacttttatgaccattttaaaatcaagtttggagaaagcatgcaccacctcacctgtgtaatctttgatgacaaccttagtacttagttgatctaggttccctaaaacgtagatattaatgttaagtttgacgttgccatcaagaggaccataaacaatcaacatcttgttttcttttcttctcgctacacgttgcatttcaatataaagagatgggacttaatgaaagactctaaaatgataatcatcatagatatctaaaaaatgataaaaaaaaaaagaattatcctgttataggtgttagatagtgtacaattatttcagttatttacttttccttttctttccttattgtattgtgggtcccactaacatgtatatatatactaaagtccaatgtgtattattaacagtttttaataacaaaaattagggattctcccttttctctcttttcacatggtatcagagcctagggagaaaaaaaacctaattatttccggtttatctgtgaatcaattttgggaaacctttcactgaccgtgtttcattccgatcacctttctcatctcctaaagcttttcggtcaaccgtatcgccgtcagaaaaccctcaccatcgttagaaaaccctcaccgctgtcgacttttcccggcgacttttccggtgaagtccttttctgacaccgaccataccattaggtgctcaagaaggagatcttcaagttttgtcaaggcaccggagggagattctcagtcacgcgccgacaactcgcgtttcttcttcggtggcctgaacctcacgcgcccgcgcatgagggcacgtggagcactttccaacaacacgatgccacctccagcctcgcctgacgccatctagccactctccatctatgcttgtgccatccgagccctgcaagtgcattttttggggtttttttgtctccgtcagccctctaaacagccttttgggcgacctccggtgacttcctctccaccccgagccctacacgtgtcttaggaagtgttcttctacccttccagtagtgccacatttgtttttctttactatttggtctctcacagccgcgaatcctcggtttttcttcttttagccgcgatttgaagtcgtattagggctctcttcgatccaaatatatttcattctccagataagtagatatggctactaaaagttccattttttcctctgttatatctggatcttctatgattactttggagaaattggttggcagtgaaaattatttgtcctggtctgcctctgtggagctttggtttatgggttaaggttatgaggatcaccttgttatgcaggaaagcggatatccctgaggttgatagagtacaatggagaaagatagacgcacaattatgtagtgtgttatgacaatcagttgatcctaagattctgcttcatcttcgggcctacaaaacatgctttaaattttagaatcaggcgaaagggctatacacaaatgatatccaacgtctttataaggtgacttcttctattgtcaatgtcagacaacaaaacatggatttatctacttatattggccagattgcctctcttaaggaggaattcttgactgtgatgcctcttactactgatgttggggatcaatgaacatagattgacaagttcttcatggttcttacgcttattggcctctgtccagatcttgagaccgtccgcgatcagattcttggcagttcctccgttccatccttggatgatgtgtttgctcacctccttcgtatctcctctactcagactttgccatctgataatacttcagattcttctgttttagtttctcaaactaactctcaaggaggatgcagtggtaaccgaggtagaggccaaagtcctcattgcacctattgcaataagcttggccacactcgtgatcggtgttatcagttacatgggcggcctccccgcactgcccacgtggcccagtcatctgatcctcagccgcctcagccgcttcagcctccaagttcctccacatcttagggtatttccctcattgatagtgaatatgatgattatctccgttatcaggccaccaagtcagcttctgttgcctagactggtaatgcttctgcttgttttacccacacatcttctcttggaccttggattctagattctggcgcttctgatcacatatttggtaataaggattttttctcttctattactactacctctgccttacctactgttaccttagctaatggttctcaaactgtggctaaaggcattggtttggcacatcctctcccttctctacctctcacttctgtcctttatactcctgagtgttcctttaatcttatctctatcagcaaaatcactcgtactcttaactgctctattactttttctgataaatttgtgaccttgcaggactggagtacggggaagacgattggcataggacgtgagtctcaaggcctctatcacctcacctcgccttcaactcctgcagtttgcatttccattgatgctcccctttttatccacagtcgcctaggccaccctagtctatccaagttctagaaaatggtccctcatttttcatctttttcgtcgcttgcgtgtgagtcttgtcagcttgggaaacatactcgtgtctcgttcccaaagcatttgaataatagggcaaaacctccttttgaacttgtccacactgatgtttggggtccttgtcggaccgcgtctactttaggatttcagtattttgtcactttcattgatgactattctcgatgttcttggttatttttaatgaaaaatcgagctgagttattctctattttccggaaattttatgctgaaatccaaacccagttcaatatttctatttgtgtgttacgtagtgacaatgccagggaatatttttctgcaccatttacttcatttatgtctcaacatgggatccttcatcggtcttcttgtgctcatactcctcaacaaaatggggtagctgaacataagaatcgacatcttgttgagacaactcgtactctcattctccatagtaatgtttcttttcatttttggggggacgctgttcttacagcatgttatttgattaatcgtatgccctcatctgtattacacgatcagattcctcattctcttcttttccctgaccaaccactttatttccttccttctcgtgtttttggttgtacttgctttgttcatattctcattcctggacaggacaaactttctgccaaagccacaaaatgcaccttcttgggatactccagacttcaaaagggttattgttgttattcttctgagactcatcgctactttctctccactgatgtcactttctttgaggactcaccattcttctccacctctgagtctctttctgtttctgaagtcttaccccttcccattatctccccacctgatgcagtgccttctcgcccacttcaggtttatcatcgccgtcatcgtgtcgctgttcttccttctttggccgaggtacttgctgactcacttcctatcccttcggcttctcctgccccagcttggcctccttctgctgacttacccattgctcttcggaaaggtaatcgatctactcgtaatcctcattccatttacaattttttgagttaccatcgattatcttcaccttattctgcatttgtttttgctatatcttctgtttctcttctcaagagcatccctaaggctctttcccatccaggctggtgacatgtaatggtagatgaaatgactgctttacactccaatgacacttgggatcttgttgttttaccctttggtaaatctacagtggttgtcgttgggtctacacagttaaggttggccctgatggtcaggttgatggccttaaggcccacttagttgttaaaggctatactcaagtttatggttttgattttggtgacactttctctcctgttgccaagatagcttttgttcgtctattgctctccatggttgctatgcgttcttggcctctttatcagttagatattaaaaatgctttccttcatggggatcttgctgaggaagtttatatggagcaaccacctggttttgtagctcaaggggagtttggtttagtgtgcatgttacgccgttctctatatggcttgaaacaatctcctcgagcatggtttagtcgttttagttctgttgttcaggagtttgggatgtttcacagtacaacagaccattccgttttctatcatcataactcttcggggcagtgtatttatctggtagtttatgtggatgacattgttattacaggcagtgatcagaatggtatttagaaactaaagcaacaccttttcacccattttcagactaaagacttggggaaactcaagtatttcttagggattgagatagctcaatctagttctggtgtgattctttcccaaaggaagtatgctttagacatcttggaagaaaccggtatgttagactgtaaaccggtagacactcctatggatccaaatgtcaaacttatactaggacagggggagcctttaggagatcctgggagatatcgacgacttgtaggtaaactgaactacctcaccattactcatccagacatttcttttcctgtaagtgttgttagtcaattcctacagtcaccatgtgatagccattgggatgccgtaatctgcattcttcgatatatcaaaagcacaccaggctaaggtgtgttgtaggagaacagatgtcatacccaggttgttggttacacagatgcagattgggttggcttacccacagatagacgttccacttccgggtattgtgtttttattggaggtaacctaatattctggaagagtaagaaacaagatgtagtggccaaatctagtgctgaagccaagtattgagctatggctctggcaacatgtaaactcatatgggtgaaacatcttcttcgggagttgagatttggaaaggatgaatagatgaagctcatctgtgacaaccaagccgctttgcatattgcatccaatccaatcttccatgaaaggatcaaacccattgaagttgactgtcacttcattagagagaagatcgcatcaggatgtgtggcgactagttttgttaattcaaatgatcaactagcagatatttttactaaatctctcagaggtcttagaattaaatacatttgtaacaagcttggtgcatataacatatatgctccagcttgagagggagtgttagataatgtacagttattttagttatttatttttccttttctttccttattgtattgtgggtcccactaacatgtatatatatacccaagtccaatgtgtattattaacagtttttaataacaaaaattagggattctccattttctctcttttcacagtaggagggaaaagtaaccttttacaatttaccatgtacttaaattaagttaattatggaccaacaaaaaaaatcaaatctttataattaatttaaattgtgaccaattaaaagttgccacatggcataatttttctaccaatgaaataatgtcgtgtacaacataagcctcatgcaaagaaaaaacaaattgatttctatttaaataaaacatgtatatgttctaaaaattaaaataattattagaataaacaaaaatgataaatttgatagttgaaaagacaattatctcttccaaatctgcataaatattatttttaattaaagaataatatttaggactaccgaacatgatatttcaaatctctctaaatattaattttaattaaggaataatatttcaaaggaatcataaaattgtccaaatatggtgcttccaattctataaataagatgattctaaagcttttgagacagaagttggaagatgagttgaagggaagctcttcaaaggagatctaaagcttcttcaaatcttcaaaggagatttcaacgtatctttgattttgtcaaagtgtctttaaattgtctagatctttaaagcctcaagtttcaaactttaagatcaaaatctacacaagatctctttgatttgagatcaagctattgaagtccttagtcaatgttgttcaagtcaaacaaaggcccaagttaagccaaagcttaagtcacactaagacctaaatcaagacaaacttaaaccttgagtcacaccaagacctatgcgagaccaagctctaagttacgccaaggcttaaatcatcccaaggtctaagtcaagctaaggtccaaatcacaccaaggcccaagtccagacaacacttaaaattaaatcaaatcaaagcttaaattaagcttaagctatttgaaatcaagcttcttttagccctcaattagcaactaggaaagaaagaattagaggacaaaataaagatcgtacctacatcatttgaggcatgctcaggtcttaagataaatctggagaaaagtgagttgattcctattggggatgtccataatatgcaggagtttgccgaggtttaggctataaggtgggcacccttccaaccacttacttaggcctcctcttaggtgctccttacaagtccagtagagtttgggaaggagtggaggaacgtttccaaaaaaggcttgctttgtggaagaggcagtatcttttgaaaggtggaaagtagacgttgactaagagcactttatgcccctctttgttatccccaaaagagtggcagccaaattggaaaagattcaaagagacttcctatggggaggaggggatttggtgaaaaagcctcatttggttaagtgattgattgtttgtatagagaaacaaaaggggggtttgggttttagaagcctttctcttttcaataaagctttattggggaagtggtcttggagatttgttagagaaaggtaccctatttggaaacaggtaattattggcaagtatgggttacaggaggggggtggtgcacaaaggaggtgagagggacgtttggtgtaggggtttggaaagcaattagaaatggttgggaggtcttcaaagacaaaacaagtctttaggttggtttggggaatcgggtgaagttctggaatgataggtggtgtggggaaacgtctttgagagaggcgttcaggggcctttatgctatcgcttcctctaaggatgcttgggtggtagatgtttgggatgggggtagttggggtccgaggtttattagacaattcaatgattgggagttggaggatattgatgccttttttgggaggttgcacaactacgtcattgctttgggtgccactgatgacatggtttggttagggactaagaatggagttttttctgtttagcctttttacttctctttggctagtaggaaagcggaacctttccctcattgtacaatgtggaactcttaggcccctgtaatagctagcttttttgcttgggagacaacttaggctaagatattggcacaagaccaacttagaaggaggggatggaggatgccaaacaaatgctatatgtgcaaggctggagaggaaatgggagatcatattctgttacattgttcaaaagcaagcttattgtggcagttggtctttgctctatttcatgtgtagtgggtgatgcattcatctgtgagaggggtgctcttaagttggaataacttctcgattggcaaaaagaggaaaaaggcttggaaagttgccccactttgcattttttggtctatttggaaggaaaggaataggagagcctttgaggatagggaaaacttagatcaaacaattaaaagttcttttttatatatcttttttgggattgagttggagtgtacatgggggatagtgttacttctttgatagattttgtgaattggttaggctctctgtagggtgcgatcgttttttgtgcattcttgcccctattggtttttgtatttgtgtacattgtgtacaccttttttaatataatacttcttttacctattaaaaaaaaaaaaaaaaaagatcgtacctatatcattctttaaagtaatagaaatccaatttgactacacaatttttttttttttttaaaagagaaatttgtttgtaaacctgcatatcctcccccaaccccttcttatccttaaagatcccaacacatctcttttgccaaatcaactatatcaaagtagggacaatagatagccatagaactttatcttttctctccttacgaaatccataacaaagtaattgacaacatttgttaaagaaagaacatccataactgaaaaagaaaaaaaaaaacatagcaattaaaaaattagatggtccatagattttgtgttatccattcataaaacatattttctaaggttgctaccttagaagggttgataaccttgaaaggcttacaaagttaaagcatatcgttgtattgagtttgctatcaaccatgcaaaggctttgaccttaggtgaggcatatttttctgaatgaatttagttaggtggaaaattgttgaattagtcaccaatttaggaattggaataaagacctagaagagaatgtgcctcttgtgcctaggtccaacatctttcgtgtctaagtagacaccttccaagattggagattagagaaggaaatgaatttggtgatttctctatcattaaaatttctccaagaattgaagttccaagcgagagaaggagaagcttaggacttgagcaaacattaaaaatttccccatttcaagattttgaacatgtgaagggaaaggatgttgaatggtttgattaccaatagtagttttctcaaaaacttgttttaaaacatattgaaatatttgtttgatagagagaaaagaggaaagccttagagtgatggctttccaagagttgttaagctactttcttgtttttggcaaagccatatgtcaggccaaaatcttatgggcacatctatggctaataggaatctcagggcttgtttggaaactattcttgaaaacaatttctaacttacaaaatacatatgataaacttttgatagaatatatatatatatatatatatatatatatatatatatatatatttttttttttttttttcttttttgagaatttgttttaaaaagatgttttttagaatgaatttgaggtgtttctagttgtttttttagtgttatgaacaataattgaaaagatggagaatgatttgggaactttacatataagtgtatagtagcttcatggagaataagttggaaaactattttcatatttaagtttctaataggattttattcttaaaaacaattgagaataatttttaataattgttctcaaaaactattttttaagaactgttttaaaatatattgcatgttggaatcaatcagttcacaagcatgtgtagctgtattgctgtaggactcccaagtatagtttccttctgaaggggtttgaatccaagatttgtatcatttgggtgggttaccaatatatacatatgttgagatttaagataattcataagattaatattgttaagcataaacttttggaaataatggctaggctcattcaacttaagttgtcatccatcggctggacgagtaaagcatggggatggcatgatctagagtggctttggttggacttcacaaccccacttaagcttggggctatgttagaatttagttgaaaatcaaattacttttgctctatcatttgacctttttatgttctaggaaaatctagcttgacacactattacaagtgctcatgggccttagtttctgggctttttcctgtctatacatgactatgcataattcttcaaaatttgagtaagtatttcttgttatgattttctttcttacttatccttcttgttctaaaatacttcatatttttttatgcatgttggaatcaatcggttcactactaacatgagcaactatacttatccaggacat

SEQ ID NO: 11554 - DNA, 5296 bp, Vitis vinifera
  Intron number 1 from transcript GSVIVT01037467001 (locus G SVIVG01037467001) derived from phytozome v7.0 (chr-ID chr6 ; pos 13202527 to 13207822)
gtgtactctgtttttttcatcatctcctctgtttagtttgcttttttttttggggacgctggatatcgcttttggactatccatctcaaaaaccatgctctcatccctcgtgccaccatcttcactggaccttgcattactacctctctctctctctctctctgaggaacacgatgtggctgaaatcccgagtgctgttcctactactttgcgccacctgccacactactgtatctttcaccaatggtccaattcctaaaggcaacttcgagtatggctcaaagccataggaagtttccgactgtgtagagtgcatcaaatccggtcaaaaacagggtgacatgctgctaatcgtccctgaaggagcctatgcacgcggccaggacttgtgcccaagaggagacattaaacgtctcggttgcacccagcgccagcgtcgtcgtcatagtctcacgccgggaaggagacgcgaaccaggtggagctcctctccgatccatctgctaagatcccaggaatgccggaccgacggcgaaggagcgactccgcgatgtcttcagagtggatgcccaagtaccttctcaagagaagaagaggatgcgaatttgttgaaagagaggcgagtaccgccgccgcaactcctctctccattgctaccgccgcggaagggtggtgagggtgatgcagccaggcggggcgagttggtgaggaagatgttttcttgggcccgcccatgctagcatcagatttgggcttatttttggagcccagcctaagcttgagatccagctggcccattggcttgcttccactttatacgaatcattttctttaaagcactaatttcttaataaactttctaacttccaatttccaagcccaatttataaaaattcaaccttcaaataatacttcaaaattccgatctttaaaattcaattccaatttccgaaaattctcatacacactttaatctatttaattattattattttatgtatttattctaaaattccattttaaacaattctttaaaatttccgactttcaaatttaatttctaattccaaaatttcaatattcacattaatctatttaattattattttgattatttatttcaaaactccattttaaatcaaattctctaaaacttcttattttcgaattaaattcctaatctcaaaaattcccatattcccattaatttatttaatcattagtattttatttatttatttattttaaaactccattttaaatcaaattcttcaaaacttctgatttccgaattaaattcctaatctcgaaaattctcatattctcattaatttatttaatcattaatattttatctccattttaaatcaattctttaaaacttcagatttacgtaaatccctaatcctgaaaattcctatattcacattaatttaatcactaatagtttgtttatttatcttaaaattctattttaaacaattctttaaaatttctgacttctaaatctaatttccaatttcaaaaattccaacattctcattcatttatttattcccatattcccgttaatttatttaatcattagtattttattcatttatttattttaaaactccattttaaatcaaattcttcaaaacttctgctttccgaattaaattcctaatcccgaaaattctcatattctcattaatttatttaatcattagtattttatctccattttaaatcaattctttaaaacttcagatttacaaattaaattcctaatcctgaaaattctcatattcacattaaattaatcactaatagtttgtttatttatcttaaaattctatcttaaacaattctttaaaatttctgacttctaaatctaatttctaatttcaaaaattccagcattcccattcatttatttattcccatattcccgttaatttatttaatcattagtattttatttatttattttaaaactccattttaaatcaaattctttaaaacttctgatttccgaattaaattcctaatcccgaaaattctcatattctcattaatttatttaatcattagtattttatctccattttaaatcaattctttaaaacttcagatttacaaattaaattcctaatcctgaaaattcccatattcacattaaattaatcactaatagtttgtttatttatcttaaaattctatcttaaacaattctttaaaatttctgacttctaaatctaatttccaatttcaaaaattccagcattcccattcatttatttaatcattattttcgtccttattattattattccatttatttatttcaaaattccatttttaaacattttttttgaatcccaatttctgaacttaatttccgatttctaaaattctaatttctttcaagtttgacatcctaaaattccaactcttaaatttaattcccaatactccaattttcaaataaatttcaaaaattcaattttctctctaacagttttaattctcttcgggtttcaaataatcttcgatttctcttgattttatataagcatgaatgctattttcataattccagaataatggaatctgtgagactaattcgtgcaaaatagaatgggctttggtaggggccccacatatgagatttcatgattgattgattgattgattgatttaattgccatgcatgagatcgttctttaattgtgtattaacctctctctcttgatagcgcatgatggttcgttgcccaggtacgcactcattcccaatctagttagtctatatgcatttgtctgactcccatatgtgcatgatagttccgggtattcattgatctcttaattaattgtcatgattgcttcattttattagtagagacccatttagggacttagaggggtgctacggtttctaccgtaccttcccgataagtaacctgacccctcgaacccgatccggtttttcacggaccaccttttccaaaacaaggagtcacacttagggtttttctttcttattttgtttaccctttaaaaataaaacaaaaataagtggcgactccaagtcatttttcttaatcaatataaaatcaaattttcaaaattaaaatcgagttcaccatcgagtgggaaacgcattgagcggaaatgcggggtccacaacttgttaacaaatggtattaaattggtgtgtactttatcctttacttttaaagataattatggaacaaattcgaaagcactattggagtgcatgaatagacaatattttttcccattttacaccaaaattaaaaaaaaaaaaaaaaaagtaaagttccaaaatctcatattttttgtagttggtgtatggttagatgattttccctaaaaattttaaatttttttaggataatttctatcatttctaagcttacttaatatcaacaaaaactattattatattttcaagtggaaaaaaattcaaaaaatatgaaaaattataaaatttcaaaggaaagaagaatgtaaggaagggtatgaagaatatgaggatttctgatattcttcatacccttcctcacattcttcgtactttcccaattttattttttaaaattttttaggataatttccatcatttctaagcttaattaatatctataggcaatattattgtatttttaagtggaaaaaaaatcaaaaaattgtaaaattttgagggtagaaagaatgtgagaaagggtacgaagaatgtgaggaatggtatgaaaaatgtgaggatttcttacattcttcgtacccttcctcacattcttcgtaccatctccaaatttttaatgttttaattttttaaaatttattttaagggtaatttccatcatttctaagcttaattggtattaataaataatattattgtatttccatgtggaaaaaaatttgcaaagtttgaaaatttgtaaaattttcgagagtaaaaagaatgtgacgaagggtgctaagaatgtaaggattcctcacattctttatatcattcctcacattattcataccttctacaattacttagtgttttaatttttaatttttttttaaaataatttccatcatttctaagcttgattagtatcaataaacaatactatttgtatttttaagtggaaaaaatcgaaaaattcaaaaaattgttaaattttcatggtagagagaatatgaggtagggtctgaagaatgtgaggattgctcacattcttcgtaccctttacgattacttaatgttttaaattttttattttttatttttttgaaaataattttcatcatttctaagcttaattagtatcaataaacaattttattataaggaatggttcgtatcctttctaattttttaatgttttaattttctaatttttttagaataatttacatcatttccaattttaaatttttttaattcttattttttttgtaacaattctatcaataataactcaaaataatattattaaactatgttattgtcatttcaagttaaaaagtaaatctgaaattttaaaaatataaataatttagggtacgaaaaatatgagaacggcatgaaaaatgtgataaatacatgtttgatactttcatcacatttttcatattgatttttagttttaaaatttttgaaattactaatttatttttgaaaatactatcattagtaactcaaaagaatattagtaatttattttattataatttaaatctaaaaaccttaaattcaaaaaatgtaaaatttggagaatacggaaaaaattaggatgatctaattacctaagttttacatatgattatcaaaatgttgaattttaatgaaaatactcatttcatattaaaatattatcatattcatttttatgttgaatttaaatatttgacaatttgttaaaaataaaataatgtaattatggtatatgatgatttttttattaataaatatgttttcaaattttatatcatttttatttttatttttttccaattctatttttatctcaatatttattttatttaaacccaaaattattgagaattgagaaagaaattaaaagagacggtggaaggccacaaccggttcttcctttaaccggttaaatggaatttttattttaaatttaaaatggatgggcaagatgtaatattggacatccaatggcttagaggtaccctagaattttcccttaaagtaatcaacatcacggattcagtgggtacagatgagacttcctttaccaaactccaaatcatttccctttc

SEQ ID NO: 11555 - DNA, 9896 bp, Vitis vinifera
  Intron number 1 from transcript GSVIVT01029149001 (locus G SVIVG01029149001) derived from phytozome v7.0 (chr-ID chr1 1; pos 19125360 to 19135255)
aactttattgtatctgctccaataattgcttttgaatttttgatagagtatggcttggaaggaagggtatcctcaagaggtgatatttacagctatggaataatgttgttagagatggttacaagaaagaagcccatggatgagatgttttctgaagaaatgagtttaagacaatgggttaaagcaacaattcccaacaaaataatggaggtggtggacgaaaatctagcaaggaaccaagatgggggaggtgcgattgcaacacaagaaaaacttttggccatcatggaattgggcttggagtgtagcagagaattaccagaggagaggatggacataaaagaagttgtggttaaacttaacaaaatcaaattgcaactactttgaagtggacatgttttatttaaatttgtcctagtcaatcttcatgtttttgctttgtatgcatagccaatgtgcataactatttatatcaattctgttatgaatgcagtatcaactccatggtagtttacggttatcaaattggccatcttctatgtcaattctgtcttgaaaaaattgattgaacaatatctcttttaaaatggaagtcaaatattgtagtggcaaattcatttagaccatggcctgggtttagattaaagaaactagatatatatataagtacatataatttcattttcctctatagtttttataaaattgaaataaataaatttgacatttttattttgcttttcatttttcttttccacatgctatcttgagatccaagagggcaccataacctcaatttctgggaattctagaagggatgcaattgcagcacaaggcgatcttggtgataatggaacttgccttaagagtgtagggagaggattggcattaaagatgtaatcatcaagtcgtaacaagatcaaatcgcaaatacttttaagtacacatatatgtgctttaatttattgcttgagttaagttgtacctttcagatttctagtcaatttttatgttcttgttcaatgtttcaagcctaaacatgcaaggtgcaaaggcgcaaagccatttcctaccgtctgctatgactgcattaacaacattcccattagcaatatcttgaaaaaaataatgtcaacattttgtttgaaagctcagatacagaggcaggctttaatttcagtaagaagtgtcatcggccactctcacatgtgaggtacacctatggataaatagcgaatgactgacatccaaactttatatgttttccttgattaaaaaaggcatcaaagaagaataagcatagcaatatgcttgaccacttaaaggtcttataagtcaacaaaccgggcatccatgaagcttcttctcaccatcctttccatgaagtggggtttttagaaagttttacaaagtgggcatcttgaaagcttattctcagggtaagactttctatctcttttcccagaaactttagtttccagtgtgaaatgtctcattgttgataatattcacaaggaaattcatatattgcctttgtctctcatgccaaccattaaactgttacaacattgacttggtgtcattaaagaagactcaagtcaaccttgcccccgaaacaagttgtggggtggggtcgatagcctttaagtccaatgaagatatgcaaaatttcaagtggaggtgaactttttctttaaaacgtctaggacactcctttgtccctcttaccatctcaatcacgtgtcaaccccctttttcatgtggtggtggaaatttgtctcacataattttttttttctttttttttgaaaagtttgtttttttggacaaaagtaagttgaccaaaattctaattatatagataactttagaatggaagggacaaaggtgatgaatgaaatttattaaaatgactagttgtgggaaaattataatcataaattcataaactctaatttattatttgtcaaaattgagtgtgattgttagatctaatttatagttataaagtacttgacaaagaattaaaacaagtgtctattaagtattaacaacaaaattatatatgggaaaattatgttttcactcccgctagacttggtaattgaggtaaggttttcctatcattcataattaaactcaaaacccaatgaaaaagtagaaattgagaggaatgatattatctttaaaaaatctctaaaatacccttaactattaaatgaaaaagctaatcgactaccccacatttttaattttttttttctggctctttcacccttctctcacctatttattagtgagaccaagttgaataatttcctaatcatttttctccatcaaattgaatatgaaagataaatggttaaaaattattattactaaatatgagaaaacttttgggttagaattgaaaatcgttttcgagtgaaaaatctttgtttaaaatgggttgattcaccgtgttcttcatcctaactctcatattgttctcatattcaactgattggggtaaaatccaagattcttgttgtgtggactcaagaagaggttgagattaaagtttcgagtggattataagtgttttcctgaagaagaaaagtggaagctgaagcttgaaggttttaggcaagtagtctagagtaggatagaaggtttgggctaggtaaaaaccttgtactcaactaatttttcttcatagtggattatttgattgcttgaggctcgtgattttttttatctcctcgtaggatttcgacgtttaaaaaattggtgtcattgtctttctattttcttttgtctttgattagcatttcattagcttatgatatttttttattgagttatattgaatgcttaattggagcatgaactaatatttgttattggagcttcgaaagaacaatatatattttagtttttgttgattgatatcaaggggcatgtgaaaatgagtgtgttgatgcaatatcttatatattatgtttgggaagtgttgtttcatttgcatgtgacttgcattaaaaaacttgtttgggagagtgttggtgcatccattattgcttgtgatttgcttatttgttcttattgttgaaaaagaaaattcattcataggagaaaaacaccagaattgttagcatttgtaagacactttctctaaatgttgcaaaaacacatattcactcccctctaagtgttatccataggtgagattcatcttccatttccatagcaattaagtagccacttggttcacatctttatttttaatatttcacaagtttttatttttatttttttatacagaaataatttgaccaggatgtaattatatcttgattatagataattcaaatcctagatataatttgggcttgccaagtgtcaaaatgagaggtaggataaatccctcaaatagagtctccaaggtggctacaaaagataggttgtatgagtagcaatggaccacaagggaattattatagagtattgaaataacacctaaggcatgtgctaaaaggacaaaatgaagggtctacacatgtttttcatttcatatatttggtactgattaacataatattctaaaatattttgatttaatctataaataattatattagttttttgaattcaaaattattcttaagaattgaaaaattcattagagaatttaaattattatttatatcttacttaatttataatttatttacctaaatttaaaaaatatagttatttgtataggagaaataataaagttatgattcaattttgatgtactattttttttagtgattagatgtattttttaagttccaaattatttttaaaaattattaaatccattaataaatttaatacaaagtgtcactcgagttgaagttcatttttataatgacaaaatttataaaaatataattatgtgtagaaaaaaattaatagagttattatgaaccgacttttatctataaattttttaaattaatgagtgtattatttaagttttaaattatttttaaaaattactagacttgttaataaatctaacatattaaatcttgtttaatttggagttgattttcctaataaaaaaattagaaaataattaccacatgatttaaatcttaatagaattgaatgcttaacataaagctcatatgtttgtttttattaaaatctaaatgctattgtgttaggttgtttattttgtatgctagtaatatttgaaaataaatagaaaaaaggaaagaagaaagaaaaaaactttttttttactaagataaatgtaaaaaaagtatctcggcaatcttgaaatgaatcacctcactagtctactacctcaagaaatctttaccatcctttctcgatgaagtatctctatagcatataactgtttttctagactgcagactcttagtagagcaaactatgcagaacaattcttgagtaggctttggaaacattattgctttgggatgccatatacctaaagggattagttctatgagaaacttggttacatttcaactgactggaaaaaatgggattggcaattggaggcttgaagcggtagaaaggatgaattttctgatttaaatgttgagaaattttttaacattatagttccattgatttaaacgatgatttttatactatggatatttgggtttatcataaaccctagttttattatttgttgaaattgagtctaagaataagattttatatcaacagccgaagaaaaaccttgattcaaatttagtccattttctatatttaaattaacaagttaactacatttctaaagaaaaataacctctcgacttttaagaaataccaatgaacttaatcattcatattcattcttgcatattcaaatgaatacttacatactcatgggatcacatatatactcatatatacatatatatgaatacataaatttatgtatattcccatttatacaaatatgcatacaaatatctcgattttacttactggatattgccttagtgaggatgtttgctagttggtcttttgctttgacaatgggaatcggattatcttagcttctaagttctgcttgataaaatgccggtctacttccacatgcttagttcgatcatgttggactgggttatgagcaatatcaatggctgccttattatcacaaagcaagttcatctcgcaactaggaggaaagccaatttatgtcaacaatcttcttagccagagtaactcacacaaccctttagccattccttgaaactccgcctctgcactagatagtgctattactttttgttttttacttctccatgttaccaggtttcctctaacaaatgtgaagtagcctgatgtggatttcttgtcggagatatttcctgtccagttagcgtcggtataccccgtaatttccaagtgcccattctttgagaacataattccctttcctagggttcccttaaggtacctataaatttgagtcactgcattcatatgatcttcattagggcaatgcatgaactgactcactacactgactacataggtaatatcaggttcggtatgtgaaaaataaattagttttccaaccaatctctgatatctgcctttattagtggggatctggtcagggtattctccaagcctgtgattctgttatattggaacatctatcggtttacaatctagcaatccaacttctgataatagatcgagagtagactttcgttgggaaagaaagatacctcgtttaaattgagccacctcaattcctagaaagtatttcaacctacctaaactcttcatttcaaactctgttcccaacagtttttgaagtttcacaacttcctcagtatcatttcttgtgatgatcatatcatctacatacactattagtgctgctatcttggcttgtcgatgctttagaaatagtgtgtgatcaaaattgctcgtttgaaacccatactttctcattgctaggctgaggcgtccaaaccaagctcatggagactgtttcaagccgtacagggtgcgctgcaatttacacaccgtcttgccatacgtttcaatgtacccaggggaaatatccacataaatttcttcctcgaggtcaccgtggaggaacacattctttacatcaaattggagtagcggccaatcaaggttcgctgcaaaggatagaaggactcttacagtgttcaacttggctacaggtgagaaggtctccatctagtcaacttcgtaccataatcctttcgctaaaagtttcgctttgtagcgctcaatcgacccatccgccttgcatttgatggagaatacccatttgcaccccactatcatgtggcattctggtaaagagacaagaatccatgtcttgtttttcaacaatgcttccatttcttccttcatcgcttagaccacttagggtcttgtagagcctcctatacacttgtaagaatgtgatgcgccgataatgcattagaaaagctttttaaggattttgagagcttctctgttgagacgtaattggcaatcgggtaatttgatttgtgtgtctcaatatctgaagagtagtgttttggtggtttgccacgattgtgcctgtgaggtaactgataacaatcgtcagttaaatgttttgtgacaagaggaaaacttacctcaagaatctctttaggaatattctcagaagttgagtcatgaggtattgtagaatgagggggtgtctcagcgattagagttggtgtctcaacagtcgacattggtggctttgtagtctgttccatacccatggtagttggtagctctgtagtcagtgggatgtccgggatgtccctgaaccaattcaactcttcattgtgtgtcttcccctgaagagaagaattggatggatgatagaacatctcggactcgaggaaggtgacatccatagtaatatagagccgcctatttgttggatcatagcaccggtaacctttctgattggtgacatagcctagaaagagacaacgacgagcacaagagtcgagtttggtgcgctggttgcagtgaagatgaacgtagacaactcatccgaaggttcgggaaggaagcgtcatagtcggaagtactgatatactcgcggctaaggcctggagaggtgttttgaaacccaaaatccgggatgacattcgattgatgagatgcacgacagttgtaaccgcaacatgccagtgagaactaggtacatgtgcccctaataggagggcatgtgtggtctcgagaatatggcgattcttacattctactacactgttttgctttggagtatgaggacacgaggtttgatgtatcaaccgatgttggtggaagtactcctggaattgtcgattcatgtattcatcatcattatcagagcaaagaactctgagtttgatagaaaattgggtctgaatcattgtgcgaaaagagcagaagacagtaaaaacctcattatttgtttttcagtaggtagatccacgtcattcgagtgcaatcatcaacaaagagaacaaaccaatgataacttgatagagtagattttggggatggtccccacatatcagaataaattaagctaaaagttacatcactcttattgttatgtaacgaataaattgccctgtgacttttggcaaaaatacaggtttcacattgaaaatctcagatggataaatcagaaaataaactaggtagtaaatgcttcaaatatccaaatgacggatggccgagccgtcgatgccaaagctagatttgttctattttggaattacctgattgtcccatatgatgtgcctgtcccattttgaagtcatccatatagtagggtccccctttcttagtaccacgcacaataatttccttcgtgagaatatcctagataagacaaaaattagggtacatcagtgctgtacaatttaagtccttagtaagttgactgacagaaagcagtttatgagatatggatgacacaaataatgtattggagagtgataaggctggtgatagcatcacaattccaaccatttgtattgatgaaatagtgcctttagcattcgcaatgctaattcgcctaggagtggtatgctgacaaaagtcctgtgcatcaaatgtcatatgatccgtggctccggaatccaggatccacaagttgcattcactgtttctagtagatccaagagatgctatacctggagtgttgttggtagagtcagtaggaattaaagacaaatggggttcgttgctgctactaccattttattagtactgggctcaatattggtgccattacgtttctttttagcctggagctcgtgcccccaatctgggtatccatggagcttaaagcaagtgtcctgtgtgtgtttggaatttccataatgggagcacattaagccctctgtccgttgctttgaatttggactagtggggttagatttattgagtactagaacttcgtatttgccaaatgggttggggcctgttttcaactccttggaagccaacccaattcccatcccttcatcagaactattccccatcactgtctgtagcaccatttctcgccggatgcacatgtaggcttgctcaatcgttggaaatggctgcatctgtagcacgatgctcttgacttggtcgagttgatcatcaaggccgtcgaggaacacatagaccctctcctcctggagaattgcggtgtaccattgcacatccttagggcactccatgggatttggttgccaaaaatctatttccctccacaagccttgcagctcgttataaaatttctctagagatccaccatttttccatagcctactcactcgtcgccggagctcatacacctgagcagtgtcattcccgtcgaagaaagtgacagcaatggcgtcccaaacctctttcgcattgggataccaaatgaacgtgctaacaagggatgaatccatggtgttgatgagctagcctttgacgatggtgttttcggttctccatcctcggaataatgtatcagtcggattaggttggggtaaatcatcgttaatgtaccctaatttgtctctcctagagataaacatctccacaacttgggaccatagtgcataattcgatccatcgagttttatgccaatcggggcagcatccgccgctgtagttggggtcggggccttgttcagcaccttggccatcttcatggtgagttttgataaaatagaggttgtcgttggtggagaccctcttgtctgagagtatgattcagacattttcctgggtcgttgttaggttgttggggttgggtagaatcaagaagttgataccaaagagtagaaacaaacctgctttgataccatgttgatgagaaaggaaataatttgtatatatggaatttgtatacacaattgctatattaaaatggtacaaaggagctcaatatatagcccatttacgatcttaatttgtctagaaaaatgtctaaggaaagttgactaatctgatcccttcagttacccccaatctaatcccttcagttatgcctgtaacggattatacaactcatgtccacatatagagctaaaatttagtaaacattccatcacatcaatttgaagcttccagggagtttgaaaatgacgtgtttcaactagacctcttaattttcttaggtaagccatgctcattcttctttagttgtgagttttcttgttgatcaaacaagacctacgaaacatgtctgtggagaggcttttcatggagtcccttgtaggagtgctgttagtgcactcatgtttggccatttcttcctccaacgtcactgatctatctgctctgcttgcgttcaagtctgagatcaagcttgaccccaacaacattttggg

SEQ ID NO: 11556 - DNA, 7784 bp, Vitis vinifera
  Intron number 6 from transcript GSVIVT01036181001 (locus G SVIVG01036181001) derived from phytozome v7.0 (chr-ID chr6 ; pos 19733809 to 19741592 reverse strand)
ctaagacccaaagcaagttggaggcctttgctcaggtattacacaataccaattcatgtcttcttggattttcaagatattgttaagttggtgtctggaatgtttcttcattttcatccttttcttccttttattatttagatgtatcattaattttttttctttgacctccttaagtagagagagagagagagagagagagagagaggaaaccagacaaaaaaacaaagtagtgttcctattaaatagcattagaattggggttacttatagtgcacatgtcggggatgggaacttccatttgggtgatttattaggttgtcttttgataagttgtttactggttttagttgccgttaaaattaatatttgtacctagggaagaagtttattcaaaggtatgaagtgtcggcatactaatgttgagcgtctctttatgtattgctctttcctttactgattgtctataaattttaaaagaatttttactgtagtgggttagtttaacttaaaatcatctggttcatctagcaacctattatgttatccatcatggggatcttttggcgttcttgtgaaaaagcattgatagtacgatcattaaatctcatgtaactcatagagagtgagactcttcaaaagattaaagaagactatttcctttttgaggaataagagagactacaagaaaaacagactacaaaggctactagccgaacacctgtatattaaggatccaatagcacaatatagctttaaaaaaaaggatccaatggcacaatatatttccaagattaccctctataatggacgctaacctacataaaatatttaaacattctgatcaaaaaaataaaatatttaaacataaaatctagatgcattaaaatcctagcaaaataaattaaaaagaatcttaaaaacatctagttttgattcttttagggttctttgtttacatgtgcgatattggagaacagtaatacagagtcctacgattaatttttacaagaaattgctaccaagtatcaacaagttcattccaagtttctatatcctggaaagggtggattccccagatcatacctattgaacaaacttcctttgagaaaaacagctacaccagtaccttccacggagtaggaatattttagcatgtggctctagtatgtttatatgaaatattacaaaaccagttcaaaactaataacaagaataattattaagaaacagaaatttgaaaaagaaaaagttaaggtcgcatttgaatacattttctattttttatttttaaaaatagaaattcctatacaaagtataagaactcttatacaaaaatcagaaatttatcctgtatttttacaaattcttttcaaaattttaaaagtttgagaattttttacttcttttaagttttaaaatttttaaaaatcgttttcaagtgcacaaggcatgtagctactctttgtataagaattcctacttttgtatggtactttctatttttaaaaacaaaaaataggaaatttatccaagcatcacctaaaagtgttgtgagatagcacccaaataagtttctccgttagatcaagcacatttgttgcaagtgttgagaatctaaaccttacttttaaggcatccttgcaacagtagtaaatatgatcaagttgaatggttaaaaatggtctgggtggaggaagttttctttttagaatctataattgcaattttatccctacatggccttttgtcttctgctgtgttggggtgactcccaactagaaaatctgcatctatgttcagattcaagtaggagtctggtgcgcccagccaatatagtattttcatgtatgtgcaattgtttttttttaattgaaaaacattataattatagcttttatttaattctccttttttttttctatttgttatcttgtttgtctcttcacattgttttccaattttcttgaatggaaagatttttttttttttttttcccaggtatctttatggaagtatgagctttcatgaaaagcatgcaattgtggtattttcaaagtcttcgcaaggagtgttctgagcttcctttggttcatgtcttgagaaatatcctatggttattccatactttgtttcttttacatctaaatttgaacacttccatggacaatcataaaatatgtgggagatctgatttggtgctataagagtggaaaataataaaatatgtggcagatttgatttagtattgtaaatgggatgttgtgatttaatttagtggagtaaattaggggatagaaccaactaagtcaacgtttctaatttagtttttattttttattttttattttttctgttttcagggtagtgattatttgcacagctatatatatatatatatattttccttttgcatgtactcaagattagttctatatatatgttgtaatcctaaacttcagagatatagaggaacaatttttttatctaaacttttatggtatcagagccagtttcctactggaagtgatacatttatttctggtttcaagtaccataattattattattattattattattattattttctggaactactaggctactggtaggagtttcaagtactagattttttttcatagaactattaggatgttggtaggaggatttgatgttaggaatcagcaaggaggagaattttggagatgcttcacagcaggtatcaatgcctctatttcaagtctcacctcatggcaccagtaataatccttcactgcacatcaccattcataaactacatggactgaattttcttagatggtctcagtccattaaattgtttcttcgtgggaaagggaaactaggatatccgaccggtgcaacaaggccccaaaagaggatgatccaggttttcaaacatgggactcagaaagctccctgatcatggcctagttagtgaattctatggagctggagataggtgagacttgcatgtttttaccaacaataaaagagctctaggaagcggttatggaaacttactctgatcctgagaattcagcataaatctttgacttgaaatcaaagatccataagataaagcaaggaaaccaaggtgtgactaaatgttacaacatcttgaaaggtctttggtaagaattggacctattttatggttttgaatgggcatgttctgtagatagtgcctgttttaagaagatgatggagaaggaacaagtgtttgagttccttgttgggctgaataaagaattaggtgaagtccgtggacaaatccttggtaaagagccctgacactctagccgagaggtatttgttgaggttcaaagggaagaaagccacggatcagtcatgataggaggctcttcttcaaccatttatgagaactcagcacttgttgccactgaagctgctaaggttgctgccaatgctactgccaatgctggtggtcaagggatctcaaagaaagcagggggtaaagggaagatatggtgtgatgattgtaataaacaatgacaaactagagacacccgttggaagctacatgggaagccacaaaatttgaaaaacagtggtagatttcataagagaattggccaaggcatgcagactgcaaccaagagtccaaaaaccataactgaagcatctccattcaataaagggcaattgaaacacctgtattggttattcaatcaagctccattttctaactctttattatcctgttctttagcgcgaacaagtaaatctcttagtgctttaagtgttcactctgaaaattgtacactatggatcataaattctggtgcttttgatcatatgagaagcttgtcaaatctgttttcgacgtattctccttgtccaagtaaccagaaaatcaaaattgcggatggatcattttcattcattgtagggaagggttcaacccctatttcaaaaattttgaccttagaatccgttcttcatgtccttaatctttcatgcaatcttctttccattagtaaactaccaagggacatgaattgtgttgctaaatttttcccatcttattgtgaatttcaagacctatgctcggggaagacaattggtagtgctaaggagattgatgaactctattaccttgttgaggatcctatcaagagtagataagctcaagttgtgagtaatgatgtttttctttctctgttggacatcaaataatgtcatggcaccataggttaggtcatcctagttgttcatatttaaaacaattgtctccttcttggtttaagaataaaaatcctttaatgtttcaatgtgaggtttgccaactatctaaacaccattgtgtctactttcttgcatgaccttatgaagaatctagacctttttccttgatacatagtgacatttggggaccctcacatgtggtgatcgtaaccaaaactaggcggtttattactttcatagacaaccacactagagtttgttggatttatttgttgaaggaaaaaatcaaaggcaaaaagggtttttaaaattttccatgctatgataaaagcactatttcaaactcaaattcaagtactttggaatgataatggaaagtaatattttaactctattcttggagattatctccttgaaaatgggatcatacatcaatctaattgttttgataccccacaacgaaatgggattgcgaagatgaaaaactgtcacttaatggaggttgctaaagccatcatgtttacatcaagggtacctaaaagtttttggggagaagttgtactcatggcctcttatttaattaatagaatgttgactaaattcttggttttgaatctcttcttaatcatttttctaaggtttaccctcatataaaaatattttcatcaattcctctaaaaaattttggatgtacgacatttgttcatattcataaacaacatagaactaagcttgatcctcgtacactaaagtgtgcttttgtgggatattcacctacacaaaaggggtataagtgttatgatcctatctctaggaaaatttttgttagcatggatgtaaccttctttgaaaattaaccttaccttaccaaaaacactcttcaaggggagtgtggttgagaaagattgtttttgggaaatgtttttacccttgccaacatttgatgacaatgtgagtcctagtctttcacattcttttggtttaggtcctattgaattagaaaacttaggttcaagttcaactccttaagtgagttctattatgccaaacaatgaagaattgttaacagagggagaatcactatagacaaaatctcaaggcaagaaggagaaatcatcaaggcaatccaaaaagtcaatactcttgccactatccaagagtcagaactagtcatagggacccaagaaggtatagttttacctattctctcttcaaatacaaattctaatgcttctaatgaccttgatattccttattacccttaggaaaggaaccaaatcttgtaccgtgcatcctatttctaaatatgtgtcataccataggttgtctaattcctttagagctcttactactaacatgtcttttatggagattccaaaatatatatgggatgttctagttgttcctttgtttctaagtgcagaaaagcagtcatggaagaaatgaggactcttgaaatgaatggaacttgggatatggtaagtttgccaaaagggaaaacaatagtaggatgcaagtgggtatttactatcaagtataagcctgatagttcgaaggagatgtataaagttacagccaagggctttatataaactatagtattgactatcaagagacgtttgcaccagttgccaagatgaacataatctaagtcttattgtctcgcaataaatctaaattggccactacaacggctagatgtaaagaatacttttctaaatagagaattggaggaggaagtgtgtatggatttaccccctagttttgagcaatcatttggaactgaaaaagtttgtaaattgaagagatctctctatgggctgaagtagtccctaagagcacggtttgatcgtttcataaagtccattcaacatcttgggtatatgcaaagtcaagccaatcacactatgttctacaaacattctggtgacaataagattgtcatgttgatggtatatgcatatgatatcatcttaacaggagataacattatgggattggagaaattaaagggggaacttgctatagattttgaaattaaagattttggtcagttgagatacttccttggtatggaagttgcaaggtctagaggtggcatatttgtttctcaatgaaaatatactctagacttgctcaaagaaacaagaatgttgagttgtaaaccaactaatgccccaattgaccctaataggaaattggggcaaacaaagttaagctcaagtgtggataaaggacgctatcaacatttggtaggtaaactgatatacttatcacatacacatcctgatatagcatttgtagtagtatggtcaaccaatttatacactcacctattgaagaatgtttcgaagttgtgtatcaagttttgaagtatttgaaaggaagctgagagaaaggattattgttcgagaaaaaggggcatatgcggattgaggcctatattgatgttgattgggaaggagataacaaggatagaagatcaactttaggttattgcacctttgttagagggaacttcgtaacttggagaagtaagaaacaaaatgttgttgctcgaagtagtgtagaagctgagtttcaagttgttgctcatggaatttgtgaactcatttggttgaagaggatattagaagaattgaggattccttatgagaaacctatgaaattctaccgtgacaataaagcaaggattaacatagcccacaatccagttcaacatgatggaactaagcatgttgaagtgtatcatcaattcattaaggaaaaacttgaggggggcctagtctgtatatcatatgatcctataaagaaacagctagcggatatcctaactaaaggccttccccaagcagccgtttgaagttcgtagtaaacaagttgaaaatgttaaacatcttcaaaccagcttgagggggagtgtggaaaatcataaaatatgtgggagatttgatttagtgttgtaaatgggatgttgtgatttaatttagtggattaatatagaggacaaaatcagctgagtcaatgtttttaatttagtttttatttttttatgtttttagggtagtgattgtttgcacaattgtatctttttatttttttccttttgcatgtactcaagagtagtcctatatatatgttgtaatcctaaacttaaaaaatatagatgaacaatttttttctctaaactttcaacttccatcatctttttcatgttcaggctatttatcatagaataaagggatgagtgaaaatggttgcagcttgttttttatttataatgtatatgttcttaagctctttacttaatcaacttataatttttttcaacttgttatttttatacaagaaattttgcttgagaactccattagggcttgtagctcctgaaatttgaagcctactttgtagcttcagaaaatgcactaatacttccatttcatatttctcatgttctggttatgtgctgatttatgttgtttttttccctgagtgcctatgatggcatatttacctgtttgtattcatccctgtctggccattgtgatgtgcag

SEQ ID NO: 11557 - DNA, 1723 bp, Vitis vinifera
  Intron number 2 from transcript GSVIVT01038419001 (locus G SVIVG01038419001) derived from phytozome v7.0 (chr-ID chr9 ; pos 12009006 to 12010728)
gttaccaagggttgaaggtaatatatgtacattgattaaggctctgatattaatgtttttattctttggcatctatcatttgaaattaggttgcctgcaaggtttagtaatcagtagtgatctttaaaaacgaaaaataccctgcttgttttttttatttactttttgcgtcaatggtttttatttttattttttcttttttgccaggcaggggaattattgctgcatgctatagtctatttatttcatatagatgacataaattgactggatggacctgctttgttctttttaatgcagttgtgaaagagagaaagcaaataccctagacctaatgattggatatagatgatcaatttagctggaatacacatgcatcatcatcatttttattattattttctttttaaataataagatctttcttagataaacaagtaggtagctatgtattggcagaagttggtgcacattaaaccttttatggcatgagttttacctttttgaacttgaaccggtgcttaaaagaactttattttatgctgatattctgatactaaatggaaaattccctttatccttttcttaatgccagataatagttagggaaggaattttataataatacctctagttttgatggaatctgtgcatttatcccatatgtttcatatgttctctttcagattctgcttgggccctctagaatctatcatctttagttttttattggaagtaattctctgaaacatccttttagtcctatttaaaatttctatcctttaaagcaaattgtggataagttgcaaaagaatctttaaaatttaagaaataaagaaaaatatgtccatttcttgaaagagaaacatcaattgctattagcttctatgaaagaacttttttttttttttacagatattttagttatgttaattttgaatgtcatactgatttagtcttctaatctcattaacttttctacattccatttattcccattgtctggaatctgatattcattttgtttcttctcacagtgatctttcctataataattttacttggccggttgattgccaagaaattcagtaagtagatttattcataagcgtagcattcaatatagttactacttaacttccttgacatgatttttcatcatgtgaattagaaatataaatcgctaccaaagctcatctcagaagtacaacttgtaagactcttttcttctctttaagatttgtcgtaagttctagatataatgagtgaatagtaatgttaattgtttggtttccaactcaagtgaggcaaattttgagcttacatataaaaacaatttagtttgtaatgctaaatgaagtaaatgaaatataaaaacataagtttcttttgggttcctcagttatctaagtttttttttttttttttttaatttcctcgtgttgtggagaacaaaatattattgattcatctttttttttttttcatttcctgcgtcttgcttgtgccccttctcctctctttcctctgttgtcatggcattgccttttaatataatgtttttatgtgcatgtattattattattatttttgaatttaagagtgtgtacaatgtaatttgggctggagttcttggatgttgacttagatttatgtttgtggtttgggctgtgtggtgatataggcaggcagcagatacttttggtgggtcagagttggcaat

SEQ ID NO: 11558 - DNA, 4999 bp, Vitis vinifera
  Intron number 3 from transcript GSVIVT01035629001 (locus G SVIVG01035629001) derived from phytozome v7.0 (chr-ID chr4 ; pos 2825000 to 2829998 reverse strand)
gcagaattttggtgagtttcattgtttgtttggatattttcttaattaatgctgagatttactgaagttaaaattcaatgaattttcaacctccaaagttctgaatctttgctttagtttatttgctttgctaaattcttagatagtaggaaagcaagtaactaaatttcttgcttgcacctattgcaaggttatatatatgatgttgtcacagaaatcatgtgggacatttgatcattattgctaatgaagctctcaaaactgaaagaggaagtactagttatcttagaaggtgattattgggtattgggtgaactaatgttgtttaggtcaggctttgccagtgcctgtgcacacctaagcttataggttaatatttaaggttggttaattggtcaactaggctattttcagcaaggtaactgacatgcggtttcataggctagtgatgttttagttcctttcatccattttgttgtattattgggttgtttgcatttacatctatttctttgtggattttgtttgtgagcttcatagtgtagttggcctctataatttcatttgtactgatatcgtccatgactttattttaaactagatatttcttttctttctccttgacttttcccaccaagactatgaattagtatcaataaaaaaccttataatttacaataaagaaggtattatgtgcaatcttaacgctgtaatagaatatgcagaaagtttctagaatcatgccttctatgcaagtgttgcatacctctaatcatccaataactaattcttctttctctccattattctttggagttgcatccccttgccacaaaatggaagaatggattttaccctgataatgtactatatagctgctgaatgaactttctccataagagattagtcatgttttaatttgaatgatgcactgagggtgggtcatgggcacttgcataagtgttatcatgttatccaattctaccactgtcgatagtcaatggttccttgaatttgagagccagagcataagattctaatatgagtttctaattgttgccactggctacccaattggtatttcagcagttagtttatgataaatgcgattgtcttccattataaaacattcttctccacataaagatcacaagttaaactccacatgacacttcaatataataggaattttgcatctgaaaaagagtttccctggagattttcattcacattgatatcacatgagggtttaaaaaaaaaattaattggcttctagtttctgcatcaagcccaaaaggccaaaactgaactgccctagggtgttttcttacttttcagagtcaagaactaatcaatgtgtatatgaaagaatagacatttggttggtagggattggaagctctgtgcctactgattttttctcatgtgcctattagaatgaagagaaaattctgtaagatgataagacgagtcatcctttatgacatagaatgcaggtgcatgtgagacaaaatttgcttgagataagcccaccagaaatgagaatgttgattcacaggtgttacagagagtgccaattagaagctagatgattgttggttgagatagttcaactgtgctttggatgttatggttaaggtgaagtgaaaacagggaggacgaggaagaccatcttttttaaattttactaaatacatgttaagctgtgatttaatgaaaattgtgaccttacatagagtaccaaggtgaaatgagttccatacaaacaactggattaggtttggttcagtgagttgtgttcaacattagagttggtttatctatcaacataaaatcaggctctcctaagtttggatctaatttttctatctagaatccaccaatctatgataaaaacctgacttgactcacctttatcaggttgggttggtacattggtttgcacacaccttttgcaccttactcaaatagatacttcaaacacagaaaaatccaccaagaaaaccactagaaaaacatgtaatacaataagggtgccactttgtacagaaaaagaatagggaatacaatctactgtcaacaatcaaagcaaggtgagctagcacataatatcagataaagaacgaaggaaatattgccatggagccatatcgatttaaactataatatttttgcagggaggatcctcacattcagaacaactaacagtttttataaccatcagcagtcaaaactaggaggctttagttattatgtatagaatgaaagaagtatttcaacaggcccatcttaaatcaagtcaatcttttagtggggaaattcaaatcagttacccgttgttagtaatcccatccaacatcaactttctgatatctctagtagtttcttggtgtactttgttttttattgaggtttctgcagaggatggttagtgatgtctgcaacttgtgggctttctgctttcccactcctacaagtgttataaaggttatccaattttcttactttagttcaagattcagccctcgtctctttagtggtagttttcattttttttagttctttgtcttggatttgaatttctgagccatgggtaatgcattcttatagagctgattcctttactgtaattgtattttgacctagtttactggtagctctaaaaggacataccgttaacttgggttacttcagttgcttatggtttgctagtttcttgtgttaatttgcttccatttgctcaaatggaatcaaattaacttccatttgtttctgtttcctgaacgccaggacaaatcctgttgaaagtagataaatcatcttgttgatgatgacacaatctacacccatattgtgggttatttgcaacattgcacattgttcatcaagacagcaacatgtgagggcccaaatgagttatttctccaaattcctgtcttatcttggatgctgggaaattgtgtatcatcaaggctactgatctgaagtttccatcagatatggctttgcactctgacatgttgcactttcttggcctgggatcagggccctgggaactttggttgggctctcctcctgtcaatggcaggtcaaagtgaccttactgcttgctatattgaatgacttcggaatgttggctctgtacttagtagagaccttttaggacaggtgcatcctctgatccactggcccacctgagaagcgtactttgttgtgtctttgatatttattgcttgacattctttttctagtgtctactcgatcactagttttcctgctactagccttgtagactcctgtcctcattggcattcagttggtggctccacatgcctctgtgtggctctgaactcagtgactctctacagaagcctgacttgtagacctgcagatgccaaacttccttgtaaggcctcaagtgacaccatttgaagggccctctttcattggattctaaattctagtctggctgtctttgggtattggtaccttcctctttcgctatatagtgcctcctacaacactctacactcttccttctcaggctgctctaccctcacttttgccaaagcacccacatctcatgactgtttatttgtctcctccatgcttatttctcttcataatgggaaggttgcaacccataagtagaaaagaaagagtttttatttttattattattataaaattttaatttgtgatgcaattatcttcaataaactaggttaatgatataagaaaatggacagcaacaaaatatatttctcgaatcctaagcaaatgtttgtttaactgaattttccttttcaagagttttgccctgacttgtgattgatgtaagttttgttcccagtcttggcgcttatctagcttttgcccttctatctgattctaggttttccggcatgagtctatacagggtttcttgcattccatcaattggtttcacattgtttgtttgacatgaccatacatatttccagcaattttcttgtcactgtaggggtttttgttatttaatagatactcaagatataatgttgcttttgtaatttttttttttaaaaaaaaaaaaaattggaaacaagaaatacattctttgaaccaaggaaaaagatgtagatacataatctattgtgtcataggaggttctaaggtttgtcctgaattttcctccaaatatctgattttggactttgaattgcccttgcatcttcctcctctcctcaacttgtcaattcttacaaacaggcctaaaaaagtctcctgttttgacttgagcttccttgatagtaacataagcatacaaaaggggaccactcaatcaacaaataatttgatcactggcccaactgctcccatggctttcttggtctgactgactcaaccatcttggtatttctcttagtaaattgcttatgtttggatgattcatccaatcttcaaagttatgttagatcaggaaatgaccagcagtggcttttgaactttatacttctccgactaggagtggattctcattgtcatgaatggcatcatccccttggtaaatggaatgggtgcaaagttcagatgtccattggtcccagaaatgtctacttccaaaagtcacggcatatgttttatcatatttttaattctaaatctacaaggacaagtactaaaaactgtaacggaaagaagataggttaggcacctggtatatgcatatccatgatgttagaccttgtctaggcaaacccaagagtaacacattttgatgattatagcttggaatgccatatgatatgaagagtctcttgctgagtgtccaagtgttatacatggttagaaccctgttcattttataagtattctggtaacattggccaatgacttctaatcctatgccataatcaaaatccaactatccaaagatcatgaaatttttttttgtagatcgggcaaacattcagtttttaattccaccgtgttaaatattaacatatcaatttgcagg

SEQ ID NO: 11559 - DNA, 5181 bp, Vitis vinifera
  Intron number 11 from transcript GSVIVT01026461001 (locus GSVIVG01026461001) derived from phytozome v7.0 (chr-ID chr 4; pos 23174906 to 23180086 reverse strand)
cttgggttatccacaggtaggtcaattatcttttatgcattttatttatatattagttactgacaaaaattttcaacaatgggaaaataacggttttcattttaatgatttggacatgatttgtgtgatattttgtaatacttactattccatatcagaagtttgtctttaattaaaacctcattttgtgttctctattttttattttttttttggatgagaaataacaatttcattgcattatgaataaaaaaagtacatgaaggatgagaagtactaaaagtaaaactacataaagatgtagtagagccccccataaggagcttgaaggaaaattatagtaattaactaaaagtcaacaaacttagggatgcgtattatcccctgcagaaaccttcaagctgactgtggcatttagcgagagaatctgccaaatccagttgtgctatccactgaaatgaacaccccacttattaagaaaggtccaaaatcctgcatgtcaaagagcctgacatcaaagggcttctctttctctgagacatccaagatataactgtcttgaatcaccctccactgagaaattactgaggcaaaagtagttgcctacatatatctattctttaggtttttatttatttatttattttttaatttaatttcctgctggaagttttacattattatattttctttacacatttttgagatataaatcttacacagattttctgtcctaccatttcttgaaacttcttggacacattgctgtagttcacaagatgcatcatgctgatgacatgatgaatgatgtcagatgtggaaattatttactcccattggcaaggaatttgagccacctatgactttgcaaaacttaatatgttgtgtggcaatgtggttcatgtttcattgcattccaaaaaataatttttgagttctttctttttaagattatttttatcttctttcttgttttatctttatttttttctttgaaggattcctcattcttcatatataatgaattataagttcaatgcatcatgtttagtaaaaagatgaatattccttgatcattacaacactcccttaatcaaaacatgatttttttttatttatctttttctcttctcctaacatttgttttttgggattgttgggcaaaatagatagatattccttgcagggttagagatcagttccaccaccatttgtaacaacccacttcctctcacgtggatattgtttgctctagtcacagataagaggaaccctttacatgtatggtttcaagaacttttcttcctagctaatgtgggatctcacaatcaccccctatacaggcatgatgtccttgccatgtcctagaagattacagggtcagagttagaaaaataccctctacaaggttagatggactctcacactagggttggagtttggttctaatattatttgtaacaacctttttcctcccatataaacattatatacacgaaacaaaaagtcctcacgattttaaaatgcatctacgtaattaaaaggagtccactacatatgtagtgtcatgaactttcttctttagttgatgttggatctcaaacatgatgtcatcgttgttgtggcaacatgggatggcgaggctacatggataaaccctctttataggataaattagataaactcccatacttagatcaattatcaacccttataccattcataatgacatgcttaccttgtatggattttttttttttttgataaccaaggaaccttccatggctaagcccttaggactttccatggggatccaaatcttggggtgttgatcgccctgtaacaaccaacaccaagtaaattcagggcatcatcagtggtaggattcgaacccaaaaccatgtgctacttattaggaccacagttcccagtattcgccctaatcaactggactaccctggcaggtgtcacaagtacatttttcctacacaagttttcgcatctgtgtagcgcttagaggctttctaagctagcctacacccttccccatgggattgcaacacaaaagcacccgagtttacaaggcatcgaccctaacttgtattttattaaatcactaaatagaatacaagactcaagccagactcccacaatcacttcagtgagtttaggcttccctcatgatcttctctctctagatctcaatctatgctaaggaggttccccacgtcctcctttatagagtggtcaccacccactcttagtcagactaggattaagaatcctagtcctactaggactctaactgataggttgtggcaccaatcaatcctacaaggactttgagtcctagtcctactttagactataattacgataggcatcaagactctttcccgtgcttgacttgcaatcctactttgagtccaactcttcatgctgcaaccacaacatctatataagtggttcgcatgcatccattgttctcttttggcctacacatttagactacatccattcgaggcaccatgctcttgcatacatcttgttgctattgcggcctcatgccttgcccaagccctcttcttggtgcaacaactcgtcatagcattacgcccatgactccacaagtctatgtgcccatatatcttgtgtctaggtctccttcttggtgtcaccctaaccatggctttgtgcccatggctcaccaaactatctccttgcacaaggcattgctcccttgtgccaccttgttaacattttgatcactcatggggccaaggtgctgccccatgaagccttagtgtcatataatccgtgtcaaagggctaacaaaccactctcactagctggagtcaacaccctcgtcgacttagattgtaggtaggcttggaccgcttcttcaaactgccatagtgtcacatctcattcccaactgacctctgattcggggctacccttccattgcactagatagttagttctttagtttttttcactcattcccatagttcgatgggccaacaccttttctacctcgcaatcaaattgcttcttgatcacaaatggagctcgcttcatctatatctttcccgggtctagatcctcatgataaggctttaggaacctcacatggatcgtgggatatatcttcatcctgtcaagtagcttcaacctgtaagctacctatcccacccatcgtatcaccttgaaaggtccatcatacttaggaattagtcccctctatctggttttgctattgatcttcttgcatatctgagtggtcagtttcaaaagtactctatccctaatctaaaactttaagggtcttcggctgttgtctgcatactttttcatttgtcttgctgttttctctaagctctcacaagcttcatcaagcatctccttcctggaccttgcaaatctataagccataagacaattaccaccagtcctttgcttggccacctccaagggcataagagccctgtggccagcttgaagggacttaaccctatcgctgagctcttctacaagttatatgacaactgagccacgtcctctagatcaactcagttcttttgtgttgcaataacatagtgtctgagatactcctcaaatagggcattgatctgctttgtttgcccatctatctgcggatgatttgttgttgagaacttcaactccgaacccagaagtttgaataacttagtccagaaccaacaagtgaatcgagcatcacggttgttgacaatgtctttaggcaacccaaagtacttcaccacatggttgaggaatagccttgttgcttcctccccagggcatgcatgtggtgctagtataaagacaacatacttggagaatcaatccactatcataaagatggatttgaatccccccaccttagaaaaccattaatgaaatgaaatccatagatttgttatcccatggtctctttggaataggaagaggttgtaacaaccctattgctttcttcttctctgtcttgtctaattgacataccaaacaaggccggacataagcttgaacgtcctcccccatctttggccagtaataggacttggatagcaatgctagtgttgcttcttcaccagggtgacccacctacttagcatcgtgggtctctctgagtagttccttgcgcaaattacttcctggcacagataacttgcctcctttaaccactaggaggtcatcttctagccaatattttctggtagttccctttttcactggctgcttcaacttctcgtaagtagagtcaagcttagcagcttgcttgatcctctcattaaattatgagatcacatgtgatagcgtggacacgtactctatcgcttctttccgactcaaggcatctgccactacgttgtgtctccttggtcaatgcacccactcgaacttgaagttagctatgaattcttgccacctagcttatttgggactcaacttcttttgggttttaaagaaggtgtttgccacattatcagtgactactgtaaatatactccccaacaagtaatgctttcactactctaagcaatgattaactgtggtcatctctttcttgtgagtggaatatctctactctgcctcattaagcttccgactctcaaaggctattgggtgcccttcctgcaccaggaccccacccaaggccctagttgacacatttgtttggacctcaaaggggagatccatatttggtagacacagcattaactcaattgaaattgctactttcaacttctcaaaagccttctggcaatccgagctccaatcccaatgagtatccttcttcaaaaggtcaataaggggagtcacaatcttagaatgaccccttattaaccttctatagtagttagctagtcccaagaaggatctttattgccgcatgggttttgagagtacttttcccatgatgcttcccaaatctttttacaatgtcaaaagaacataacagtaatagtgatactaggtttcatgctatttcataaccgggtcatgattattgagttttctctatgccattttttaatgtcctttgaatcatttgacaaaatttgtaacttgccctttgccctaagatacacttttacagcactgtggtgctgtcaccattgtaacagttattcactacatttatttttcagtgtagga

SEQ ID NO: 11560 - DNA, 7614 bp, Vitis vinifera
  Intron number 1 from transcript GSVIVT01025786001 (locus G SVIVG01025786001) derived from phytozome v7.0 (chr-ID chr8 ; pos 11881505 to 11889118)
cgaggctcttcaaaaccctcgccatcgtctcaccagttagtcttcccttcatctatctctctctcgcttcttttgttatttgcacatctacacgtgtttggatttctttttttatttttaatttttaattttttaaaattttttttggaattgttctgggtttgtggtttctttttcgatccggttggggttagggttttgaggggattgtttccaattggggtttaattgtgtcagatctatgtctgctttgagaaacatgccatggttggtttgtgagaaaaggtgggaaaagaaagataaatcagaattttgaatctgggatatttctttatatcggaagtcgaggcaatctgtttagattcaaagctgtgttcttttttacacgaaatagggctgaccattatggtttaattttcttggggcttctaagattgtctgttagtgtgactatgagaaattcttgaactcccttagatcagatttgatggtgttggtattattttatggttttgtaaagtaaattgtttatttagttcctctcggtttaactgctgccattatgtaacttcttgaatgttttcttcaatatacgataacttgtcttgaggctgtttggttttatttggtaatggtttgtccatatttttacaatgttcttgctgggtgattagatgtgtgtttgaggttttgttaacttatatgaccatataacttggattagctttttgattcagtcaaactgagtatttattagatattgtgatgatgatctttctagttctctttgtgtacaggagtaataaaatcttctgtcactaattttttttgataagtaaatgcacagaaaaaatatattagaataaagggcgccttaaggttgactcaaagcatacaaggggtatacaagaggtgccaaaaagcaagaacaaaaagaaaaggggatacaaaatatcaccagccctcatctagaacccaaccaatcaaaaaaactgattaaaggaagaggtccttcatctacaatcgacttagtccaaaaccaaaaattacatacaaaagaatttttcatcctatgaatcgaaaactcctcattttcaaaatcaattctatttctttccttccaaattgcccaaaaaagacatgagggggctgccatccacaccttactacacttcttgcccatgttgataccatgccaaccaagatggggatatctaactgaataaggaaggacccacattacgctaaaaagagcaaacaataactcccataaaactcttgccatggtgcaatgaattagaatatgatcttcctactaaagtgggtttttatgcttgggaagcctcttggggtaaggtgttaactttggatcaaaaggagggggtggtcactaataacatgaattttcacatatcaaaaaatgatatgtaagaatgagaaggtgcttaaatatagactttttttagataggacacaggggtgcacaagagtatacttgttgaaatacacgttgccaaaaggccaaacatggcaaagggcttcacaaaaaccaacacccttgccttagttagagctcaaccaatcaataaaatcaatcatggacaataagcaatctcttgtgtacactctaactccaaaaaattgtacattaatgatgtttgatatcttgatccttttttttttccagtgttttcaagcgctctcctatttctccttccaaatggtcaaaaataagtataaaagagctgctcaccaagcttttcttcctcttctttctaacaaaggaaccatgccagcgaagaagaaattctttgactgagtgcatcacccactggactccaaagagagcataagttaattgtcataacatgattgttatggaacaatgaaagaggatgtgattagttgtttcttcttcccctttgcacaagtaacatttattcagcatcctccaatccctccttttgagctggtctagtgtcaatatgcttcccccatctagcttcctaagcaaaaaaaggatcctcatgggacccatggattccaaacaatgcatgagaggaatgcctgcattctttcatttgatgaggaggaatatgctaggatttaactgtgaattcgccacccattgaaatttgccaaaatatattttcctccttatccgtgcttagtggcaatattgtgattctcacttaccctactcatgtcctttatggcttttaccttctgaaaatttgttctctccatggccatagttcctattaaggtgaatactgtaattttatttcaacttaactcatgtcatatgtggccttttctccctttgccttctagtatgttctagcaactttagtttgaatttgaaccatgttatgcatacgtataagcgtaaatgttgagtttttatattgcctctcataaatttgatcttttatttgtgtcatttgagtatattgtctgcccttcgacgccattgcatgccatggagacaaggacttgtgcttgagagttgagtgaacttatttgtattgagactggtctcctggtctaagtcaaccattgcaggcagacagtttcttcttaatggtccaatctatgatttcttgttggatgagaaatatgttatagttatggaagtctatttcctttttcatttttttccttgctggcttaagaggatcatagatatggagcacttgttttggacaggacaaaatggaaagttttttgttaaagccctttattcgaccttggagtcagaaagtactataccctttcctgctagtgtaatttggaattcttgggttccttcaaagctgggtttttttcgcatgggaggcttcttgggcaaaggtgctaactttggatcattttttttttttgataaatgagcgcaaaatagattaaaaaaggccagaaggccgcaacgcatacagggagtatacaaggcagccacaaggccaaaagcgcaaaaataggaacacctcaccagcccttagggagccgctaaccactccaagaagcctaaaagcgaagaagactctcccatatacaccttagcccaactccacaaactacatacaaaagaattcttgagtgtctgaatagccaaagagccccctctaaaagctaacctattttgttccttccaaaccgtccaaaaaatacacaacggaatggaattccatatctttttcctttttttacccacaaaaaggcccctccaacaaaataacacctctttgactgtctttggaaacacccactgaaccccaaataaggcaaagacgatctcccaaagggccttgaccactgtacagtgtaaaagaatgtgatttacattttcctcttcacaaccacacaaaaaacaacgatttgggagctgccaccctcgcttttgcagcctatccaacgtgaggattttttcccaagtaacctcccacgcaaagaaaacaactttggttgggaccttgtccacccaaatgcttttttttccggaaagacgaggggattgggggctgccagcatattataagccacccgaatccgaaaaatatcaagaccccctcctttccataacatcgagtcctcctctgaggatatcctgaagtcccttagcaaaagaagcaactcttctattaacaccagctgctagtcattagaatctctaaacaatctaagatttcaccctctttgaccaaggcttgggtcccacacttcattaaccgttgcgttactacaaaccgccatggcataaagctggggaaacacttgggacagcgctacgttaccgcaccaatggtccgtccagaacataaccttagtcccccttcccaccctgaactccatgttatcccaacactagcttgtctccttcaatatctccttccaaactcccactccaaaaggaccacgaacttcattagatctccaaccacatccctctaggccatacttcaccccgatcaccttcttccacaaaacatctttttcaaaggcaaatctccaaatccacttgcccagtaaggccttgttcaataacacaatcttcctaatgccaagaccccccttctccttttgagtgcacaccaccccccaattgattaaatggattttcctttccaggcttccccctccccaaagaaaatctctttgtaatttttcaagccttttaaccactaacttgggcattctgaaaagggacagttggtagatgggaatgttggccaatgtacttttaatgagggtaattctcccgcccttagagctaactttggatcatttaaagaggaaaggatggtttttagaggaatcatctatttggatggtttttagcaaatagatgtttcctttgtcttgaagaggaaaagatcattgatcacatccttatccattgtgtcaagacaagagtgttatggatttctttgttctccctatttggtgtgctttggatacctcattttgttagggacacgctcttaggataacatggttcttttgttggtaaaaggtggaaaaaggtgtgtcaggcagctcctcttcgcttattttgaatcgtatggaaagaaagaaataggagagctttcaaaaatgagaaacagcccgtcgaaggaataaaacacgctttcctttgtaatctttggtattggtgtaggttgtttttattttttggtccttcttcaattgtagattttgtggattgggtgggttcttttttaagggacattgtttttgttggtccttctccttttttgcgctcttaagcattcgttgtatacgccccatgtacttcggagtgctgttttagcgccttttgtttataatacactcttttcatttactcttaaaaaaaatagagacggaacacttgtgtgagaatttattcctgaacccaagcctttttggtgtttgcctctatttttagacagcaatgctatgccacaagcatgctgtataatccataatgatccactagctactgaacttttacaagcccgagcaggattctggttctgcctaccttcttcaatgttccatttgcatgatctgtcctataaaaatagataattaaaaaagaagaagcactctcctttgcaagactttttgccagcattatttcaaatatatatatatacacatagaaagttaagacttacatataaggaataaaacagcaaagaaatagcttacaaaaggatactgtgggatcaacctatttcagaaactacagaatgtgagccaatttctatgaaaatcagtgatataattcccttgttcaagttaacaaagcacgaactaatcttctgcttatctctgcatatcctttgaaagtttttctataatcgggggaaatgattcacatgctaaactgagacccagaacttgggaacagccttcccaactattagtagccttatcagtggatgctggagtataagaaggtttgctaaaaaaaggatgagaccgacagaggatgcaactactgagaattttctccttttgcttagatcaagaacttctgtgtgggatttttaattatggccaaccgcacaaagaaagaaactttgcacaggatggggatctactgtgacaaaatacagggcttccactctcaatcaaatagaagaaaaaagtggctagaaaactcttgatctatcaagaagacactttatgggtgtgctttctaaaagcacttcccttgtgccattttccattctagtaggactaagcataggccatgcttttatggtgattttccatttttttttccacagccatatctcctcctttttgcttgtcattgttatttcatttattattttttggttggtacatgtagaccagggtatgcattcctgagatgagaacaatcatgtaaattcccaggtttaggacaatgcaccgtaatagtacattcctcttgtacaatgtacaatactgctctatagtttgtgcttaagggtgttgtgatcgaccccatgtacaaattggtttttgccttcttacgcagctgatattgatatgggcacattcttctatgtttgccttggtttacttgcttcacattttagaggaggagctagagacaagtatatgacatatcctaggaattagtgattcattgcatgctgttagttttacttttacgataacataagcttttactaataaaagaaagcatgggatagttattggcaatacgagctaaaaatacccagaatatgtttaagagatatctgatatttaggagagtcataaagtgagatctttcacatgcttctcaaaattaatggctgaagaaaatagggtgagagctactagtcagaacctataaggggaatccttcatcttaaatgcaattgcgtcttctcttttttggcatgaaatgtcatcaatagtaggcaaaacagacgccaaagtacccttatatgcatatgtgaaacgtaatgctattataaaaagatgagcttctccatgtttatgggacatttttgtcacaccgattctaggatttcattgctttttaatttttctctcacatgttaaactcaaataatacacttataaattgttatataggatagatgttgtctcaaaagctcttctacttcagaagattattttctattgactttgttctctgtgtttcttcttttagaagtctttttgatctgtctctttctggtcctctcattcttatttgagtcttttgaagtagtacctttcactgttacatcatttttacttgattgaagaaaatctctttgttgagatttagtgcatctgacagtttgccccatagaaccactgtcatgttgacatgtcattagtgcttcacccttttaacgcatacatgtaacacagcttatatgttaagaggatagattcacttcaatattcatatcttgtattgttgtttctagttggcttcaacagtttgtcatgtacctaactataacatgcctgtgcaaattgctagttggactttgaaacttctatttggaagcaccggctatttttctgagttatgggcataatattatttgctaacatttattctgatctatttatgcttccagaatgtgcatattgcaaatatttcatagatgatatccttcaaagtataaattttcattgtactttgtccatctctgcaaccatgtattggtattttatgtcagtgtttctatttggtcctagcacttgagctcttcatggccttaactgaattggcttgctactttgagaacttatagctggatgcataaattggaagcaacttagctgagttttgagcttgcctacaaaatattataaatcatttctcatatttatactttcagattctgcgcattttgcaaatctaatctacacaaagaatgtctcttacaatataattggaaaagtagaactatattagtaaagttggctgttgggctgtgacattacatttagttacttgatttgattttattattctctggagataatgtatagtgaaagttcttactttatcattttatatttttttggctatggtttctgggatatatgcccttattcatccttgtaaatactaaaattttcctatcccttttatttccagttttgaga

SEQ ID NO: 11561 - DNA, 4707 bp, Vitis vinifera
  Intron number 6 from transcript GSVIVT01010524001 (locus G SVIVG01010524001) derived from phytozome v7.0 (chr-ID chr1 ; pos 21437479 to 21442185 reverse strand)
tttattcatcaattgcagtaagtttctttttatgttctggaatctcatccatcctttaattttttccatgatgtttacctgttcaacagtatctcataaaggtagctattgtataccaacagagtcagtacacttctgagcactctcatggaaaaagaatacttttgattgccagtttatgtggatatgaattcagtaatttatgttgcttccttttttaaaggacttgacaattggatgcttggattgcatttctgattttgtattattttagttcatgatacatctttgggaaatcaggttgatccatcttttagatgctagcattagcactaaaaaaagtgtacataggcaggggctatatgcctttggttgacttcaggtctttgtcaagggagggagtacttttgcgtcccttcttttctgcttttttttagtgctcattgtatatgacctgtgtaattttgtgtgctttttgcgtttatataatacactctcttatttatcaaaaataaaataaaaactatgaacatataatctgccaactgggttgagggtgctacccaaaaattatacttttatgttagtgtgtgcttatgagcttatgaaggaacatacatgcaaaaagatgcactcatcatttcaggtttttctgttaacaattgtcttgtttttgaggtgtccctgtacatgctttcttgctatatgaaactacttagaggggaggggtgaataagtagactgtagacctttaaaagttaaaactttagtcccgattgattgtaaaggcccaatctttaattactagacatttgttaagatgtagaaaataataaatcaaccaccacaataccatatataccaggaaacctcttcaaaaatgtatttcgttcgggtaaaaccattggtctatttggctgcaagggcaatcactaaatcttaaggaagtacaggatttctccaaatttgagatacactcctccagagtcttattcttgatcatgcttacactctccacatccttgatgcagcaaactcctattaccttcttagtgtattgctacgttggactccatttgaagcgcatggttcaaaatgcctcacctttctctagaaaggttaatctgaattttcgaacttctaaaattttgaggttttttgatgaaagatgatactgcagatttctgactttttctccatgtatatgaaagttttttttctttatagtagacaatcaaaaccctgagtttgagtagaagacatacctctaaatactgggacaagtggccaatcaaattatttaaaaacaaatttattttaatgaaaatcagagaacaatcagtgggtgccggatcagtccttgcaaatttaaaaaccagtgttgattctgctactagggtgattaatcatccttgggggtgattggttggtcaatgtcctatcaacgggacaattgatggtccttgatggacaatcagtcagttcttttgcagttcatattttctgcaatttttcactgcttacagacttcaatcattacaaaacccagaaccagtacattcaccttaaatgttagtggagatcccaaatcaatatcatgagcgtgtttgaagctatgccttcgctattgaatttgaataaatacccagttcagtaccggcaaaccccaatttctggctcggattggaattgccaaacctaaccaagcaccaatagtcccttccttacatgatagctcttcatttttttttgataggtatacatgatagctcttcattgcatgcctcatcttgaatcatttcatctgttaagagttttgacatgctcttgttttcaacttttttttagttcttatttcattttgtgttttaattttgtttgcagtaagcgtgtattcagtatgcgacatgcttattagattcaataaagtgcagataaggaaatattttcaaagtttatcattgtactgatatgatgttgcgtggtaaaaaagtttggtggtgtcacagtgcatgaatccttataatggacttgagataaaagagtttggcccatgaatctgacatgtagacatggagtgtggcttttatcacagttcttagaaacatattttttagtgggataatgtaactgttgcaagagaattgaaataaaaaatgtactgtccaaaattttgatttctgttgcttttctggcggcattgtcctttagtctttgatgggccacaccaggaagcggtagagcattcttacaaggcaaactgcaacaccaacgtgcataaatatatatatatatatgaaataaaaatttgctgtccaatatttttatttctgttgcttttctggcggcattgtcctttaggcatttgatgggccacaccaggaaacagtagagcactcttacaaggtaaactacaacaccaacatgcatatatgtgtatatatatatggtattataggcacgtttgattttgccgctgtggatatttctagtgaaggttcactagaaatcttctgttttctggtgcatttccactgtaacgttttctgttttgatcaatggcactccggtgggattcttcaacagtacaagggggctgcgtcagggggatccactttctccctatttatttgtgatcgggatggaggctcttagtagactcatctttagagcagtgagaggggggaatctttcaggctgcaagataaagggaagaagtggagatggggtttcggtctttcatttgctgttcgctgacgatactctagacttttgtgaagcttcccaagatcagatagtttatttaagctggttgttgatgtggtttgaagccatctcaggtttgagaatcaatttggataagagtgaaattttgcccgtggggagagtagagaatctagaggttttggctcttgagtttggttgtaaagtgggaagacttccaacttcttacttggggctacctttgagtgtgcatcacatgtccgtggctgtttgggatgggctggaagagagatttcggaaaaggcttgccatgtggaaaagacaatttatctctaaaggagggagaatcactctaattcgaagtactttgtcaattatgtccatctatttgatgtctttactgcatattccaagattggttagtttaaaattggaaaaaatttaaagggattttttgtggggtgggggagctttggagaggaagcctcatctagtaaagtgggatattgtatgtttggacaaaaggaagggcggttcgagagttaaacgtctttctactctcaatagagttcttttatgtaagtggaactgacgcttttcgaatggaagagagactctttggaagcatattgttagtaggaagtttggggaggaagaagggggttggtatactaggaaagtgagggagggttttggagtaggtttttggaaggaaataaggaaggaagggtctcttttgcaaaacaaagttgttttttctatgggggacggtagaaaagtgaaattttggaaagataaatggtgtgggagcttcgctctttgtaattctttcccctctttgtatgcctttgcggcttttaaagaggcttggttagtggagttgtgggactcttcgagagaggaaggggtttggagctctacgttctctaggcccttcaatgactgggaggtggaggaggtggagagattacttttgacaatccaaggaaggaggcttaatcctaatttggaagatagagtgctatggaaagagactataaagagattttctctgtcaaatctctttatagtgctctagtttcaagaagtgttgttcagttcctaatagcatcatttggggcccctgtgttcctactaaagtgggttttttttgcttgggaagcctcttggggtaaggtgtaaactttggatcaacttaaaaagagggggtgaactttagctaatagatgcttcctttggtgtgtggaagaagagtctattgatcatattttaattcattgcaccaacgcaagagttttatgggagttattgtttgctctttttggcgttatttgggtccttccttattcggttagagatacccttcttggttggcgtggtattaacatgggcaagaaacgtagtaaggtgtggatagcagcccctttgtgtcttttttgaacggtttggaaggaaagaaataggattgcatttgaaaatgaggagctttcgattcataggttgaaaaattcttttgtatgtaatctttggttttggactaagtcggttgtaaatgaaggacctcttcctttaatcagtttttttattggttgggttttagttgagggttggtttgtatcccctcttctttttgttcttgctttttggtgcctcttgtataccccctgtatgcttttgggtcagccttaaggtgcccttttttctaatatacattttctctgtgtgtttacttatcaaaaacatatatttctagtgaagattctatgtagaactgtataaattgctttaattgactgtatttagaaattagcattttacttgagcaacttggaatctcactggagaaaactcattaaaccagattagtcgatgtattcggaattataatgaaaactcacaatattgtattattgtatctgaatagagttctgatctgctttttttgcaggcaaccaagaggcatttatcttccagaattgaccg

SEQ ID NO: 11562 - DNA, 2735 bp, Vitis vinifera
  Intron number 2 from transcript GSVIVT01021809001 (locus G SVIVG01021809001) derived from phytozome v7.0 (chr-ID chr1 4; pos 7096445 to 7099179 reverse strand)
aaatcttagttggaaaggtaacaccactttcccttgacttcaacaaagtggtatttatacctttgggccaactacaaaaatctgaatatttttctgatttaatataacacaactttctgattcttttatgctgtactgaacattagtctcaggtctttgttgcataaataagtatatctttcagtttggaaaattttctgagcatcaaatttagcaattgataaaaatcatgtaggatacatttgagtagcaacacaaggcaccacctcccttaaaacttgttgattttcttggagaaatgcaaagtttgagggcatctaaagtccggttaattctaaagaataccaataatcataggaaataaaacgaaagaataatagtcttctttgaacagaattctgaagagaaattctaaaaaaccaattctatagatcaataataagaccaatgtcccctaaaatgcaaaatacagtaaagtatttacagacaatctaatcataattgacttagccaaagaaaccatattagggtttaagagcatcaattacagaatgggatattgcttaagttagttgattgacctctagataaaatctgaaatgaatatgaatatcctgtatttaccactgggagccctatctagggacaagaaagtcaagtatgatattgagcatactatttgggctctatttgtttaaccgaagacagatccggaaaggaaggaaaatgctaatggtctaggcatgtgtcattgtagttttgatgtcagttacctatgtttttgaactattaaaccaatatggaaccaaatcaaaaggctaatctccaattcaaagaaggaaaccacttactaaaaggccaacattgatcacttattattctaagatggattttatttgtctctgtggttttggggctcaggattaatttggagaaaattgagcccattcgggaaggggtggaaaatgtggagctgttggcttttaggctgtgttatagagtgggctacctactacataaggatgctcttagtgctcaataaagctttgctgggaaagtgattgtgacattttctgaaagagagataatttatgtagaaaagtcattgcgggaaaatatggggaaatggaggaggatccctgttcaaaggagattagaaaggtttatggatcgggtccttgaaaagccatcagcaaggtgcatattagatagcagatttctgtgggggagcagtggccgttcaaccaattttttaacaaagaatgatgtggggagaattctttgaaagactaattcccaattttgttcaacctgcacaaagattcctggatggagaatggtggggaatggaaaacaggctgaggtgtgattggaatcctaaatttagaatggtttatggaggttgtggtagccttttctgaagctgttacattcagtatctatcactagcaactccaagaatgagttagttttggagacttctcagaatggtgttttcttattgaactccttctgtatggcttttggtcctttgaattgtttttctctccccagaaaagagatttggagcgccagtgcaccttccaaagtggcctttttcatgtacgaggcagtctgagagaaaattctgacaactgatcagctgatgagagaagaggctggattttggttagtggatgttgtctctgcaagaaaatggaagaatctactggtcacatttgaaacaatggcagtcaggctgtcagtttatggaatttggtgttgtcaaggtatggggtgagttggtcttggccatgcaatcaaaggaggtgttactcagatggcatgacagctttgtgggcaagaggagagctaatctgaaagatggccccactttcatttatgttagaccatctggaaagatagaaccgaagaacctttacggcagggagcaatcaagagtgggtaccaagaacatctttatcaaaggtattttttcatggtctaatctacaaattagagcaggcaatttgagcccagggtaaagagttgtaaatagtgtttgtctatttgaacttggtgcgccttatttaattggccttggtgtttatttcatagacggtcagaatgtagttctctattatgaataaaacctaggtgtaatgaaatacagaagtgaaatctagaaatgcagttacaaatttccctgagaattctccataagtattcatttataaatatacttattagtttcatcttggagttttttttttctccacataaggcacagcttgggtttaggttaacttgcagctctatcacataattctctattttgaagtagaattcacagttaaggattggagtatgacaacttgaagttgagtgctgcagttggcatccagcatgctttcatgggtcaagaacacaaaacaggtagccacaaaggggaagagagagaggacaagaaaaatgaaaatcacttccagaatcatgaattaggaaatggaaaatatcatgcttaggtaggtgatttcaacaatgtatttagtgctctgatgttcaatcaggtaactgctgctatttctcttaccaaaatgtcaaaacagatcaacgtctgcaaatgtgacattagtttttgattttttattattttcttgccactcgtttgagttctctttgaaagtggtttatgattttaatggatcttgactcttgtaggcattgaaggagttgcctcgagaaaagatccagtt

SEQ ID NO: 11563 - DNA, 5612 bp, Vitis vinifera
  Intron number 1 from transcript GSVIVT01033719001 (locus G SVIVG01033719001) derived from phytozome v7.0 (chr-ID chr8 ; pos 18359813 to 18365424)
tccggggtgtgtgacgacagtctgcccagattagccgttttggatcccctttgacccagggttaagaaaatggtaaaagaaaaaacaaggtaaaattggcttttatttgaaaaagaaagatggagttaaaagataaattagttggatggtgatgagaatgataagctattcatatttagaacatcactgtaatgagaaatgtaatgctatgctgattcaggaacgaaaaatatgttatccattccatttttttttttttataaaatataaaagatattcttataatatttgattttttttaaatatgaaatcttttttatatttagtgttacttagatatcttttcaaaatttatattttaatagggttaattttattgatagcttttaacttttaaggcttggtgtaactacaccggatcattcttggtttcaaattttattattaatatttctataaatttattctgattataaaattcattttaagaggaatttaggtaaaaataatttagataagagtgttaaatttttttctaaaaattaaaatttattcttcaaaaaataaaatttatatgtgaaatactaatatagaagtaataaatgacgaaatttgaaattaatagtggcctaatgtatttacattaaatctcaagagttctcaatgaaattaatcatattttaatacatatttatttatttatttttatttatattgttaagaagtaaaatatttaaaattttatagatgaaaaaaattattatattatagtgtcaatcttatgcttaaataggtaatagtattatattggggcatataactagtatatatatatatatatatatatatatatttcttttttaaggtcaaaagtaagtaatatgaaagaaagaaggaacatgggagaaataaattgaaggaaaactatatctccatacgcctatttgcaaaaacattataaagtaataactcaaaatttataaaatccaaattttatatacttatctaaaaatagttaaaattttgtaaaaaactattattcagtatattaaactcgaattattttcaaatggttcttattaatgtgtgaaaacatattcttctcataaactcttaaaagtgaaatatttatattttatatctacccatgagaatgagatatttatatttaatatcttaaaatatattttttctcgtatacttacgagaatgggatatattcatattttatatcttaatgaaagtttattatataaaaacacacatatcttgttttatcttggttaagtatataaaataaatggttattcgatgaaaagggtttttgaaaaccaaatttttgaaatttgatttcccatcatttttcggtcttatttgaacaaaaatttcaatattattttcttatacaaataaccctcccattatttcatccttttaaataaatatttctaaaataactatatgcttccatgccaaataaatggatataaaaaaaaaaaaaaagactaaaactcgtttaaacttatagtttataagattttgggtttctataattttatcttaattggtatatttattttattttagatatatgattgtaaagcgaaaaaaataaataacttaaatgacttatgaatgaaatttattttttgaactaaaaattatcctcattgatatttaattgatttgttctttttctattaataaaaactattatttagataataaataattataaaattgatcaagaaaatggaggaggagaagccgtgtattcatctgcaagtctgcaacatatgaaattcactcccctttaaataaaataattccaagtaaaagtcatgcgtatactgtaaatattgtccaacagaaagtctaaactctattcttttaacctaatcatcattgcaaaaagtctaaactgcaaagcatcaatatcacaattccatgtcatccagatcaggcaatggaaacctaagaatagcagcaatcccagttaactgacctaactgctctcccattacatgattgtgcgaatacaccagggccttccctcccgccttctttaccgacttaactaaatccgtgtacttgtgcctacttccatggtttgcactccggtaaagttcatcacttataaacagagtgtcgattgccataattcatttgccttctccacactctttgatccataacacgccctacttgaatcgttgctcaacatgtcgcacaaatccttccatgctgttatctccactgccccgtttttgccccgaatcaatttcattacctcgggctcatgcaacaccgctttcaaagttgcttttcctgaagtattcaccactaccacacgttccttattttcttctatttgctgcagcttctgccttcgtgtgattctgctagcaagtattgccgaaactccgtcccgttgggacttgctattatgaccaagcttacgaagttgaaatttacgtgctttacaaattctgttaaaatgttttcaaaaaacttgtttgacttttgcagctctattcttgttgagattggttttagatggggcttcaatgttggcacaaagtgtagtggctattttccctattgagtacaactccgcggatacgtcttgtatcaacaagactgcgaggtctgctttagcagcattgccgtaggagcgtagttcctcgattgcatcagaatcccaagctttcttcttcaggtcaaacggtttattcctctcaatctctatggtgtggaaggcaccggcgtctacgtgttcattgtgcaccaagttcctgccggcgacgcggattactgagcctactttatcataatcgatggcggtgattttgatttcaagtgtgagtctaactctgccaaaggcggttttgcgggttgtatcggcaacgatgacatcgcccttagaaatcaaattgtagaggagccacatgtcatctagttcttcaggaacgatattgatgattccaccgctattaggaaggattttttcttcttctaccagcttcatccttttcagagaaagtatggactatgaacaacagaaattataagcgaaaagaataaataacacacaaaacataaaagattttatatgaaaaaccattcacaaagtcttccaaagactttacggatattaaaaatacaagttagagatcaaaaaattataattcatttacaagaggtttataaatttaccttctacttcttcaaactaacacttgagccaaccaaagcaaaacaattacgaacttttttgagagttttgggataagtataaaggataatagctcaatggtgatgcataagtttatatatttatatatatatatatatatatatatatatatatatatatatatatatatatatatatatatatataacctaatgaactttgaatcaaattggaactcgaaaacctaatgaactttgaatcaaattagaaatcatctccgactaaaaaacaatttaaaaatttaagaaagatttgaaatgcaatatttaaattattttccaaatttattaaaagatttgaaaaaattatcttttctaaattctcaatttaattcattttctaaattaattttattatttgaaaatcattttatttttaaattctcaatttatttatttattttcaaattaattcctaattttggggtgttaaccttttggggtgtttggtatacgggaatagggagtgagaatagacatcttaaaaattatttaggtagaaatcaaatccaacttataagtcggatatgaattcatcaaaagtaggtggtattctgattcattaaacctatttgataatataaaataacctaaatttactattttattatcttatcttcaaccccgatgcttatcttctgatttaaaaaacgaatatttaaattttttttaaggttatgaaaattatcggatatgatacttgttgaaaattagaatgaaatttgaattcttttattcattcttttttaaaataagaaaaacatttgttagctttcagaatttaaatattataataaatatatatatatatatatatatttttttttttggtaaaatagaattttataactacttaagcatgacaaattattcaaatttttaataaaaataataattgaatatttgtacatgagggttatatgattttttatggttaattttttatttatcgagtatatatatatatatatatatatttttaaattatatggaatgatatcattgtaaatttgtttctttttcatttccattcctattattattaaatattgaaatagaaacaaataatcattttaattttacatttctaagttcatccaaatgctagaaataaaataatcaaattcatttctatccactaaataataggaatgaaaacaatatattcatttccatttattataaatttatttctttttattcattatcctcattaatacaatcatatttacctatttaattcaagttgccttgacggaggaaagtaatctaaaactagcatcgatagaataaattttttaacttaatctcaatagcctgcttcactagcactcttttatttccttttaatccaaatttgattttcatttggtttatatttttttaaaacattaataagtttgtttatttcttgttacgttatttatttattttttaaatagcttttatttataatattttatttttaattattctttctatgatataattattttttaaaataaaattttaaaaataatttattaaaatgtattatcaaaattttttttaaaataaattatttgctaagaacaaaaataatttaaaaataaattattttttcgtttttaaaaccgtctcttgatcttccaatgcgttaaaaaatggttgatattaagtgtaatttttttaataatagtttttataaattataaatttaaaattaagaacagtaatcatatcccatcatatttggaatattgaaaaaaaaaaaaaaagctgagaaggtgagtagaaagttatttccttttcattgttaaaattgagaaattgaaattaatttgagttgggagccaaaaacaatttcttccctcaataacatctcatccacaattgacaatttgacacatattaaataaagttggtaggtgcacaaaattaattcagccaatcaacttcatctctcaacagctcgtaatatgtccactgtgccaatcaattaaatctcacatatatcaacggacacaagagcttaaccccttcttacatatatttattttttatgaaaatttttgtaattgcaatttggggtacggtgtagggtggctttgattcatttgcatcctgagtagacgtgttcattatttgagagtccacgcagctgccaacattttattattatatatggccgataggtatatatcatttggtaaggtggtttgcacgtagcaagttgtgctcttccacctctgtgtaccgtatacgtggctccaacactttgtcattcgcttcttatatatctatgttcaagggggctgtgccgctctggtcaaatactttaccggttgcttacatttgtatgcgtgtctgagagagag

SEQ ID NO: 11564 - DNA, 1348 bp, Vitis vinifera
  Intron number 1 from transcript GSVIVT01037759001 (locus G SVIVG01037759001) derived from phytozome v7.0 (chr-ID chr1 9; pos 7636686 to 7638033)
gattggttggatccagtgagttcaagtgcgatcaggtattaaattttattgatcaatctgctaattattgggaattttctggttttagaagtgttgaatttattacttctttaaatatggattaaagttcggttttttaaatagtatattggagtaaatgtcattttaatggcttgaaatttccatttttatacttctgaatctgcttattactggaaattcctttgtttttatcgtcttttcattcttcacggggcatttcatgcatgccgtgccaagggtttccgaaattcacagttgacttggcaggcatctgactccacgatgggggagctgacttaaatttgcgaaatcaaataatttcaaaatgaaaaaaaaaaaaggtggggggcggaagatgtagattggttatatcccaaaaatttcaggaggatctgatacaatttcatggatgaaaaagttaatgagttattcaaaaccgtaaattgtttggagtagaatctgtaactgagaaatgaacaagggttctgattagttcacttttcatagttgattcccatcccatcctaggtgtggttgctgaaggcaccttcaatgaaggttggaatatggagtccaaacgcatggcatattctctttcagattgattgtataccacacaatatgacaagggaaaattattctgcgattgggattcaaagcatattgtatgtgcagaagcttttgggaaattttggttaagaatccagaaataaaaggtagaggaaaacaggacataaaactaaacctaaatcatcacaaatgacatacatgctatgaatgttcccattgagaccaaggttaaatagtggttggttgactgagattctgtttgattacagtgttagatttgacttggaattccaattctgggaactatttttgtggagttgggatctttggaattttattctattccaatgcaacaaatcaattgaattggatataggacctctttcaattccatgatacaagttcatgctaccaaaaaaaaaaaaaaccatatgtgagtggatcaaagcttttacacattaattctatcctactcttgatattttagattgttttgaatgagttttttggtttgcatgtaacagttgacaccatttttactttcacaaagttaaaaaaattccagtagacaactttatcatggagtgcagccccatgatcattcttgttatagtaattatttatcattgctaacgtgattgctgctctaatatatttttgctccatttttgtgttcctgacattaaagcctctactttcagtggatcgaggaaccaacacttctagtcacacgctt

SEQ ID NO: 11565 - DNA, 6579 bp, Vitis vinifera
  Intron number 2 from transcript GSVIVT01021250001 (locus G SVIVG01021250001) derived from phytozome v7.0 (chr-ID chr1 0; pos 2968222 to 2974800 reverse strand)
aattggagagttccagctctgagcagtgaaatagacatgaaagataacctcagaagctgggctcacacagtcgcatcctcagtgagatgatgatgatttctggatcgaaagttttgctcctgagttttttctttcctgtaaatcttgttcccataggagttttttttctttgtaaatctcgatttgttgtttgattttttcaaatttttggtttctgaattgcatttgtagataaagatgtatacaaatttaatttgtggagattctttgtcaattggtcaatttttgcccaaaaaaacaaattcatggtaaaaattagctttaaccatgaaataaaatttagggagaactatgtaaaggtatggtgagaaggaaaatagattttttaagaacttttaagaagtaattcaataagtaataataacataaacaaaatttcaaggttacccttttttaacttttctccgttcggtcaattaccatactcttctcttttaaaaaaaaaaaattgacttgacaagtcaaaaagatgataatgatttttttttcttttttgttactcatagttattttttagtttgacatgtggcaaaccagcatgccacattatttttttcccttatttctttattttagcttttgatttttattttttcatttcaatttcaattatctatgaatattttaaatataaaataatattaatgagaaaaagtaatataaaaataaatacataataaacaaatttaattttttatttatgggtacttgactttggttttaactttttttcttaattaaaatgtttaaaaattttaattgaaaaagataaaaacttgaatatgattttgacattttgttttgttaaaattttaaattttttatttatataaaataaaaataaaatatatttttcataaaaattatatttaatcaattatgttaatttttttttttaattttattaaaaattaaattttttgtatactaaaatcacgcattgataaacacaactattaacaccactcttttatgaaaaaatatcagtaaaatgtgttaaaagtacttttaccacacattagtgttacttttttttataaaagagtggtacccttatttctaaaagttatatttattaatgtgcaatttcaatatgcaaaaaggaattaatttttaataaaattaagaagaattaatataaatgatcaaatacaaatttttatgaaaaatatattttatttttattttatataaattaaaaattaaaaattttaataaagtaaaatattagaaccacaatataagttttttcctttttttaattaaaaatattaaatattttagccaataaaaaatatataaaattgtggtcaagttaaattcataagtgaaaagttaaaactataataatcaactttggttttcacatgaaaaattaaaattgaaaaatatataaacaataaaataatataatcgatatataagatttataaaataaatctatattttatctaataaaaatatagaaaagctaatgttctaaatctctatatttgttcattatgtatttatttttatattaaatttattctcattaattatttattatatattattattttatgtataaatgtaaagaaataattaaaattaataaatataaaaagatgaaatatttttaaaaaatgaaattaaaaagattttataaagataacatattaaaaaaaaacaaaaagaagatagagatattatagaggtggggaaaaagttaaaaaaaagaacaataatatggtacgatgattgttacgtgtcaaagttttttatttttaaaaagaacaataataatgataacttcatttgttttgtcaaaataacaaaaaaaaaaaaaaagggaaaaaatttagtagttggctcgatgagaggaagaggagggtaattttgaaatcttcattatttttactatttgagagcatgttttgagtattattttcctcaaaacacatatccttaaagttctataaaatataattttttttttaattgtgcatgattacacgatttccactaaaatttatagtggaatgtgggctattgtgccaaataaaataaaataatcatagtcaatggtcacattcaaccattaaaaagattattataaattcattttccaaaaaaccaaaattattacaaaatctcatatcattatagaaaacaaaatactcagtagtattaaatatcacaaagcaatagaacaagcttatattttactaggatcttatgcattattagggatgctaacaagataggtttgaaatggattatttatatttcaacttcgtcctaattattttaaaatttaaaaaaaataattgaaatgatttttgaaaaagtacttgaaaaatatttcttttaaaaattttaaatattcttgaaatagcctaaatgattcaaaacttcaaagttcaagggtctcaccctttcaatattgttgaattcttatatatatatatatttattattaatcaacttgaattgctagttaaagtttatggttgtttgatcggttaaatcttcaatcacacaacaaggtttcagaggacaaaaaatgaacatttaaggctgtgtttggttttagaaaaatattaggaaaagaaaaaaatatatatcaaggaaaatggttttttatttttttatttttggtttcactatagaaaatataaaatataatcaaatataatcaaaattaatttaaaatttatgtaattttaaattatttaatattgctataatagagagaaataagtaaaataaatttgaagaaatataaaaataatttactaaatttaaactatttttttcttctattttattttctctattttattttcttcacattttccctcaaatttttcgataaccaaacataacctaaaaatctaaattggaccaagaacttactattagaaaataccaactgaaacaaacaaatgaaaattcttttgacatatgaaagtaggtatagatagtgcccaagttggcatttaaaaaatattaacatattaaataaagcataccgtttggggcaagtagtggccaagttggcatttaaaaaatattagcatatcaaatgaagtatcttgtttgaggcacctaacacatgttggccaataaagaatttaaaaaattaaacatcaatttaattacatgataacgttactgattatataatggaaattggagagtaagacattgtgacgttcccaatgaatttaaagataatttcatcttcggtcggcaagcatgtgatctacaagttgtcagtcttcactgccccccctagtgactaaatgaacatctttttatcaaccttttgtgggccaaaaaaaggcaattaattgatccaattacgtgaatactttattaaacttttattttatcaaaccttattttgaatattggaaatagaatctaaatgtttgcctgataatcattttcgaaaatagttttctgttttttagaacaaaaaactaaaaaaacacgtttgataattaaaaattattttctattttttgttttcaaaaacaaaaaagatggtgttttcaaataacattttttagttgtttttttactattttcacttgttttgtaagagctattttaaaaaataattatgaaaacatataaaatgattaaaaataaaataatagatataaacattatttataaaaatgttaaaaataagttaaaaatatttcaggtttccaaatagacttttattatataaaacattataaagcaattttcaaaaattattctcacaaattatttttttaaactattttcgaaaatagttatcaaacaagtccttattttttatgttacattcataattgaactagagaaagaaatagaatcaaagcaaaagaaatcaaaatcaaaatcaagaatttcattaaaatgttaatttacaatatatgaaaaaaaaagttagaataaaattaatcatttttaaagtgttattacaagtgaattgaatgaaatatatatatatattatccttataaacataatttcactattattattttagattaaaaaaatcatatttaaattgaattacaaatgaataaaaattatttttgtaacatttgtatttttttaaaagaaattcattaatttaaattatggaattagtttttaaaattaaaaaatattgtaataaattaataattgcttttagaaaatttattaatagaccaatatttattttaatggttttaaatattcaaatatttattttaaaatattttggattaatatgaggggtgcttagatagttttgggggaaaatttgattccctgaccacatttctatgcttaaatggattatgaaaggttgtcttccataccttttgaattcataatatactttaggctatgtttgattccgtaaaagtattgagaaaaaaaatagaaataagaaatgatataaaaaataattaaaaattatatattttataattattaaatttttacataaaaaagaaaaaataaatgaaataagtttaaaatgacatataaaataatttattaattttaaattaattttttattttctttcttttttttttcctcatattcttggaaaccaaacatagtcttcactttcattttaccaattattaccctatttacactcctaaaaagaatgaaagggaagtaaatttgtctaaaaaatatggttgttttaattaaaccttgcatgtgaaactctctttatttatctatattctccttatagttttgttacctttcaacaaagatatcttgtgacctcatttttttagcttctcaaacttcatttcctatgaattgcctttctttgatcttttcacttttcgtttctttttttttcaattttttttttcttgtcttagattctttatcttaaattttattttattttttttcttcatattttcatttttctattataccagtatttaagcgattttcattcaatttgcactccatcataatatttttatgatttgattcactcatttatatttaaagcggctttctttccaccatcatttttatacgctcttatatctcttcacttaagaaaaaatacaacattaaattgtccatattatagctataaaagattttatcatccaattcaaagaataaatttatctacaaaattttatacaaaagatattacacaagagaaaaaaaaaaaaagagaattttaccttttaatacccgagaggtcaatgataattatatatacaatttttaatatgatatatgtatttgacttcatcccatgtcaatattttaatatttttcaaattattaaattatgatagttcaattaaaaattaattatcatcattacttaaaagatggttctattacaaaaaggataaattaagatgtaatacggataaaaaaaattcaaataattgttaccagcattaagggtattgatgtaattttatattataaatatttatttaaaaatgtattttgtaataataatttttaaccattaatctctattattcagttagttggcctgatttgcgtgaacggagaaaaaaaatcggcggaaatagtgccacctcccccaaaggtcccggccataaataaataaaataattgtccacgtttttttcgaccgttgggtgaattccggctaattactggcctccactaacaaaagaggaatgaatgctcaccccacttgctactaaagcgcttgcctgtcactcaccagtcaaatgcaagataaatgcatgtggcagctaaaattaaattatggcgagtgtggtctttaagcacagctcccatggtttgttgcccaaaataccactttacaattctccagaagtggcaaataagcaaggttagtttggtcattatgcagcagtgagggcacggtagatgtttattcctctggcgaggtctgtagaaagtgtagattgtccaaggggaggctgtggcaaattacaaagttgttctccccattgttgaaactctggtttgttcaggtttgtaggttctgtttggctttatttctcatggaggattcagggttcacagagaagttggactctctctggttcttctccaatgttctttctttgagaagtcaatctatggcttctgctactgatgagaaagccactcaaatctctctccatcatagtcccaaatcagaggcaaccaaacccctgagcataattgctcagaatcagaagaatcaaacagagaatgctgaggttctggtccaacaacgaaggtgtcttaattgtggtgagtttgctgttgaaactgaaggccagatagcgaaaacagaggtcttggaagtgctgccaccagtgaaagaagaaaagagaagaagcaggagaagtttcaagtcttgtttgaatcaaaggagaagggttcttggggagtctgatttacaagtgaaggggcttggcgatatgggttttgatgtgaatgtggtttgtgggaactgggtggttgaggaagcgtctggttatcagtggtttggcagtccgcatc

SEQ ID NO: 11566 - DNA, 22786 bp, Vitis vinifera
  Intron number 2 from transcript GSVIVT01017480001 (locus G SVIVG01017480001) derived from phytozome v7.0 (chr-ID chr9 ; pos 9078489 to 9101274 reverse strand)
aaacacctccatcatttggaactagaggattttgggcggcttgcctcagctgcttcaaaaggtgtggccgaagctctacggcctcatcaaaacttgaagtctttaaaaataagttattacattggtgccaccgagttccccagttggatagcggcctcatcgttggcccaattgaaaaagcttgaaattgtgtattgcccacaggttacaagtttgcctccattgggggaactacctctccttgaaagcctgagaatagagaatatggagagactgaaatacgtgggtggtgagtttttgggatcttcaacaactgcattcccaaagctgaagcacctctgttttaatgatatgaaaaagtgggagaagtgggaagtaaaagaagaagggaggtcagtaatgccatgtctccactccttcaccacaaataaatgccccaagctggaaagcctgcccgggcgccttctccagataactacactacaggaactgaatatcctcggctctcctactctgcaagttcgttaccatgcggggacagggcaggattggtccaaaatatctcacatccagagaggtaattgaattgcttcttaactaagtacacacaacatacaatattctatttacttctatgatttatttattttttatagcgttattttaaaacaattaattattaatgttcttgcttcaactactaccatgggatgtgatccctaaatgcatggttttgataattgatgcagtgcaagcctgactccctccgtccaaaggggcgcatctcatgctggaagaaatctactatcatgctcccaagagatcagacagataaattttttatcattccacatggttttctgatgaatccatgtcaaattatgatgcatgtgtaccataatatatatccaaactctggcaagtggtccagagctgattaacaattacgtatatatgtttgaatattggcataatatatatccaaacacgatcatgttcattttatttgttttagttattacatgtttgcagtttctaaaacagaaaatagtatttaaaataggcattttcaatgaatgatacgaagataggtttaaaaaattgttagttattacatgtctttccctttgatcttttaagtgtcccctgtaacaaccctattaaaaaacctagttaagctaatctttttacaaacaggtggccactactacagctacataaggtcaaccactactatagctggttattctcagctacacatgtaacgacccgctcccaaccatgtagatattgtccgctttgggtccaaggggaccctcacggctttaaaacgcgtctacttggttaagaggagtctctacatatatagcgccaggaacttgctcccctatccgatgtgggacatcacaaatacccccccatgcagacacaacgtcctcgttgtgtcccatgggattgcggggccaaacagacaaacaccctttacggagccaaacaaacccccacaccggggttggggatcggctctgataccatttgtaacgacccgctcccaaccatgtagatattgtccgctttgggtccaaggggaccctcacggctttaaaacgcgtctacttggttaagaggagtctctacatatatagcgccaggaacttgctcccctatccgatgtgggacatcacaacacatccagcagcgcacttaggtacttgctttttcatgcagctgaaacaggctgcaccagaataggattgtggctcccacttgctgccacagtggaccaccaccagggctatttcttatctgtgactctacctcaattaattcactcatcattaattcaccaatgcagagatgtctccaaatattttcttaaaaataaataaataaataaaaatccatagcattatttctaaggttctcatcacaataatttcacatcatgttgttagggtgaattcacaatattctaacaaacactacaatttttataccatttctttgtgcaaaattaaataggcaataacaattagtagtaataaataaataaataaataaattcatgcaataaaaaaaataaattagacactagaatttttacgtaaaaaacccctcaatgcgaagaaaaaaaccacaggacctattacagttcaaacttccattattaacaataatgggttatacctgtcttttctaaaataatctctagaggctaccaaatacatcaagagtacatataaccttggattatacaatctctcttagcaaaagaaacaaagaaaattagagaaagtaaacccaaaaaacttcgttactattcatgggcagtaacactagttcccgaactcaaaatctgatctccaccatttagattgtagctactcgagtttcaaacctctcttccaaatttcaactcaatcagaccacagatgaagtaggatcgacttgttgatgaaatttgggcatatgcatttttcctctctcttctcttctctttatttttttccttttcccaatctccctctttttttttttctttttttttttaaatgtaactgatttgggccctaagaatatggggtccagtccctcacatacgagggagcccaacaaatctcctcttcccgactatgtaaggggttataccaagcccgcttgttttctacagaattgtagcttctctgtaggtattggttttgtcatcatatctgatccattctcattaggatggattttctcaaggtaaaacaatttcatctctagtgcatcacgaatccaatgatatctcacatcaatatatgcttggatctagagtgaaaagttggattcttacttagatgaatagcactctaactatcacaatagattagatacctttcttgtttagacccaattcttgtaggaacttattcatccatagtaactccttgctagtttcagcgatagcaatatattcagcctctatggtcgacaaagcaacacatttctacaaccttgattgccatgacactgctccccctaaaaaagtgatcaaataaccataagtagactttttagaatcaacatccccagccatatctgcatttgtgcatcctacaagcacatgtttgttagtcctaaaacataaacatgtcttagaagtacccctcagatacctgagaatctatttcactgtagcctagtaatctttcccaggattagaaaggaacctactaacaactctaatagcatgagcaatatcaagcctcgtgcacaccatggcatacatcaagctacccacggttgatgcataaggcacctttcacatttcttctttttctttctcacttgaaggactttgtttggaacttaactttagatgacttccaagtggagaactcattggttttgccttgcccatgttgaatttgtctaaaaccttctcaatatggctttcttaagataaccacaattttccattcgtcctatctcgagaaatctttataccaataatctgacttgcaggccccaagtccttcatttcaaaggacttgctcaactcctttttcagtttatcaattttaccagtatcacgatcaacaatcaacatgtcatccatatatagcaagagaataataaattctccatctgagaatttcttcacaaacacacaatggtcaaaaacaattctttcatacccatgctcaaccatgaaggaatcaaacttcttgtaccactgtctcggtgcctgtttgagacaatacaagctcttcttcaatcgacacactaagtgttccttgcctttgattgtaaacccttctggttgctccatatatatttcctcttctaagtcaccatggaggaaagtagtcttcacatcaagctgttcaatctttagattcatactggcagccaagcctaatataactcggatcgaagacatcttaatacaggtgagaaactctcttcaaagtcaatgtctttcttctaactaaaacccttcacaactaatcttgccttgtaccttggttgtgatttgtttggttcaagcttccttttcagtacccatttattattcaatgctcttttacccttagacaactccatcaattcataagtgttgttcttatgcaaggatttcatctcttcatgcataactctcatccactttttttttttttctcatcatgtagtaaaacctcttgataattttctaactctctcccatcagaaaacaacaaatactcatcactagtatacctcctagaaggttgacgctctctagtagatcttctcaactgtgtttcaataggcaactctgaagtggcttgttcttgttgttgttttaagccatcattctcaactgtaagattttcttctacatcatcaactgcagactcatcatttatgtcaattgtatcaacttgttcttcttgcacaacttccctgtgttcatcatgtcccatagagttaggagagattggacccaaatcaacgtgttcttcactaaaaggctttggcttcttaacctgatccaaatcttcaatggtttgatcttcaaataagacaacatctctgctttttataatctttttggtagctagatcccacaacttgtacccaaactcttcatttgaataaacccaggaagatacactatttagtcttgctattaagcttggaccgcttgtctctaggaacatgaacaaatgcccaacaaccaaacactctcaaatgctcaaaggaaacaaattttactatccaaaccctctctggaatatcgccctttaaagtatatgatgaaaacaaattaatcaaattaacggctatcctcatggcctcaccccaaaaagacttaggtaattttgcgtgagaaagcatacacctgattctatcgcaaatggttctattcattctctcaactacaccattttgttgcggggtcttaggaaccgtcttctcaagcctaatgcgatgacttctacagtattgctcaaatggcccctatattcagcaccattgtctgctttgacagattttaactgcttgccaatttgcctctcaaccttcacatgaaaatctttgaatacatcaagtacctagtctttggatttcaaagcatatgcccacacctttcttaaatgatcatcaataaaagtcacataataaagtgcaccaccaagagtattactttgcatagtacaaacatcaatgtgaactaaattaagaatatttggttttctatgtgaaggaaatctacgaaatgcaactctactttgctttccagacagacaatgtgtacaaggtaatattgacatacctttaactggtagaagcttctttatggcaagaacctgaagtcccttttcacttatgtgaccaagccgcttatgccatagcttagtaaaggcttcattctcaacaatgttcacctctcccttaactagtctcacttctatcttgtagaaagtattgtttttcttctttctagctaaaacaagagaacccttagtaagctttcacttactctctccaagatgactatggtaacccttatcatcaagcttcctaacagagatcaaactaaagcgcatttcatgaacatgtctaacatatttcagaaccaatttgcacccaatgctagtttctagttctacatctcccatgccaacaatttcacattttgcttcatttcccatcctaacccaaccaaaattgtcactggtgtaggaaaagaagaaatctttatgtgcaatgatatgaaacgatactgttgtatcaactacccaagtggaatcctgacatgcaaggttaacacacgcatcatcacaaacaatgatcatatcaacatcagatgtagttgttgcaatgtctttatcctctttttgttcttcacattttcctttaaactgttctcttctgaattttctgcactctctcttaatgtgccatgacttgccacaataaaaacactttatttttttcctggactttgactttcctcttgacttgtcacgattgtaatcactagaaggttttctgcttttacttctttctcgtctctttgtaacaagtgtttttgtattagaggaaataactaactcttttcttcttgccttttcattaaacatgttgtcttttatcatgttgacagttatcacaccatttggggttgaattactcaaggatgctaccaaagtttcccaattgtctgataaggaattcaacaaaaggaaagcatgtaccttatcatctagctcaagcttcatggtagacaactcattcaacagtccctgaaaattactaagatgctctgcaacactattacaatccttatgcatcaacttccttggctacatgatggaagacactttgatcaacccacagcttaatctgtccaatgattttcctgtttaatttcttacactcatcctcggttgtagtaactgggttataacccctgcatttaatgagatcaaacaactctttgcaatatagaatatcctccatcctagtcttcaaaattaaaaaagggagaattgtgttttgggcccagttgagcccaaaaattaacatttggtcctccaaccacccatatttaagtccaaggatatgagatagtaattgacaaaaatacccacttgactcatttttgtctttattctactacttgccactcttctttcttatttaaccatttttagatttttcatttttttaaaactcttttataaataattgaaaaattacattattttttatttttaaattataaataaacaaaaattatattaatgattcaaagactattttagaaaatactttaaaaaaaatattaatttaaataaataaaaattatcttttatatttatttttatcgtttacattttagaagtaaataatttaatgattaaaataccatttaaaataaatatattcactattttattttttttataataaaaagtattttaaagttttttttactattatgaaattaaaagttcaatttttttttaatcttcttccttccttattttaacaactttttgaacatgacttttagtaataagttatatgaaatgctacaaatttgtttattaaagatttttttttaatgatttgaattaattgaaaatttattaaaataagaaaaagaaaaataaagaaaagggatggattgagagtttttattttaagtactcgattaaaatgaggatggatggagagtttttattttaagtactcaattaaaatgttttcatatgacctaattttataagtggattatatcaatacatagtagagattgatttttttatatatataaaagggttgaaaggtatatttacttgttttagatgaaaacaagtaactaaaaattatatagattatatttgagtttaattttaaaatatttttctagtttttattttctatattgcctctttttgaaaatacgtttaagttatgacaaatatgaaatttatgtcattgtacaagggaaatgtgttaagtgtacaagggtgtataaggctcctaataggttttgtacgatttttaaacaacttgaatttgatattaagacgattattgatagtttttttttcctttttttttatcaaactatttcattaagacattccctacaaaaattaacacataagaaataaaattttgagttatttgagttattgtacaaggtattacactaactgtacaagacaaatttactgattgtacaagggcgtacaatactactttttgttaaggattttaagtgattttgaaaaattttcctatttttttccactcaaagatttttcccccactcaaattctctcattcaagaattgtttcgaattttatttttaaatttcatcatcaaaaatttgtaattgcatattttgtttttatagttttagcaatgttatttcttttcactatatttttttttttgtgaaattttatccaaatgaatctatatttaaaattataatcatatttatcaaaatttttactaagattatctttaattcttttaatatatttatactcatttatttaaaaaatgaaaaactaattttttttttttttgtaaacatgttctattacctttcaagtaaaaaattagataagtttcaaagtcaataaataaaaaaattaaataccactttcaataatttttagataaaattttatataatatattttatttgaaacttagtttttaaagtttaactaaaaaattgtattgacaattttcttgttgtgggtcaaaatactttgcattagtctatctagataataaaaattattaatataatattagaactttatatcttagttattttttttcaacaaatttatctttttaaaaattttaaaataaaaacattaaaaattaaaaagctaaaaagatatatatatatatatatatatatataataataataataataataataaagtgaagtgatagttaattttaaaattttttaaaatatggtcaatgtagaaaatataaaaaataattaaaaataagagaaaaatatagatgaaagggtaatataaatttaaaataaaaaatgaaaattaaactaaaatataaatataaaaagataaaaaatatttggatgaaaaatcgcaaaatttttatcattgcttttaataagagcaaaaagattcaatatctttaaaaatgaaaaataaaaaaatattattgttttttatttgacataaaatagaaatatatattggaataaaaaggaaaaaaaaaagttagaaatgagtaatatttaatagggaatagaaaatgaaaaaaaacacaaaaaaaattaaaattcacactcacttgtaggcatataagagataagggtattttaggaattaatgaaagacaatatccttcatcttaattttcatactttgtttggatcttgggcttaaatatgggtggttggaggaccaaatgttaatttttgggcccagctgggcccaaaacacaattctcccattaaataattggaagctgtgagtttaatcattccatttccagcttcctccatttaattcacataagagatcccattgctaatctacttggctttgatactacttgttagggtgaattcacaatattctaacaaacaccataatttttctaccatttttttgtgcaaaattaaataggcaatagcaactagcagaaataaataaataaactcatacaacagaaaaataaatcagagactagaatttttaagtagaaaatccccaatgcaaaggaaaaaaccacgagacctagtccaattcaaacttccactatcaacaataatgggttacacttggttttttctaaaataatctctaaaggctgccaaatacatcaagagcacatatagtcttggattatacaatctctcttggcaaaagaaacaaagaaaattggagaaagtatacccaaaaaacgtcgttattgtttatgggcagtaacaccagttctcgaactcaaaatttgatctcaccgtccaaattgtaactactcaagtttcaaacatctcttccaaattttaactcaatcagaccacaaatgaagcgggatcgacttgttgatgaaattcgggcagatgcgtttttcctctcttttctcttctctctgtttttttcttttcccaatctccctcttttttatattcttttttttttatttaaatgtgtctggcttgggccccaagcatatggggcccactccctcacatacgagggagcccaacacatgtgaactaagtaaaatcactacactttaataattgctaaggcattacaaattatggattctttccatgataggtctcattgcaacagagtgctagcttcccgaccaatctcctaaaaaccgcttcttaacctctacctctcccaaaaaaaatacattttcattgcttaatgaattatcaattgatccatatgaaggtgttgatttttgcattgatcatctttattttcttgcaacccattattctttgtttgaggtctcaaagcacgagtagacttagaggtctcattgggtatgccaaaatttttttgttgtaatttatattagccaacctacttctaacacatggaatgtgttaagcacaggcttgccaaagaattccttcacaactcaccatttgatttttagctaagacctattttggccttgatttttataattgacttaatagaactgcaaaaggctcctatgcatgcgagcggagagcctttctacccaaataggctcctctctaagatgcagcaccagaacagccctaggggactacgattatgtttaattatcaggataagatgaatagaaaaagcaagaaacattcatacttgtgagtggatttaaaacgggcatcattggaaatattttgttgtagtgatgtgaatcaaataagttctttgtgactaattatcattttcaaatagaataggctattctcaacacaagaagaagggagaaagcaaagtggatgcttaatacgaaaaaagaagttaatggtggcggctaacagctgcagtaaaatgcaaaaatctatgtcaccacatcatataactgcagtcgaagctggccgcaacagagcgtcacaattggtggagcaaacaaaagttgtagttgcggcccaatatggtttccccattatattttagttatgatatagctacagtaatatcattcctgccaccaaaagctagatatatagctgctagtgatgcccgctaccaaaagtgtcatacagcagtagcagattttatgttctccactgccattagtttcttgtagtaaggatttattggtggccatgagaacacgtgttatatttcaatgcaaattccctataactatgatttttgtttttaataattttttttaaaaaaattatatataaattacacaactaagcattagaatgacaatttatttattagaacaaaaatttccaatttatttaggatggtagtttagcatatactcaacccaaaagatcttgtatttataattttgactgaaaagaagaatagaaaggaggcaagtccatgagagccttcccaaaaaccagtgacaattacaaaaacagatttcccaagaagtagcatgtttaaatgcttacaaaactaccacttttcataaaatacattgtttggtcaactagaaagtttcatgctacatcgattttccatattatgcttcccagtaaaccattgcttcaattgattagtaataattagataattgataggatttttaataaataataattaggaagcaatccatcaacaggaaagaatacaacaaatatctcttctctaatccataacggtggcatttagttagaaattttacacaaattgctatttgaaaacaaaggcaggcaatatttattaaaaattaacaaaaacaaaaaaaggtactacaataacataccctcttaagtgcatcttctctaggattgataaagactcaactacaatacaagctaccatttttggaggcatcctgtgaatatatcaaatgtttatcaaacatacaatatgattcattaaaaaagaaaaagaaaaagatatccaaggactatggaattgaaattcaattcagtataaaaaggaactgatcttgaacttggaattgaatgcctccaatttcaccgcaggtggtggcattttcagaacaacaggtggtgtatttgcttaatttgaatgaagatgagagagagagagagagagagagataataggggtttcttatcaacaacatatacatcacaaggcaacaatttgttttagaatctattgagaagtgaatgagataagagatgttttttgttcatatatgataaatctctatgaatgataaaaagatttcataagaaacgttatgttgtaattttgaagaaataatcaaatatcatcatttggttttatctttttatatataatggatttaatgattccaatcaacaaagttaatgattcttagtaaggggtttaatgctctttccacgaccttgaatatatctagatagtcaatcctgaaagcatgataaatactcatcaaattaaaaaaaaaaatcacttattatttttttattttttgggtgtatatgtgtagccaaaataaataaaaatttataaacttaaaagagtgagtagtttgtgtgtgggggaaagcatgggtggtctatgaagtaataactcatctagatttggtactgcacctaatagcacgtacaaattattgaatgagaattgagcactaaattcatgtcaaattttcccttgccctcaattcaacaaaaaaaatgcataagcaatatactcaatatatattgcaatttataagcttagaaaattccaacttaaattatgattacacacctaaaagccccttgggatgcagttaaaagaatgtgctgaagtgctctctctagcaaaccctaaatacactaagaaagatacaaaacagagcacctcccttagcttctctcattagtcagaatggaattgttggatgtgtcaatacaaaatggctatgaccaagaagatgggaaagagggtttgttacagaatggtacatgttcaagtatcacttggttcaaagaatgtttgctttaccaaattccttgtaccttattttaagtgaataaaataagagagaggaaagggaaaattagaaaaagaagaaaaagagagagaaggtagaaatgtagaacaagatacacctccgaagtttgatttgaagggtagaaagggtgtggcttaagctctggatatttttgttggtggagcaagagtcaatcttaatccagtcaggtagaaaagcccacgcccaagcccactttgctaactttgatagtggatcgatggaggcaccatcatgaaataaggctttgctttctctcaaactaagatgtgggattgccttcatgtaccactcgaacataggacacaaaagagcaaggcccaaacccgagtgcttgaatttgccgtgggttgcctagcctattgaatcatctgtagatttgtgttagatgtgcacttagtgttatatatatatatatatacatatattataaattagttaaaataaaattattgtaaataattaaattttaattatcttattatatgttgtgtaaactaattaaatacaaaacaaatataaatttataaataaaatattaatatttttaaataaaaaatacttatataaatatcattatttcttttttatcatttgtttaagtctttttttcgatattttataagttttgattaattttcattttattgatattttgtatttaaatattcatagatatttctcgatatatcctaatatatctaaaaaattaagttatcgatatattcgacgaaacctatattctcatcctctctacaacacatccaaagttgaaatctctatgacgcaaagtagcctagttggattacaaggtcatcattaatccaattgaaaaatcttgtacttaagaattgtgacaattgtttgtgtatgccttcgtcgggggaattacctcttgatgggtggtgagttttttggaatcattgtcaacaattttattcacaaagttgaagagactccgttttcatcatataaaagtgttggaaaagtggaagtaaaagatatgggagtaagagggttgatggagaaacacaaacaattacaaagaatataaaattgggaagaattaaaaatttattttattccaccactctttcttttttttagttatcacataatcttttatttatatatactcacacttaattaaatagaaactcctaacaataaaatatagaagcattcttagtttgataattcaaaaatagaaactaaaataataactcaaaaaaaaatattttcccttgacttttagagactaaatttaattctaataattagaaagtttttaaatcaagtttaattttccaacatgctcccttaaacttgacttgtgactccaagtagcttcctcaactttctaaaattttcaaacttaagaggcttgataaaaatatccacaatttgatcttgagattttgcaaaattttaattacatttccttattcacaatgcactatctaataaaatgatatattaaatcgatgtgcttgctttgatcatggaaaactagattttttttataaatcaattgcgatttgttattcacctagtggatgctttgttgttgcttgtagccattagccaccaatcttgttttgtattcctctacctccccttttgcattcttctttaacactcattttacttcaactgcgttttcttttggaagagatttgaatttccatatgtcattcttccttattacttttatttcctcttccatggtatcttttcatctttggtcttgaattgcttcttcaaaacttatttttcatcatgtgcaaaaaaaaaaaagagggttagatcattttgattttttgttacttcatagatatcttgtagacttctaagacatggtgtccttttcacttgagcttccaaaagaggatgatgttgtgggaacttcataagttgatgggggtagtgatgaaagtggagtagcaatctcttgcaaactttctcttgtttgttctccttcttcataaaggggaggagtattatagttaccttaagcattccaatctcatgcgtcttcttcattaaacttgacacctgtattaagaatgagctttccattttttggattgtataattgtaacctttggagcttgagtcatgattaatgaaaatatattttccacttttgtcatctaactttgattacttttgatttggcatatgagcatatataatgcttccaaataccctcaaatgtgaaaatacctaactttattccattctaagattcttgtgatgttttattccatacacttcaattaggagagtgattttacaaataaatcaacaatcaactacttcggcccaaaattctttagccatcttcttacttttcaacatgtttgaatcatgtcaagaataactctatcttttcttttaactacaccatttttgtgtggagaatatggagttgctaaaggcgaatgaatcccataattttcacaatatttttcaaattcttttgatgtgaattcacgtcttctattgaatctcatttcttatatattgtggtcactttcctctttaaccaatgctttaaacttcttaaaagcactaaatactttagatttttccttcaaaaaatacactcaactttttctactaaaatcatcaatgaaaagcaaaaaatatttatttttaccaaaagagtttggatgaattggactacatgttaagatgtgtggagcctaatcattatcctaatactaagagtattttaagttggggaattttggggattttacacatgtgatttggattagggtagccaacttcatggatgcctaatcaaacatggctattggcagaactactaaaagggaaaaaaaactttgcaaaataaatgggtatatcgaataaaggaagaacatgatggtagcaagaggtacaaagcaagacttgtagtaaaagactttcaacaaaagggaggcattgattatacagagattttctctctagtggtcaaactgaccattatcagaagagtacttgggttaatggcaaaagaagatctacacttacagtagatggatgtaaaaatgacatttcttcatggtgatttagaagaagaaattcacatgcataagctacaagggtttcaagtttaggggaaaaagaaaatagtgtgtaagctacaaaagagtctatatgacttgaaagaggctccaagacaatggtataagaaattcaacaacttcatgagcaataatagttttttgaggtgtcaagtagatcattgttgctatatcaagaggtttgatggctcccatattattttattgttatatgttgatgatatgttgattttgggggctagcatacatgagattgacaaactaaaaaacaagttatcagatgagtttgcaatgaaggatttatgtgctgcaaaataaatccttaggatgaggattactagggataaagaggtcttgaaactatcgcaggaagagtatgtgaagaaggtccttaacatattcaatatagttggagtgaagcttgtgagtacccctttagctagtcacttccgactatttaaagatcagccgcccttaattgaacaagaatggatttacatggccaaagtgtcttatgtattagtagtcttatgtatgctattgtttgtactagactagatatagcacatgtagtgggatttgtgagtatatatatgagtaattcgggaaaataactctaggagagagtgaagtggattctcaggtatttgagaggcactacagagttgactttgtgttttaggaagtcagatttaggtttgtaggggtacgtagatattgatatggctggtgatatagatagcagaaaaagtactataggatatgtttatactctaggtggtactacaatcatttgggtatcaaagttgtagaagatagttgcattttctactattaaggtagagtatattgcaatgacaaaggctagtgattactaccaaaaagtgctattttttagacctaataataatggttttaagcacctttgagtagtaatcatattcatttaacccaattaattcattaaggtccttagtaattggttttaaccatttttgtggcaagtttacatgtttttatcagcttatgaaccaattcaagcatgccaattgatggaggagctatttgggcgagttaagcaaggattttggatgattacaggcttgaatttcaagtggaaacacgagcacaagcaatggagaagaggaaaacagagtgaagaaaacagctgcagtcttctttcacacttttggagcacttcccgaagtccattttctacatactatataccatttgaaagcttaggaagtcaagaatccaacgcttcaaaccgtgtatgatttggagctgaaatgaggaagatatggccttcggaaggcaactgcatcatgccaaatgaccaatttcgcaaggtgaatttcacattgcgaaaatttcgcaatgagattttcttcatggtgcgaaattttgccatttcgcaatgtgaatttcacattgcgaaaatttcgcaaggtgaattaactcatgatgcgaaaatatggcacttcgcatcatgagtaattcacattgcgaaaatttcgcaatgtgaaattcacattgcgaaattcctttgaatcctctgtttctccacgcacgcaccactgacttcccaaatatttttagcttgatattttctcatgtaaattccttttgtaaccttgtattcagccgacataaagctttatattgtaattttgctatatatagaggtgcacaacacctccaacaaaaaaaaaaggggatgaatgaagggatatattgggggatcgatcctctgtacattaacttaggaatatataaagctctgtttttctctcttctcttgttcttccccatttctattttcttagtagccaaacagcctctgagggcttttcctcagaggatgattggctaaaacttttagtttctcaaagtatggatgttatgtgatggcttggatgcaatcccatggaaatttctcgcacttggaaggtaaggtagtcgtttttcattaacggttcattgatgcaaagtttggtttttatttcctttggacaacttccaacggccaatacttgataagcttttggatttctatccattagttatctcctacgagctattggaaggtgaggttttcaattccaagttttgcattaatctgttagaaccaatttcaatggccattgaaaggtgagtttatcacctggaatgactttgagttgccaatatttggtaaccttttggctttagaccattagttatctcttacgagccattcaaaggaagtctaaggtgaataaccattgatgaaattcactaccatctgttttgtcattttaaaggattaaaacttgatttgctaaatccataccggttcgggaagcaagcatcaccatagttgcaaccccaacgcgaggagcctatcctgagatttccaatttgcataagagccagagcatagctatcctatctttgagaaacttgtttttacaccctttcattttagtctttaatgttagcttagattagtttaaatctttctaaaaacatttgcattttcttttaaagctaacatctataagaaaatcacctattttcctaatttgaatatcacttgtgtttgcgaaaacccttcccaatgaacgatcctagaaccactatgctatagtagcttggctactttagtaatagtatttaaggtataaattttgttgatacgcctttaaagctaagctaccatgagtcgcatcagctagcaaaaacctaatgtggttgtagcctttcttggaagaattgggtcacaagtataagtgaagtgtgttacattgtgacaaacagagtgccatccatctagcaaagaatcttgtttatcatgctatgacaaagcacatacaggtttagtatcacttcataagatcagctttggaagatacagttttaacactcgagaagatttaggggaattgaaatctagttgaaatgttgacgaagaccataacaagtgagaaactagagttgtgtgcaatttcaattggacttcttagctgagatagagaagtcgtagccactataggtgaagacagttgatgatggattagtctccaagtgggagattgttgagacgtgtggagcctaattattatcccaatagtaatggcattttaagtttgggtattttaggattttacatatttgatttggtatcttatttatattatgtttagggtagccaacttagagagttttatttcttttagggtattgaaggaaatagaaaaacgtagagagaaaaacctagagggtgaagtgttttaggattatcttgtactctattttcatcataatgaaaatctacaacaactacaagtggacgtaactctcaaattgagagtgaaccactataaatttcgtgtgtttttgtgctttatttttcgcattggtttattattgctttcagaaaataagattagagtgttttaatcctaacactaatacatccacatgaataagctctagagacttctttgctcttgtaatggtttcttttggaaaattatttcgacatgttttccaagtaggcatcattcacataattgatcaaaatgatctatagaaaacaatcctctcactatattttccttgttcaataatttcaatcctccaaaattaagatcttcaaatcttaagtgtcaaatccatgaggaatcattgacataagattttagacattttacaatattttgaatgtttaacaacaacattctatttcttatcataggcatattatcaattaaattgacatattgatcttttattgagaaaccttaattttgcatatgaatataatagattttttctaagagttgactcaaacttaatatatatgtattatttttcatgttgggtaacttaattattatataaaataaaataatgtttaattattttagattaaaattttgaaaagtaagtcacactttacaatattttaagcttattgcatgttattctaattcttttttattttgtctttttattaattcttgaaagttaaaaaaaaaaggaataattatttagatatacttttactttctataaatattaaataggtttgagaattctaattttatttcttaaaaataaaaatatattttgtaattatataataagaagaaaaaaagtatttttacaatattctttataattatttgctaattttgaataattttttaatgtttagacaagataggattattgttagttttgtgatgaggtatgaaataatagtttcgaatgagtattaattttcaaaatcattttaaaaatcttaattatgaaaacaaaaaaataaaaataaataaaactggaaccaaacatggttaagtaacaaaaataggttggcccacaactccttttccttcatttccattagtctttatttcactagaattcttagtctttacgcgttttcttacaatgtgatatttgtcataaaattccaagcttttacggggaagaagacatcaatctgacggtgaaaccgaagagatcgactaaagctccaatgagaataacaaatggaaaaaataaggtgggcctcatttcctccgcacatagttgataagccaaggctaaatagttgatatagatgaagtcaactattggtgttgtatggctgcgcctctttaccagtgaaattagattactagctctctcacttgccttcattcatcacccccttatggctgatgctctcctttctatcgtcttggagcgcttggcttccgttgttgagcaacagattcgtgatgaacttactctggttctgggtgttgaagcagaaatccaaagcctcacagatacactccgatccgtccgagatgttcttgaggatgcagagcgcagacaagtgaaggaaaaatccgtccaaggttggttggagaggctgaaagacatggcttaccaaatggacgacgtggtggatgagtggagcactgctattctccaattacagatccagggagctgaaaatgcttccatgtctacgaagaaggtaagctcctgcattccctccccttgcttttgtctcaagcaagttgcttctcgtcgtgacattgctcttaagattaagagcattaaacaacaactacatgtcattgcaagtgaaagaaccgattttaattttgtgtctagtaggagtgaggaacgactacagcgacttataactacctctgcaattgatatttcagaggtatgtggccgggatatggataaaggcaccatattaggccatcttttgggtaagaattgtcaacagaaatctggcctctacatcgtctccatagtcgggacgggaggcatgggcaaaacaactcttgctcaattagcctacagccatacagaggtgaaggcccattttgatgagagaatatgggtctgtgtttctgatccttttgagccaatcagagtttgtaggtctattgttgaagccctccaaaaaaagccttgtaatctccatgatttggaagctgtacaacaagaaattcaaacatgtattgccggaaagaaattccttcttgtgctagatgatgtgtgcactgaagactatcgattgtgggaacaactgaagaacactatcaactgcggagcatcagggagtagagttctggcgaccacacgaaatgagagtgttgttaagatgatgaggactgcgtacaagcatccattgggggaactgtctccggagcaatcttgggcattattccatcaaatagctttctttgaaaagagcagggagaaagtggaagaattgaaagcaattggcgagaaaatagcagacaaatgcaagggcttgccactcgctataaaaactttagggaatctcatgcgcttaaaaaataacaaggaagactgggagaatatattgaagagtgaagtatggcagctagatgagtttgagagagatatttcccctgctttgttgttgagttattatgatctaccccctgcaattaaacgctgcttctcattttgtgctgtttttccaaaagactcggttattgaaatagataagttgatcaagttgtggatggcacaggactatctcaactctaatgcgagtaaagagatggagatggttggcagagagtactttgaatatttagctgctcggtctttctttcaagattttgaaaaagatggtgatgataatataataagatgtaagatgcatgacatagtgcacagttttgctcaatttttgactaagaatgaatgttgtattatgaacgaagaagggagaacaaatgtatccttccaaaaaattcgccatgccaccttaattggccaacaaaggcacccgaattttgtctccacatatgaaatgaagaatctacgcaccctcttgcttgagtttgcagtcgtttcaagcattgatgaagccctacctaatttattccagcatttgacatgcctcagggtattggatttggtgcggaatcttttgagaaaggaaattccaaaggcacttgagaaattgatacatttaaaataccttaatctatcacattgtcatggattgagggaattgccggaagcaatttgtgatttgtataatttacaaaccttaaatattcgtggatgtgattcacttgtgcaactaccacaagcaatgggtaaacttattaatctgaggcatctgcaaaattttctaactattcttctaaagggcttgccaaaaggaatttcaagattaaactctcttcaaacattggagaaattcactgtaagcagtgatggtcacaatgaatgcaatataggagatttgggaaacttgagcaaccttagaggggagcttgaaataagagggttgcagaatgtggaaaatgcaagggaggcacgagaggcaaatttgaagaataagatacacattcatcatttgacattggtatttgatccacaggaggggacgaactatttggttggagctccacgatcccattcgacaaatttattacctgaagtaaaggaggggccgaagagtgtggttgaagctcta

SEQ ID NO: 11567 - DNA, 9735 bp, Vitis vinifera
  Intron number 27 from transcript GSVIVT01009320001 (locus GSVIVG01009320001) derived from phytozome v7.0 (chr-ID chr 18; pos 7346161 to 7355895 reverse strand)
aaggtcaaacctcgtaaggtattgcttcaatgattggtttaagtgctgtctaattgtgttttttgttacctatatagctattgcatccgcaactatccataccaaaatgaggggtttctctttcttccatctgtccttagtgtcagtttggttgccaagacaatggagaaatatatgaaagaaactatcttctttccttccttggcaatttggttgccaagctattggtttaacttaaaaatatttattgtagagttctatgtttatcttctttccttccttggctacataagagagtatatgttttagaaagtttctaaattttgaagcttttaaacatgtttttttattttttttataagttgaagcttttaaaagcgttggctggaatgaggagtgttagaccttcggcttgaaaatggtgagatagatactgagtatatatatacatatatattgtgagtgcattggaatttaccccttagaaagtaattgatctgaggttaggcctgatgggattttccctttgaaatgaaaaacttaatagattttccatctgtggaaaaatattcaaaggcataactattggaactccaatatcttggtgtggtagtgaagttctcctttaatctttgatctagaagctcatctccattgaaaattctacggttgtgctctttccacatgcaccagaataataggggagctattcgccaaatatggtgtctcttcttatccaatccctcaatcttccacttgaggagatttcccactgtggctagagacacctatttcaggctaaagactgctaagagaagtgtccctatcctaacacaatgaatcaaaatgtgattagctaagtcttcattctttttgcacaagttgcatctattaagcattgtccagcccttttgtctacagttaagatcttctcccatattgctaagtgaaaaaacacattctttggggagctttaaatccctaaatttctttggctgggaaatccacactagtctaagcacacaaagaattacattgaaacttcccttcctattctcattccatactgagatgttgtctccttcatttgacactcttactaaataagtaagcttcaaaaattgggttaactccctttgtttccgagtcttggaaggatcttctgaattacaccaaccacttgcctccacttcttctttcttccaacaaatcagaactgtagtgtacttagaagaagctaatctgtataatgaaggaaaaacttctttcagctgtttctctctcacaaatcagtaattgtagtttacttagaagaagctagtctgtataatgaaggaaaattttctttcaactagttctccaactaaattttgtttgtttactatttttgacctgaataattatcctatggctagaatcttccaaccttttataacgtcttttcacaaactcatgccaaatgtctccctcacctctcttgtattccacctccaatccaattccttgaattttccttaagtgatcttcctccacattctcttccttgcaagagcaaatgtccacaaccattttctaaataaagcttgattaagaaccttcaatcttctaatgcccaaacctccacccttttttattcatgcgaaccttagaccaactcactagattaatgttattacgttctaaaaggtttccccataaaatattgttgaaataatgccaaagttaggactttaatttaggaataaaaaaggagagatcatttaggatatttccttatgatttagtttcctaattttaggagagaattaagctagattgattttttcttattcagtcatttgtgtatatatatgtgtatggtgtgtaccgattaatatcaataaaggagttcagaaattcttcatggtatcagagccagttttctgaaactctaatcccttctggccacctcttattcaggccatcactcattccggccaaatctctctggccatatctcaatccgatcatctctctctctctctctctctctctcattccgatcatcagtccctgttctcagagccaagggagaaaacgctttccggacagtcgaatcgtcgtcagaaaacactcaccgtcggcaacttttccggcgaactttccggcgacgattttttttctacaccgcaaggagcgcctggaggagatctccaatttgtcccaaagcaccggaaccagaaacccatccacgcgccgcccacgcgcgtttttccggccggcgactgcatctcacgcgccggcgcgtgagggcgcgtgagccactttccgacgacgcgcttcctcctccaggctcgcctgacgccgaccagccacccttcctacctgtttgtgcaatccgagccctgcacgtgcctcttttggggttcttttgcttccgcgggtcctctgatcagattttccggcgtcctccggctattttttctcaactccagtccctgcacgtgccttgaaaagtgttcttctacctttccggtccatgacaaaatacggaatggcatcatcacaagtatccagcgtcacgtcaccagaatcagggggcagatctgaaattccaaaccttggtggcaatgattcctctcctattctcatcacaggacacaaattaaatggccataactatttacaatggtcacaatctgtgttgctgttcatttgcggtaaaggaaaggatgagtacctcactggagaagcagtcatgccagaaactacagaaccgggtttcaggaagtggaagattgaaaacatcatgatcatgtcatggcttatcaattccatgaacaatgacataggcgaaaatttcttgctgtttgggactgcaaaggacatatgggatgcagccaaagaaacttactcaagttctgaaaatacttcagaactgtttcaggttgaatcagctctacatgacttccgccaaggagagcagtcagttactcagtattacaacacactcacaaggtattggcagcaacttgacttatttgagactcactcatggaaatgttcggatgatgcagcaacatacaggcaaattgtggaacaaaagagactgttcaagttcttcctaggactaaacagggaattggatgatgttagcggccgaatcatgggcattaaacccctgccaagtctcagggaggctttttcagaggttaggcgtgaagaaagtagaaagaaagtgatgatgggatcaaaagagcaacctgccccaacattggatgcctctgcccttgctgctcggtcatttaatagtagtggtggagatcgtcagaaacgggataggccttggtgtgattattgtaagaaaccaggccattataaggagacttgctggaagcttcatggcaaacctgctgattggaaaccaaagccacggtttgacagagatggcagagcacacgtggctgccaactctgagagcacatctgttctcgagccgagtccattcaacaaagagcagatggagatgctacagaaattattaagccaagttggcagtggcagtactaccggtgtagccttcactgctaatcgaggaggaatgaggccgtggatagtagacacaggtgcttctgatcacatgacaggagatgctgccattcttcaaaattacaagccaagtaatggtcattcatccgtccatattgctgatggttcaaagtcaaaaattgtcgggacaggttctataaaacttactaaagacttatatcttgactctgtcctccatgttccaaacttggattgtaatcttttgtccattagcaaattggctcatgatctccaatgtgttactaaattctatccaaacttgttactaaattctatccaaaccaagtctctcaagcaagttgcgtccagtctcagagtatgtcagagtctttcaattctgtgtcaaattctaaggtcaataaagatagtgagattataatgttacactatcgccttggtcatcctagctttgtttaccttgcaaaattgtttcccaaattatttatcaataaaaatccagcatcttatcactgtgaaatttgtcagtttgcaaagcatactcgaatagtatatcctcaaatcccatacaaaccttcgactgttttctctctagtacatagtgatgtgtggggtccctcccggataaaaaatatttctggcactcgatggtttgtgacattcgttgatgatcatactcgggtaacatgggttttccttatgaaagaaaagtcagaggtcgggcacatttttcaaaccttcaatcttatggttcaaaatcaattcaattccaaaatacaagtcctcaagtcagataatgcaaaggaatactttactagtagtctcagtacttatcttcaaaatcatggcattatccacataagttcttgcgttgacaccccacaacaaaatggggtggccgaacgcaagaatggacatctcttggaggttgcccggtgccttatgttttcctctaatgttccaaactatttctggggggaagctattctcacagctacctatttgattaaccgtatgccatccagagtgcttacctttcaatccccacgtcaacttttcttaaaacagtttcctcacacccatgccgcctcttctgatttaccactcaaagtatttggttgtacggcattcgttcatgtgtatcctcaaaattgtagcaaatttgctcctcgagcaaataagtgcatttttctagggtattctccaacccaaaaagggtacaaatgctattctccaaccaacaaaagattttacaccaccatggacgtctctttctttgaacatgtcttcttctatcccaaatctcatgttcagggggagagcatgaatgaacatcaagtttgggagtcttttcttgagggtgtaccttcttttcactcagagtcaccaaatccttcccaattcgcgcccactgagttgtccacacccatgccgccatcagttcagccagcccagcacacaaatgttccttctcccgtgaccatccagtctcccatgcctattcaacctatagccccacaacttgctaatgagaacttacaagtttacatcaggaggaggaaaagacaggaattagagcacggatcacagtcaacatgtggccaatatattgactccaattcaagtcttcctgaagagaacataggtgaggatagggctggagaggtgttaattcccagcattgatgattctactttgccaattgcattgaggaagggtgttaggagatgtacagatcatccaattgggaattatgttacgtatgaagggttatcaccatcttacagagcatttgctacttctcttgatgatactcaggttcccaacacaatacaagaggcattaaaaatttcagaatggaagaaggcagtacaagatgagattgatgcacttgagaagaatgggacgtggactatcacagatttgccagttgggaagaggcctgtggggtgcaagtggattttcaccataaaatacaaagcagatggatcagtcgaaagattcaaggctcgtttggtagctagagggtttacacaatcctatgggatagactatcaggagacttttgctcctgttgcaaaactgaacactatcaggatccttctctcattggctgtcaatcaagattggtgcttgcaacaactggacataaaaaatgcgtttctaaatggggacctagaagaggaagtctacatggaaataccacctggtttcgaagaaagtatggcaaagaatcaggtttgcaaactccaaaaatccttgtacgaccttaaacaatctcctcgagcctggtttgatagattcacaaaagcagtcctgaagctgggctacaaacaaggtcaggctgatcatactctatttgtcaagaagtctcatgccgggaaattggccatattgatagtctatgtcgatgatattattctatctggaaatgatatggaggagttacagaatttgaagaagtatttgtcagaagagtttgaagttaaagaccttggaaatttgaaatatttccttggtatggaagtggctagatcaaggaagggaatcgtagtctctcaaagaaaatacatactcgatcttcttaaggagaccggtatgcttggatgcaaaccaattgatactcctatggatagtcagaagaaacttggtatcgagaaagaaagtacaccggtagacagggggagatatcagcggcttgtcggacgcttgatttatctctcacacactcggccagatattggctttgcagtgagtgctgtaagtcaattcatgcacagccccactgaggaacacatggaagcagtctacaggattcttagatatttaaaaatgacaccagggaaaggcctattcttcagaaagacagagaaccgtgacactaaagtatactcagatgcggattgggcaggaaacatcattgacaggcggtccacttccggatattgttcttttgtctggggaaatcttgttacctggaggagtaagaagcaatcagttgtagccagaagtagtgcagaagctgagtacagagctcttgcacagggaatctgtgaagggatttggataaaaagggttcttagtgaactgggacaaacgagttcatctccaattctgataatgtgtgataatcaggccgctataagcatagcaaagaaccccgtgcatcatgacaggaccaagcatgttgagattgacagacactttatcacagagaaggtgactagtgagacggtcaaattaaactatgttcctaccaagcaccaaaccgcagacatcctcaccaaagctttacctaggcctaacttcgaagacttaacttgcaagctgggattatatgatatatattctccagcttgagggggagtgttgaaataatgccaaagttaggactttaatttaggaataaaaaaggagagatcatttaggatatttccttatgatttagtttcctaattttagaagagaattaagctagattgattttttcttattcagttatttgtgtatatatatgtgtatggtgtgtaccgattaaaatcaataaaggagttcagaaattcttcaaatatcaataaaggagttcagaaattcttcaaatatctctctgaaaattttctaatatgatcctcactttcctaggaattgcaaaaaagggatataaaatagatttataagtgagagaacctttcataagaactaatattcctcgatttgagaagtaatacttcttccaaggtctaatctccttttgaatctctctttcataacatcccacacaacaccggatttatgaagcattcccaaaggcaaaccaagataattttaggataaagccctttaaagcatgacatgatataacaatataagatttcattattatgatttcaaatttcacttagttatccttcttttgcattatggtttaatagatcattcaaggttacattagttgcattatatatggcatgggtgtattaagagttgcacagaagatccaagtcatgagttctttgcaagttgatgagttattcgtagttggtttttggacttaggcaatccgtcttaggcaattcgtaatgtactaccttctaatgaaatggatgacttgtttttatctagatgagttttccatggtgagtgttagtgtgtatgattacatgttggatgagacctatagtaaatcatgacattgactatcaagtagtcatgatttcaccaaactattatgttgaatgaactcttaatcttgagagaatattaagctagtgatgaggtttttagtgactttgatccataggctagaccttggagtgatcatatatttcttatgaattgagttattgttgattaagacatatgacaataggtatcttgagataggcaccataatatagcatgagattgagacagtgtccccttaggtgattttaagggcttgtggtcatgaaatttgtggcgtcacaataattcatttagtgaaatttgacatatgctcttggtgaactagggtatgttagtggttcacataatagaaggatttgagacttaaggatgatagagacaattttgagaggttgataacttctacctttttagattcaggacgtctgttaatgggaagcttagacgcaatagttagtaggtcacgaatttgagaaattgattaaattggatttaattaatttactctttgatttaatttcataggatattggagtacaattgagtctttatagtaggatgttgtgttaacttcagaattggattatgaggcaaccaatgttttcctataaatcttaatggtccccgcttaaattcactttttggtggcatgttattttgagggatatttgggtttttattcatatatgtgcataaggatgttttggtgaaagcatatgtttcataggagcttatgaattgtctttctgcatctggctaattaattaattggaactaattaattaattaggacctaatgagttaaattgagtgactcaagtccaagatgagttgaagtcacttaagccaacaatgaagtctatataaatcttttaagggtttaggattagatacacctatttattattatcttctggagaagaaaaccttagcctccatctctttagagagaagtctacctttctccattgccaagattcaaggaagagttattaggaggaagatctctaggtcttcaaaatcgtttttcatctattggaaaaaggatttgaggacatccaaatacaagatatggattctattgttctcatccttgaatgttctttagaggcttattagtttccgctatctatagatgtatgcactcctttagagatctagaacatagattggatttttctaggaatccaacaaataagatgcaggaagcctccctaccttatacccaacaatagattctagcctacagactccttccattctcccacttgaataaactcacttttttgcaagtttattttcaatcatgacacaacctcaaagccaattacaatccaccttcaatatcttagttgatccaattggtcttgcaaagcagaagaggattatttgcaaacaagaggtgggagatgtgcattccttctccccctttacccttgacatcatgagggtccattatagttaggtgcggagtgattgcccgtggaatagatgaaataaattaattgtttaagaatgaaattttattggaaccagaagatctttgtctaaaatggcaatatggatctcatttaggatagtgaataaacagcacaaggatagtggagatgagtatgccaaatatcagtagggttagaaggttcacattgagaaattttgcaggcccaggttttgctagcttcctgaatgccaactttgaacatgggaacagtgaccttataacatatcagatggtggtaggaacaggattggttagtgtaataaagaaataacggcctacaagtttctcagaattttgtttgacaaaagtttgaaaatatccttcttgcccaaaatcataagtcaaatttatcattatataaatgaaattagactatttccttagcttatgtgttactcagtttcagttttagtaatgcattgggttcttttcttttcttgagaaggcatcagcattatttctcatggaatttcactttatattcaatttgaatatgcaggtga

SEQ ID NO: 11568 - DNA, 9316 bp, Vitis vinifera
  Intron number 3 from transcript GSVIVT01026325001 (locus G SVIVG01026325001) derived from phytozome v7.0 (chr-ID chr4 ; pos 13996750 to 14006065 reverse strand)
aagtctgtgcgagaaaaatttactggaataattaggtatgtaaatttttatgtatctgtctaatggaaaaaaggatgcaaatctgttatttagttgttgattgttgatttgtgcaatgaattgcagtttaaatgatttagaattatcataaatttccatgtccatggctcatacaggcttatttacagcacataggcagcatagtattagacagccatgatttggttagataagttaatggccttgttgattggtcaaagtttgctggctcttctcgcatctaagggtggatattactccaagtctaaagaaattttgcatatatttgagtggattgatctaggaacttaatttcacagttggacctgaatttacacagttacagatagatctctgtttcaggattatgaatggaaaggctgcctgggcaactttagttattcggtatttctcatggcttttaatcgctagaacaaacatttgtttacttttatcataattaattgattgaatgactattatactttgcatgaagaatgggattcattggtaaatattatttgtgaacaaggcattggatgagaggggtaatgcaggtagatttagaagtataattgcagatttccattttagttctcctgctccaagtgatgacaagtgtcaaaaatggcttcaacatggtctgtgtcaattgctcatttttcttttcctttgttttgatcaggtttgtaactagggaaggatttatcatccgtttctgttttactctgttaatgaaaatgcttttgtttctgataaaaaaatggtgtatttcaattgcattgtcaagagttgtggttaatggtacgattccacaagataatcttggagggtttcagtgtcaaagctaacattataatccaggagagaacactcactgttagtttgagggtttgggggataaagataatttcttagtctttgtctttgtgattctctaggttatagcagctaacgtgaggttcttttgtgggagataataatgtgtccttggtgaaggaatcatgagatgaattaatggatctcatccttcagatattcttttgtgtcttggagatgaagagggtatgaagggaggtagggatccagagttccaactgcatggagatatctcggtgttgtagacattgaaggggacagaacattggaaataaaataaataaataactaaggttagggctgtgaaatgaaatattgaaatttgttcgctagttgagtaataattaggaagaatctgaagaaaaaaaagaaaaacatcagggagaaagaagagggtgataggatccaccagagtttctctgctaggaactaggaaatgatcctagttaaagaataagagagactgtaaccattagactagctccagttcgtcctaggctcctaacattatatctgattacctggagaagaagaatgaatataaacctactagaattgcactagtatgttcagacattacttctaggcaaggcttcacaccatttaaatctgtgaaaccatcttagtatttagaaatttctttattttcatccattgtcaaatgcataccataagtctttcatagaatgttttcaagctctttaggatatgcattctggaaacactggaaagttaaagttttttctatatttttcgctaacttcttgcacattcttaaggtttttggaaagttaaagccctttccttgattatctattaattgagcatttagattgaaattggaatgtttcggagacgcttgttctattggcacttaggattcttagagatacgtgtaactaatatttgactagttgggcaaaaaagatatcagtagagtctgagttcctagagaaacatgagttcaatcaagcatgttggttggttaattgatcctgttgaatataatgaatttatagtgtacaatctttcctttttaatataggtcacatgtatggtagttaggactcctagccttgtatatatatattttcttaattgtaagtagacacaatgaatgagaatcaaggttttcttctctctctctcttaacatggtatcagagccaagggagaaaacctaattctttccagtttccccgtgtcatcaattccgggaaaccttactgtgaccgtgtttcattttggtcaccttccccagaccctaaagctttccggtcggtcgaattgtcatcagaaaacattcaccgccggcgatttttccggcgacgtctttttcccataccgcaaggagcgcctggaggagatctccaatttttcccaaagcactggagccagaaaaccacccacgcgccggccacgcgcgttttttcggccggcgactgcatctcacgcgccggcgcgtgagggctcgtgagccactttccgacgacgcgcttcctcctccagcctcgcctgacgccgactagccacccttcatacctgtttctgccatccgagccctgcacatgcctcttttggggttcttttgcctctgccggccctccgaacagttttttcgacgtcctccggcaattttttctcaaccccaatccctgcacgtgccttgggaagtgttcttctacctttccggtggtgccacggttatttttcttttccatttggtctctcacacgggcgattctttggtttttccttcttcagctgcatctgaagccgtattagggctctcttcgatccaaatatacttcattatctagataagtggatatggctactaaaacttccattttttcctctgtcatatctagatctcctatgattacttcggagaaattggttggcagtgaaaattatatttcttggtatacctctgttgaactttggtttatgggacaaggatatgaggatcacttggttacacaggaggcagatatccctgaggttgagcgcgtacagtggagagatagatgcccagttatgtagtgtattatggcaatccgttgatcccaagatccttcttcatctttgggcctacaaaacttgttttaaattttggactcaggccaaaggattatacacgaatgatatccagcgtctttataaggtggcttctgctattgtccatatcagccaacaggacttggatctatctacttatattggccagattgcctctcttaaggaggagttcttgactgtgatgcctcttactcctgatgttggggctcaacaaacacagcttgataagttcttcatggtccttactcttattggcctccatccgaatcttgagcctgtccgcgatcaaattcttggtagttcattagttctgtccttggatgatgtgtttgctcacctctttcgtatcttgtccactcagactttgccatctgatagcatttcagattcttctgtgttagtttctcacactacctcttgaggaggacgtagtggtaaccgaggtagaggccaacgtcctcattgcacctattgcaataaacttggccacactcgtgatcgttgctatcagttacatggacgacctcctcgcactgcccatgtggcccagtcctttgattctcagctgcctcagcctctgagctcctctgcatctcaggcatctcaggcttctgttacctctgttgcccagcctggtaatgcttctgcctgccttacccacacatcttctcttggaccctggattctagattctggagcttctgatcacctatttggtaataaggatcttttctcctttattactactacctttgatttacctattgttaccttagctaatggttctcaaactgtagctaaaggtattggtttggcccttcctctgccttctctacctctcacttctgtcttttatactcttgaatgtccttttaatcttatttccatcagcaaaatcactcgtactcttaattgctctattaccttttctgataaatttatgaccttgcaggaccggagtacggggaagacgattggcataggacgtgagtctcaaggcctctatcacctcacctcggattcatctcctacagtttgcatttccactgatgctcctctcctcattcacagtcatttgggccactctaatctctccaagttccagaagatggtccctcgtttttccactttgtcgccgctttcgtgtgagtcatgtcagcttgggaaacatacttgtatctcgttcccaaagcttttgaataatcgggcaaagtctccttttgagcttgtccacactgatgtttagggtccttgtcggattgcgtctactttaggatttcagtattttgtcactttcattgatgactattctcgatgtacttggttatttttaatgaaaaatcgagctaagttattctctattttccagaaattttatgctgaaatccagacccaattcaatatttctatttgtgtgttacgcagtgataatgccaaggaatatttttcagttccatttacttcatttatgtctcataatgggattcttcatcagtcttcttgtgctcatactcctcaacaaaatggggtagctgaacgcaagaatcgacatcttgttgagacagctcgtactatcctcctccatggtaatgttccttttcgtttttggggggacgctgttcttaccgcttgttatttaattaatcgtatgtcctctgttttacatgatcagattcctcatttccttctctttcctgaccaaccactttatttccttcctccttgtgtctttggttgtacttgttttgttcatattctcactcctggacaggacaagctttccgccaaagccatgaagtgcctcttcttgggatattccagacttcagaagggttatcgctgttattcccttgaaactcatcgatactttatctccgctgatgtcactttctttgaggactcaccattcttttccacctcttctgagtctcttcctgtctctgaagtcttgccccttcccattgtctccccatctgatgttgtgcctcctcgaccacttcaggtttatcatcgtcaccctcgtgtcgctgctcctctctcttttgctgaggcacctgctgactcacttcctatcccttcggcttctcctgccccgactctgccttctcctgatgatacccattgctattcggaaaagtactcgctctactcgtaatcctcatcctatttacaattttttgagttatcatcgattatcttcaccctattctgcttttgtttctgctatatcctctgtttctcttccaaagagcacccatgaagctctttcccatccaggctggcgacaggcaatggtggatgaaatggatgctctgcactctaatggcacttgggatcttgttgttttaccctctggtaaatctacagttggttgtcgttgggtctatgcagttaaggttggtcctgatggtcaggttgatcgccttaaggcccgcttagttgctaaaggctatactcaggtttatggttctgattatggtgacacattctcccctgttgccaagattgcttctgttcgcttgcttctctccatggctgctatgtgttcttggcctctttatcagttggatattaaaaatgccttcctttatggtgatcttgctgaggaagtttatatggagcaacctcctagttttgttgctcagggggagtctggtttagtgtgcaggttacaccgttctctatatggcttgaaacacttttctcgagcatggtttgaccgttttagttctgttgttcaagagtttggcatgcttcgcagtacaacagaccattcagttttctatcatcataactccttggggcagtgtatttatctggttgtttatgtggacgacatcgtcattacaggcagtgatcaggatgatattcagaaactaaagcaacatctttttacccactttcagaccaaagacttggggaaattaaagtatttcttgggaattgagatagctcaatccagttccggtgtagtcctttcccaaaggaagtatgctttagacatcctggaagaaactggtatgttagactgtaaaccgatagacacacctatggatccgaatgtcaaacttgtaccaggacagggggagcctttaggagactttgggagatatcgacgactcgtaggtaaattgaactatctcaccattactcgtccagacatttcttttcctgtgagtgttgttagtcaattcctacagtcaccatgtgatagccattgggatgccgtaatccgcattcttcgatatatcaaaagtacaccaggccaaggtgtgttgtacgagaacagaggtcatactcaggttgttggttacacagatgtagattgggctggctcacccacagatagacgttccacttcagggtactgtgtttttattggaggtaatctaatatcttggaagagtaagaaacaagatgtagtagccagatctagtgctgaagctgagtatcgagttatggctttggcaacatgtgaactcatatggttgagacatcttcttcgagagttgagatttggaaaggatgaacaaatgaaactcatctgtgataaccaggccgcattacatattgcatccaatcctgtctttcatgaaaggaccaaatatattgaagttgactgtcacttcattagagagaagatcgcatcaggatgtgttgctacaagttttgttaattcaaatgatcaactagcagacattttcactaaatctctcagaggtcctaggattaaatacatttgtaacaagcttggtgcatatgacgtatatgctccagcttgagggggagtgttgaatataatgaatttatagtgtacaatctttcctttttaatataggtcacatgtatggtagttaggactcctagccttgtatatatatattttcttaattgtaagtagacacaatgaatgagaatcaaggttttcttctctctctctcttaacagatcctatcaaaaaaaaaaattgttggttggttgattgattgattgagaagaaatttctagaaactggaatatgattgattgagaaaatgttagatcaactgagaggcgggaagttgcagtttccaatttcatattttgctctatgtgaaaaaccgtcttttattattattattattattattattattattttaagattttggtaagggaatacaacttactctgatttgtgaatgaatttgtcaaaaacttttgacttttttaaaagaatcaaattttgtaaagagagaaaaaattcacaatttcatccttgtggatttaagcctgtccatttgtgccattgactcggtgcatggctaatgtggcagattccatatatggaaggtgattttgcagtttgggacttgttccatttctcttcttcactgtgagcttctaccagtgaagcttttgcgggcatccctttgagccttattatgcgagattggaacctagtttgcagaaccatgaggttgactaatgagtcaccttgtgaatggctaccaccatttgtatgttttgtcaagctaaattttgatggatgttctttgggcaacccaaggcagctaggaattggaggtttgattagaatgttcagagcattctctaaacctgcaggctagggtctagccattgtggcaaaaattctagcccttctgaaagggttgttatcggtgaaagttttgggtcattccaattttctagtagaaggtgattatgttattgtcatatcatgggcaactaagaaagaaagagtagttgcaccagattattgacatttcgtcagagttaggatgttctttctgttggactcctcacttaggcaatggcatgacagatgcgttagcaaaatgtggagctagacacttgttttcttttataggagattttataccattgcaaattgtagttaggtttgactttttggactagtatacactcatctatcttttttatccttcttattataaacaattacataccttttggaagtattgctcatccttctttgtccttaatatttcatcacaacgaaattgttgtttcttatagaaataataataataatggactagtattcactcatctatctttttgatccttgttattatagacaattacataccttttggaaggattgctgctcatccttctttgtccttgatatttcatcatcatgaaattgttgtttcttatagtaaagtcccatgacggatgacaaggtcaagtctgaattggaaatttagacttaataataataataaagtcctacctatcaaaaataataataatagtaataataataaagtcctatgactgatgacgaggtcaagtctgaattggaaattagacttggtggttctagttcaatctgtttgtgactattttggttggttgatttccttcattctaatttggatttggtggttctagttcaaactgtttgtttgtgcccattttggttggttgatttcttgcaatctgattgcactgttgaaatttgtagattaatatggcttggcaaggatttttaattagactttaatacacaaaatgttcacccccgccctccccccctctctcatattatgaatcctagactcaacaatgtttcaaatactttcctattctagttccttagaggttggaactggataggatttgagttatgacctcaaagctgtgggataaaagccaaattattcagaagaaagaaattgaatgttgaagtatggtctcctctaacttgtctggtttgtgtagtttatgatatataaatgctttgattcttaatcaagaaggtgatgttttatcatgcatagatgctttcactagcatcttggctgtagaaatctaatgatgtttaggctatgcattggcatcactaaacctttgttcatttttggtaaaatgttttgattgctgtgtagcactcattcattatattcatgctacaactaatagctcctcacttctcactactgcattatcaagtatggaaactgacctgattgtgtcatattactggttcatggatacttgaatggacaatatgcatctgaatgatgaccaagctatcttctgtcattatattgttgcagattgatttaattggtcttgcttctatttgttgcatatattggaaattagtgcataaattttgttatttcttgctctattcgtatttcacttgcatattgcggtatgacttttatatattcaatttgttcagttggtttttataatttaaatagacttagttttttaatttttggtggcaatatctatagaaagtaaaaaatccctctatgttattaacaggcaacaag

SEQ ID NO: 11569 - DNA, 15464 bp, Vitis vinifera
  Intron number 2 from transcript GSVIVT01017889001 (locus G SVIVG01017889001) derived from phytozome v7.0 (chr-ID chr5 ; pos 4389428 to 4404891)
gaaggtaatgttttcaatgacttcttttaattaatgtttatgttccctattctgtggaatagttttgtgggtatgaatgatttgatcgtttgggtaagctattgagttgggttttgattttaagatgaatttcttcacgggttgattcaatttgggacgaagaaataaccttttgtaaagattaaatgctaggtttttgtaattattcaactccgaaatcaggaatcattagggaacttgtttgtgatagaattttgatgagcatatagagaaataggagagcctttcataattgtgaaactatggatcaattgatcagaaattcttttttgtaccttctttgggattgggttaacttgtacagtggggctggctatgtcgttagttgacttaggctctgtgtaaagcgcacttgcagttttctgtgtccttgtgctgtttttccgtagttgggttactttgtatacattgtgtgtgccttttttttcatttaatacatttttatattgcctataaaaaaaaagtacttgcaacttttgttctcaatatatcttccttgcttacaagatgactgctgagttgagaggaggtttgagaggaaggtgctggtttgcggtggagaccaagacttttgaacactccaccgaattagttggaggaaactaagaggggttattctggagaggagtggagggaaactctccaccgttcctcactctcttcttctcctttctttgggcctatgggatctctctgcttctactcctttcttgatgtccgatcggatcttgggcatgtgtgggggaatgtggtccaacgctatttgtgggttggagggtttgctaggggatgccgactgtgatcccttgagagtaatcttgttgatgatagtgccttgggtaatgaatgcatggaggagcaaacccttgggttggcagacaacacattttcaaaggagcttgtgcttgtcccaatgagggtggattccatgaaggtgttggaggtaaatgttggttctcgagggaaagagggggagctgtcagaagggtggtcctccagttgccttgctaagtttagctgatgcttaggcatgtcgatggaggtttgaaggggagattctatacctactcaagaggatgaaagagagaatcgatcaaaagggtcatgtaggggctaataggagggcgaattccttgtcttctaggtttgaaagggaactcaagaaacttgaatggatagtgaattataagggttcaagcactggtagtgggttgggcaaatctggtggggcctttgtttcgggatgcaaataaagataagaatcctgtcctggaatgtgaaaggggctaaggatagtgacaaaaggaagattataaagtccttgatcaagtcgcaaaggatggatgtggtttgtttgcaggaaactaaaattcaagagatgtctagtgggcttgtacatagccttggggtgggcagatatttacagcgaagtgttgtcaattctaggggtgtagtaggtggaattttggtgttttgagataacaaggtgcttgagttagttggagtggaaatgaggagttacttgatttcatgcagtttaaaaattgtgaggatggtggattgtgaatttttaccggggtatatggcctgatgtgtaggaggaactaagagtgtttctaggatgagtttggggcaattaggaggttatggagtgatccttggtgtatcggaggcaacttcaacatgataaggtttcttggggagtgttgtaagggagacggtctttccttagccgagtagattttagaggttacagaggatctagagcttagagatatccctttgcagggaggccttttcacttggactgttgggttgaataatcagccctagtctagacttgattgatttttggtgtctgaagattgggataacctcttcaaaggggccttgcaatgtgttttacctagatcagtttttgaccactttcccactcttctagacgagggaggcatgaggagaggatctagattcaagaatacgtggttggaggagggttttaatgatttgttgaaaaatttgtgcgtgggtcttaatgttaatggttcctatagttttgttttggttgctaaactgagagctttaaaagtagttttgaaatcctggaataaagatgtgttcgactttattgaagccaaaaaggaagtggccctcaaccaagtggcattttgggatgataaagagagggttacaaccctatctttggaagaggttgaagcaataaatgaggcaagggaagagtataaaaaatgggtccttagggaggaaattttatggcagcagaaatcaaaggaagtgtggtagaaggagggcgacagtgacaccaattttttccataagatggtgcatgcccatagaaggagaaactggttggccaaggttaaagtgaatggttgctggctcattgaggagaatgaaataagagatagtgtggctgggtcttttcaaaaccttttaactgaggaaggggagtggagacctaacattggtggcttgacttttgagagactaggaggctgtgaggctacatagttggagctcccattctcggaagaagaagttttcactactctttcagacctaggcaaggagaaagtgccatgtttggatgggtacactatgacatttttggctttttagttgggagtttgggaaggaagaggtgatgagcttttttagcaatttccatgaggggggcagatttgtcaaatccttgaacgctactcttttggttctaattccgaagaaaggtggtgccgaagacttgagaaattttaggctaattagccttgtgggcagcctttataagctattagctaaggttttagccaataaacttaagaaggtaatgggtaaagtgatcgcttttgttaagggtagacagattttggatgcaactttgatcattaatgaggctgtagattcaaggctgaaatgtagtgaatgtggtgttctttgtaagcttgacattgagaaggtatatgatcatgtaaattggaatttcttgttgttggtgttaagaaagatgggctttgggagaagtggattgaatggataaattggcgcatctcaacaacaaaattttctattcttatcaatggaatcccaactggtttgtttcaaagcacaaggagtttgagacaaagggacccctctctccttatttatttgtgattgctagagaggcgtttagttgtcttctgaagaaggtggagaatggtggctatctttctaggtggtgggtgaggggtagaggaggggatgagattcagatttcccatttattatttgttaatgacacttttgtgttttgtgaggcatcacaagattagatgacttatttgagttcgttacttatgtggttcgaggcaatttatgggttgagaattaacttggataaaagtgagttaattcttgtggggaggatggacaacatagatgatttggctttggatttgggttgcaaaatcggcgatcttcccttttcttacttgggtctttcttcgggagcctttttcaaatttgtgacagtttgggatggggtggaagaaaggtttcgcaaaaggttagccatgttgaaaagatagtacatcttgaaggagagagacttactctaattcgaagtactctctttagcatgcctatccatttcatgtctcttttttgcatgccaaggcaagctagattgtagttggagaagatttaaagaaattttctttggggtggtggggcttttgttcagaaaccccatttagtaagatagaaaatgatttgttcagagagaaggaaggaggggcttaagtgtgaggtgttttttagtgatgaacgaagctttcctctgtaagtggagttgacactttgctaataaaaaaggggcactttggaagcaagtcattagttagaagtatggtgaggatgaagaggggtggcgatcccatgaggtgggaggtaggtatggcgttggtctttggaaaatcataagaaaggaatcagattttttaaacagcataatttctttctttgtgggagatggttagagagtaagattctgaaaggacaagtggtgtggagatgagccactttgtgttttcttcccttccttttttgccctaatcatttctaaggatgcatgggtggtggatgtttggaacttcaaaggcaaaaggggtggttggactccttgcttctttaggttgtttaatgattggagtatcattgaagggatggttgggcgaatgtttggaacttcgaaggcaaaaggagtggaaagagtggagcactttttggttgaagattcaagcaaaaagggtgtatagggatgaggaagataggatgatttagacggcttcgaggtgtgaaaactttttagttaaaatccttttattttattttcgacctcggtgaccctttattgttcttgtggagtatcatttggagatcttgtgcgccaccaaaggtggcttttttcacatgggaagcaacacgagggaaatcactaactttggattaggttcaaaggaggggggtttctttggcaaacaaatgttttctttgctattctgaagaaaaagctgttgatcacattctttttcactgtgcaaatacgtggattctatgatagttacttttttctctttttagtgtatcttgggtcctttcctcttcagttaaggaggcgctccttaggtggcatgattttttgtgggtaaaactcgtaaaaactcttggatgatgacccctttatgtatcttttgaatggtgtggaaggaaatgaacatgttagtgtttggtaatgcggagttgttggtccaaaggatgaaaaaaaattttgtttataatttgtggtcttggtctaaggtgtttgtagatatggaccctagttctcttgttagctttattgattggctaggttctaagtgagggcagatggtgttttttgtttctttctctcccactttgggtggttggtgtatacttcttgtatactttaggacaatattttggtgtttcctttatatatatatatactctcttacctattaaaaaaaaagaaaaaaaaaagaacatatcatgctataatcggtgggagattttgatgtcttggaattttgtcataagtggtacggatggttggtatttgttcctaggtttaggcaacaaacacattggtgattggttttgaaattcataattcatttgatctcctgccaatcattcatttaaagaatctcaaacttcataaatgtagaatttgcataaaatgttaattatctttggtctattaacccatttttgaacaaaggaagatgagataaaaggtgatgatgagcacctctatttttttaattttttttttatatatatctttgttaactagggaacctcaccatggcaaggtcctttgagcccacttatcccaaagtactaactaggtcgccataaccaacatcaacaaataaaaataaatataaatatatattaaaggtgccaataaaaaagaggcgagcatattatattgaaagtatacttgtgagaaaacaaaaagaagcagactacaaccacaaccacaatctagtacttatagttcaaccactcagtaaaatctatcaagaatagtggacaagttggaccatcaattataagatacccttgacaccacatgtatagattagatataagggaattcttgagagattgattagtgcattgcacccctttgaaggttctttgatttcatttcttgagagccgtctccatgcctttcttttctttttgtgtacaaagttcccattccaatccattagcaagttcttcaccaaatatgggagaacccatgaagtgccaaataaggagaacaaaaagtgttgtagccctctagcttccacatgaccatctcactttctacctttcaaacatcatccacctaaacttccttggaagttgcaaaatagaataaagatggaaaaagagtcctttaatggaacattgctgaaccatatatcatgctggacttttattcttctctctcatgacccacctcaaatcttgttttaatttaaaaaaattcccattgttttcttatcgacttccataagctaacattatagcctttttttccctagccaaaggcaccatcttcttggctcttcccccctaaactttcccactatgacctttctccaaagcatattcttctccaaagtgaatctccaatatcatttacctaataaagttttattgagaatggacaactccttattgcctaaaccttttccttttatctttgcaaattgtttactatttcactacatgaggctttttcttgagagtccctccccataggaaatctttttgaacttttcctagtctcatagtcactaacttgggaataacaaaaagggcaatgaataatatcagtaagctaccaagagtacttttaaaaaagtgagtctttccccttttgagaggtattgccttttcttttccttttttttttttttttttgataggcaaataggaatagaaatatattaaaggcactaatgaagaaaaagcaagcatagtatcttggaagtatacaagtgacaaaacaaaaaaagcaagctacaaccccgatctaatactcaaagctcaaccatttgataaaatcaatcaaggaaaggggactaacttgatcatcaactatgaggtagtgccttttccatagagctagtcttttggagagccccttctctgtcacatctcaagtagttgaagccttgaagggagcacccacaaccctgatctaataattagagcttaaccacttgataaaattagttaaggaaaagggaccagctcggccatcaactatgaggtaagtgccttttccatagagctagtcttttggagaacctctcttataccacatctcatttagctgaagccttgaggggagcacccaagggtaagcctaagtggtagacaactttcccactccgtatcccaatattgatgcttgctcctccacaattgggaactctcccagcagaattagttctcttttatttaagttaatttttagctttgaaaaagcttcaaaccaagatagaacccaagccatataggtcaattgcggtagataaggttcacaaagaaaaatggtgtcataagtgaatagaaggtgagaaatctccattgctccacctccccttgaaacccataatgaagccaccctcccatgcgtttctcaagagaatgctaagagccatataaaaagataaggagaaaggtggtcccctttctcaactatgtactttaaaaaaaccctgaggcacaccatttaccaaaactgaaaacattgctgttgggatattaaattgaatccgcttaatccattttttcctaaagcctatttttggcatcacccctaaaaggaagctccaatttacatagcataggctttttctctatctaacttacaaacaactcctctatgactcctcaatctcgagtctatgatgtattcaacaatgaatgtatttggaagttattttcttccttaaatggttgatatacattttaaaaagaactttgcccgaatgatactcattgactggtaataaaataataggattacaaggatatttgggctttgaagacgatagaatattaatcaaatttattaatatcattgatgatatgtaggatagagtagtaacaagcatgaagagtgttgaggtttcaatcataataggcttacatctaggatcatcattaattctttttcactcatggttgaatttagtatgcatattcatgaagattttctatcatccgtgtgttcttcatatggtttggttacaaaccaaagtaggtgttattaattatggtgaaaaactttaggatgtagaggttgtgggtaagtagaaataaaacaatgtatgcactagaagtggagtgggaatatagtgaagattggtggttatggaataactaaaagttactgttgttcttatcttggatcaattgtccatatggagagaaagattgaggaggatgtcacccataccataggatgtgtttggggtagaagcgtctcttgaatgtcatttgataaatgaacacttgtagtccaagacaatactaatatgatggtagtagtgacctcaaatgagtagggatgacaatggggcgggttttttcgggtacttgccctgcctttaatgggatagggttgaattttaataaacgggtttgggatttttttttaaaacccagggcgggttcgggtattgccccgccctgccccaacccgattatatataaaattaatttaatttaaaatttaaaaataatttaatttaatttttattttactatttttaatatatagataataaaaaatatttttaataaaataagttataaaaaatataataatttaattatttataaaatatatttatcttaatgtaattaaaatttttaaaagtaattttttaaaaaaaattaaaattaaaaaaaaaagttaaacggggcggggcggggcggggtgggtttgagaatatatcatacccgctccgccctgtttaaatttttaaatgggacggagatgagaattgttttgaataaatgggacggggtttggatgggggcgaaccgtcccgaacctgccccgttgccatccctacaaatgaggaaaggatgagggaaagttctttaagatgggttgactatgaaaacaaagatccatgacaacactagcatgaagaagtgatgtgcaagttgaaggcaccaggaggatttgattatcttatacttttctagatggagtttaatggtgaaaaaggatttgtgttgctagtacttcatagtttacttgacaaggatgcatgaattgtccagtaacaccaaccacataagatgttttttttttatgaagaaaccccacaaacctctaattgtgtaggattaggagatatagcagctaaccatgcgatgccatcttgtttcactgcttgtcaataaactgtggccttgattgtcaagctagaaaatctccgatatggtaattactgcaacattgttgatacttgttatgagctgatcaggtttcagtacattggatgactgtttaaaatcattactcccttttctaagggagggagaatcactctaatcaaaggcactttattgagccttccaatctatttcatgtccttgttcatcattccaagaaggttagttcaatatatttcatgtccttgtggctttttggccctttctatatatattgttgtttatctatcaaaaaaaaaaaaaagaaggttagttcaagactttagaagacccaaagagactttttatggggaggttgtgtgctggagaaaaaaacctcatccgataaattggaccatagtctgcttagaaaagaaagttaggggtcttggtgtctgtaatctttgaaccttaaacaaggctttgcttggtaagcagatttgaagatttgctactacatggaagtccttttgaaaacatatcattataaggaagtccgaagaggaggaaggggatggtgtttgagaagggtgagagaaggatatggagtgtagggatgtgcaaagccataagaaatgagtggaaaggaataaaaagtagatcttgctttacaattgagaatgagagaagggttgaattctagaaagatctctggtgtaatgatttacccttaaaaaatgtcttcctaaacttattctatattgcatctaacaaagatgggtgggtagtaaaggcgtgggggcaggttggtgaagcgggaggttgaagcccctgcatttcaaggcatatcaatgattgggagcttaaggaattggagttttctatggaaattgaaaacattgtcaattaaaaggaaaatggaggaaaaattgagatagaatgaggccaaaagtggcaaattttcagctagaaccttttattcatccttggttaggggaaataaagagccctttctagcaagtgtagccttgttggtatgggcaaacactaggaagtgtggtcctagaaagtggcatatgatcttgagttcaaatcttgccattgatgataccctaaatttacccgatgctggttgttctggggcggttagcacctcgaggtttgggtttccatagagttctaagggcttggctatggaaggttactcagttataaaaaaaaataaaatagagagcccttcctagcaagtgtagtgtggagtacatgaccaccaacaaaggctggcttctttgcttgggaagtaacttacggcagaattttaacactgaaacaactcaaaaggagagggtggactttgctgaataggtgttagttgtgcaaaggtaaggaggaattgacgaatcacttgcttttccattgctttgaagcaagtatgttatgacaattgttattttctctctttgaattgttttaggtgatacacttttcaatagaaggaaccttttaggatgacatgactcttttatggagaagaaacaaaaaaagcgtggaggattgcaccttgtgcttgttttggactcttttgaagggaaagaaacaagaggacttttaatgacattgagaagtcagatcaagcaatcaaatataactttctgtatgcttttgtaaattggattaggatgtaaatagaggattactcaatgacaatgatggactttgtagattggttgagcttaagtaaggggaaggtttttttgtttatcttgtccttgtctagacaaggtgtcttttatatgttaggacaccttcttttaggtgcttttatacattttttgttttacctaccaaaaaaaaaatggaaaatcaatacccaatcatatcccacttgtagggagccataccttacatgtctagtaactttggtaaagttctctctttttattttatcagtaagcaagaaaatattatatatataaggtacatagaatgtatacaatgggtactaaaagacattaccaaaaagagagagaacattaaaataactactccttcccttagctagatcccgcccaatctacaaattaggcctttacatgctaacccataacactagattcttaaggaaaaaacactttagttcttgaattgattgtttctcactgttgaacactcttacattttcttctaaaatgtataggagagtggctcttttaaccttcttacgttttcttcccacaaaggagtcacactaacttaaaagagtctccttgacttatagaaggaaggacccacataatgtcaatcaaggtaaacaaaaattgtcataatgcctttatttttgcacaaatgagacatttgtttgccaatgaccaccctttcttttgaagttgatctaaagttaacaccttaccccaactaacttcccatgaaaaaaaaaaaaaaacctcacttttgatggaaataatggccatcgagaaaaggggttgcatgccctagctccaaaatggaatataaagatttgacaaagaataccccattcctagaatccatttataccacttttatctttttcttctctattcatggaccttccttgtagccttgagaaaaaagcctctacattatctaacttccaatcatcccagtgtctaacaacatgaggattctaagtggcccccctcacctagatcatccgaaagatccaccttccaaacttcttttgataatgctaaggtatacaagggtagaaaagagccacataagggttcatcaccgcacgacatataacttcaccctcttcccatttctcacctcaaaggatgtttcttgccaatcaaattctatatttttctgtaatttttccatacccaaacctcatacccttcactcactttgcaagaatactaaccccctcatcttctccatactttcctcgaatgaccttttccaaaaggtttctccttccaaagaatatttccaacaccattttcctaagagagccttattaagcgaggaaagagatctgattcctaggtcccctttgcttatctccctactatcaattgaccatttcactaaatgcattttgttctctgaagccatgcttcccaaaggaatgcttttggaattttcttaagcctcaatttgactttttggggggcatgctcagtaaggacaaaataaataggcaaactggacaaagtattttgaattagagtaaccctctccctttttgaaatatattgttttttccataatgatagtcttatgtgaaatctttctttcatgttatcctaaattgactttactatgaatggagctctaagaggaagccccaagctactttggaagctccctaaccatgcatcccaattttaaagtcaatttctccacattaacactccccctattgggatcaattcacttttctcaaggttaatttttaaccccgagatagtttcaaaccacataagtagccaacttaaatagggttcaaaatcttagcaggggctggtatgactttgccaagtcatctacctcagctaatatcattacgataccaagaaccaagtccaatattttgttgaattgcaaaataactcagttgactaagagatagatcgaagcttttgaagaagggattcaagtctcacacctattttttgtagacaatattcttcttttatgtggggataatgtagatcaattgaaatattggatgttaatagtcacttgctttgaaatagtgtcaggtttgaaaataaatatgaaaaaaagtgaaattattctagtgagggaggtggaggatgtggatagagtactttttttggttgcaaagtagggagacttcctacttcttatcttggttgcaaagtaagtcttgtggtgggtgggattcaatcgaaagaagatgtttaacaggaaattgattgcttggaaaaagtagtacctgtccaaaggaggaagactagtccttactaagagcactctatcaaatctccctatctattttatgtccctctttgcaattcttagaaaagcaagaattggattagagagaactcaaagggactttttgtggggagatacgaaagaaagaagaaagatccatttgataaattgattagatgtttgtaaggataagaagtacggagggttgggtttaagaagattggagggccttaatcaagtcttgctaggcaaatgcttgtggaggtttccttttgagaggcaaaacttgtggaggaagattatacatagaaaatttagggagattgaagggggatggattaccaaaggggtgagggattcttttaggatgagcctatggaaagacattagaaatggttaggaaaatttcaatcttaaattaattatttgaatcataaatgataaatatacaagattttggtaggatagatgggtgagggaggttaagttaaaagacacaatccttatgcttttcaaaataacctgcaccaaaaatgccctggttgcagatttatgaggtggaggaggagttgaagatgacaattgggaagttcaatttagaagatctttccaagattgggaaatagaggaggtgacccaatttctagagcttatttaccctttgaatatgcagaaaggagcggacactttactttagaaagatgataggaggggaaatttcagtgttaggctgtaccacaaatcctaagtgatgagaataatttagtattcccagccaaagagatttggggatccctaactcccctgtgttttttttttttttaaaaaaaaaaaatgcatgggaagctgtttgcgggaagatattaactgcagataagttaatgaagaggggatgacccatggtcaacaaatgcagccttcgtaaaggcaatgaataatcaactaatcacatcttgattcatgtgatatgacaagagtgctatggacttttctgttagtagtttgtgacttgaattgggtgtttcctatttattgagaaatctcctacttgaatggaaatttaaggggctagataagaagagaagaaatagtttgatgcatggctctgatttgtctattttggtgcatttagaaagagcgcaactgaaggactttcaatgatggagagctttcataccaaagattgaaggagttcttcattaaatcgctattagagtagtctcatgcttcattggagatggagaacccctctattttggatttcttagatgttcttctttgtggttagcttggcttgcttttgtaggctaaccttgtatatgtttggtgcttgttttgtgatgttttgtgcatactgcctatatacataaggtgcacccttctttttggcccttcttaatacatgcttttgttgtctatcaaaaaaaaaaaattgtggcttaagtttgatcatggctttcgtgaccttatttcagttataaaaaagtatgcaagcctaccattgtggggacatgaggtctttttgtttgtgcagagggatatgatgttctcttttgttacatgggcttgagtggccttttttttttttcatttttgttccccattggaatatgttgttcattgttttcatggctataattttgagggctagggttggagaatgcactaaaaatatttgaagtactgcagactcaaatctgagtgtaatgcattcttttgtgctatttggaaagattatgatgaatcaaatgctttctaattttaaataaatcttttggccttcaatattatagaacatgagaccatttatcatgtcccaatgtattccaacactagtttcttgtttcctgtcttgtttgagttggtttagtgaaaatgaagaacattctgagaaaggggtaatgattacaaatcccaagttgtcagcatttatttttaactggctttgaagttttaactttatgtggatataagcctacactaaaatattttaagctgattggcccaaatttatctagcccaagtgtgataattccttactagaggcttcttatggttgtagcaaggtatcactgtgggagtacaagaagccttctttgcttctgtggaaggataaagtgtccttctgatacatgggcttaagtggccttttttcattacatttttacttttttgttccctgttggaccatgttattcactgtttattcaagcctatacatttatgggctagagttggagaatgcactaaaatatttgaagtactgcagaaacatatcttattgcactctaaatgttatttggaaaaattatgatgaatcaaatgctttataatttaaaataaatcttttggctttgactattaccgagcaattagaatcttaaaggagtttcaattgtacatgtaatgttgttcttaattgtgttttctaattgacagcatcaccatttactactttgccaaggaagagtcca

SEQ ID NO: 11570 - DNA, 16079 bp, Vitis vinifera
  Intron number 7 from transcript GSVIVT01030942001 (locus G SVIVG01030942001) derived from phytozome v7.0 (chr-ID chr1 4; pos 19458182 to 19474260)
gagagaaggaaataaagtttcttgttagaactttggtaagctatttccgaattgtttggttcttgatatagttttgtacagatgcttttactttcgtccaaaagatagtcttttctagtctcatagaatataatcactaaacaaaaagttattttatgttggatttgctaaaagtggaattgacttgctggataaatcagaacatagtgtcacttggtctgtgcaatagtaatcaggatcctcagaatgtagttaaactgtatatttaatattttatattattgtttcccttttgcatcctttcaaaaactatgttcctcattttgctaacaagatgataccaagtaagagtgaagaagttattggaaacttccatttctgagattgtcaatggaccccactatagttaatgagtttgtttgagtcaaatgtgtctgtttggaaagttctaattccccttcttttaatgttcatgttgacctgccaaacaaaataaggatcttcttatggtatggactttggtgaggtcccaaaacctaaatacaaatttgttctttgtgctttatgcacaaatttcttatgattttttacttgtttgtattcaaattggtgcctcataggagcgtgtgtcccttatagggttcttggaatggttggcatccaactaaggggtggtgagccttgttgatttttttgctttgagagggggttgttgctttgtataccccctgtatacttgtaactttccgcctcttcattaatatatcttgctttacttatcaaaaaaaaaattggtgcctcataggatcttcttgggccaaaataaaacttaatgccatgcttctatgcatttgttggtttatgtccctaacttgtgcaccacctttgcaagccttaataatgttcatgttggagtatttcaaatggtccctactggtggatctctcgatgcatatgttgtaagcagatatggattgaatctgtattttttttttgtatagtatctgaagaatacaatctaatatttataacctatacaagacatattcaaacaggaaactatacaattgtcaccttaatctagaatatgaattaaatttgaatagcaaatcataatcccaaatttagctccctaaaataatgaatttagttcccttaataatgaaattaactaaatcaagtctactaaaatagtgcaattctcacactcccccttaagttggctcatagatgtcaatcatgcctagcttgctagttaagtagtcaaatgtaggtttcaacagccccttagtaagtatatcagcaagttattcattcattggaataaatgacaaacaaataagtccattttccaatttttctttgatgaagtgtcgatcaaccttcacatgtttggtttgatcatgctgcattggattgttagctatatttatgacatctttattgtcacaataaagcttcattagagttttcatatttaccctcaattcttctagcaacctctttaaccattgaagctcacactttccttgagtaacaaccatatattcttctttagcattgcttctcgccataactggttgcttcttgcttctccatgtgactagatttccacctaccatggtagagaaacctaaggttgaccttcttcattaatagctcaaacctagtcaacattagtgcatgcctcaacttttacatgttcaccctttttaaagagtagaccgcctttcctaggtgttctttttaaatacttgagtattttacaacttccatttgttcttcatgggatgagtgtatagcaagtcactgcaaatgctatattaggccttgtgtgtgatggatagataaatttacctactactagttgcctatccaaaaaaaaaaaaaaagaagtttgcctactagtcgttgataacattccttatctagtgggccttcctttaggagctacttccctggcaaggtgagcttaaggttggaaaagatttaaagagattttctttgggaagggaggagattcctaaagtaggccgcatttggtgaatttgtctattgtctgcatggagaaaaaggatgggggcttaagtattagaaatctttctatgatgaataaggctcttcttggaaaatggtgttggagatttgcttttgagaatgagtttttttggaaacaggtgattgtagggaaatatggagaggaagatggaggatagtgttctagtgcttcaagggaaggttatgaagtggggctttggaaggcgattaggaatgggtggatggagtttagccaaagtgtggtttttaaggtgggggatggtagaagagtgcggttctggaagaataggtggtgtggagaggattccttggaagacgcttttccaagcgtgcattctcttgtctagtctagagatgcttgggtagcttagttgtgggatcaaattggggaaatgggttactggaacactatattcacaagacttgacaatgactaggagttggaagaggtggaagctcttttcaaaaagttacatagacatgttcttagaagggacgatgaggatgtcatgtcctggtgggtttcaaagaaaggcctctttattgtgaagtccttttactcctccctagttccttgcaatggtagagagttcccttcaagcatagtttggaacccttaggtaccgaagagggtcaacttttttgcttagaaaactatttgggggagaattctaactatggatcaactaaaaaggaggggttgacttttatcaagcaggtgttttttgtgtaaagcagaagaggaatcggaaaatcatttgcttcttcactgtcccaaggtagccatgatttggcaacttatttttgcacttttcggtgtttagtcgattatgcctaattctatcaaggaaaccatttttagttggcacgactcctttgttagtgtgaaaagagagaaaagggagaattcttaatttttgttatattaaaaactgttaataatactcattggacttgggtatatatatacatgttagtgggacccacaatacaataaggaaagaaaaggaaaagtaaataactaaaataactgtacagtatctaacacccctcctcaagctggagcatatatgttatatgcactcaacttgttacaaatgtatttaattctaggacctctgagagatttagtaaaaatatctgctagttgatcatttgaattgacaaaactagtcgccacacatcctgatgcgatcttctctctaatgaagtgacagttaacttcaatgtgtttggtcctttcatggaagactggattggatgcaatatgcaaagcggcttggttgtcacagatgagcttcatctgtttatcctttccaaatctcaactcccgaagaagatgtttcagccatatgagttcacatgttgccagagccatagctcgatactcggcttcagcactagatctagccactacatcttgtttcttactctttcaggatattaggtttacctctaataaaaacacaatacccaaaagtggaacgtctatctgtgggtgagccagcccaatctgcatctgtgtaaccaacaacctgggtatgacctctgttctcgtacaacacaccttggcctggtgtgcttttgatatatcgaagaatgcagattacaacattccaatgactatcacatggtgattgtagaaattgactaacaacacttacaggaaaagaaatgtctgaacgagtaatggtgaggtagttcagtttatctacaagttgccgatatctcctaggatctcctaaagactccccctgtcctggtataagtttgacatttggatccataggagtgtctaccggtttacagtctaacataccggtttcttccaagatgtctaaagcatacttcctttgggatgttgtgtgtaagccgagggtaaaagggggtttggggatagggaagattcctttaaggaatcgcgctcttttagggaaatggttgtggaggtatcctagggagagtacagctctatgacatcaggtcattcttagcatatatgggacacactcaaatggttgggatgccaacactttagtcaggtggtcacatcgttgcccttggaaggccattgcacaagtctttcaggatttttccaagtatactcggttggtcgtaggaaacggggaaagaattcgtttttgggaagatttatggtggggggaccaaatcttcaaagaccaatatccaagactatgtagagtagtaatggataaaagtgttcccatatattcaattcttggttcggatcgccctttctcatggaactttaatttcctttgtagtctaaccgattatgagatagaagatctagaaagcctcatgtgctctattgattgtatgaatttatccacctccgcttcagatgcgagatcttggtccttattgtcttcaggactgtttacagtcaagtccttctttacagccttgtcccaaatgtctgattcatctcctttgatcccttataagtttgtatggaaatcttaagttcccttcaaagttaaggcctttgtctggcttgtgacacacaagaaggtaaataccaatgacttgctacaattgaggaggccccacaaagctcttagccctgacatctgtaagttgtgtatggggcaaggagaattagcagatcacctattccttcattgttctgtgacgttggggttgtggcacaaactttttcagttagccaagatggattgggtccctccgaaaagcatttcagacatgatgttcatcaattataaaggttttggcaaatccaagagagggttggttttgtggcaaaatgcgtgcatagctttaatttgggttgtgtggcgggaaaggaatgttaggatatttgaggacaaagctaggaattcagagaatctttgggacttcattcatttcatcgcttcgttttgggctttttgctcaacggggtttaagggcattccccttaacattttacaactagattagctagcagtgtgtaggtccaatgagacggtgtagtgtcatgttatttattgtgttgtttagttttaattctggcaggaggacttctcatcctccttatgtactattttatcttatcaatatattcatgtgtggtttcctataaaaaaaaaatacttcctttgggaaagagccacaccggaactggattgagctatctcaatccctaagaaatacttgagtttccccaagtctttagtctgaaagtgggtgaaaaggtgttgctttagtttctgaataccattctgatcattgcctgtaatgacgatgtcgtccacataaactactagataaatacactacctcgaagagttatgatgatagaaaatggaatggtctgctgtactacgggacatgccaaactcctgaacaacataactaaaatggctaaaccatgctcgaggagattgtttcaagccatatagagaacggcgtaacttgcacactaaaccagactccccctgagcaacaaaaccaggtagttgctccatataaacttcctcagcaagatccccatgaaggaaaacatttttaatatctaactgataaagaggccaataacgcatagcagccatggagagcaatagatgaatggaagctatcttggcaacaggaaagaaagtgtcaccataatcagaaccataaacctgagtataacctttagcaactaagcgggccttaagaagattaacctgaccatcagggccaaccttaactatgtagacccaacgataaccaattgtagatttaccagagggtaaaacaacaagatcccaagtgccattggagtgtaaagcagccatttcatctaccattgcctgtcgctagcctggatgggaaagagtctcaagggtgctcttgggaagagaaacagaagatgtaacagaaacaaatgcagaatagggtgaagataatcgatggtaactcaaaaaattataaatgggatgaggattacgagtagatcgattacctttccgaagagcaatgggtaagtcagtagaaggaggcagagttggggcaggagaagtcgaagggataggaagtgagtcagcaggtacctcggccaaagaagaaggaacgacgacacgatgacggcgatgataaacctgaagtgggcgaaaagacattacatcaggtggggagataatgggaaggggtaagacttcagaaacagaaagagactcagaggtggagaagaatggtgagtcctcaaagaaggtgacatcagcggagagaaagtagtgatgagtctcagaagaataacaacgataacccttttgaagtctggagtatcctaagaagatgcattttgtggctttggcataaagtttgtcctgtccaggagtgagaatatgaacaaagcaagtacaataaaaaacacgaggaggaaggaaataaagcggttggtcagggaaaagaagggaatgaggaatttgatcgtgtaatacagatgggggcatacgattaatcaaataacatgctataagaacaacgtccccccaaaaataaaaaggaacattactatggagaaggagagtacgagctgtctcaacaagatgtcgatttttacgttcagctaccccattttgttgaggagtataaacacaagaagactgatgaaggatcccatgttgggacataaatgaagtaaatggtgcagaaaaatattccctggcattgtcactgcgtaacacacgaatagaaatattgaactgggtttgaatttcaacataaaatttctggaaaatagagaataattcagctcgatttttcattaaaaataaccaagtacatcgagaatagtcatcaataaaagtgacaaaatactgaaatcctaaagtagacatggtccgacaaggaccccaaacatcagtgtggacaagttcaaaaggagactttgctcgattattcaaacgctttgggaacgagacacgagtatgtttcccaagctgacaggactcacacgtaagcgacgacaaagatgaaaaacgagggaccattttctggaacttggatagactagggtgacccaggcaactgtggataaggaggggatcattagtggaaatgcaaactgcaggagttgaaggcgaggtgaggtgatagaggccttgagactcacgtcctatgccaatcgtcttccccatactccggtcctgcaaggtcacaaatttatcagaaaaagtaatagagcagttaagagtacgagtgattttgctgatggagataagattaaaggaacactcaggagtataaaggacagaagtgagaggtagagaaggaagaggatgtgccaaactaatgcctttagccacagtttgagaaccattagctaaggtaacagtaggtaagacagaggtagtaataatagaagagaaaaaatccttattaccagatatgtgatcagaagcaccagaatctagaatccaaggtccaagagaagatgtgtgagtaagacaagcagaagcattaccagtctgggcaacagaagtaacagaagctgacttggtggcctgatagcggagatagtcatcatactcactgtcagtgagggaaataccctgagatgtggaggagttcggaggctgaggcggctgaggatcagatgactgggccacgtgggcagtgcggggaggcagcccatgtaactgataacaccaatcacgagtgtggccaagcttattgcaataggtgcaatgaggacgttggcctctacctcggttactactgcatcctcctcgagagttagtttgagaaactaacacagaagaatctgaagtgttatcggatggcaaagtttgagtggaggagatatggaggaggcgagcaaacacatcatctaaggatggaacaaaggaactaccaagaatctgatcgcggatggtctcaagatctggacggaggccaataagtgtaagaaccatgaagaacttgtcaatctgtgttcgttgatccccaacattagtagtaagatgcatcacggtcaagaattcctccttaagagaggcaatctggccaatataagtagataaatccatgtcttgttgtctaacattgacaatagaagaagccatcttataaagacgttggatatcattcgtgtatagccctttcgcctgattccaaaatttaaagcatgttttgtaggcccgaagatgaagcagaatcttaagatctgattgccataacacattacataactgtgcatctatcttcctccattgtactctgtcaacctcagggatatccgcctcctgcgtaacaaggtaatcctcataaccttaacccataaaccaaagctccgtataggcagactaggacaaataattttcactgccaaccaatttctccgaagtaatcataggagatccagatatgatagaggaaaaaatggaacttttagtagccatatctacttatctggagaacgaaatatgtttggatcgaagagagccctaatacggcttcagattgtgactgaaagaagaaaaaccgaggatccgcggctgtgagagaccaaatagtaaagaaaaacaaatgtggcactactggaagggtagaagaacacttcctaagacacgtgcagggctcggggtggagaagaagtcaccggaggtcgtcggaaaggctgtttagagggccgacaaagacaaaaaaccccaaaaaatgcacttgtagggctcggatggcacaagcagagatggagggtggctaaaaggcgtcaggcgaggctgaaggtggaagcgcgtggtcggaaagtgctcatcgcgccctcacgtgccggtgcgtgaggtttaggccgccggagaagaaacacgcgtggctgagaatctccctccggtgctttgactaaacttgaagatctccttcttgcgcacttgatggtatggtcagtgtcggaaaaggattttgccgaaaaaagtcgttgaaaagtcgccgacgatgagggttttctgatggtggtgagggttttctgacggcgatacggttgatcggaaaactttaggagatggggaaggtggctggaatgaaacacggtcactgaaaggtttcccagaattgattcacggataaaccagaaataattaggtttttttttctccctatgctctgataccatgtgaaaagagagaaaagggacaatccctaatttttgttattaaaaactattaataatacacattggacttgagtatatatatacatgctagtgggatccacaatacaataagaaaaaaaaaaaagaaaagtaaataattgaaataactgtatactatctaacaacctcctcactgcttagtttctttgagtcccaaataatcaaaacccttcccaaagccccacaagctagaataaaagcccagtccttattcctagttgtctaaatgctacctcctgtcacacacctccctttttgtttcctgaaacattacaacattcgggttctcatgtagcaagaaatctttaaccacccttcgtttttttcttagaactcaatccccgtatattccaactgtagatcttatgacaaaaccacctctgtccctaatcctccaagctagttcctgtaggtctcaaagacttgtggaaggtttgttcttccgcctagaatacaccctgatgtccatagaacttaagaccaaatgaactctagccattttgttgggagaaagaccctctatttgaaacccaccccaagaggaaaactcagcttcaatcgggcattctataaagaggttagggccctcactaggcatgttgggcagggtcttaagggagttaataccctcagacacttgatctgtaggggactgagacagatgtactgagtagggaagagccaaatcagaaaaaaaaaaaaaaaaaaaaaaacaagggtggatgtgccaagatagaggagaggggaagatcccactttgtttttctctaccatcaaatcgcaagtccccattgaggaccaccttttttctttggttactagactagaaggaaaaaccaagattgaagagccacaatgagcaaaacccctaaatccttagtctcctctgtttgtaatgttacaagttaagcaaaatttcgctttcccctctggctaaatagttgccttaagtgaagacctttgctggacagggcattcattattacctacattgccacctgtcgacgaaggccttccctagaacatcttctttggagccctaattgacgtttagaagtgacaagacttgagctgaaccttcgcgccttctgtgatcccactttgaaagcaacgtcccatggttgaacatcttgtgctgaagttagaacttcctgcaatagaggcctgctttgtcttcgaagcccttgttggcaactagaaattggaggactaagtcttgtctgtagcttcttcaaaccaatttttggcatgaaaccccctagttgagaagaaaaggcctttgagactatcatcccctttgcgattgaaacaagcagagaggagtcttctttgcataaagagcccttcctagctttgggctgaactccatccatctcttggcctaaaattgtaaacgggctttcttttaatttatttcccctatcccggcccacttttgcttccaccaagggcttaggttcttgagaaaaatgggcccttcccttctgcacaatatttgaagcctggtaccattcctcaatgcttgaattggccttacccctctaaccatatcttcaccaaacagccttagcccaaatatcccattgctctctttatttgaattcaaattaaagagagggaagggtgagacatagttattccccattgatgcactcttcttgccatgtgtcccctcaaaagcatcctcacccttttgactttctactccaccttgaattttgccaaaatccccattaaaagaccaacccttagccattggattagccttctcaaccatccttttgccatctatctgtgagtgagactcaagcctcccttgagtcgactcacacattcctctaacccatctttcgtcttcagtttcagccattgcaactaagattgtaaaaccccatctttcaccttaattaaagtaggaagaactgtacattccttcattgatattctcacccttgccttagaaagatcaaacaattttacagttcgccaattgatctctaccaccgttccccactgctccacaattttcttcagatgttccttagaccataaatgaaagggcaaaccctgcaattcaatccatcctcctctaaacttccacaagacttctgtgttttccctaggagaccaccatctcaattggactgtgtactttcccttaaccaggaaaaaccttaactcctgaagaaatgaggctttctcaactatgtctacaaaaaataaaccttttccaatagagaaacccacatttttgtattttatactttcatccctgcactgcctttccgtttcagttatattcaaggagaggaccaccaacattgaagaaatagcattttttagtcactcccaacccttgcctttctcgcctttagggattaccaaaaaagttaactttcttttgagggcaaactttgaaagcctgataaacctaccatagttgttgaagcatacctccattaagtgagctctggactttcctttgtattttatgttgaaacccatgtaactcttcaactcaacaaccttcgccaaatgctcaatcaaccaaccaaccttttccttctcaaagcctaaagagaaaacaaagcctttaccatgatctgaaagtgaacaccaagtacctccggactcaccttcaaacttgacctggaaagtcttcatttccacaaagaacctttgtgtcctcatttcaggggtttttaccatacattaaaaaaactcattgtttttctgattgtggttagtatattcacttttaccaattactttcattgtttgatacattatgtgtatagattctaaggggttctcaattcacaaagtttttatgttggaaagcattgatggggaaccattcatgagtcttaagaaccctagatggttatcttactctagcctattatctaatctttaaattttttttttccatgatacaaaatcaattccaaaccaccattaaaattttcagattactctagcctattagctaatctaaaaattttaatggtggtttggagttgattttgtatcatggaaaaatgatttttcaaggtggctttggcttcacttttttctttcgaaaggtatgcccaacaaaccctagaatcattgataaaagtaataaatcattttgctccagtcaaatttgtaaccatcgaaaaaagtttaatggtttatttatgaatgcttttgtgtagctagagtaacaactaattgcatgattcgctagatgggttgtattctaatgcttggactactggtgtttgtactttgtattactttttagttttctggttcattttggagactcttttgattttttgtgaggcaaaggaggaacagttgatgtacttgtgctggttgttaatgtggtttgaggcaattttagggttaagagaaaatttggagaaaagtgagctgattccggttgctagagttgagaatgtggaagagttggctgatgagttcgattataaggtgggaaaattggcctccacctacctaggaatgccgttgggtgctccttttaaatgtgttgcagcttgggatggaatgaaagaaagattctgaaagagattggctatgtgaaaatgtcagtacatttcaaaaggggggaggattaccttaatgcaaagtaccttgtctaatttgctgatctattttatgtctatttccagctgcctagggtggttagaatgagattggagcagattcaaagggacttcctatgggttggtggggctctttagcaaaaaccgcacttagtaaggtggccgatagtgtgtttagacaaaagaaaaggagggttgggagttaagagtcttgggtctttcaatagggctctccttggcaagtgggtttgacgctttgcaaatgaaagaaaggccctttggaaccaagtgattagagggaaatacggggaggaaagaggagggtggagatcttgtgagactaaggaggcctatggagttgggttgtggaaagcaataagtaagatgggacatctagtaaccccttcttttggttttgtggtgggtgatgctaagaaggtgaggttttggaaagacaagtggtgtggaaccatccctttgtgcgagacttttccttcattatatgctttagcatcttacaaagaggcttgggtaaatgaagtttgggcagccaagggggaaagggggggaagttggaatccttgtttcaatagacctttcaatgattgggagttggaagaagtggaaaggttgttttgttgtttggaggggaagaaggttagggtggatgaggaggatagggtgaggtggatggactcaaaggattgggttttctcggtaaaatctttgtataggactatgcagccggtgtctcttgtttctttcctttcgaagattatttggaactcttgtgtgcagcccaaattaagcttctttaagtgcgaggcttcatggggaagagttctaaccttggatcatttgcaaaagagaggttgggctttggcaaatagatgctttttgtgtcatacgtgtgaggagtcaattggccacctcctcattcattgtgaaaaaacaagggaagggtggatgttgctcatttctttttttggagtttcttgggtttttcctctttcggcgaaggaaacccttttaggatggaggagctcttttgtgggtaagaagaggaaggtggcgtggcaagtgggaccgttatgtttgttttgggtcatatggaaggctagaaattcaattgcttttgaggattgcgtgttgtccattcaaaggctgaaagcttcttttgtgtatttactatggtcagaaaccaatttgtggataaaagatggtccttcaaccttaatagattttatagattgggcgtgtttgcgataagggataaggtttttgtttttttctttgttgtatgggcccttatgtaagggggtgagttcctttatattgtaattttgtggatcgctattttaatgcctctttgcaatacaatcgtatacttattgatcaaaataaaaaaacaaaggattctggtttaatgcttatcattctttaaatttgctacccgtattctgaattttgggtcatgatgatggatccaaattgatttcctattttttattcatttagttgcatgctttcttttttgtaagctggttttgtaagtgcccaattaactaatatgaatgcaaaccaagggattttgttccagcatctgcttaagcatggtttttctatcctttttgcctgcatctagtgttaccaatgttttcagaaccggactggtcattgaaccggaaaaattatgggtttacgttcatcggttggaccggtggttgaaccgcagtcgaactggtgatgtcataaatatgtattttatatattattaaaatttaaaataattataaaaaatttaaaatatatatgcataaattaaaaatcaataatattattttatatctttgatattattaaattaaatcatatcaatattttaaattttattaaataaaatatgtataatatttaaatgtgaatatattaaaaatgaacaaaaattcaattatttaatttaaactaattttataatttttaaaaatattatattatttttatttaatattataattttttttaaaatggaatatattttgttttgtttggcatattagatatcaaaaggcctataaccgatttgtgtcctaggtcggttactcaacctggagtccaaggttcaaactctcttgggtggatttgttaattatttttcattgattaatgttagtaatcccacatcggattctaagaggcataaggacgcctataaaaactatcctcatagaagatgcaagcatcaccacatcttgtaggctcaagactcggcccacaaaatggctaaggtggggggctgggctttgttataaaataatgggtccaagtgatgggcttttgccaaaaatttatgtacaatggagccttccatgcttataaaaagagagggagacttgaaccgtctggtttgtttagaacggccctgttccaccgggttagcggtccaaccgctggtttaggcggttcatggccggtccaatgcttaaacggtttaatagagtaaaccagaacggaaatgcgaccggtcgatggttgaaccggttaggaccggccggtccggtccggttttcaaaacagtgggtgttacttccttaaagacaattatattcatgatgccttggaagtcttaattcttttggttctccccacatttttaagatgccagtggcaatattacgggttccaacttggttcatgtaatccgataagttccaacgtagttcatgtagcttgataactgactgactgatgtgaatgtggtttatttgcccctctatatataattctatttataagaagctattatttttgtgtctgatttcaaagaaacaaagtgttcatctccagtggactttcttgtcttcattctaggtcttttgttctaaatttccacattttgaatatctataatgaacagtgttttaaaaagctatttatgcttacgccttgaggtgagcctccaggagaggctatgcaaattagccttcaggctatggcctcagtagagggtaattgaggcttatgctttacctcatttggataaaatgcttcatgaaggcctttagccttttaaaacattgataattaaagatataatggttgtcacaggattcataaatgtgttatgttacaatatatgactgttttattctttttgtggtttcatgtaattgatggtggcctcagatatgtgattggcttctgaatatcatttccccttacaggttaggaatttacgaattggggca

SEQ ID NO: 11571 - DNA, 9883 bp, Vitis vinifera
  Intron number 5 from transcript GSVIVT01034276001 (locus G SVIVG01034276001) derived from phytozome v7.0 (chr-ID chr9 ; pos 13945045 to 13954927 reverse strand)
caaggtaaataaaaagtgaaatttttattattatacattatgtaagagcgtaattaaaattaacattctttgctcattaatttgtgcaccactattatttaactttcttgggaaaagaattaaaagaatgcccaagtgtacaacatttaagaatttgatatgcatgggacaatgaaaaacataataatatctacatatgcattgaaactctaatgattgaaaactattttcttgcaattctaaattcatttataggttatatgaaagtgaaaatcatgaattttaaattttaggccataaaaagtgaagatggttaatactaacaatatagttccaaaatgtaaagattaatgaaatagtgttctttatgactgcaactaagactaattgaaatgaaaagaagataaaagtaatttagtttttgaatctatggttaggatatgttacagttttttataatcaatgaagatacaactagtgctacaaaatgctatacaaaaagtattagtactagtaccagtgttgcgctcatttatccacaaaagaaatccttggggttttgggtttattaagaatttgaaaattaagaagtcacccatgtaatttttaataacttttagttttagtaacacacacatatataaagaaaaatatttaaaactaaaaattaaaaattaattttttttttaaaaaaggacaataaaaagaatgttatatggagatgaggatagaatacaaatatataatatgtaagaaacaatatgcaataatttttttaaaaagaaatttaaaaattaaaatttgaaaagaataaaaaaaaaaactctatggagatttatatgaatggaattaaaatatgaagaataaaaaactaaatgaggttttttgagacaaccttcattagacttcaaccaaatgtatttttctcaaaataaatttcaaaaaactaaagaagaaataaaaattagacaaacactaaatattggacttaatccattgccataaccacctggatgagtatgagtaattattctttttctaaaacatcttgtatttttgggaataattattccatgtattgaatgtatcccaatgtgaagtggcataaaattgggagttatgaaaattatgaagaaataatatggcgatgataatgatagtgaagattaacaaatatcattctttaaggcatttttattgtataattagaaaaaacaaggttcttggtctacatggagattgtaattaatcatccataagcatgtttacggttgaaacgagtcgataataaaaaatttaatttactatcttcgattttttttttctctcctatgtgtaaggggtgagagagcaatcattcaatttagcaacttttcattttcaattttgtttctaacttttcttggctgctactagataaatgaaataagttttttggttagtttaagcctaataaattggtcaactggatagactgggtttacaaaattttaggtgaaaagtttctttctaataaatgtgaactcataaaaccatgaatattttattggtgtaggaattgttctagagtcttcttaacctttttattttcatattaattgatatttacgttgatattcttctatcaaagtcaaataacaaatagtgatcaatacatcagctaatactgttgtgatggccatgaacatagaatgtttttttttttcaacttcaattgatgcatataaatgataattttgttcgtagttttaaaaaacacgcttaaattacgcctaggcccaaggaacaaaaacaatatttaagcattatattttaacagttggtttttccttgagacaaaggcaaaagtcataaaaaaaactcacagaaagtacataataatgaggtcttggatttaaaattcaaaagcttttgtagttagaattaattcctgaaaatttgtaagaaaacaaaattattatatgctaggctattgatgtatgactaataggtgaaggagggttgtcttatagaaaggatggtttgattttaaacattagggaaaaaatattgcatatttaagtaaaaaaataatcttgctaaaagggaacgtacataagtgtttgagacctcaagcctaagattggagctaaaaatttcaataaataaaattataacttcgcgtaccaaagataatcctaaatttatcaattgaacaaccaagtccatttatcagaagctctatgagcaaccaccatttccaaatcacataaaccatacaatttcccaagtgccattgatgttataaaacttgataaattacataaaatcaaccaatagtgtgtgtacaccacaataaaaaatattcaaatgttggtttatcacattgtagggtattatatattaagatgatagattatgcagataaatagtattactaacagagaaaaatatgctaaatgcaaaaattttatattcattcaccttttgtcatataaaaaaagaataaaaaataatataaaaggtgttattagcagtactactcattcactagaaattaatatttcttattcgctatcacatcttgtgtactttagagagcttgctaagttttgcaaattgctcattgaacaaactagccaattcccttatttctaaatgaatttgcatatatagtgctagaatagaaaaaagaccttgtttaagttaataagttgatgaagcctcataacttggaagtttgaaggtacaaacttctatccaaactcattcctcattagttatcatgttgtgatctaacacaaaaataagcctatcatgtaagttagtttattttttgtgttgtaaccctaagactatgtttggtcccataaaatgtgaggaaaaacatgagagaaataaattagagaggaaaagtaaaaaagaaatagtaagtgaagaaaaataaaaatagatttaaagtcaataaattatttttatatacttttttgaagtcgtttaacttattttaactttttgatataaagattaaacgacttaaaactgcatagatttctaactaattttaattgttttatattttctttgatgttttttaaagtacaaacaaatatgcaaaagttcttttttaattgcttttattgcaggagaaaaactcatacttttggaattatggaaaagactactagaaagctagctaattaaccatttatattttgactaagactagttgggttagaaataattcatatggagattaaaaaaactatgtaatttagtttggcaacttgggtgctattgtaatgattaatgatctatagcttgaacacactcatgagtacttcctaattgtacaactaaatttctattaccactttaaactacaatacttacatgagaagaaagcttttccttagtgataatgcaaaagaaattaagtattagtttttgttaaactaacaagtgataaaaaattataagaaaaaactcttttatttttctttctttcttccatttttttttaatttaaaaaaaaatctttaatgaaatataagaaatcttatatgtataaaaagtaaagacttgtataaaaaaattattttcaaaattttttaaagcaaaagttttctcttcttcaaattttaaaaatttcaagaagtgttttttagaatttgcatttttagtataataattcctatattttatataaaagtttttgttttttttttaaaaatagaagtgcatctaaattaaaattcttaaattgcgaatttttgtcggataaagagataatgaaagttgtagagagtttgcattattcaacctttgcaattactttttgaaggtgaaagaaaataccttcttgcataacatacaatggcaggttctggtttgtaagaaactaatatatgaataagacttcctttataataaatatgtagagaagaatagtggacgataggaggtgaaaatcttgtaataaaatataaatgtcggttataagataatcaacattttctctatttcttgtacctatgtaattaagaatcttgtagctcctttatcgaaatataatataaaaatataaataaactatttagaaataagtgcatgtagttttcaacatgaggaagttcaaaagtaggttaattatgataattttctacagtttatatagaacacaaattatttttgctaaaggttcaatcattctatgaaggttaaaagtttgaattgtttacatatgcaaatgtgaaatttgaaattttataattttttataattttcgtgtagattcaaaaagcttgtccatattcaaaaagctagagaccttgaacctcaatgacaacatgttcaaaaacactagcctgaaacaattgaatatattcacatcccttagaaatctttctctacaatggaacgatgttggagcattttttcctatccaaggtatgtgtaattattattatttttaatggtaaaatattagaattgtcaacatcttttatcttttttcctctcaatggcactgcagaattatgcactctggaaaacttggtgatgttggacctaagtgggaatttcttgattggcatgcaaggtaaatacaaagtgaaattttggttatatatatataatgtaagaacataactaaaatcaacattctttgtctaccaatttgtgcatgactattatttagctattcttcataatagaattgaacgaatatttaggtgtacaacattttagaatttttacatggcacaatgaaaagcatggtaatcaatgtatgcaataaaattctaatgattgaaaaagaattttcttataattttatatttatgtataggttacattgaagagaaaatcatgaaaatgtatattagttagactttatatattaatggacaaaaaaaatattagttccttaacttatcctgaaattttctagataaccaaagagttttttattttgggctataaggtttacaacctaaaaagtgaagatagttaatattagtaatataatttcaaaatgtaaaacttaataaaacaatgttctctataactataactgcaactaagaataaaagataataaaattaatttagattttgaatctatggttaggtttgcaattttttgatgatcaataaagctataacttgtgatgtagaaggctatacaaaatgtattaggagcattgctaagctcatttgtcaataaaagaaatccagttatactttgattggaaaaaacttagaatcatgtttgatatgcataataggtgaagaaacaaaataataattccatggtattagttagtttgacacctctagaccaaactattccattttaaaataattatttcatcttatcgatagaacgaaaaaattcaagtagttatatgggtttttgagtttcttaagaatttaagcatttatgtgtcacccatatatatgtatgtatgtatagacacccataaatgttcatataattattaaaataaaaatatcaataagaaacattatacaataaaatagaaaatttaaacttcttaaaatttaaaaataaaaactaaatgaaaaaaaaaattaagaagtaaaaaaaataataaaaaggccaagaatacaaatagagaagtaaacaacattaaaaaataaaataaaaataaaaatttaaaagaaaaaaaatacatagattaacgtgaacactaaatgatggttagacttgaaccaaatggatattaaaaaaaaaacaaatttcaaagaaataaaaactaattagatgctaattattggattaaatccattatcataaccaaatgaataagtagtgattattcttttttaatattttttattccccaaaattattattttgtgtattaaatgtattataagtgtaataaaaaatgtagttaagaaaactataaagaataataatggtgatgataatggtgacaacacttaataccttttattgtatatttagaaaaaaatgaagttcttgatctttgtgaagattatcattactcatccataagcatgttgatagttgaaactactcgattacgaaaaattgaatttctaatcttcaatatttttctctcaaatgtatatgtgggtgagaaatcaataggaagattataaggtctcacatgtatatcagtcatggaatagaggcaatactagcatttatttggtctagtgacaaatagagaaatataacataaccataaccataatgttctaaccttatatataacataaacatgtttctttcatagaattttgcaacttttaatttcttttcaaattagaatgtaacttgtaggatccattgcctatcaaaattttgaatcgaatattataagatatatcacatttctacctactaaagcatgaacttcaattttatgacgcacttttggctactaagttaaagaactctttgaggatcaatggaggttctttaagtagcaaatcattataatcacaaatggggctgcccttatggtcttattagtgatatgcaatttgaccaagaactgatttccaactattttatgacttttatgacttttcttggctacttgtaggcaagctcaagaaattttctagtttgttaagtctaaaagtggtttcaagtttagagccaagcttgggctgcacctaagttcttgggccttgttcagctccacatttaaaccaaccttgagcctatctttgtaatttttctcccaattcattgattaatgttagggttttatagagcctataaattgaccaactagataaactaggttcataaacttttagatgaaaattttctctctaatgttaattcaagagtctacttaatctttttatatccatactaattggtatttaaaccaaccttattatattaaagtcaaataacaaatagtgaacactatacctgctactaccactatgatggtcacaaacatagaatgttcatttttttagagtcaattgatgcttataaacaacaattttgtttgaaaataaaatacattgagtcatgcgttaagagatagatgtaataattacatacttgatttgacaatgctagtataagttgattaaataaatgagtatttacttataaggtagcctatacaacactatttatggaaatattcatgcacatctacataggttcatgataacttaggttgataaatttaagaagaacaaattcataaccttgggcatagttagaaagaaataacaccaatagagtttggtatcatgattctaattgttcaaattgttttaaaggaatattttaaattgcatgttaattcgcttctaataaatggagagaaaccaattcaagaagataattgtactcaaactatgtatagcaatcatgaagatgtagaaaataatgatgaacttacttttgagcaagttgaaatcataattaaataaaagaccaaacccaagggttaagattgtcaagtaaaactttaactaaattttattgattttttaaatgcctattcgaggagcaatagaagttctagatagaaagtaagaacttttctaaggaatcacttgttagattttaagtgatcaacaaatataatgtccaatttaaaacttttataaaagcaatgcttctaaagaataacttgatttgaatttaaagttattattgatatttatttataatggacgtagataatcaattgaacaaaaaacacataaatttttcaaaataacttctagttgttgggtatatttaagtaatcatccatatctcattatcttttcacgcacatactaatatccttattgagtatttaccaattacaagtaggttgaaatttacttgaatttaagtcactaattaatgttaacttgatgacaaataagtctccctttggaacttgttttacaagatagtgaaatgtagtctgtcaatcatcaaaacaatgtttaagtattaggatttagttgttgatttttattttttattttttgtgctttaaacaaagacaaaaattataaaaactccttaaaagtacatattaattgaacttaatttatacatcaaacaagaacaaactagtcttggatttaaaattcaataggttttgtaattataattcctaaaaatttgtaagacaacaaaattattggacactaggctattgggtgtgtatgactaagaggtgaaggagggttcatcttatataaatgatggtttgattaattttaaaaattggataagcaataattgcatactaaagtaaaaataacattactaaaagggaaaataagtattttagtcctcaagcctaaaatggatgaaaattttaattaatagaattacaacttcacctacaaaaaaaaagtccaaaatttttcaatagcacaactaagtccatttatcaaaagctctatgaacaaccaccactatcaaatacataaatcatgttgttttcaaagtgtccttaaagttttaaaacttaagatatcacataaaaatcaaccaatggtgtatgacattataaaaaatatatccaaatccattgtcgaacttaaactaaatttaactttatatgcataattgcaagtgggttttttttgtctttcaatttgcgtcaaattcagatgttagtttgttacataacaagggattatcaaggtgataattcatgcagatgtataaatagtattacaaatataaaaaaggatggtaaatgcaaattttttgtattcactcaccatttggcctatcaataagaaaaaaaaaaaatataagaggtgtttctagtattactcatcactagaaattatattttttcatttgttgtcactgcttgtgcactttggaaaggttgctaggtacaacaaattagctcaatgaagaaattgatcaattccctcatttctaaataaatttgcatatacactagaataaaaacaacctttttaagttaacaagttggctgagtctcaaaactcagtaggttgaaggcatagacgtctatccaaactcatttactatcaccacatgttggaaaaacaaagaaaaaccataacacttgagtatagttgcagaccaatctaaatataggtggaatctacctttctttgaaagtttataacaaatttttatttttatgataagactatgcagtacttatccctctctaacagtctataattagtctaaagcatgggatattgcataaattcttgaactcaattagcctttaatccatgcctttcaagtaaatttaaaacctagtgtacttgttcttgattcacatccttatcacgattatcattacttggtcttgaatatataaccctatcactattatgttttgttcatcattagttggtcttgctttgaagcttcttttttatgactatcaataaccaaatttagataccaaaatttatgcaagcaagcatgtactttatacaatcaagaacttgtgagtttagattttgttatataggtaaaataataaattggttcattagaataactaggattagatatctatttcaattcctatctcaagcaataaaagatagaagtgataaaatacattcttattaagaaacatttgatgccaaaagtgatgtaaaacatgtaaaacaaacaaaagtaatcaaacgtgttagtgataattatatctacttaacattgagacagtagttgtactaatggtaattattttatttcttgagagtttaaacaagatataatgaaaatatttttaaaggtttagcaactaccaaggttataattaattacaagccttttatttttaaaaatatgaaatattaccatccttactttctttgatcttcttgtaggttttaaaagtttgcctaagctgaaaaagctggag

SEQ ID NO: 11572 - DNA, 3953 bp, Vitis vinifera
  Intron number 12 from transcript GSVIVT01020038001 (locus GSVIVG01020038001) derived from phytozome v7.0 (chr-ID chr 1; pos 11258308 to 11262260 reverse strand)
cagcaggaattcctagcccaaaattttcagagagtgtaagttttctaatgattttgagtccactgattatcaggccactgtattagtaaatggtaaaaaattctgtgatttctattgaaataataaatattgaggtaagtcaaatttgggaaatatacaacccctttacaaaatcaagaaagaggaagaaccaactaactaacaacttaaaaacctagtaacagtatcattttctttctttctttccttttcccccctttttcttcctttccctttgttttttttttgtagttaaaaactctttaaaaatgacaagactcactaagtcaatttgaaagcacactaaaaaatacagtaaggcaactagatagtattttttataaagaaagaaccaatggttgtgatacctagaaaaactgctttatttgaaatgtagttgtcgatatcaagtgtaaagctttgtccttatgattaacaaaatgtcagcaacatagatttaaccagctagattgttttaatgtccttcattttttaacccagcaatgattagattcaatgagaaagaatgataattacctgtcacttaagtcttcctagtggttaactgtgtctagtaaattccaaattgagcattataaagacaggcttggattatgatagattggcaagaacctaggatagacttgaactataatagattggggacagcttatattttatttggtttttactttgtttgggggggagggagagggttgtcggaatcaactatcaaggccatagaaaaagcaacagtaaactagcagtaattgaagtaggttccacattttctgactattcgcccattagatactttgatgattatgaaaatgaaatactagtagcaaaagattggagtatagttgcagcaatagtataagttgtaggaattaattgattagcagaattctcaagtttaaaatgcttcattacattaaagcatgagaaattttctcttatatttctgcaaagcttaaaatgttcatgaattatataaggtggatatggataagaatatgaaataagcagaacaggaaatgactctgttgttctagtacactgtaaagaaaaataaattaagggtggggagaaaacttaggacatttttaattttaagaaagtgtaataaaatgagatttctcataagttgaggagaatgagtagtagtggtatggagaagaaagggtggggagggttaatatattatattttatgttatgaaagtaattaagtacataatatacttcattatatatttatctaactcatgtgtctgtgtcctatttttaagaactttccatctcattttctgtaacatgtcaaccactgtctgtgcccatgcagcataagttgatagttcaaatatgaagttcttaaagaattggagatgtaatgctagcacttcacaatttaagccaacaaataaatatctgtagatcttatttttgaattgtgtcagtttcatattttgatctaggaaactaacagcagtttggtggttcaaagctaatatggcatgctatttgttgaagcaaaccaagaactcaggctcacagtaagcaagcacagtcatgactagggcaagagagaaccagaaaaaggaaaaccatagagacaacaccccccctcttgtcatgttgctgctgttcttgtgttgttgtttcccatcacatgtgcacttgtactcaactagcaacattaaccttatatttcaccttcttagttgtgaaatgaaaatccaatggtgcaatccatgttaccatgggtttccagcccaatggttttaggctgtggctggaactgaagtcttctttgctggaaagttcctttccatttcctgattccaataggaaatacatctttgtccctgaatctttggctctgtggctatacctagctgttgacaatgccaatgatcacactggtctcccttcatgaggccaaatatgagttggggccaaggaaatcaggacatttaagggtttgagttcaaatcagaagtagccttcttcaacggacagtactctggaaaattagacatattctctgctttttgaggtgttaagatagctgcaaatctcatgggcatattcagaaggaatacgatgggagttgcagtaataagtacaaatatattgtgcttagttatcaataacaacatgacaagtgggtgagtcatcgtctctcaggttatggtatttagtcactctgtctcttgagttatgactgcgcttgctcattctcgttatttatagacagaagaggaagagtctagactctaagtttgtggcttggtgcaaagcacagagcatctcatcagcttcccagccccaattgaactgccattagtgttctatggattgaagtatgaaatagatgcttgttgggaaagggaaaaaaagagtgaagtgcttgcattacatctccaattatttaaatgacttcatttcttcaaaggatatccttaagtgtgtgtcataactgatatatgtccatatccctataatgtcagcttcttttttgggttgtgatatttattttttaaaattttctgacatcagctaaacattgtttatgtgcatgtaaaatcaagggaaaataaaataaaaataggacttctgttcattaattttgttgtgttagaacatgttagacatttaattaagtttaaattgtgacatgctagtatcacatcttgaactatttttcccactaaaatataagaaaaaagtatgttagagaacaatgactaaataagaattacaaagcaaggcctagtctaagaagtcctatttttaacaaaaaaaacccatgtgagctttgtttttgctcttcttcttctcttctattttccttttcattttcttttcctttttttttttttggtacagtatgtttccttttctttatattctttatggttctggttccctcgtgtagttggtacttaacttggttgatcacttattaaacattattttcatttatctgtaaataaaacaaacactattttatacatagcataacattattttgaaataaaattgaaaatgcatggcataatattgtctttaagttgtagtatacttagcatacctttgtctttgaagtagtaaatagcaaagcatgcatatcatattaatatttagacaaggtttaaacttagtgaacagggaaatgcaagagcaccttggagaacaggtttcatatgcaaccaaggttatcttactataaattcctgcccagtcaataatgcaggaagaaagaacaattgttagacctaggtaaaagaacatcaattagacctaggtaatcatcttatctaaaggtaggtcaaggatgtaaacttagatgactgatcaatagccagtaaagctctgttcctcctccctcatggcaattcttacttattacatgttattcccatcattaagtcagtaacgagtgtattcaaaggtaggccaaaatattttaaggctttgtttggagaacaaaaagtgcctgggaaaaggaaaagaagtagaaaggaataaaaattttcttgtttggtggttgtattgtggaaaacacaaagaaaaatcaaatataacaaaaataatttagaattatgcattttcaaatttttcattctttataaaggagaaatttgggtaagcacaagagaaaaatttattatgtttattccttctaaaaaaataaaataattgtccttcgcactttccctctaagtattcaagatcgaaatgaagtctaataataagtaggggaacacattttgtaacatggaaaaatatattaatttaattatttctcttgctttagcaaatatattaatttgaaattttgatacagtactaactatgtactcttgatgaattgttcaggagaggaacttcctactgagagcacttgga

SEQ ID NO: 11573 - DNA, 4999 bp, Vitis vinifera
  Intron number 5 from transcript GSVIVT01031205001 (locus G SVIVG01031205001) derived from phytozome v7.0 (chr-ID chr1 4; pos 1193036 to 1198034)
tctgtaggggcaagccacagcctccttttgatcaggtttgctgttttgaatgttctacttaactttgagaaaatgtgatggtagccaatagtatttatctcttcactatgcggctggacttggttttatgctcttataggtgttttctcacctttccacttactaatgtatacatatacatgttgagcacctgtagaagaaagctttcttccaatattgaggtttttgatgttaagggccatattcagggtacaggatgtcctatcccaaaaccaacttgttgaattttcaagatatgattgctaaatggttctgtttttgactttgctaaagctaatataaagtacaaatagctcatatatcatgttcaaatattaatgtagagtattgtggaaaggaaatataaacaagagggtgttttttcccctgttttagggcttgagtggtgtttgtgttgtgggtttgagttagcaggtgttttggtggtttagtcattgagacttccatttgttttttttgataagtaaagagaatttcatacataaagagatgccaaaaaagcgactcaaggtatacaaacctatacacccaccaccaaaaaggccaaagaaaaagaagaaggagaccagaatccaataggcccaaaaaacagtcttaacaggatcccaaccaatcaataaaattaaccatagttagagggcattcaactataaacagcttagcctcaaaccaaaaagaataaacaaaagagtatttcaatctctggattgacaactcatcatccttaaaagccaatctatttctcgtcttccaaccgtccaaaatatataaagaggagcagctctccacaccttcctgtgctttttacccacaaaagaaccttgtcagctaaggagagtctctctaactgaagagggataacccaagacaccccaaacaaagtaaagcgtaactcccgtaggacccttgtttttgagcagtgaagtagcaaagggtttatgctcctcattctcaagacacataaaatatctatttgccaaggcccatcttcttttctgaacaagatctagggttaatgctttaccccatgtagcctcccacgcaaagaaactaatattgggttgttcccacacattccaaatacagctagaaggaaataagtaagggtaatctgcttctagagcaaggtagagagacttggtcgagaacttgccactctttgtttcggtccaaaccactatataatccacatctccaagcactctcttcccgtgaagccgctccaaaaatctttctgcctcctccacctcccaatcatttagggctcttgaaaaacagggattccaacccccccaacccccctcaaccaatggatcccaaaaatccgccacccaagcttccttgtcaacagacaaagcgaagagggaaggaaaagacacacacaaaggggaatccccacatcatctatccctccaaaatcccaccctcctcccattgctaacaatgaaagaaatccgagcacccattaactcctagtccatccttattcctttccaaagccccacgccatgcgcctctcttacttcccacgagcaccaaccccctctatcttccccatacttccctctaatcacttgattccacaaagcctctctctcatttgcgaatcgccaattccatttggaaagaaaagccttattgaggatggaaagacttttgacccccgattcccctttctttttacttaagcacactaactcctatcttactaaatgtggtttttgctccaagctgccaccaccctaaaggaagtccctttgaatttgctctagtcttcggctaactaaacgtggtaggtgcaacaaagacataaaataaataggaagattcaacaaagtacttcgaattaaagttgctcttcctcccttggataagtatcgtctcttccacatggtcaatcttctacagaatcgctcttccacttcatcctacattgatactgacttaaacggagcacccaagggaaggcccagataagtggatgggagattgaccactctacaaccaaaccaaggtgagatcatctatattctctaccctccttactggaatgagttcacttttctccaagtttattcgtaaccccgacagggcctcgaaccacataagcaaccaatttagataagtcagatggttttgagaagcttggcagaacaccagggtgtcatcagcaaacaacaagtgggaaatctgaacccctttttcactcttcaccttacagcctgacataaaacctccatccatagcccttttaagaaaggagctaaagacctgcattgcaatcacaaaaagataaggcgagagaggatcaccttgcctcaatccccttgagctttgaaagaagcccttagacgtgccattaaccaacatagagaagcttgcagtggatatgcatcacttaatccaccctatccatttctccccaaaacctagtttctgcataactgtgaaaagagaagatcagttcacattgtcatatgccttctctatgtcaagtttacacataatactattctcattattctttagaatcgagtcaattgcttcattagttatcagcattgcatctaggatttgtctaccctccacaaaagccccttgagccttagaatccacctttccaaccaccttttttagtctattggctaaaaccttagccaaccacttgtacaggcttcccactaagcttatgggcctaaagtcccttaaatctctagctcccactttttttgggattaaaatcataaaagttgcatttagacttttaacaaatttactgtgtccatagaattccttgaagaaactcatcacatcatctttcacaaagtcccaagcgaactgccagaaagctattaaaagccattaggacccggagctttatccttgctacatcccaacagcgtgccatacacctcctctttcgtgaacgacacctccaacgcaccaacatccatattttgcagcatttcacactgcaacccggataaaggagggcgccagtcccccggattagacagtggagatctaaaggcatttactatcccttcgcttatcccattctcctccgaatgccaaacaccattaatcctaattcggtccacattgtttcttcttctgtgaacatttgccatcttgtggaaaaaactcgtatttctgtaaccctctttcagctacacttccctagatttttgtttctaagtaatctcttctaataaaacccattttttatattcttcccttgcttctcttttagcttccatctcttccaaagacagtttgttagtcttctccttagcatcccaaaactccatctgatccaaagccaaattcttcctgtattccaccctgctaaagacatctctgttccactctttcaaattagacttcacaacctttagtttttcaaccaaaataaagtttgcagaaccattaaagttgtccccctaccatcaagatttcaacaaatccttaaaaccctcctctttaagccacatattctcaaatctaaagggggatggacctcttctcaaagcccctcctccttctaacagaattgggaagtggtcagacactggtctcgggaggacacattgcctcgaaccactaaaacgacaatcccacttctcattgaccaagaagcgatctagccttgagaaagactggttattcacctctccactctaagtaaaaggacccccaatcagaggcaagtcctttaactctaggtcttctattacttttgagaatcttctcatgtctgaattcaaactcccttctctattgtgctcttcatggcttaagatggcattaaaatcgccagcaacacaccacgacctattccaaaggcctttaatggcccccaactcatcccagaaacactccctgtctcttctcatggttggactataaaccccttctcctcctccaagatatttcacagtccattccaactttctcaactccttttcaaaccttgaagattccaatattctctttttcctaccatccagcttccccttctgaattttcatctctttcattcttttgagcagaaacaaaatctctccttcgaagccctccgtcggcattccaaggcatcggctaaacttagccaagcaactagactgccaacacggctcacccacttcgttcctctcctccataatctcttgaagagccctttccgaagcatcctctgtctcctcctcaacaatcccattagccaatcctaacaactcgacagttccatttgttaccctttaacatctgcttatatgctttttgttttcctctatgatgtctccatcagttcatttttgggttagtgaatttgcaaagggtttccaatgggaagggatgatgaggccaatgatttgtcacatttgggaatttagtgattgtattttataaaggtaggtgcccttggggattggaaggttgggaattcttaatacatctttgcttggtaaatagctcttatgatttgtgggggtactgattgactgtagatagaggtaatggtgaagaatatgtgagtaggtggggtggtggtgcttgggctgcagttggggcctgtggaaggatatctgtcatatcaagaagggttatgaccttctcaggtttgactttctcttaatggcaaaggtcataagataaagcttggcctggatgttaggtattgggaaatgagcctgatggttctgtcttaggcttcctggtgcccatttgctatcacatcattaacagtataatgactcttgatcttgctaatggtaactgttttactgcatgatgtctaaatgattgtaatggtcttatggcatgccttgttgaatgttgtaggccgtaacctgtattgttatgttatttgattaatttttttcctcttgaattttgttgcacagacaaagcctgctcttccagcacttgagcgtcttat

SEQ ID NO: 11574 - DNA, 5359 bp, Vitis vinifera
  Intron number 8 from transcript GSVIVT01033023001 (locus G SVIVG01033023001) derived from phytozome v7.0 (chr-ID chr1 4; pos 25132273 to 25137631)
cacagggtcttgttgcactgccatcttatctctctgtaagattctgacttcaaaacataattagaccatcagaactattttactttggtttaatggataaaagaatgtctataagagatgtcttcctctatgtttgtcaatatgtaaaggacattgttataggcatactttttgatgtttcacatctacatgctttatacgtgccaaagaggtttcctgatgcaggacgggaaagtaaaatgcaatgagagtagtagtgtaactggaaaaactctaggaatcgctcctagaaacctttaggtttctcacccaagtgttctttgtatcacgcaaagaaaatagtggttgttggaaactttatcattcactcattgatttcttttcaaaagacagatcaactactatatagaacttttctggggatttcgtgggaattagtctcatagtagtaatgcaacttgaaaataacaaaaactaggattaactactactcgaccacattaaaaactcttggaaaatgttaatattaatgactaaaatagtaacttatagaattgactaggcccataatttgatttcttggaagtacttctaggccaattccatattgaattatacaagatcacaactaacccattatcattcagaaaattccaaattaaagcttaggtcttggtacccattccttttcacctttggtaaacttttaaaggtggttgcctgttatctctatcaacccatcatctcccccaccccctcatcccctgggccttaggaaaactcaacattgaagagttaaaggcatgaaacataaaggtcattattcaagtgttagaattttccatctgtgatccatgtgcaatttgaaattgacctccctcctctagttgaaacaatttggtgatcaataacatcttcaatttcctcctttaatcgaggagctgatggtaagcgagcatttgggccatcattagttgtagtatcttcaggattagaatatagagtgaggtccttgatgttgaaaatattactaatgcccatattttccaacaaatcaagaacataagcattagagctaatttttttgagcactttatacggaccaacattctttaagtgaagtttcttgtttgcacatttaggatatcattcaagcctaatccttacgataatcatatctccttcattgaaatcatcaaactttcttttcaaattagcatgtgccttgtaattttcattgttgagagcaatcttccttcaaacatcatcgtgtatatgatgtatatgtttactaaaagcattaacttcaccacttggtcgtgcctccattggttatgaaactaaatcaatagatttcctaggcagcaaccagtgatgatctcacctgtagatttgtttattgaactattgtatgcaaacttggcaatcggaggaatttgttttaattagtgacatgttctccaactaggtagcaaagtagatcatccaaactttagttcaatacttttgtttagcaatcaatttgagggtgaaaagtaggagaaaatttcagctttatgttcagcatcttttatgaacttctccaaaaataactcataaactttgcatctcgattagaaacgatagtcttgggcaaaccatgaagcccaacaatttctttgaagaagagtttagcaacatggacaacatccaaagtctttgaacatgggataaaatgccccatttcaaataaatggtctaccatgacaaatatgaagtcatgtcccctgaaagtttttgacaaaccaaggacaaaatccatgcttgggtcttgccatggcttatgtggcactgagagtggcatgtacagtcctgtatttttcttcatttcctttgattggcatgtgcaacatttaaaaacgaattatttgcttctttttttaaaacttagccaataaaaacgatcttctatcattgcaatcattttatatcttccaaaatgaccggttggccctccagaatgtagttcccatatcacgttctctcaaaatgatgtgttaagtaagcaaaggcctgtccctttgaggaggtatccatcatgtagtgaaaatttaggatatgcttctaagttccctactactagggcttgcaaaaatgataattttgctccaaaaaatcaatcctacaacttgtatagccatagaagaaagaatatacaccactcgaaagagaatcagttgtcttgttctcaatacttgatttatgcttaataaagaaggtgtattcttgtaagaagggaacctatttcccatgttaatggttaagcttcttttgagaattgacatacttgagagcttcatgatcagaatatttcgtgtttcgacattgcttagctgaatgtggaggctatcaagctaatccaccatctgaattaatatctcatcacattggctatcaattaattttcctaaaactccttctagaccgtgtagtcatgatctcaacctcagtcttataccaaaattgatgtaggatagaaaagttaaatgcaatgagagtagtggtgtaattgaaagaactccaagaattgctcttagaaacctttaggcttcacaccctagtgctctttgtatcatacaaagaaaatagtggccactagaaatttatcattcagtcattgatttttttttttcaaaagacatcaattactatatagaacttctctagggacttacaattccttggaactagtctcatagtagtaatgtaacgtgaaaataacaaaaacttgaactgactgatagatcacattaagcattcttcgaaaattgcaatattaattactgaaaatagtaattatggccattgactaggcccataattcaatttctggaaagtgctcataggctgaaaccatatagaattatataaaatcttagataagcccattatcatccaaagaatgtcaaattaaagcttgagtcttggtgttcattcctttgcgccttttgtaaacttttaaaggtggctgccacttgtctccatcatttctccattaaagtttttctcaatttgcaagtgatcgtattctctattgtccaaaatactaagccttgtatgtagcgattctgaccaagaaaaaccagagaaagagtcacttcggattttgtaatactccaagtatcatccttaaagactagcctacggaatttgtcaaaataggcctaaatgattgcattaatcaaattctttaaattgaaaatatttgaaaatctatttgaatacaaaaggatttgctaaataaatctaaattaaaaatgcaagattatattgatttttgattgaaatgttcaagaatagggttcccacaatccaacttcaggcttaggactttaggcgaaacaagagtatttatttgtataaatctagtaatattcaaaaagtgggctaaatgagatcaacttaaataacttagtgttgcatctgtctccttaatgtaacattttattttactttaaattacctattagatgaatggaattgaaatcttggtttgggtataggatttgtaggcctttaccactatgtgatgacaatggttaaaccttagataactagagatcaagaattaccaagaatccctagtatcaaagaatggacaattgtaccaccccctaattcaaaccaatcttgagagtatctcgattatcattaattatgtttttaaccaatcattcattctgatattgagttcaatttctcattgtttccttacaagccttaaccataggtttttatgctttacaccctaagaaaactctttaacctctcatgggtgtgttttcacaagcacaatccattaaagaaagataaagaaccattcttgaaacttaaaaaaaacaaaaaaaaacaacatattaattaataataatggaaaaaataacaaactgagattttgacttatagtcttcttttttccaatctaaaaataatctcgaactcccttgaaaacctaaaaattgagtttatatagtttccaccaaaaaacttgacacatgtcatgttcttattggccacttcttttaaaataattacctaaaatgattaaaaaaaataaaattatgatttctaatcatatggtgcgcacttagggcagtggagtgcccaagatgcaattccgaattagaagaggcaaaacatcaatgtggcagtgtgcgatttcaaaattggggtcattttggaatgaattttgaattcataagttgaatttcaaaataatttcgaaatggttcttcaactctgcgtaattgtcttcaaatggtcataacttcttcgttttagcttcaatttgcacaccgcttgaagcattggacttttgacttcccaagcttcgagacaatatataacatgcccaaaaaatgacatcaggaattgctcgaaatttcacctcaaagtcagggtacatattgtggcctgattttaagttccaaatttccatgtgaacatgattgtatttgcttcaaacctccttcattttggttgtatgccctctatctcacttcattacattccttactagtatttcatgcccaagactcactcatttcaacctttcttggactctcaatggttcacaagtcccgagtcttttagttatggatgctatttccttggttgataataacttttgcacttactatttttttttcatcccttaaatctagaattaagctcaaaatagaaattagatccataactagggtcttaacatcaatttgagttaagttgggtgatttaagctttttatattgcataaatcatatcacatatgtgctattgaagctcatattttggctcaaatcagcaaacctttatcattatagaaataatatattattaatatgtttctacaacattcaaactatattagccacgtatttagaggagtttttgttccatgtagccataaaaaggaaaaaaaaatacctataaaaaaaactctatatgtgattatagtgtagaagcaaattcctgaaatcaagcttcatcaactcaatcagagaccacctaatggttgaattcatgtactgtataatggttaattatgttggtcaactataattaatcccttatagtttaggctatcattttgtaaagttttgtaagtaattttgtacatcctatatttatatggacattcattgtaaatgaatatagaagaattctcatcaattcagatctctaacatgcatgacttttgtagtagttacctattattttcatgttcatttttcttatattgtgttgtcaattttgtgaaaaagaattgatggttaaattcacaggttttgtttggtattttacctagagaaacccttct

SEQ ID NO: 11575 - DNA, 2198 bp, Vitis vinifera
  Intron number 12 from transcript GSVIVT01008052001 (locus GSVIVG01008052001) derived from phytozome v7.0 (chr-ID chr 17; pos 6220515 to 6222712 reverse strand)
tagagaagaagcacggcttttaatcgctgaaactggtatgcacgtataattttgtttttttccatgttgtaaccattctttttccttcttgggttaatttactaattactccaatgaattcaattatgattttaattctaaagaagaaatttgtaactttagccaagttataatgtgcaaaataatgggagatgaaaataacttttagtttccttcttgtagaaaaggaagtacaatatatgtaatgacccgcacccaaccatgtaaatattgtccgctttgggcccaaaggggcctcacggctttaaaacgcgtctacttggttaagaggagtctctccatatatagcgccaggaacttcctcccctatccgatgtgggacatcacaaatacccccccccatgcagacacaacgtcctcgttgtgtcccatgggattgcggggccaaacagacaaagccaaacaaacccccacaccggggtcggggatcggctctgataccatttgtaacgacccgcacccaaccatgtagatattatccgctttgggcccaaaggggcccttacggctttaaaacacgtctacttggttaagaggtgcctctacatatatagcgccaggaacttcctctcctatccgatgtgggacatcacaatatacttacagtcagcctcaccttgaatgcaataaataactcacatttcagagactgaagggtcatgctgatgtgcttcacaacctcgaaaagcgacattataatttcactagtcatacttatagttaaccttgtcatgtatagtccatagtaagtttatgcttgaaggtttggcatcatggtttgtaggtgaaagattggagggtgcattacagtgtgatagactcaacattcattggaaagttgtcagtaattttaccaacattgtcatctcatttttttcttttgcgcttagcatcttagggtgttttgcattttatttgggagaaagttggataacccaaactgtataatgattggagttagtctgtgtagggcaaattttccaaggacagattttctaacacatgcctcaatctccatccatgtaaattccatttgtttattattattatcatcatcatcaattattatttggtactttcacaatttaagttgacattcctgcttgttccatagttagccatatttgattcctatgcatttatgtagttaattgtttgatatgttaattcaaaatagttcataaaaagaaaaagaaccacatagttgaccataacagaggctagatttccaccactgagtgcagaaaacttaaattgctcaaaatttccaattctaagaattgagcctataagaatcttaaaattcacaaaattagaattatactgtttaagggagtcaatgctatttgttaatatagttgttgtggttgctgagctgttgctgcttgtagtgatactctggtagtggcattgatgggctagtgttattaatgtgatgtcattaatgtggtgctggcggtagttgtggttgtgcttgtgaatctggtggtgcaaagaggaaatgggggtggtggtatttttgatggatgtgatggggaagtaatttggtgaatgtagtcatgatggtactaatcacatggctgtgacattggtgaagtagtagtttgtcccaggccttcatttctattgagcttacgtagggtttcggtttttttccttaaatccattaatattgcaacatgaataacactggtctcattagaagttgtgaagctctcttgaaaattgaagtttcatccttgaatctgagttggaatttcagttatgccacagaactgtgcctctgttatgagttaagggatttgggattgggggttgtaaaattcaaatttaaatctcacctcaatttcatccctaggttatgcaccaaagatactgtagaattaaattagaaaacattgggtaggcatggtatcttactattattttggattttaggaatttaatctttttctccctttttactagcatgtatttccacagtacaggtggattaaaaaccatttgtgaatcttatggttattgttctttaatgagtcagaactgtaatcttgatacacataagaaacaacccatgaattgttttttggttccttccaatggaaatcaaagtttattcttaaatatgttttccagaa

SEQ ID NO: 11576 - DNA, 6023 bp, Vitis vinifera
  Intron number 8 from transcript GSVIVT01019319001 (locus G SVIVG01019319001) derived from phytozome v7.0 (chr-ID chr1 5; pos 1176725 to 1182747 reverse strand)
gcggggtgatattgttggtgtcactggctttccaggtccagatattacaattattaatcaaatatagcatctttgatctatctttataaatatttcatgtgtctttggttgagtacatgaaataaaattatggctataaatcaagtttcaattgaatatacgattttttttattttttattttttatttatatatcttgatctgaaaatcaaaccattgctactacaatgaagccttgtggatttaactttttgttcttgcaaattggttttccaaattctaaggattgcattagaattttattatcctttgttaatgttgttaatcatggctgcgaagaaaaaatacccaatcaaccactttttagttagggaaactccttatatttataagagaattatagagttctagatcacataaaaacaccttgctatctatttaataacttaaagagttcaagattatatcaaacttcctaaccatctataactttataaactagatagctatatccacaaatgaaataaaaaagaataaatatataacaagataaccatatgataataggagccaatatcttcaacactcccccttaaactgatgtgtagatattaatcaagcctagcttggataaagcatactgcaatgcagttctagaaagggcttttgtaaacagtaaactaatctacaaaacaaatataaggaatagaaatttcttgatctagtactttttcatgaccaaagtgacaatcaatatctatatgttttgtatgttaatgaaaaatagaattagatgtattgtgaatgaccccttgattgtcacaatgcataggggaagtagatgaaattggaaaacctaacttagctaccaattttttgaagccaaattaattcacatcatgtctaagacatgactctatattcagctttgatactactatgaacaaccatgaatagttttgtttttggtacatcatattaccaagttacctcccaaaaatatacaaaatcatgtagtagatcttctatcacctaatgaacttgcccaatccgcatttgaatggtcaacaatatttagatggcctttattttggggcaaaattcctttccctagagcattcttgatataatgaagaattgatttaactacttgcaaatgtttagtacatggcacatgcataaattggctgataagactaactgaatatattagatcaggttgagtaatagtgagacaaattagttaatcaaccagactttgatacagttgaggattaggcaaaagagtgccactatgtgtaggtaactttgtctttttgttcatatcaataggattatcactggcttgacatttaagaaaacctatatgttttaacaatgcattgcatgcttccattgacaaaggaaactgttttcttcaagtaagagacttctatcccaaggaagtatttaaggtggccaagatcttctaccttaaaatttctctttaattttaaggccaattggcacttaactattaagaaaatttcacaatgaagaaacatttttagaatcaagaattgaactcagcccaatcatactcacaataagctatgagtgaggatggaaagagagtgaagttttggaaagataggtggtgtagtgaggagcctttaaacatgttcccaattttgtttgccttatccaaggcaaaagaagtgtgggtagcaaatttatgggagcaaaggaagggaggaggggattggtacttcaattttgctaggaatctaaatgattgggtgttggattatgtggagaggcttctacttcaactccaaggtcaataggtgaatagggagcaagagaataaagtggtttggaagggtgatagcaaaagaaggttttctgtataatccctttactctttgttggaaccaaattgtgttgtctattttcatttagggattatttggaactcctgggttccttctaaagtgaggtttttttttttgcttaggaagcttaggagatgaaggtgttgactttggaccagctccaaagaagaggctggtcgttggtcaataggtatgctctttgcaaagaggatgtagaattcattgaccacattcttcttcattgtgctaaagcaaggatcttatggctgttggtgttctctttatttgatatcccttgggttatttctacctcgggaagggataccctactagggtggcaagtttcttatgtgagaaaagagcgtaggaagatatggagagcgccttcattatgttttttttggactatatagaaagaaagaaatcaaagagtgtttgaagatgaggagacgccagatcaaaggctaaaaagttcattccttagcaaacttgctatgtgggttcacgtgtacattaatgggagttctttctcattaattgattttttagattagatgggctttgattgagagagggagtagttttttgttttccctcctttttgctttgcatcttttgctcattgtatacatccggtgtactcttgtgcatttttttgcacttaatacattcttttataaataaataaaaagaaaaaaaattactcacagtaagctgagaccattgcaacacaagaccactttcctttgcttgatatgaatttttgtgttgctctagaccattgcatatagtttttagaattgactaaagtagtggtaattttgagacttggattgtcattttgttgaacaacaattatattctcagaatcaccaagagactcttttatttcagatatggtagccattactactaaaaataaataactgcaaaaaagcaattacagtagcacttatctgtgctttgacatccagaattttgagatcacatcatgaaagcctaaactcagaaaaaaacagtaataaagactgggcagttactaacatcaacatactataagctagccgcatttacttaaacagtcaacaatcagcagcattaaggaggatggaagaaagaaaataagagagaagagaaggagaagaaaaagttgaatgatggatatgaaagaaagagaagcggaatcaagtggtgtgtattcccaacctggtcatggcaccctggtacgcttttttcaaagatctaggggcttaatgtaggggatcccctctcaccctatttatttgtgattgctatgaagtcactcaattgccttttaaagagggcagtgaaagaaggacttttattgggttgtcaggtgaggggttcaaatatcccattttttgtttgatgatgatactcttgtcttttatgaggcctcttagaatcaaatgacttatttatgatggttgtttatgtggtttgatgccattatggggttgagaataaatttggataaaagcaagttaactctagttgaaaggtggaaactatagatgatttggcttcaaagtttggttgtaaggtgggtagccttcctcttatttctccctttgggtgtaccatttaaatttgtggcagcttgggatggagtggaagagaggtttcacctaaggttggtcatgtggaagaaacaatccatttccaaaggaggaagaattaccttaattcaaatcactttgtctagtttgccaatttattttgtctttgttgtgcatgccacaatcgataagattgaggaaagggggattgggagttaagtgtcactcaactctcaataagactctcctatgcaaatggagttagtgatttgtgagtgagagagggcccctttggaatcaagtcattaatgggatgtatggggaaggagggggtggtgttcttgagaagtgagggaggggtatgatgttgggttttgggaagtgaaggaatgattgagacctttgagtagtaagatttcattcttggtggtaatgggcgaaatgtgaaattttggaaggataagtggtgtgggtgcaggatgtttggaattcctcagttgaggaggaggggaagggggggttagagtccttgcttctctaggtctatcaatgattaggaggtggattgtgtggagatatttttgttgtgttttcatgggaagagagtgtgtagggatgaggaagataaggtgctttggatagagatgaaaagtggcaagtttacagttaagtccctctataacgccttggagttggacagtttaatttcttttccaatgtgaatcatttggaactcatgggtgcaacctaaagtatgcttttttgcctaggaggcaacatggggaaaaactttaacattagatacagtttaatttcttttccaatgtgaatcatttggaactcatgggtgcagcctaaagtatgcttctttgcctaggaggcaacatggggaaaaacttttaacattagatcaagtccaaagaagagggtggtctttagtgaatagatgttatctttgccaattggaggaagaatccatagatcacatctttttgcactgtgcaaagacaaaagttttatgagagttgctctttgctcttttcaaagtgttttgggtgcttccctcgtgggttagagagacactactaggttggcatgatttgtttatgggcaaaaagtgcaagaaggttcggagggtaagacccttatgcatcttttggatggtttggaagtcaaggaataggattgcttttgatgatgaagtgcttttgatcccaaggctaaaacttttgtttgctttctttggttggagactaagatgtttataaatgatggttctttgactctagttagtttctttaattggttgggctcttgttgccctttttgttttgtaaatccttctcttgtttgagcctcttggtggtaggtgtatacgtcctatattccttgggccactcttttggtgcctatgtatatatatagatacacttctttatctatcaagaaaaacaaaaaatgaaagaaagagaagcaaccaaccagaattagacatggattagctttgattgcaaacaaaaaaaatccattcaaccatgctttagttcgctggaaactccttatattataggagaattatatacttctagattgaattaaaaaaaccttcctattatcaattatcttgtgaaacctgctcagtgtctgtaatggagtatctcaagtatgatgagggtgcatcttctggatagtgaatatcctgcttgtcattagggaacattgcctattggaaacaggataagatcccagagtattggttattggttatgatcctgaatcatattggttctttattagctttgtatatcaattttattttgttcttccctcctagcacctacctgctacgtttgaagggaaaaaaattgagaatgggagccttgagcctacatctgatgtttttggcatttttccatgcagtagtataattcctaattctttaattacttgataatgtaggttttagatatgtttcttgtacaatcttagttaagcttttagttttactgtcaaagttgtatgtgtgtttggatgttcctacattctctgaacctttactatgattggtgtagggtgctctcttctaccccttctcctacttgcttctgatatctattcctatgcccaaccattttaagttgtttccttctactacatacgactttgttattatctcatgggttcttttactagatgttatgtttgatgcactgcatggatattatcgattgcaatcatttagaagatgttaaaatattgtcaacatctcaatgtgcaactattctgatattgttctttcatttctttcatgtcatgttctcactgttctattgaagctttgtttgtcatcttacctcttttattatccatgggagtctggtttttgggttaatgtttatggaaaacattttgcattatagttaattgtagaatttctaatgatgctcatattcaagctatggtgatttgtgttgttccttatttttaatttggttttttcttttttcttttattttttttaaactatctttcaggaaaaaccaaaaggggggagctaagtatttttcca

SEQ ID NO: 11577 - DNA, 2354 bp, Vitis vinifera
  Intron number 1 from transcript GSVIVT01020611001 (locus G SVIVG01020611001) derived from phytozome v7.0 (chr-ID chr1 2; pos 3781893 to 3784246 reverse strand)
ttgaaaaggggcttgagggccttgatttgggcagggttggaccactggagttgagcagtttttagggctttaccatggagagaaggtctgttgcacttgaggttctgtttgagggcgggcatgactggagaaatttcagtgagaatgaaaccgtttaggctgaatgaaggactcaattgcaatcaataaaccaactatgcaacaccaagaagagagtaatatagtgatagacactaaaccatgaccaatctcagaattctaggttcataaaataacaaacatcaagtagaaatgaaggagaacaaaaataagaaacctcctcttcgatagctagaccaaccatgccaggttgaaaagagttagattatccatttgcaagttaggtggaaactgaccctaatgtctaaagatgtgcatccaaggaaggcaaaaggtacctaataagatattcacttctatgcatctaactcccaactttgctaaagatggctttacttagattttatggatcctatgttctgggatgaagccattaaacatgactatgcatgatgaggatgaatattcaagatatatatcaagaaagggaattagtattagttgtaattaaagtaggattattattacttggaattaaattaggattggtatttgttggagtctaattaggattagctagttgagttataatataattagaatttgagtcatgataggttattagagtcctagtagaataggttattagagtcctagtagactttggatttcttagagaagcctataaataggctaatcaatgtaaatcaaaggaatgaattttgatgaataatattatactttctttcattgcaaggttgcaaccctcaatggtgagactccattgattttcttctaggtgagactcctagaaggccttagtgagactctaaggttttctatcttttcttcattgtttcttctttctctctatttcttatcttataattttctctaccacaaagtttattccttgttcctctccttacaccctaaaaataaaaccctagcccacctacccttgagtgtaggcaaccatcctagggttgtcctacatcaatgcatgttacccttctttctatattaagcatcactcatggttgatttgatttgagaaggcatgtcaatatctatatcatcttattgagtcataatctgcgttccaactgacctacaaatgttgcaaatttttatcttccatatcgcgcaaaaagcaaactcccacacaagagtgtaaagtaaaaatgagctgcaaatcaggaaaactcataacaacagttaatcacaaatagaataaagcaaaggaagacgcataatgtttaataaaccgcccaattgttaaacaaattttctgcattgttgcaaaatcatcaacagtcggactgttcaataaatttcttaaacccattgaagcaaagggggaaacaagtacaatgtatctctgttcctctgaatttcattccaccattaaaaccaacatttctatacttcatacacacaaaattgctaatttaatgaacccgaactattgcaaaatcataaggaaaaaacaaccaaagaaacatcactcatacacgaatcctaaataactaaactattgtataaaatcaatccctctgcttttttgatttcaaatgattcaaacagacagaatgactacaaaaagtaaaagcacaaccacctcttcctgcaattataggattggaatgagcgtgtatgaagccaaagaatttgaacctgcagacagaattctaaaaccaatgctatttcttcctcaacacaaacacatccgcctcctcatacgcatactccggatgcaagtcttcatggggaatcttctctatcgcaaaaaccctagcgcacagctcccagaacaaccggtccgcctccggagatcgtagctggtaccccagaagcaccaccccattgtcggaaacgagcgcctccatggctgcaactagcgacgccaccgattcttcgatgtagacgacgtcagtggcgatcaccacgtcgaagggcggcttcagggcattaatttgggcggggttggtccagtagagttgggcggtttttagggttttgttgtggagagagggtttattgcgcttgaggttgtgcttaagggcgggcatgaccggagcgatatcagtgagaacgacgtcgtttagaccaaggaggaagaggcccatggaggcgaggccgcatccgcagcccagctccactgcgcgcttgttggagaagtcgaggaggtgggcgtagggattgggggtggaggatgaggaggacgacgttagaggggaccagcgctctgcgaa

SEQ ID NO: 11578 - DNA, 3449 bp, Vitis vinifera
  Intron number 3 from transcript GSVIVT01016319001 (locus G SVIVG01016319001) derived from phytozome v7.0 (chr-ID chr1 3; pos 5136235 to 5139683)
gaaggtaaaaaaggtggcttaatgcatgtcttatttggggttagggtgcactaacatgcctatgttgatgtctcataccagtcctcatggcttcaagtcttaccatggcattatgccaacacctcatccttgtcgctgcctatggcttagtgtccatggtgaaggccttgcaatggttggccacaccttgcatgtgtcaagggtaaacatgccatgcacatggggcacactcatgtcatatgtcaaggccaaccttgcaccaccacgtctatatcagatatacttatgcttctatcactcatttttgttgcaatctcatgtcaagcacaccatgtcatgacattgtgcccatggcattccttttagttgcacaaggcattgtgccttgtgctaagccaatcgagtcatgcccatgacttagggatggcttcaggtttgccttgaggctttaggaagcgatcctagtcaatgctccatgtggctcttgagaacattgaccagccaaccccatcccttttcgaagagcattataagccattttggctttgacaggagtcactagggatgcttgaggagacaatggatttttctaaaactccataaattatttttgtggttcccaccatctcaacctctttctacaaaatcatgccaatgctaaatccttttgctacaaaatcaagccaatgctaaaccttagcctaccttagttgtgccatgttgctactcacgcgtgggccttgttgttgcttgcttgtggcctcatggctaagccatgttgatgatgtgagatcacattgctacacatttgtggcctcatgcatttgtcaacatgctgatttatggtttaatgttgcctatgttgcacaactctagctatgcattcatcaccctcacaactacattgtcttaattttgacatgccaaccacatgccttagggcatgtctacaagtgcaacgtgccactcgatggcctcgtgcttggtgccttgtgttagacattagggtgctaacaaaccactcccactagaagaagttaatgcctatgttgacttggtgagaaaaaagagaagatagattatagaaaagaaaagacaagaaaaccttgagcctcaataaggctttctaggagctatgttacatgggtttgggtatgggtgttggctatgggtatgtgtctaggtgtcaaatcttttgcatcctaaaattgaagacacatggattcgtttgaaaagaatctcaactatgggtgtggccttatgggtacttggatgcgacattaatgaaaaataaattagcactaagcatagacacaataaggtaagtatgagtcatttataataatatatggttaattgtagttggagaacatatttattttgcctttgctattttaataaattgctaagtttgattgactttgatattattacttttaataggatgttgagaaatttttttaagaaaatattataacaaactattagtaaactttaattagtttaaaactttgaaaatatgtatctattttgtaataaaaatcttttaatacactagatggtgataaaatataattcatatttaatttcttattatgcaaaaatttatatactaattattataacttatctctaactttttaaagataataatttgatatttatttttatattttttatgctattaattattatacttacctctaaattttccggcctaattagcatcaccataagcttctaatttcatatttttgttcttctgaaatatgtgctttcctagtgtagactttaagtaatttaggattttgtatattgccttcatgtgagatttatatcgtgaatgcatgaattgacataccacacctatagtgtaggcaatgtatggttaggtgtgagatgaataagttaatttcccactagtctttgatagaggccatagtttaccatatcatttttcatttttcctcctagtttatgattctgttcaattagagtctttgctagtttacatcttagaattcctgtctcctttagtaaatcgaggatatatttttgttgtgaaataaatattccttcttttgaatgtgccacgtcaatctccaagaaatactttttaagagtccttagatctttgatctcaaatttattgggcaaataagtttttattagtctttgagtttcccctttgtcatttccaataataataatgtcatccacataaactatcaggacaatcaacttatcaaaggagttgcatttgataaatagtgtgattcttttagctttgatggtagttcattttatcattgattttgtaaatctcccaaaccatggtcttggaggctatttaagtccataaaagagaattcttaggtttgcaaactttgtttttctaagctttgtcaccaaacttagggaggggtatccatgtatacttcttttaagtgaccatgtaataaaggattttttcatatcaaaattgttgcaaaggccaatcaagattagcaactaaagacaatagaatgcaaatagtattcacttttgccatgggtgcaaaggtctcttagtagtcaataccttaagtttggttgaattccttggttaccaacctagccttatacctttctattgtcccatcaatcttgtatttaattgtgaaaatcgacttgcaaccaactagtttattccctttaggaagctcaactatatcccgtgtctcatttttttctaaggcttgcatttcctcattaattgctttcttccaattcttatctctaagtgcctcttggactgtgtttagaatttcaacagaagatattagggtaataatggcccaatatgtagaaaataaatgatgtgatgaggtaaaacttgaaataagatgtggagtgtgttttctagggccttttctcaatgcaataggccaacgcaaatcatcatatacactagaatgaattttttcattacctaattcaaggttagaggtgtttcttgcagtatctgttccctttccttcagttggtcctcagtttcatcgggtgggatttcaatggacaaatcttctaaaatttccataagagtttggtgctgcttcattagaaatttgctcgaatttctcatgtttgttggctcaaatgccagctattctctaattataagaactcaaatgccaaaataagtcccaaattttaaatgagactcaaataccaactattttctaattatgacatcaaagaaaaactaaaaatttgcaggcttactctgatacccttgataaagtaacttaggattctttattcccctctctttccttaataagcaatccttgaaaactcaccccatcaatttatcttgaggattgtgcatatattgatctttttaattagtataaaatccgattattgttctcagaaaccttgaaggtgaggatatcgaaggtacttctc

SEQ ID NO: 11579 - DNA, 6372 bp, Vitis vinifera
  Intron number 2 from transcript GSVIVT01005826001 (locus G SVIVG01005826001) derived from phytozome v7.0 (chr-ID chr1 6_random; pos 303472 to 309843)
aaacctaccgtcgcaatctccaatattttcagcttaagaattccatgacagtgaaggagcctcagtattccaaattggtaagcatcatcaggttcaagtgccttaccatgaaaagtaaaatagtctggcagagtttggtgcgtcagacagaattgacagctcagttgcgtttaataacaagaaataaagaaccatagtggaattggggaagctagacagggaatagtagcttagattggcaaaagatcctctgattttcgcttagcaatgtatggagatgactccatctaagttcctcaccaatagagtcatccccattgacacccccataaccaccgtctccaccttctaggtcgccatcttccaaccaaccacctgcgaaaccaactgaagggcccataagcgatctcttatggtctgacccaaatgatcgatgtggttggggtacctctcctcaggcgctcaatcaggcatattagaagattttatcgtggtgaactccgcaattgagttctctcagtttgtaatttggttgcatggggatctgaaacttgaaaatatcacatggatgcatattatttaaggaggaatatcccttggacctgctccagaaacgggttctgcagctagagaaaccttagagcaatcaagattggtgaagaccttgaacacaggattgggatgttggaaacttcactaaccaggtttggcatgatcttggattctactcagagtgatgtcatgcaagtgaataaagggatgaaggaactttttaatggagatggaaggccttttcatgcaaccaccaacacctacaactgcaatcaatcaagctcatttccaccttaagccttatgttgctccgcccttgcttgcatggtgaccctcatttgatcttttgtaaggcccaagtgattcatcccttattcttcatccttgcttccaaaaattgattttcaaaattctggttttcaaataaatttaattccctaactttgccttttaaaattcttagaatttctcttaggttaataaaatccggattttaataaattgcttgttgcaattattttccttttggcatgcaccttccataacttttctcaattttaaatgattttccaatttttttattttaataacatgaataaattctataatttcaaaataatggaattttctctaaattcctgtgatctttcctccatgatcattaggaaaatagagtttatggaattaattcatgcacaaatatgactaattatatacgaatggtctttttggattggtctaattaattaattaaaacataatatgagtcatgactaattaattaattaattagaatctgataggttagattaagtggtccaagcccaggatggactcaagtcacttaaacccacatagggtttaagacttgtaaccttcggccattttgtcttccagagagaaagagccttagcttgctatggaggggattccaccatcgtcacatgtacaagagggagccattaggtgaaagatgagattttgatatcacttttgcagaaggatttgggtttgggaacaatcaagccctaattatgatttctaactcatcctatatgcccaaagttgtgttttttttttatcatttccattatgcctaggatcttagatacatgtaccttaaagccttaaacacatgtagaattgcctaaactaactcaaacacattagataactgtcaagcaagtgcattggtacctcaaatgcaccatatatcatgttttttttcctcaaatgtggctctccactgcttttgcatgcattctttgatgcaaattagacaagaaatccaaatgataaaaccttaacaaatgcatatgttctctactttggctgcaacccaatttcttagagttccaaaaagcaatggtatgttgctcgatcttccattgaagcaaaatataaagttgtttcttataatactacaaagttgggatgggtccaatcacttgttcttcaacttgatatgtctctcaaacattctccaactatctatcataataatatcgataccatctacattcggtttttcactctcatatgaagcatattgctattgattttcactttgttcaagataaagttttttctagacaacttcatatctctcatatttccactcagtaccaactagttgatgttctcaccaaaccattatcttgtcaacgccttattttactttgatccaagataggtgtttccaattgaaccactatcttgaaagggcatataaagaatggatctgcaacttctccaacctcgttagtgcgaactcatgattcactcattcaagtgaaatcaaatcctttaatcccaactactttggataactttctctctctctctctctctctctctatatatatatatatatatatatatagatatatataagtaaactttcttagccttgctagaaacaactaagggacttattattagtctaaaagcaatgttgaagacaaatgaaaaaaagactggataagataatgacaatataaaagatagattgaagttttaaaaagagctaaaaagtgtttaacagtataaaaaggcatgaaaaacaaagaaagaggcttgggcactaaagcaatataaagagattattgggcgcccttggatgaaaatcaagcattggatggacttttaggaaaaaaaaaattaaatacaagtttctttattttaatttattgaaaacttccctattgtgcatttatatttaaaactttcccaatactataaaaaacttttcaaaattatgtttgaaacccttttggatggaaagaaaagttggtgatttgctaatctaaatagagttttgatgtaatctactaaagagctcaaggtattacattgacataaaagacaaatatagatgataactaatataagtctttcgaattaaagtagcttttctatcaagtaaatctttgtagtctcttttatgtttagtatattttatttatggttgactaaggtccatggttgtaagcctattaatgttctatagatagttttcacgttaatcacacattgcattcttttatgggttgtccatttattattcatatttttccttattcaacatattcttgtgaatgaacaaatataaatatttaaacaaaagaaaatgttgaatttaacttgtaatctttaaacttcctattagtctttactctaattagttttagtcattaagaacatattcacacatgtatatggtggattgcctatgcatgtaagtttggcctaggcaaagattgaacccatcttgtatatatgttggattagataattaaggataaaaatttgacatattcattgaagctaagttgaggtttgccaaaaacagattagccaaagtccactcaacatgaatttgagcttttcttaaaacaattaattataattcccaacccaaagttgggttgatttaaaagtccaactcaaagagtaagctaagttaggctaaggattaaactcaagctaaaaattaaatttctaactagatatataacttgttaggccttgttatggccaacctgggcccaagccagacaaccttagcttggtctggtgcaacccatttacctacgtattatcagctcattccacatcacaccacatcacaacccataatcaagtacaaggttggttaaaaaaattggggtttgagatggggtgttgcattcccattgtttgttgcaacattttggacataggcagattttccactaagaaatcattgctcaccatacttgggttatacaagtttatggttttggaaattctacctttattcctccattctttacaatataaattatcataaccaccatatatgtatctaagcctctaaacaaattaaataacaattatatttgagttcgaataagaatttactaatgttagtaaatatacatgtcagtttgataggttggtgggtcattgaatcaagttaggtcaaattggattgagctagccagtaagttatgattaacttttacatcaatttaataaggaatttcctattatattaaaatcacattaaatgatcttattaacttttgcggttgatatacatgtaacaaggaattaattgtcaaattcataaaaaataatataaaaataaagcaatatatgactgaaattcattgaaaagttatatcaaaataaaatttcaaataaaaaactcattattaaaaaatattatattaaattcataataaatctaacattcatttcaatatcaatttatatttaatatataacaaactatcaatatgtaaattcataacgtccactagctcaataaatctagtagttacaatattatacaataatccataaaatgagtaaagaagtttatggaggaagaactagagctagtaactaacataaaatatacatggaagcaaaatgaaggataatgacataatttgttatggaaatgcattaaaatattaaataatataatataaaaataaaaataatatttaaaaattagtcatcatcttgttttaataaatagagtttttcaagcccgatttagggtaactcttttacttttagcattaattagaattggaagataagttatattttagtggcttagtatttggaattataataatttccttcggtacgtgacaatattagagaaaacagggaagtttcattattcttacctacctccggatactttttctttgttagaatttttattaataacactactctcttactaagattaaaaaggaatttttagtttcaaaaaagaaataaaatccaaaataacattcgaatctccttagtcttatagaaaattttatttgcttggagaacaagaacttactatattttatctacataagtgggacaaaattaaaatttggaagaaaaaaaatgaaaaaaagaaagttgaggtacaatatataagttagtagagtattttaaaattttaactttcctagtagattggctaagtagttctcaatacttttattttcaaattatttcttatcactcaaacataaagtccacaaactttatttcctacaatgaaacgaacatgaaaattaggggaaaaaaaaggctagcatattggtttttaaaaataatgtgcggatacaatcttaatgtattttttgataaaatcataacttcatttgattttattgtcatgatgtagatccaagaagtgaagcatatgcccttgaaatggaggaattaaaggttaaaggtaatcattatgatatctcacatcagatgaagagaaagttcttaatgctatataagtatgagctcattttaaccatatagatacattttaaagtcataagaattcctttggatccaaagcgcataatatctacacggttaggagtggatcatcaaaggtgaaaaagtagcacttataattatgtttaactttgtgatgttgctcaatacaagtttaacttatgtcatatccttccaaaaactcattgaagaacatttcaagttatcctagattttagagttttttaggtctcttttttattttcctgaagagaacaatatttataggtggagtttggatactttatttgacatccttatatttgattttattgatttgaaaaatttaattccttgattccattaatttgatttttttttttcaaatgaaattttactaatgccaacaagagaattcatcctctttttttttttcttgtaatttgatttgattttcttttgcaaggcatttttatgtatagtcacttatcatttataattctaaaattttatggaattgaatgttatgtaacactccctctttcttgaacttaattataactattaagttgaagtatctaagttgttaaaaaaaaatatattaattcaacggtatgatttaagtccaccaagttgatgcatagcaacatcccgaagatataggtccaacaagtggtggagccaaagaagtagataaaaggggcaagatatatatgaaagttagttggggtgggggtacaatgatacaaaagagcttttgtagcctagtggtagttattgattttatggtttaacaaaattatggataaaattataaacttggttaatttaagaacgacaatcttgatattattctccaattcttcttaaaaaaaaatgaaatcaccttcaaaatttgttatgtttaactttggataaataggggtctaaacaaacacttgatttttttttttttattgaagtcgtaaaaaaatcttcaattcttcaagaaattttcaagtcttgaagaaatctctccaagagtgtttttttaatcttcac

SEQ ID NO: 11580 - DNA, 7508 bp, Vitis vinifera
  Intron number 6 from transcript GSVIVT01014679001 (locus G SVIVG01014679001) derived from phytozome v7.0 (chr-ID chr1 9; pos 8513617 to 8521124 reverse strand)
caagtctttcacgtaaagcctttgtcctgatacaggtttgactcttggtttcttgaagtgcttctgtttgtttattttgatctgcattcttttcagcttattgtgttttatatttgcaatgttattattattattttttgattcccatattatattgaactagactgttgagtgaatatcttgatcaactatggctgaaccaatcatgcttatgtgtatgttaagtaaagatttatcataaatcttgtgctattatgaatgtttcaaacagaaatccacatggaatttagatcaagtatgctctagttaccttcacttaatggtaggtgaagaagtcgaggaacatttcgattacttacttcatatcaatgaattagtttgtttctaataaaaaaattcattagtaattaatgcatgaggcaaggcagtggcatctataaataaaaatttaaagttcttgtagttgatttgtagttctgaatatatatagaagaattttggatgcaaggtgttgtgacagagatgtggaggttccaagtgagttctagtagggaaccacacccccacccccacccccacccccacccccacccccctccccctccccctccccctccccctccccatcctgctatacccgcccaccccataaaaaaagaagagttacacatcaccccaaaaaaaaaaaaaaaaaaaaaaaaaaaaaaattccaaggctcatcaacttgaaaagggtagtgaaaatataagaacttattaacagtagcacactaccaatgttaatgcatttgcttattgtttctattactaatgtactctacttttatgtacccaattctaacacatttatgctctttatacaaatcctaaaaaggttaaaagggtcatttctcatgtggagcctttgcatgtgtcatgtttttcttctttagcttttctacactagttagagactcagagccaaatgcttttgttagtccaataccttatactactaggctaggtagtcatatcaaggttggattgtcctatgtgccatagattttagtgggaggctacattatggctttaaatttgaggattgtttaatgaaaacataataggatatgttatttaagaggttcttttgtagattgactaatggaagctctattgaaacatttaaaaggaattttgtttttaagtagattgaaatttgatcttgtgatatagcttagaaagtaactgaagaaagaagcgagaaaagaaaagaaatcgtggaagatgaggtgtgagggtagtgttacctcatgagtttttctatggtataacttataagtagtgagcaccttaaaattacaaaagttccattctaacgcaagtcacaaaggtagctttttatcccattgaatgctccccctcaaaacttgggtgtttatcacttatgtcttgcattcctagtttattttggaaagcagtactttgaacttgttattttcaatttctactatattatcacttatgtcctacttagtgaacttttctactatattatcttcaattcttacattgtcatcataagatctaatgggttctttgttacaaaaccctaattcactaaataaagtcttcttggtaggacttgcaggaattcactaagtaaaatctttatccttttttgaataaaaattcaccaagtaaaaatcttcaattcagttcacaaatcctagaagccattgctttgaattctccctagattatttcatgcacaaaaaatcaagcttgtaaaaaggatggttcaatgcgaaggatcaataacaacaaaaagggagaatttcttatccttgataaagaatagagtttaggatatcactaaaattgctctccctattataaatccttgcagaacttattgttgaatcatcatatgatgatgatggggtttaagaatcctacattgctttcagcctgccagggtagccaagttggttagggtgaatgttgggtggtcctagtaagaggcacatggtctcaggtttgaatcctgttgttgatgacaccctgatttacctggtgctagttgttgtgggtgaggtcaacaccccgaggtttgtgtcctcatggagagtcctaagggtttgactatagaaggttcctcagttataaaaaaaaaaaaaaaggaaaagaaaaattcctagattgctttccaaaatccactaacattgatataaccatctaacaactatgttggtgtcctttccattggaacacaaatcatagatgcttctaagttataaatactacatgatgagggtatgtttttcacttgggaagttacatggggaagaataatgaccttaaatcccctcagaaacaaggttggaggatgccaaattgatgttactttgtaaaggagaagaagaaatggctaatctcatcctccttcagtgttctaaagtagttatgttatggcagttaatgtatgctctctttagagtccaatgggtggtgttctccttagtcaaagatgttcttcttggctaacatggttcctttgttggggagaaaagaaagaaagcttggagagcagttcctttgtgcttagattggaccatatgaaaggagaaaaataggggagcgtttggaaaccattgaacaagtggatcaagtaatcaaacaatcatttatgtacaattttttgcagtgggttagtgtgtatataagcaattgctcattgcccatatttgatattattgattggttgagctctaactaaagtgaggatgttgtttttcgtgtagcccttagccgtgtttggcctttaggtgccatgtatacactgtgtgtgcttttgtgctactccttgttaggtgctattaatacaatttattttttcctataaaaaaaaaatcctacattttcatagtgagttactttccttataaaaataccatcaccatttacctaagaaagttctatttctagtagaagtccttaaaacctaagtccacttcactcctaagtccatgtaccttgatttatcttaccaaatgttctctcacccattcactaatacttgaccaaagtcagtcattgcatattcttaggtggtgtttgttttttgactgaatagaaaaagttggctttttctattaagctaaaagtaccttattaatattaaccaacatcactaaaatgaacttgttatcaataagtttaatttaattatgttggttgatgtaaatgaattacttttagctgaatagaaaaagtcaaatattttggctttttctattcagccaaaaaacaaacaccaccttagtactagaagtaatcttaatgaggatctcaaagatggattttggatacatagtacatagggatatatgctagacaagactagatagaggtgatgtggtgagtaatggcctctaaaccaagtttttgtatggtgtattatgtgggtgagtaggcatttaaagattcatttccaatttgttttattgcttctcttagaaatgcttagatggctgatttttgggaaagggggagagggcagttattggaactcatatttggagaaatttccatgattgggattttgggacttgcacttgttccttcatactggagtattccaatgagggaaggatgtcatgaacagttggtttggaggtcctcgaagaattgttagcttcttggtcaagtcattttgcttttcattctatgttcctgcctgtttcctctaaggaagtgtggtccacaaagctctttcttaagtttgtttctatgcttgggagatggtgtgggagagaatactcatgatggatccgcttatgaagggactttggtcttctagtagttggtgttgcctttgcaagcattgtgggtgtcaatgatatacttatttattgtagattgcccagtggtgtataatctttgtcatcccttttgtttagaatctcctgggtgtgctgccttggttgctgaaggattttgctattggactgtcagccatcaggtgagttttgtggggaggagctgaagaagatttggaaggcagtccttctcttcctcttcccatgtatattgaaaagaatggaatcataaaatttttgaaggtttgtggaatcaataagggtcttctttccaaatggaattggcgatttgcaaatgaaagagaggctttgtggaatcaagtgattagagggaagtatgggaaagatagagggggttggtgctctcgggaagtgagagaggcgcatggtgtggggctttggaaaggaataaggatggactgggagttggtgggtgcccggatttatttcagtgttggcaatgggaggagggtgagattttggagggatagatggtgtggggattcccctttgtgtgagtcttttccttccccttttgctttgtctgttgacaaggaagcttgggtgacagatttttgggatccctcggttgaggggggtcggaggggttggaatccctgtttttcaagagccctaaatgattgggaggtggaaagatttctggagcgtcttcacgggaagagagtgcttggagatgtggatgatatggtggtttggaccgaaacaaagagtggcaagttctcggtcaagtctctctaccttgctctagaagcagactgcacttatttgtttccctctagctgtatttggaatgtgtgggtacaacccaaaattagtttctttgcatgggaggctacgtggggtaaagccttaaccctagatcttgttcagaaaagaggatgggccttggcaaatagatgttttatgtgtcttgagaatgaggagaccatagaccatcttctttttcattgttcaaaaacaagggtcctatgagagttactctttactttgtttggggtgtcttgggtgctgccctcttcagttagagagactctccttagctggacatggttcttttatgggcaaaaaacgcaggaaggtgtggaaagctgttcctctttacatattttggacggtttggaagaccagaaatagattggccttcaaggatgatgtgttgtcaatccagatattgaaatactcttttgtttattctctttggtctgaggctaagttgtttatagttgaatgcttcaactatggttaattttattgattggttgggatcctattaaggttgttttttgggccagctggatgttgttctcattcttctttttctttggcccttttggtggtgggtgtataggtttgtataccttgagtcactttttggcgtctctttatatatgaaattctctttactcataaaaaaaaaggaaagactagaagggttggtgaaaaatgcattaatcaattctttattttatttagtctctggattcagcaagaattgacattagttgacttttagatgtcattgattgtttgggaaggggttgaggtgcagttggaccttttttttgggtttttactctctctgtatacatcctgcacttgaattgcaaccctttttattagacacctattaataaaacttcaatttgcttataaaaaaaaactatacgtgattctgcctcctgaagacaagacagattttccaaccaggtctcagaatttgagaactattggtttacccctatgggaagatctagagaagatagtggcaagcctgctgaaatgaccttgatccatatatctgacagtgtgcttttatctaaatgttattacttgacaataagatccagaaagataaatttaatggtaagagctaataattgtttccttttaagaaaataataatatcatatgcaaactgaaggtgggacattgtaagattgtttctcctgacctcaaagccctttatgaaacctcgagcctcagcactcatcatcattctgctcaaaacatctactgcaattgtgaactgtaagggtaggattttctagctaagtttacaagaggctaaaatccaggccctaggtcaactatatagaagaattgcaaaactatcaattgtgaactgtaagggtaggattttctagctaagtttacaagaggctaaaatccaggccctagctcaactatatagaagaattgcaaaactatcacaggaaacaatattaaatccatgaggtgcatatagaaaataaattgtaaagaccacacaccctcctctcccaacctaagtcttatgtctgacaaatgattagctatcaacacaacattcagtatctgactgcccttaatgagagcctcctcatgaagcacaagtctgatgggctcaggaaggaaattggcaataatcttataaagattgaaaactgaactaaagattctgtcttctttaacgtcatgtggcagctctttttggaataagggcaataatggttaaattagtgttcttatttataaccatattgttgtggaattcatgacatacttttgattgattgtctttttaagtctgccaaaaatcttgataaaaagatattgaaaaacttagggcctggagctttttccttatccaattgaaatatagtcgcttcaatttttccttggaggagggatgttctaactaaactgcagtatttacagtgaccaatctcaaccctgaatactcccactgtcaacatttgtcctaaaatatgggagaaggagatagttaaaactcataatatggttgtctaacagcatgggccctcaacaacttgtacttgttcagtttttgctttcttcttcaatgggccacctagtgaagggtttgaagttgcagccaccttctttctgataagaaatgagaagaatattatattattagggaatggttcacaaaagatggtgctagatccttcaaaaaagaagctgtgcaagaagaaagagaaaggaaaccagcaggcagaaaggaaaaaacaaagatcagcctatagaaggcccctaactaaacaaatgcaagatgcctatagatgatcccttggtagactcctctcttggcaagcctgttgaccttatggtttgctgatttagacttcaagaaaaggaacagccctgtttcacccatctaatcctatatcttctcaacaacaggttcctgaaaataaggtgccctatgattgcctcccaagggaggacctaaactttagtttgttgagccaaatatcctacagctcatggaagttacatcctttaagtacttcttcgttaaggacctattttcttcatttggtctgttctttctttttccctgattggtagtagcaaataggtctattggcttttatgaatttaagcaaggagaagccagaaataaaagtttctcctatattcctatactgtctcagtctgacacactggaaattcattgatcatatatatttttaatctgacttaattgctaatatactcaaaatcactatgttatatcgttgtcttttatttctgttttatagtgttttcataacctaaatatggtatttgagggcatgctttcttctagggtcccccaggaacaggaaaaacacagactattct

SEQ ID NO: 11581 - DNA, 4829 bp, Vitis vinifera
  Intron number 6 from transcript GSVIVT01028787001 (locus G SVIVG01028787001) derived from phytozome v7.0 (chr-ID chr1 6; pos 18829629 to 18834457)
gttcaaccagtccagcttcttcaccatcaataatagtacccatccttcatcaagggctacatgtagttattccacaatgtcacctagatagcaaaggagaaatggaacaaattttgttgttgtcccggaattttatcaccttgataaatactgtccagaaacataattcttattgatcaattgttaccatacatactaatgggcaatgaaattagtagagaactttgcataggttgaggtacgaaaatctgtcttttaaaggagatttaagccatttctggtttgacaatttgagaaattggtgtacttgacttctctttcatttgtccccgcaaggatacgatagtcggccaagtgatttgttgcatagctcacatcaatatgcataaagcatagaacttaaggcttcacaaagaaaagtctttttttgccaagaaaaaaaaaaaaagaagaaaggaagaagataactaaaaaatgtctgaagttacatgacattaagagtgtgagtcaaaagactcatcgtaaagtttaaaatcttcaacaatttcaaaagaattcaatctagctctttaatttttataagctaaatcccattgacataaatgatatttaatacttctcaattcccataattgtaactacaaattcaataatccattatgccaactttcatatataaccataatgttggtagctagtttacattgataactttgttccaaacttgttggatctaactctaatatttaattacttcatgtgacttacattggacttgaaaacttgatattattatcaattcctccttaaggtcattctggtaactatgattaagtttgttcggatgaataatgacatcgaaaggtatatgctggtttttattagatgatatgaaaataatagggaaaaaaagaaaaaaagaatcggatttggattggcaatcaagtgatccctatgagtgcttaagtgctcaaaaccactttacataattttttactaattttcttattcaattttttcatgatatttttccgctacaatttttaagattatgattacaccttatgttattgatttgatatatgttttttagagctagatgctattattctctaagagccccatcgtggattaagtttagtttgtggtgatttctttcattaaggaatacactctctctctctctctctctaattgggaaatatcatggtggatattgaagtgacatatgggagagtttgtggtgatttctttcattaaggaatactctctctctctctctctctaattgggaaacatcatcgatatgttggtggacattgaagtgacataaggggagatggatagatattgaagtgacatataggggagatatatccatctaccgaagtttaggttatttttaaaaaaattgatatttttgccattcacatatttaagagaataaaatataaaagagttaaatatcttaatcctcgtaaaattgaaatttcaacttttgacatgtcaaattacaaaattataaaacacattaaattttgatatgccttagaaaaaacatatttaattcatttttttaattttctttgttatcttattaattaagttagcaaattacattaaaaatcaaataacaatggatcaattaaaagatataacactatgttcggttgtctaagatttgaaagtaatgacaacaaaaagaaaacaaagaaaaaaataaaaagaaaaataaaaatacatttaaaattaataaattatttttacatcttaataaattatttttacataattctttattcatttcacttatttatactcttttatataaaaattaaatatttttaaaaatatataaattcttaattaattttaattatatttgatttttctttacacttttttagagttaattttgtttaccttctagagctttgggttaaatatatttagtcaccttgagtttaaaattttatcaaatatcttttttttcttttttttttgagttagatgtaggggcataacttgagcagataggccctactcaacctgatgtttgaataacttgaacaattattttcaatacttgagttgtgatagattaaatattttcaatttgtgctcaatttggatgactaaagattcaaacaactcaaacctaatccaaatcagatttaatatttttataatatttataatataaaatataaaatattattattacatatcatatcttgaaattttgttctattaactatttaaattttgacataaatatatgagtttattacactttacccctgtaacttataacttgtttcgcacattgtcccatcaagttcaaaattgagtaatgtaccttccatatttaataactgtatgtaatgtgcattttttttaaagacaacattattttttggacggaaaggtatgtgctctctgcatgattgagggcaaaagtgtcttttttcctttgcagctccctctctcgatcgttactcccctttggaaccccaaattgtagctcgcttctttttgaccccgttcttcttttcttctttcaaagcctcagaatgcgaatcccaaaaagttgctactgaagccccagataatttctcatgtttatagggtggaaatgtttctccaaatttccctcaaaaattgcctaaaaatttcctaaaaatttccccaaaaattcccccagttttctaaaacatgaaaacaaaaccccaacccttataaaggattaagggtacattattcgattttgtacttaaggggtcaatgtgtaaaatacgctttaagttgaggggtaaaatgtaattaactctaaatatatagaatttttttttaaaaaaaaaacattatttgggtaaattttgaattatgcaatcgattattttctcttgaatagcctcatgaatccgaactcaatctaattttttatcgtactttagatatatataactcatttgtcttgtctcggccacattgtcccaatcacattcatataagaaacttatgtttggggctggtaatattaaaatattatgagattggtaactcaacttttgattttttaatataactattctaatcccaaaaataatatagggttcatgcactttgagctgaactattttttaatgtccaatatgccatcttctttctgccaggtcaaactccaacatctcctgtgaaaaaaaaaagggtcttcttccatttccagcatcaccttcactagatgaccataactcatcccaaacttcttcacctccattcgcggactctccactgtcgagtcaactcgtttcatctcagtcaccgccgcggctcatcaccaacgacgaccgaggaaacctcgactctatgtaccgcatcaacgtctcccccgatctcgaaacggtgtcagagccacactgcagaaccagcatatcgggtttgagaatcggcgtctcggccgacaccattcagacggatacgcatttgtggtgcaaggcgaaccagacgtaggaggtgagaggaaccgctggagacaaacgacaccaaaattcctttcccatcttccactccctggttgtaggtctcgtcataggaaacaaacggctgagacttagtaaattgggagaggaagcatgctagttgtaggtgtgagaagttgcgggagagacatggacgaaggtgggggtgggggggagggagagagaaagagagagagagagagagagtcgaagaggttaggtttttttttggatttgggtttcaaaggggggcagagcagatggaaaattttaggcaaaacgttttatgttttttcagtttttttattttttactttttaaatatgtggaggttgacttgtaataagagagggcatattaggtattaaaaatagctcagcccaaagggcatggaacccaaaatattttgggttcaatattgaaaaattaaaaatggtaaaaatgagttttggttttcataatatttagttatcaccatcccaaaacctaactttcccaattttctctttcgtgctttctgttcacttgctccgcaatttacgcaaagactctcttaccattgactttattacaatttctacaagaaaattcgaacttcaagactaagcaaaaatcctaggaatcaagctggaagctacaatgctgtttcagggaagcacatgatatacaaatacaacccttataagttacagcttcggcactgaccaggagactgtaagtactggccatggatgcagaagaagaaaggctaagtaaaacccacatccatggccaattggtagagataaaccacaatcaggagaaacgaatacgccacgaagaaacaaaggcgcagaatctgacaactgggtttgcggtcgtccaagctttaattctcaacacaggggtgatcaataagccatccaacagatgcgaacactggtgggtgccattctctctctccttatccgtcggtgtgatttatttcatcaccatttttgaggtgttgaggaaatggtaccttctgctctaccatttggacgtcaactacctggagcaagaacttattctactggaaatgcatgggggtgctccgtcctggcgaaatgatcagccattgaagccagatgtggtgaagctcctgaggcgtaaagcttatatcacgatactgatttctgctatgctcgcctttcaagctctgatgctccacgcctgcagatcctttctttgcagctgaaagtaaccatcttcccctttaaataaatactagaataaaaaaaaaaattgttgtttattatgccaaatttctcgatgcctttgaagagtgtc

SEQ ID NO: 11582 - DNA, 3922 bp, Vitis vinifera
  Intron number 18 from transcript GSVIVT01023693001 (locus GSVIVG01023693001) derived from phytozome v7.0 (chr-ID chr 11; pos 9424813 to 9428734)
ctgtagtgctctaccatactggggattttaatcaggtaggtgcttaaaataacaaaatagatctcaggactagtgctatgctggtatacaatgcatttaaattttagtgcatctgatcactggtatgttcgacaaaacaataggcaaaagaagtacttggacagaaacacaacaatatttgatatacaaaattgggagcacttgttctggattttattgtcttctctttttgtactcttcatgacttagattacatcctacgaactattttgtgaactttcatatgaaagatcacctcaatcacagcactatatttatggatgtatatgtgtagcattatcatgtcaattcttcaaaatgcagaaagatttagtcaaaaacttatgaaaattttataaaactatgaattgctaaatttcaaagttcaaacttgtgatatgaaaaaagggttactgtctgtagatttaaagttcggaattctattgaaagatagattcaagaatttgaaacaaagatataaacatggatatagacatacaattattgatgtcactccctttttttaattagaaacaaataaattaataggtaaaaagaaggaccagatgcctctccaaaacattcaaaaaaacttattaaaaacataggaaaaagtccaatggactccaaaagataatcaagatgagctgcacatagacaaaagaaaatgtaaaatgccaacaagtaatctacatggctcagggaggtaaacattccctataagctttacttctcactttgctaaaagatccacatcatgcttgggaaagcatggaacccaagaaaaaaagcatcacgggtcttgaacaataccaataatttgatgaagccaactgccaaccatcattcttccatgggcttctctccttattagctgcccataaaaaatgactggcaaaatctcccgcaacctagagtttagagagactcagggtcttgcaaaggtgctagtttctaggtctcaagagcaaaaccttctccagtatgtttaagaaaaatttctcaacgccattccacgattatctctaggcattcctccggtctctagatgttctagattatctggcgtgaatccatcaaatttagctccaaagaaccctaggaggtggtctccacaaagtatgtgtcttcccaatcatcttattgaaccacaagctattttcaatattgaacaaagaactcaaatggtgtgcccttaaaggctttggtgaacaaaaccacaagaaggaaagaagtgtatcatgtcccaaacagttgcaaccaactgaaatgcaatattaagagtccatttgggagtgattctagtaagtacttttttagtctatagtgcttttatctaaagtgtttccattaaaaacactttgaaagagaatcgcttagcttttgaatataaataaaaaaagtgtttttgatagtgcttttggtagtatgttagtgaaggagaaaagtcagtaccattacatcccgaataataaaaaagtgattataggaagaagcacctaccaagtgattgtttaggaagcacttccaagtggttatctagattgataaaagtgattttcaaaaattcaccaagcgcctaatttctataaaaaagtgctttcaagcaatagcaagtgcttctagtcctttcaaaatcactcccaaactggctctaaatagatataactactcgtttggtttttgacctagatatgaggtgtcccccccttcccagtagaaaagaaaaataaataacactcatcataaatgattatataattgtaaaagttatagggtgtttttggtgatgattatataccttggcatacaacataaacttcatattaagctttcatgagctcaataattttcttggtttggtaaaaaagtcacttctatatttctcttatgttcttttattttatcatttgaatatggaaagaattctgattatttgagtctctaagttagaaaaaattgtaacgctatttggttattttaaatcttaaagatagaaaaacatacatggtttctgttctttagtgtttcgatgctgaaataggaggataaatttaataaacctggatgataataaaaaattctttctaaattgcttcttaagttaaaaagatgctatcatccctatcaactaaaagcatgtcttaggctaatcaggttcccaagtggatcctacttcagtttcatgccaaacaaagatgatttactgatattgtgtgcatctagagatcgtgtgggattggcatcaatatataaaatacaggttttgaaaaaactagtagtagggatgagggaatgtgcaaaatgagaaccaagagtgtttgtcttcctctcgagatcccagctaccaaacatttttctggcaattccctttcatttttgagaccaaaaagcaaacctagaattttaaggtggtgtttgtttttctatttgaattttgagtgggtttgaattttgtcctaaatttgaataaaaatcaatgcaaaaatgtcatttagacttcagatttaagataaaagtagattttttttaaactccttttgtgttaagaataaatatatgatgatatgacttgacttaaaataataacaatatggaaacatctggactctattaaggcttcagacaaaaaaacaattgggatgagtgttatttcaaatactatttgttaaaacaagagctgtttaccttgtggaagtttatatatatatatatatagatagatagatagatagatatacatattgtacctgagaaaacaatgtttaagggaaaaacaatcatagaaatgcttatatgtggtgaaagaaaaaggggggttagaaagtaccgcatttggagagaagatttaccccattgttattgaaacctaatagagctgcaacatgaatggattagttactcattgaaggaaatatcctgtttcttgactatgcacttgcatctccctttttttttttttgttcttctttgactgctattgcaacatgtggaaccaaccataagtgtttgaatattacatagaactaaagaagtatatagaaggaatataataaaatcaatcaagtggtcttacaatatgaatcaagaccagcaagcacttagccactaacccatctctgtgtcccatttatcaagcaaaatacccttcatcaaggtttgagtttcttctacacacggctctgggtctgatatcagctctccatggctccatgaatgaagccaaattcttgggattcagctgctataaacctctgtccaagactagttggtggcaaggaatacctaacccaatggaaatttagtttaaattcatcaacctgggagtaagcctccaaagttacccagaataggaaaggttatggataaacagaatagaaaatcaatgccaaaattatcagtaacacatttgtgtgtgattgaattgctgcatagtgtgcacacctaggagcagcataaacactgacagctcattcttggtcaccaacttaactctttttatgctcatccatattgccacttttctgtgatatggtgccatggataaggggtggaagggtatacgtatatgggggagcaaaaccttccaagatattcaccaaggtgcaggaattcataaaagaatattagagacaaaattacagagttttaattaagtgatatacaggagacagttctaacaggacctttaaatttaaaagtaaatttgagtgaacctattttttaaaatccacaacttcattctaaacacttcatttgaagaaagacattgtcctgggattttctatttgaaaaataatattcacattaaattgtttcatattattggccctatttatttttcgtaggcaaccatctatcagcaaaaagctttggatatcaa

SEQ ID NO: 11583 - DNA, 15927 bp, Vitis vinifera
  Intron number 4 from transcript GSVIVT01030703001 (locus G SVIVG01030703001) derived from phytozome v7.0 (chr-ID chr1 4; pos 13964207 to 13980133)
caataatctggtgggtattagaagctttcaataatacagtgctggttgttaacattggttatcttgttcctgattcccaatccaacagatttgcactggacttttatcctgcaccttgagatataagcttcttagtgggcatataataatattatactttgcaattcatttggcacgtgtgaagttaaaatacacactgttgagacctgatgcataaaattttagcttatgtactgtaaaaaattatagaagcatagttatatctgtcattttttgagtagtagtagtttctttcccttgcttttgttttttgtttatttatttatttttttaatttttatttatttatttatttttttttggggcatgaaagcttatgagcatgttagcatgagaggaaaaaaatgagtttctttgggattagtgttatcaaaggcgatcatcgcctaggtcgcctaggccactaggccaagtagggcagttaaaagttctctcttaaagactcaagcaaggaggcttaaaagaggcaaagcctaggctgttgccttgggacaaggtgcaaggcatagagaccgcctttgaccatgggttaaaattaaacatacttagattgtaatttaattcaatctaacattggattaaacaaagtatacgatgaaatattatattatcaatcatagtgataatgagagagagggctatcaatctagcctcaatggaagttatgataattttaatttcaatgatgattatgcccaaaacttcttttggatgttcattctcttattttgttttttatttcaatttttagatgtttggaaaattagaatatgcatttggactagattagatgaatttctttaaacaatatgatgtttcttatgatgacagtatgttatttaacacgttgaataattattattattttgttaattttataagacaccatgaggaatgaaaaattaatagtgttgattgttgaagatgatgcttatattggttaaatatcgagtagttaaatatattatcaccttactatagtcagaatatcgccttgtttttcgcctttcaccttaggttaaaaggagtcttatcgccttttactttgacatcattgtttgagatatctttaagtaggaatggggtttacttaatttacttagtattcgattggataggcaatattgaaaatttttagtaatatcaatgtagcagcacattaatgttcagatttctataccatgatacggtttatgcaactgtagcagtaaattaataaaggtttttctgattcttttttgattaagtttagttcatgtttagaaatagtttagttttatgggctaaaattaattgttacatggatctttagtctacaaaacaggttgtaaccacctctactaattagtgaatgactaatcaagaattgcagctttaagtgatgtcttaaaataatgattgccttcatttctctctctcaaggtttttttatttttttattttttattatttttattctcttttggttaggtttagttgatgtttagaaatagttttagtttatagactaaaattaattgtgttgactttgggatttttgagaatttctctcttgtattatttcaatagaattacaccaaatatatacaaattgtaagaggtcaaaatgaaaaaaaggaaggagcttatttctagcctaggatatctctatttgcaaaaaagaattggtcaactaaattaataaggaaaaactaaattcaaaaatatttcctaactagaaagtcttcatataggttgtctatattttccattactcccccacaagctggtgaataaatgttcttcatccctagcttgcttgtgatgttacagaataaatgttttgtaagtcccttagtcaatatatcatctaattggtcttttttgtggaaatataagggatgcaaactagcttactatccaatttttctttgatgaaatgtcgatccacctctatgtgtttagtacggtcatgctgaactggattgtgaactatgctaatggctgacttgttatcacactaaagtctcattgacccctcccacctaagtcggtaagtatgatttttatccaaagaagttcacatattccatgtgccatggattgaaattctacttctgcacttgatcttgctaccactgattgcttcttactccttaaagttaccaatttacctcttaagaaagtgtaataactagaggttaatcttcgatctgtaactgatctagcctaattggcatttgtatgtgcttcaagtttgattccttctacctttcaaaattgaatgcctttgcctggtgttgattttaaataatgaagaattttgaatactgcttctatatgtatctccttgagattatgcatgaatttactcactacagtcaccgcataagctatgtctagtctagtatgcaatgagtagatcaatttccccactaatcattgatatttctctcgatctattgacacatattctttatcttcatcaagtttgtgatttggctaaatcgggtgtctgttggtcttcatcccaacattcctatttctttgagaaggtcaagtgtatacttctgttgtgaaataactattccttcctttgaatgtgcaacctcgattcctaggaaatattttaaccttccaagatccttaatttcaaatgcatttgcaagtttcttctttagtttctccatttcctccaaatcatctcttgttactgcgatgtcataaacatataccatgagagttgttatccttcccttctttgaatgtctaatgaagagagtgtgatcccttggctttgactataacccatatttttcattgctttagcaaatctcccaaaccaagctctaagtgattgtttgagaccgtaaagagctttgtttagtctacaaactttctttctcatagagtcttttataaatcctggtggtagttccatatagagctcttcccccaaatctccatgcaagaaagcattctttacatcgaattgctgcaaaggccaatcaaaattagtagctagagataacaaaatacgaacaatattcatctttgccactagagcaaaagtttcctggtaatctatctcatgagtctgtgtataacccttagccaccaatctcaccttatatctttctaatgtcccatttgctctatgcttggtagtgaacacccatttacaccccacctttgtcttgcccttgggaagattaacaagttcccaagtattatttttcttcaatgctctcatttcttccaatatagctttcttccaattctcattcctaagtgcctttcgaacaggtttaggtatttttatagagctaagtttggaaacaaatgcttgatatgaggatgactagttgtcaaaagaaacaaagttgcttagtggatattgggtgcattgtcttttttcttttctaagggcaataggcaaatcaaagtcactaatgtcattagaggtagaggtagtttgattttcagtatctttatcagggtgaatggttggagcatgtagagatcttagagctggctgtatcctccttgaatagactttgagtggcattgaatgattctccccctctttcctttaaatgatagactcaagcttttctatggattcaagaggaacagattctagagtatcgtgaggtaaagattcaagtgaagaattggttttagaatgtggaagggttagatcaggaaaaaattcctgatcttctacaaagggcccccttgaagataagattgggagaagaaaggtagttgttcattaaaggtgatatccatagttacaaaaaacctttggtaattaggatgataacacttatatcccctttttgttggagaataaccaatgaatatacatttaagagcttggggatccaatttagttctatgatgtgtctgaatgtgaacaaacaccaccacacctgaatatttttagggctattctactaaaaccatcaaagtgtgagtagaattgagtgagaagatttacagtttctttaaaatcaaacaccttggaaggcaatctattgataagatgagtagtagttaaaaagtcctcccctcaatatgccttgggaacatgtaggacatttttcaaggttaaggatggtgaaatggaaatatttccttgaccaactatactgactaaagttccatcaacaatctttattttttggtttctaggacatggacaataagtggagaaggacttggagaaactggtcatatggtttgaagcccttgaatttatgatacaagtgcttgtatactgatttctagaggcacttagggcttgggaatacttacctgtttggcaaaatgactagaaccctctgatttttcaagctgtgaaatagactgcttcagcttattgatctcctctttgttgaaaatttctttagtagcagtattttccagttgttttgcttctacatcagcaacataactttggggcttgtaacctgaatttcctcccctgctgccattattttttccaaagaaatttgaaggcttgccatgtaacttctagcagttttccctggtgtgatgattcttgcggtagtagctacaccaaagtgagtccttttcacttggttttcctccctccatctttcctgaatttgcagcattggtagcaacaatagtggtagtcatgactctgtcattaacacttgacttaaaggtagacaatgcagaaccatccacagaatcaaaaagttttcagcattacatttctttgtccctcttctcctcttacaatagcaaatgcttcattcaatgaaggcaatggatctctcccaagaatctggaccctaacttgatcaaattcaccattcaaaccagccaaaaaatcaaagagtctctttctcaagaaactcttggtatattgttgcatctttactgcattccatcttaaaactttgataatgatacaactcaaggcataatccctttataacactgtaatactcagttatagatagggtaccttgtttggcatcatggatttttgtattgagttcataaatctgagcagcatcccacaccttggagtaggtttgatgaattgcatcccaaatttccttcgccatggagagaaacatgcaagtatgacttatttttacctgcatggagttccataaccaagacataatttgagaatcttcttcatcccaagagacaaaatttggatcatccttgtttattgtaggaccaagaagatgacttagcttcccctttcctttagtatacgttttcaccaattgagactagtgcaaataatttccaccattaagtttgaaggaagtagagacattctgatagtcattgggagttgtgctctgggttgtgaattggctggttatattagtactaatttcagaaatgtggagaagaaaaacagtttgtttggaagcatattagtatgaaagaaagttgagttaccaacaattaaggctggtttggagaaacaacaaataatagtaaaaaaaggctggtttggaattaaatgggtttctgcttaataatgaagactgagcaggcttatggttgagcaatgagggcccgatgttgggaagatgtatcttggcagagagagttttcctgctttgatactatgttgactttgggatttttgagaatttctctcttgtactatttcaatagaattacacctaatatatacaaattgtaagaggtcaaaaaatgaaaaaaaaaggagcttatttctagcctaggatatcgctatttacaaaaaagaattagtcaattaaactaataaggaaaaactaaattcaaaaatatttcctaggtggaaagtcttcgtataggttgcccatatttttccacaaattgttattcagatctgtaggctacaaaatcagttgtaacaatctcttctaaatagtaaatgactaatcaaattgcaactttaggcattacccacctctccccccccttccctctctctctctctctttctcttttgcttgctcactttctagctctcgccccccttctgcccatccctacctctcccctaactccccatccctctctccctctccttgactttctctctctctctctctctctctctccatctgtccatccctctctttcttctgactgtcaattttgtttcaaacaaatctatcataagaagatggccatataatcatgatattctactcccaagtactctcttattagtttctaattgaccctaaaccaagctacaatgcctagggctaatgcactcttcttctctagttcttttcttgtaattgctttgttattatacactatttttctgttttaagacaaataggttatttaattattgaaacaaccaaaacccctaattttacttctaaatcctcatccactaattcttttggttggcaaaatatataggagtctagaaaaaattgaatgcaacccaactatgcaagatgtttggaaaaactgccaaaggtcaaatacacaacaaaggtaaataaaaaggcattttatcaccttaaccgccaacaaatctattaatgaagtctaaaagagaaccaatatctctaataaaaaaaaaaaaaaaagagaaccaatatcacttcttgaagaatcatgagactaggtaaacaaagatttgacgaaaatatttttctttagcacctccaaactttccaaatccatagaatttttgattctgcaatgcaccaaatcaggtagagataggctagcttccagattttcttatgattccttcctactaacccccataccaacctgactatttatccattccaaaacgaggaaacacccaaaaaaccataaataaggtataatgaaatgatatgtttattgatatgttttgtggctatgaaggtttcctagggagagttttgctctgtggcattaggtcattctaagcatacatgagacacatactaatggatgagatgccaacactatagtcaagtggtcacatcattgcccttggaaggctattgcacaggtttttcaagactttaccaggtacactcgatttgtggtgggagatgaggagagaattcgtttatgggaagacttgtggtgggaggaccaacctttgggttctcaatttctaagactattcaaaatagtcatagttaaaaatcttcccatttcttttattcttgggtttacttttcccttttcttggaactttaatttcctccgtaatctttctgattttgagatagaagaactagaaaaacccatgttctctcttgctttaactccatccgtttcaaatgcaagagcatggtctttatcttctttagggttatttatagtcaagtttttctttttagtcttgtcccacctttctgattcaattccttccttctctactaattttgtttggaagtctcaagtcccttttaaggtcaagtcctttgcttggttagtgacacacaagatggtaaacactaatcacattctatagttgagaccctacaaagcctttagtcttgatatttgtaagttgtgtatggagcatggataatcagtagatcatttcttcttatattgcccttagacgatggggctgtggcacaaattatttagaatgaccaagatggattgggttcccttgaggagcatttgtgacatgatgactattacttataagggattaggaagccctaggagaggcctagtattgtggcaaattgcttgcgttgctttaatttgggttgtgtggtgggaaagaaatgctaggattttcgaggacaaagcaaggactttagaggttctttgggatactatttacttccttaattctttttgggcctcttgcaccacatcttttaagggcatttcccttaatgtttagtggtgtatagttccaagggtgggttagtaaggagaggttgccttttgtaattaccttatggcttattgctttttgtatttcgtatgtttagcttttgtttgtgggaggattctccatccttctattgtacttcttaattcctaattcaatatttctcattgttgttttaaaaaaaaagatatgtttattggctcttcaatatgtttccatacaaaaatccaaccccactttgtgaactaattagttctaaaggttttctccaaagttcttttcaaggaaagaaactgatgttaaatagagtttttgtacgccaagcctccttattaggaaatgagtaggacatccttgggttcaaggaattccagaatgatttaatatagaaccagccttttttttttttctaacccccacgcctggttgtcaggacaattgattgtgcacaacaaaggaattattgcaccatcatagctccttttcatggaatcttcttcgaaaaactgagtttgaacgaccctaatcactgacccttgcttataggtaagccacccagatatgtgtaagcatcattgcatgcttacccaaatgggccacaccccttctcgttggaagccaaacatctttccacctcctgaaattaaatccaaaatgactttctaactgcactgccacctcatgaatagcacccggttgaaatatcttatatctatatgccttttcttttcttagatatgcttgaattcaccttaattttctccttttgttaatatttcttatgggaggttgtgagaagaatgatttgagtgatttgatgaacctgggaagcatttttcatttgataaatagaaatgaatttaccttcatttcctcctttctttagaatatttcttgtgggaagttgtgactagaatgatttgagcgacttggttaacctgggaagcatttttcatttgataaataagtatgccattgtattgtagagccaaagataaaagggattcatgagatatgtaatagaaagaataaaataggttgtatgagtgatttaactttgtttttttccttcaaaataaaggaattcattcaatcagagcatcatatagaatattgatcaaatttttttgaagaggaaaaccttcgttttttgatctatttaattgctggtgtgttcagactaagttatggaaaaaccttattctagatttgttaaaatcacctcaatagagcttaaagtccagattgaattgcttgggctgaagcatatggttgagcaaatcttataattgttctctagtatgaatgaagttgttggtataatgtcaactaatatttagattatgctttcgtttctaatttcatattgtaggttgcagggagaaattttctgttgaagtgcttcatattgagagtagtgactaggtttctggtatcttttggtatgatcttgttcatataatttaggttaaattttttcattatgatgggcaggaaaactttcatatttggctgtttagtctctggtctattcaaaccaaatggtggagaaacctattgcagttctgttaaaagtcatctccacagagcttaatctccatgactaaatacttggtttgaggaaaatttagaataattctccagcatgataggaggttatgttgcagtgtcaagtagttaatagtttcttctttcattcatgttgcatgatgctgggagaaagttttttgtaagtgctcttcattgtgaatggtgactaggttcctgctatcttctgatatgacattattcatatggtttcaaaatattaagttgtttgtcctacaatagtttaactacttaagtccatgtcaatctttttgttttgtcattgtcatctttgtttgatgattgtgagcttcaagtttggattataatttggtggctgttgaataaatcatgtaattctcaaggcaaattagaatcaagaatcagataaaaatctagcatcaaggagaggtgagtaggctcctctcaaatagtagtgcaacaggatcgctccacacaacattttggttgggagtttgggttagattttgttataaactggtttgtactgatcagaaatttggtaaaagattattgaggaatttttttttttttgataggaaacgccacaaagatatattaatataataagaagtacaagaagaaggatgagaaatcctccccccaaagacaactaaaatacaagaaaatacacttaaaacaaacgacctcccactaaggaccaatccctatggagaacacaccgctttccaatccagttgaatcacattaaggggaatccccttaaatgccttggaacaaaaagcccaaagggaagcaaggaaaacaatagagtcccaaaggaaccctgaattccttgctttatcctaaaaaatccttgcgtttctttcccaccacacaacccgaattagagctatgctcgcagcttgtcacaaaactatccctctcttagaattactgaagcctttaaatttgatgaacatcatgtcatatatgctccttgggggaacccaatccatctcagctaactgaaataacctgtgccacaacccaatcgtcaaggagcaatgaagaaaaagatgatctgctgattccccgtgcttcatgcacaggatacaaatatcaggactaagggctttgtagggtcttctcacttgtaacatatcattagtattcaccttcttgtgtgccactaaccagacaaaggacttcactttgaaaggaacttgagaattccacacgaactttgaaggaaagttctgaggagatccagaagattgagataatgctagaaaaaaggatttgactgagaagagccctgaagaggataatggccataatctggcatctgggaccgaaggagagagatacaaatcatcgatagaccgcatgaggccttctaagtcctcaatctcagaatctgtcaggttacggcggaaattcaaattccacaagaaaggccgagaaggaccaagaactgaagaaatagaaatgtttttatccactactactctaaatagtcttggatattggattcccaaaggttggtccccccaccacaaatcttcccagaaccgaattctttccccgtttcctaccacataccgagtaatcaaagaaaacccctgaaagacttgagcaatagccttccaaggacagcgatgtgaccatcttactaaagtgttagcatcccaaccattagagtgtgaaccataaatgcttaagatgacctgataccaaagagctgatccctctctaggatacctccataaccatttccctagaagagcgagattcctccaagaaatattccccaaacccaaaccccctattgtcttcggtttgcacacaacatcccacctcactaaatgatcccttttgccttccccaacccctgaccataaaaaatccctttgcaacctctctatttttgcagccactgaagcgggaattttaaataaggataagaagtaacttggcaaatgggtaagacaagattggataagagttatcctccccccgaaggataagtaggccttttgccacccatctaatctacttgagattctctcaaccactgggtcccaaaatccacacgccttaggattcccgcccaaagggagacccagatagagaataggccatccagacgccttacaatcaagcatctcagccaatcttgaaagaagagcctgatcaagattgatgccataaatactactcttgttaagattgaccttgagcccagaaatgtgcccaaacactagcaaaagactcttcagagtctgcaactcttcctcccttgagttagaaaagaatatggtgtcatccgcaaattgcaaatgggacaccctagttctatttctccccaccctgaaaccctccatcatatttctttccttagctctcataatcatcctgctcagtacgtctgcgactaaagtaaacaaaaaaggggataaagggtcaccttgtcttaatccccttaatgccttaacccaccctttagcactaccattcaccaagattgcataagatactgaagataaacatccactcttccatttcctccatctaggactgaaccccttcttttctaacacatgatccaaaaaatcccacttcacgtgatcgtatgccttttcaaagtctattttgaatacgacgccttcctcccctgaccttcttctctcgtccactatctcattcgccataagaaccgcatccaatatttgtctcccttgaacaaaagcgccttgagtatagtggatggtctcatgtagaacccctcttagacgcccagagagcactttggctattatcttgtagagactagtgatcaaactaatgggtctaaaatctgatattctctttgacaaactctttttgggtattagaacaatgaaagaggcattagtgctttggttgataattccgctcctgtgaaattcagcgaacactctcaccaaatcctccttaatcacatcccaacactcttggaatacggcaatagtaaagccatctggccccggagccttgtccctatccaactggaaaatggccttagaaatctcttcttcggtgaaaggggagtctaaccttaacgcactctcttccgaaataggggaccaatctaatccttcaacaccccaagactctcctgtcggatttgtgtaaagcttctcaaagtaatgtaagatctcctctgtgattgaggaattgagctttactttaagaatgtttaatgatttgttgtatttcatgggcagggaggatcaagattgagagaaatttcctgttttattttatttttcttttttgtgtgtgcgcttttctttttttactacaaaagggtaatggggttgggaatcagaatatctcagttctcaatagggccttgcttggaaagaggctttgaagctttgaagtttactcggttcatggtaggagatggggaaagaattcagttctgggaagacttgtggtggggggatcaacctctgggggtccgttatccaagactacttagagtagtcacggataaaaacattcctatttcttcaattcttggatccactcgccccttctcttggaactttaacttccgccgtaacctttctgattccgagatagaagatttagaaagtctcatgcggtctcttgatcttctacatttatcacctttggttctagatatgagggtctttatctccttcaagagttttcacagtcaaatctttttttcttgccttatcccaattttctggtttgccttcagttttccttaccaagttagtctggaattcttaagtccctttcaaaatcaagtcctttgtctggttagtggctcacaagaaggtaaatactaacgacatgctacagttgagaagaccctacaaagcacttagtcccgacatttgcatgatgtgcatgaagcatggagaaacagtagatcatctttttcttcattgctctttgacgatggggttgtggcacaaattatttcaattaacaaagatagattgggtccctcctaggagcatctttgacatgctatctaccaattttaatggttttggatcttctaagagagggattgttttatggcaagctgcgtgcatcgctttaatatgggtggtgtggcgggaaagaaatgtaaggattttttaggataaagcaaggaattcagagaacctttgggacatgattcatttccttgcttctctttgggctttttgttctaaggtttttaagaggattccccttaatgtgatacatcttgattggttagcggtgtgtaactccaatgggttggcctaacctagagcagttgtttgtttctactttgtattttctcgcatttgtttccttgtagttttgtttttctttggtgggaggattccttatccttctcttgtacttcctttttatcaatatattcctttgtcgtttcctataaaaaaaaagaatatgtagagagtgatttgggataaatttggggaggtttgtggagtcagtttttgttgagcagtcagaaaagagtgagaaacttttcaggcttccatgaatgtcattgtgggagatgctagtggtactaagctctagcttgatgaaagtgtagggagccatctttatgcatatctctcctagatttgcttgcaattgctttttttgaggagtggttgggtgtggctggggtgggatgttagggtcgctgtctctgcattttttaggagaatttccagtatagggagcttggggcagtgcaggctttcctttagtctattcagccagtggctcaaaagaaggctgcttgaagaaattgatgttaaggtaagtggcaaacagtactttctctgtcaaattgtgtttgtctaagtttgaggatgtcagattcttttcctgctaaggaggcaagctcccttggatccaataggagtcagcacttttgtttggggggtggtatggaagaaagtcctcactatgaatcagcttatgaaaaatagtcttttgcccatttgaattgccttcacaagcaggttagggagttggctaatcatattcttattcactatgacttggtgtggagtttgtgggccatgtactcttggtatttcacattgcttgggtgcttccttggtcattgaagtagttgctgttggcttggcatgggagttttcgttgggagttaaaagagtttttggaggcttgtccctcttcacttgatttggtacatttagttagagcagggtagttgattttttttgaggatgtgagggtacagaagtgagtgaaaagttcattttattattactatgcattcttggtctactctctatttggcccttgattatgggcttttacttgattccattgattgttttggaaggtttaccttatggttctttctttgcaaacatttggtggtttatgtatacttcttgcatttgtggcccccaatttcttctaggcactttttgtaagtctttatttgtctgtgaaagaaaaaaaaaaaaatatgaaacaaaaagagactaagagaaagaaagaatatgaaagaaatgtagctgtcatttttcttttcttcctgttcgacaatttgataaagtttgtcgtttgtgactgtttccatagttttaatgtcattcataatttttttaattgataaaaatattgaagtttcagaattgtgcaaaattggaaccagtcccattcttgaatacattttatgatgacctgtgatatttatctgcatgtagttcatgaaattctcacatttctgaacgctaaagatgaggataagagtgctgatactccctggtagacatgcagtctgcaaccattgtctttctttggatttagcatctatgtttcatattaaggggattaggtcaaaatttattaccatacaacctggttgctgctatttaatgttatggtgtataatttttatctttgatagccttgaactttctttgtatgcactcaaaggtatgcgtattgtcttttttttatttttttattttttttattagaaagatatgcatattgtctttgctgtctcaatttgaaaatgatccttactaattgtatattaatgccttaaaacctctacttgatgattgaggagcatgcttagagatccatattattcccaggaagcatcttgtattgcttgtctaacctacaccatactaaaggaattaatactgtgaatcttataaactactgaagaagtaaacatgaaaaaaagggtaactttttatttaatagaatgtatgttgattgttaactctttaatgtctttaagaagtcattgtgttgtaggacaagaaaattttgccttttttcttccctttccttctttttcttgaatgcaccttgaaggatgactcatctccatcacattgttttttgttcttaacatttcaggcagaactatatagagttaaaaagttatttgataa

SEQ ID NO: 11584 - DNA, 3742 bp, Vitis vinifera
  Intron number 16 from transcript GSVIVT01034015001 (locus GSVIVG01034015001) derived from phytozome v7.0 (chr-ID chr 8; pos 15861380 to 15865121)
gaagggaaccgggtttcatttaaaggttaatttagatttcttcaattccttgggttgatatctttctttgcttgttgacaatataatctgcattgatgcactcctgcattatgaatttgaacacttggaactctataggcacattcaagcacacttgtggcatgactctaagagattggttccatatttaaggacatgatccttttcttagagaaaaaactacggtgactataacgaggcttctagatgagtcgtatatcttattgttatttgatgtcttgaagtgttataataagcctagatgaaattttttagggttatttgggtagataggacaaaataatcatcaaattgtaagaatgacctccctccatagttttaatgaaagatgccccatttttgaccctttacccttttaatttgtttcccttcaaaagcacgtcttcccacttattttgatcatttcatttttttccttctcatttatctttcaagcttttttgttactttccctcgaatgtggatcctatcatactcccctctcactacatgacttcatctctcgtgtgattttgaactttccttctttctcatatcatcaacatccactatatttttacttagaaaaaaaaacatccattagatttttaatttactttatttttattattaatttctcatgaagggtgtgcaccttaactgcacaggagttaagtttggtttacaaaaaaaacttaaataaggttaaattttcgatcataatgataatctaaaaactataccatagttaagttttatttagaaaaagcttaattgatgttaaatttttgtttcatctatagaaaacttgattataatgacctgagttgtaatatgattaagtttcatttaaaaagaacttaaatgaggtaaagttttctttttatttacaaatcttaattaaaatgttcatatatttgatcttattttcaaaacctaataaaaacccaaattctaataaaaaataactgccaaaatcataacaaaaaacaaaacaacaaaaatctcaataaataaataaataaataaaggtaaaaaacctaatgtttttagaaccggaccggtcattgaaccagaaaatttaccggttcactggttggatcggcggtcgaaccggtgacatcataaatatataatttaaaaattattaaaatttaaataattataaaatgaaaataataatttatatattatttaaaaattaaaattttatttgaaaattagaaaattagtttcaaattaattatttaaatttaaatcataatttaaatttaaattttaaaaatttaaaattcattttaaaataaaaaactcattttaaaatcaagaatttatttaaaattgtaatattttcattaatttaaattaaaagcataagttttaaatatcacaaaataaaaaaataataaatataaaaggaaataaatagtaatgagataaggtaaaaaataattttaaaaaaaatctggaagaactgaagaagataggagaagagcgggcagggttctagtggggttttggggggtgggtttccacttccgacgccgggtggggggtttccgacaggcaaaaaggggaaaacttttcagctttttccagcgcaatgggttccagcacaggggaggggggtggtttcagcgcggaggggttccggcgagcaagaagaatttttccagcgtgcgcgcaagcaggaggtggtggtgttccagcagggttgcgggctggctttgcaagggtgatggggtctctgctggcaaggcttttctggcgcagggacaggtagggttccagcagggttggcgggaaggtttcgacggagaagaagagcttttccagtggggtgactttgcaaggggggtgggggaaacaatgacaatggaggaaacaaaaaataaaattgaaccggatggttcatacggaaccgtacagttcgctggtcgggccaccggtttaactggtccaattccggcctgaccattttctggcccaattgaccggactggactggactggccttaaaaaccccaacaaaaaaccaccacccccccctaaaaaaaaaaaaaaaaccagggtaaaaaaccttatcagaaacatctacaaaccctaaatgcaaaaaatctcaactaaaagtaattgcaaatatccccaacaaagaacaatagtaaaaacccccgacaaaaagctacaaaaaaaatggagaatgacaaacttgaagaagaatgaaagatgaaagaatttttgcagctgattttatcccttgatggaagaattattgtagcggatctttatcccttgagggagcgaactgagagggagagagagagctaggtcaaaatgggagggaaatgaattggcaattagggatgatgttgttttagctgaaataaagaagggcaaaagtgtcaaaaataggttagttaaaaaaaaaaaaaaaagacaatgggaggttgtttttccaattttaaaactattttaggtcttttaaccaaataactcagaaattttttgaggtttccatttttcttctcctggtatttgattataccattaaaatatgatgcacaccccttttgcttggcgctgtttgtatcctctgtttgtctatataaaaaaatagtactcctgaagatagaaaataatctgcaacaaaggtgatcgtcccacataaaattttgatgagggggtttctctcattgggtaggcattgcatagtaaaaatttatcacattggcaatgacaccacattgaaaagagaaagttaatgatgccctttcttccaagtggcgccttaggaaaccaccttaatggccttgaggtagagccaaccttgaattgtgggttctattattgtgcatatccatgcctagtgcttgcaatacatttttgggctggcttcttaggttacagttgttcattcctactatattctaaagaatttaaggcaagcatatattcaatgtcccattgcatcctggcaatgtggcttatgatgtgattataggatacaactctatggagctgaattgcatgttgtcttgtgtatcctatcccagtaccttgggatttcaggtttaagttttattgctaccatgtcctccaatttcctgctgtatcagtgcctagaaaatgtttaaaagcaacctttgcattcagattctcactgtgaagtgtcaaccaaattgaatatgctattatgcatgcatagatgtaatagcagttcctactatgtgaagaaatgacttgaatttgtgaaatcaatatgattgaactgttataatattttattatgtagaacatttgaattgagtctttctcttagcatctgggatacttttaatactctctcctatcagtggatctccttgttaagggggccgtgtctctctatgagatttcttgaaaattattacaattttcataactttgaacaaataatatttgttggcgacacaaccttgagactgtcaagagcacatcaccagtttggggatgcattttaactggagagaatttcgtaagaaatactttgacccattctaatttcatttggatgttgaagttccaatatttctttgcgtttggaaatacctctggacgtgccgcataattgtgttattctttctaggctgtttctcatcttattaattgagatttgtaggcttgattctgattacttacgctccatttgtataacaacttgcag

SEQ ID NO: 11585 - DNA, 812 bp, Vitis vinifera
  Intron number 6 from transcript GSVIVT01009586001 (locus G SVIVG01009586001) derived from phytozome v7.0 (chr-ID chr1 8; pos 9676453 to 9677264)
ttggacagtaacttagattctggtgagcattgttatgcaaacccttttattttgtcctgccaatttatatggatttgaaaatttcaattttggttaacttcagcataaagtgtgaaaccctgttgcttgctagatatcatggggagaaattggagaccaagcatcctggacaataatagagcttcttacttaattttcaatctattattgttggttaactaatggtatatggcacactgagcctgaatctttattactatttatcatgggtttaacttgttcaactgatttatttgaaagttggtctctggttattacaataaaaaaacacttggaaaatagccagagtaaaatggtggcaggtatagacttacatttgcctcttttcatgctacataaaagtaggaagatgtgtacaattcttatcatcaaacatcctttttcttgatctgtgaacacaacaatgattggggttttggagtgccatttcctggaactatcttcataaacaccagttagaattggcacaatttggagtgaacttctaatatggtaagttcgagtaatggctgatttcagattggcttaattaagggataaagaatgagagaagaagatgtttatgttgggattctgcccaattttataatttatcctaatggtgcagaaattccttgtatttcatttgtaggtttgattgagtgaagtttttatttttaacttacatataatgaattatgatcattcttattttctatttttctggtgaatttggttttcatgtgacccagaaatgtttgtgcaggtggcgg

SEQ ID NO: 11586 - DNA, 5091 bp, Vitis vinifera
  Intron number 3 from transcript GSVIVT01025837001 (locus G SVIVG01025837001) derived from phytozome v7.0 (chr-ID chr8 ; pos 11370389 to 11375479 reverse strand)
tggtgggacctttgttggtaaaaagaggaagaaggcttggaaggttgctttgttgtgtctattttggactttatggtgggagaagaataggagagctttagataactatgaaagcatggaccaagctattaaaaattctttcttgtatctattttgggattgggttcagttgtatattgaggatggttcattatcattgttagattttttggattgggtagactctcgttagggctcggtagtgggtttttgtatcttcatgcctttttgtctttggttttctttgtatacagcttttatactttctttctcttaatactaatcttatttactcataaaaaaaacaaaaaaaagttgatcccatgtgattttctcaggaactagttaaattgagatattttttggtgtgaatgagtttcactagataaatcagaataatataaattgataggtatagctcttatcacagatgatatggtgattttggcttggttcctagtgtactgattatgttttattttatggagttatacaataaagcaatttccatttatatgtgtttggttacatgaaatcatggccttatggaaagtggaaatggacgtggaatttaacttctgctgaagttcattggtgtttcgggaatcagaattccaattcaaacccaattttgtgttagggtttctttgtgagagtggaactatccactccttctcaatcagggaaatgatgtgcaacttagtaaagggtattgctcttagcgtaggcatcaaaatgcttaagtagcctgagacaatggtcccactagtgcctatgcactaggcaactaggcattttctgaaagtacatttcatgtatgatatgtcatacgtgtagttttacacatcatacttatacaactgcatcaattattaattattcatttctgcgatttttttgtccataacaaaagtactggaaataattctttagaagaaactatttcatatagaagtttctttacctacaagtacaagcaacacaagtaggaaaaaaattagggttagtaaattgtcaagcatgaatccagtaattattttatcctaaacaatttactttacttactatcaaatcctggttggtggttatggtaacaacattggacatactatatacatgtagggatggggagggtttgtgagaggttccaggttcaagtcccaatggggcaaaaaattacctataaaaaaaaaaatactacatacatgtagggttttgaacatggttccactgtgtagttttcacaattctttatttgattttcatatttaggacatatattttaaaaaataagaggcataaatgcattgaatctaattcttgactgagatagggacaagaaagacaaataaatagtgaataaatgaaaaatgccaaaactagggccaccaacatgaaagacatttaataatttataaaaaatattgccattaattagtataattggattcattacatataatattttctggtgcaatgttgaaaggggaggatatgtgtgggcatagatgcatggaatgtacatcataaaagatatgggcacaagaaagaaaaatatataatcaataaatgaaaatgccaaaattagggccactgatgtgaaagccatttaataatttgtcaaaaatagtgctgataataagttcaattagattcagaacataatattttctggtccaatgttgaaaggagaaacatgagtgatagatgggaagtgaatatagagagagaaagtgagagagagatggaaaaagctgaaactggtgccaccacttcgaaaggcatttagtaatttgtcaaaaatgtctcttagaattaggtcagagtcgattacaaaatcctttttggatttggtgcaataatgaaaaggaatacataactgatataagggaagtgaacatgcacacacacacacacacacacacacacataggggggccgagagagacgcttatcagaaaagattgcttagctgtagttcctttgcggctaagtagatctattcacaaagcgttttcttcaaggttcaatatagagacgattgctagaaaacattgcttagtggtgtttttttgaggctaattagatcaactcaaaaacattttcattgaggctcagtagattgattccaaacaagaatcttttttcttgatcaatgttctcaagttgttgtggaaaaactcaaactgctagggaaggtaattttatgtctatatcctaaaatctttctgggcactaaattgactcttagtctgtaacatgtgagttttcacttgttcctttgcttcttcaagaattttgcaacctttgtaccgatctttgttatatctgtcttttttttaaatgatctagtatttgctttcagtaaatttatgaatcaattggccaaactgatttcatttctttcatggagtagtttggtttgtagaaagaaagagatacgagattcttctttttgagtcaaggcatcaatggaagaatatgaataatttcattaattctctagcaaattatagatatatttatttcatttcttatgtgctctttccaattatctatcaagttctggatgtttgcttgtggaaacttcagtggtgctgcctagaacataggagaacctagtttagtgcaggtaactaggcttgtaatttcccttggatgtagaactattgagattgtgggccctggctaagtttgataacattgtttgacatagggtcttgcctgtcttggttaacaagggttttgctgagcttttgttattgtcctgtgcaagtgttcttgtactttgggaaagtggacttctgagaatttggtggtggttatttcttgtcgaggggtatttttttggggtgaagattcttgatcttttgtgtaggaactttgtggttgaggtgctttgttttagataatttttcactggattttggtttctagtatttttgttgaatttttttcccttgagaaaatctcccaatttgtaaaccctaacatctttcttgaatcatgacaaatggaatgccttaagcttttagccaccatatttaatcagttatgaataccaaaattgaattcttgattttcagttggctttgaaaataacatttcgattgttgaatattaactactattgaggttggggactcatcattgtctaatcatgatctctcaggaaaagctctgaatgccttattctttatcaaattgatatggctggtttgtgaattaagttaagtaagattgtcccacaaagcttatggttctaatgaccttcatatagctcatgtctagaccattgactacctaagctttggtcaggtgccatccttctgtacattaattgtaaatatttccttcatggataagctagtctattttaattttgaatttttgcacattctatttatgcatcttctcaaatatacatcattattaatagatttggacactcaaaagtttttccagatttctcttatccataatgctgttccgtcactcgttctatggtcctacttgggagtgtatttcatggaaaccttatagtacattcctatccacttcgatatctttctctattgctgtttaactgtattttgtttgtgttgggaccttcctctttaaggacattttgtccttctgtgtgccactttcttgttttagttcaatgaagtgattgttgcttataaaactgagcatgccaatcagcagtaatcatatatgtaatagttcctgaatattgccttttaaagttttcaccggcttttcaagtatgttctaaattttcttctagtctgcattaggcggttaatattttgggaatctacttggttatattattaaacctaaatctggacatttttattttgctggattcctaggagacctttctgcgataattcatgaaatgaactgatatgattgcttgtataattcaaatatttcaatgtctgtgtatatccttcaacacatcttctccttttatcttcccttgtcgttttcgtatctttgttcccaaccccccaccccccttctatttctcattttttattatttattatcctcctgttcaaatatcacagtgtctgtatatatcctacaaacacccaatgatgcacctaggagtctagtggtgcgacagttgagggggtgaggatcgagagtttttggttcgatttgggaattattgtttttaaaaacaattttctgttttttagaacagaaaacaaattttttactcaaaacagttttttgagaatttgttacagaaaaaggttgtttttttagaacaattttaaagtgtttttttaaaaacaattttaaggctttttagatgtctttgtaaagtagtctaaaaataattgaaaatatggagaatacttttgagaacttctccattgtgcataagtgcaagataataaaccaagaaaagtgtttttcatattggggttcctaaacagaattttgttattgaaaccatgaaaaatctatttttaagagcagttttaaaaaattgttcttttgaaaactgtttttgaaaatattgccaaacaaacccttcacttttgttctttcggttggttggaggtgcctatatttacttgcaggattttgtctgctggaaggagggcttggaacactttaatcaaagagtcacttaagaacatttttgttatgtttttgttctctgcatgcagctctcaaggaatagtctgaaccatgattttttgggagagaggttatacctcttatgaggattgccctctttctgcccttcactaaggtcttctatcccattttgtattagactttatgctctcttcttattacactattgatattggtccatgtatctgattattgctaatgatctgaagttacctgcttaccttaagtaggtgctgcattttatttctaatgttttgttatgttgctgtatgcccattaagttttgtagatataattgaagagaattaattccaagagacttaactattttacaaaaattgatgcttggtaggtggatcaccagaccaggaatcagtaggttctggg

SEQ ID NO: 11587 - DNA, 4724 bp, Vitis vinifera
  Intron number 1 from transcript GSVIVT01028157001 (locus G SVIVG01028157001) derived from phytozome v7.0 (chr-ID chr7 ; pos 4291905 to 4296628 reverse strand)
gggtggacggcaagtggatcagacccgaaaagcaggtatcatttgttgttcatctgttggattttggggtgtttgggggattagggttttatgttttgtgatcaccccggggacgtcgttgttttaatggggattttttggcgttcgatagtttagttgagcgtatacagaatatattttttaataattatttatatgtccttggacattgttttgaaatgctatttgtttcttagctttgtgcaaattgaatggtttgattacttttattggaatcaaattttttttagggttctgaggttttaggatcttgtgatcaatgggaaaaaagttgtttctatgagtattatctgctggtttgatattattgtgatgctgatatggtatattcttaacttttgccagttctagctctggttaaacttgttagtgactgttttgttttaatcatatttatttctgaattatcttcttcaatgcttctatagtttgacctatttaattactgcatgcttctgtgaccattgaaattgaattgtttgattgcattttgacggaaatgggaatttttttttttaaaggatgttgagattttagaggtttttggtcagtggtaattgaaataatttagttaagcagctagggcatgttcgtaattttctgaagcattaaatttgtttaatcttataaaggatgcttttggtttaattacttttaatgtgaattgtcttttgcagtgtttttttcttctcaattttgtatttgctgcatgttttggtgtttgatggaagaaattgaactgttggtttcagttttagtggaaactgaatggcttttaaagttttgaggttttagggtttctaattggttaatggagaaaagtttacccatcaaaaaaaaaaaaaatgattaatgtagaaaagttgtttacatgggtgttgtttgtagttgcaataacttagtgaacatatgtgttatgccctttcattcttatcatcaatgacaacaaaaatgtaatagaaatggaagtttaatattagtgtagcatttttccctaataaaaaaattaaaaaaaaaattgtggcatttttctggaaaaatatggtaagatttgacagctaataaaacaaaaaaattacttcacgaatcgcactcagatcctatttgcctacttggccaaaaaagacaaaaacaatctagaacctcccatttgcctaacctaaaaaaaccctagggttttagaaatcaatgtgtgaagagtgatagcgataatggagagtggcgctgagatttttaggcaaggctcattggttgaagtcagaatcaataatgatggctgcagaggctcttggtatgtggcaaaaattatcatggcggagaaatctagggcattggtggagtatcaagaccttttggatggcaaggatggatcaaggaggttgagagaggtggtggatactttgttcctcaggccacttccgccattagagaccaatgcatcatttggtgaatatgatattgtggatacattttaccatgatggttggtgcactggggtgatcatatgcattaaggactcaaaatatacggttttcttctcaaacaacgagatccaggtcgatcgatcagatttgcgattgcacaaagagtgggtcaatggcaagtgggtacaacctagaaaggaggtatctttgttcttgatatggatttgtagtcttttagggctttcgggtgttagggctttgagcttgatgaaaaaaagttgttgttgttttttttttttttttgaggattcaatgatttagtgaatcaaataggatatatttttactttctaggtctgaaaaatggttaatcttgttatggattgatttcatataaactgttttgttcactaccattctgttctttgtgattgcatttattggaagttgaatggcttctttttagggttttgggttcatatacgtcttaagtatatttatatgtaaattgtcttgttcaattctattgttttgtcaaatttgcatctcttaactatttaattactgcatgtttctgtgttccattgaaattgaatggcttgaacccattttaatgaaaattgaagagtttttagggttttaggtttagaattgtgataaatggtaaaaggttattgtcttcatgggtttatttgcaggttcaataatttagtgaaagacatgaggttaacttggcttaatcttgttatggactatcttgatttaattttatttccatatgaattgtgttctttaatgttgttctttttcccaggtttgtagtgttcagttcttgtaaggaatattaaatggatttttggggttttggaattttcttcagtgttgttctttctcccaggtttttagtattcagttcttttaaaggaaattgaatggatttttggagttttagggtttttaaggcttggtgataaaggaaaaaattgttgttttcatcggtcttattgcatgttcaataatttagtagtgaaacatgtaccatatactcttattttgcttgacttcaactttgattcttgttatttaaccatatttccttgtgaattgtctttttcaatatagcatattgagattaggggactttctttgggaaggtggggctttggagaaaaagctttatttggttagttggtcgattgtttgcacagataagagtaagagaaaaggagaggggggggggaattaggactctctctctcttttgaatcagcccttcttggtaagtggtgttggatatacgtttctaatgaggatttttttggaagcaaattatcaaggggaagtatgggaaggaaggagtgggttggcagccttgtgaagttaagggtggttgtagggttggtgtttggaaaggtatcaaggaggggtgggatctcttcttcaatagaatcccttttgaagtgggtaatgacagaagggtaatgttttggatgaacaaatagtgtggggaggagcccttgtgtatgtccttcctttctttgtatgctttggctctatcaaaggaggcttgggtggtggatttttagggtgatacaagaggaatgaaacattggtccctgcacttcactaggcattttaatgactgggagttggagattgttgagacttttttctccatgctgagggagagtttggttaagagggacgatagcaacaagggggtttggaaagatgataaaaagggattgttttctatcaaatctttttatgaggttctagatgtgggagggcagtcatctttccaaagaacattatttggaatctgtgggtaccatccaaagttagttcttttgcatgggaacctattggggaagagttctaactttagataatctccagaagagagagcgacccttggtgaataaatgttatctatggaagcaggagagggagtccattgatcatgtactttttccttgctctaaagcaaaggattctatggcacctattgttttccttgtttaaggtggcatgagtgatcccttctttagtgagagttttgctcttaagttggaaaggctcctttgttgggaagaaaaggaaaaaggtgtggtatgctgctcccctttgcatgtttttggacaatttggagggaatggaatgagggagcttttgaagataaggaacaaaatgatcaatggctaaaactcttgtttctttgtaatatcttttcttgagttagcttgtacataagggaagactcattgcccctttatttgattttgtagaataggtggggtctcgttaagggcttgggtatttttgtgctctttttcaagggcttcctttaggttctccttgtatacgtcctatgtacgttggtgtattttgcttctttttataatttactgaaacattcctttacccatcaaaaaactattcccctaactcctcatctacagcttattgcagccttcattggaaattgaatgggtctgttatgtattacacagcatttcaaggataatctcattgtcccaaaagggaccatgcaacactgttaagaatcctttttttcgtatttaggttctctagaaaaagataaaatggaagggcttgaacctagtgttattcatgtaaactaggcacatttattaagagtgttagagaataaaatattgcaaatgagcaatagcagcttgatccatgaactcctttgaatgtaattgcctttttaatgatattcgtgacaagtgatatgctaacaatgacagtaatacacaccatatttgtgaaaactagcaaaatcctgcatggcagccatcagctgatgtgtaaatttgtgcaaaacagaaatgatggttactgattctaaatctctgttggtggttttctcttcctcttctaccagttgtaaatactgttgtgtattgctgggtgtgtgtttttatttcttaatgtaatatgctttttttttttagaagtgcaaattgtataaaaactcctagagggccctgcacaccgaaagctttgcaatcagcatttgaggactgcaactttttgcttgtgcttttatatttgaggactgcaactttcatatacaaggcctctgaaattttatggtgattttgttagttccaaacagtctatcaagcttccaataaccttcagcttgtaaggctgatgtgtcttttaactcttgacagagaacgacaggattgatttttagcccaggagcagc

SEQ ID NO: 11588 - DNA, 11514 bp, Vitis vinifera
  Intron number 2 from transcript GSVIVT01029680001 (locus G SVIVG01029680001) derived from phytozome v7.0 (chr-ID chr1 2; pos 12950884 to 12962397)
catcgcactcttctttaggtcattttattgaaaacgtaatgaccaatattccataacctaatgtatcggatcgttactttatcatatgtttttatttcaatgttgatgtaatttctttgattttgaaatctataagaaagtttgttatctttttatcatttagtgaagaaagtttaaaatgatataaatttaatcatatgtagattttagttgttaatgaatgcataattgataatcttccgtatagggagttaagttaataataaaataaataatataattaacaatcaacaaagcttttaaaattgttttattaaggtcaatagtaatagtaccattgggaatttgatggtccaatttgagcttggacatctaaaagtctattttattatagtaaatactagctagaatttgttcaattgggtctatattaaggttggaaagagaaatgtccaagatgatcattaattttgtaacatacataattaagtaataattaataggaaatgactttttcaagacctattaaattaaaattaaaattcaaaaaaaaaagttaggtgaataaacaaaataataacttttatatgaatataaaaaaactttattaaaaaaaaatgaggagttcacgtgctttcaaaaactgaaattccatgtaataaaaatgcttttaacttcaaaattttaatctattgtttttttgaagggaaatttttcctatttatataagaatttttagtaattttttagtttaattatgtaggacatgcgccttaagcaacctcttcgggtcatattattttattatttttccctgttatgtttccttttcaaataggagttgacataaatacccttctctacatgcactatgaagtgatcggactgccctcaattgtcatcaaaatttcatgtatttacctcttgtcatgtagtgtccaattcttcacaccctcatatggtgcttctaatatattcccaataattctttatgtctctatgcatgatatttgataacttcaaagtgtgacatgtgacacttctagtgcatccctaaattaatacttatagtttagttaatgtaattcttttctagcccatttgcatagtgttgagattattcaacttttctaattattttaaattgttaggaatttaattattttactaatgttttactttctctaattatttttaatctaattggatttttaattgttttatttattttactaaggttttactttctctaattattttaaattaaattggatttttaattatttaatttatttattttcaaaaattgaaaaaaaaattcttatctaaaaatccaagatgttaatcaatgtagcgaaaaaaaaaaagtaaaagaaattttatataatctagataacatataattttaatttgtttttttctttttttttcacgaaatcaatactaattcctctaacctcaaagaaacacacaaatttttagaaaaaattactgttaaaagacttaatcctcacctaacataatatatatatatatataaccattactattaattattagttaaaattataatttgatattcctaaaaattggatatattattattattattattattattattattattattattattattcctcattatattaatttaattaatctattcttaaattagattgagttagtaaatttcccatttacttaaaattattaactccaaaacttgattctaaaaatataccaatttgatttcattaaaccaagagtttattttatttattaatttaaaactaaacattttatcataccatctcattactcttttcttttcttttttctttttaataaatactcattgatagcatcaaatccaacatttaaacatcactgtaaccttttttttattattttataagaaagtttattctctttttatcatttaatgaagaaagtttaaaatgacataaatttaatcatatgcaaaatttggttgttaaagaatgcacaattgattatcctctagtagggagttaaaataaataatataattaataattaacaaaactattaaaattgttttattaaggtgacagtaatagtacaattgggaattttaagatccagtttgaacttggactcctaaaagtctattttattatagtgagtactagaatttgttcacttgggtcactattaatgttggaaagagaaatgtccaagatggtcattaattgtgtaacatacataattatataataattaatagggaatgactctttcaagacctattaaattaaaaaaaaaaaattcaaaaaaaaaaaaggtgaataaacaaattaaataataactttgaataaacaaaataataatttttatataaatataaaaaaatgaggatgtcaattgctttcaaaaactgaaattccatgtaataaaaagcttttaacttgaaatttttaacctattttttgttttggttgtaaatttttcctatttatataagaattttttagtttaattttgtagaacattaaccttaagccaactctttggttcacattatgatgtgacataaataccctttcaaataggagttgacataaatacccttccctacattatgaagtgatcgaactaccattaattgtcatcaaaattttaggtatttacctcttgtcatgtagtgtccaatttttcatatcctcacatgtgacattcagcgaccatgtggtgcttctaatatattcccaactattctttatatctctatgcatgacatttgactactccaaagtgtgacatgtgaacttctagtatatccctaaattaatacttatagtttagttgatgtaattcttttctagtccatttgcatagttttgaggttattcaacttttcgattattttaaataatggggaatttaattattttactaatgttttactttctctaattattttaaatttaattggatttttaactattttatttgttttactaagattttaatttctctaattatttataatttaattgaaattttaattatttaatttatttattttcaatttttttttaaaaaaaatcttatctaaaaatccaagatgcacaatcaatgtagagaaaaaaaaaagtaaaagaaattttatataattccaaataacatataattttttttcatgaaaatcaatactaattcccctgcacaaattttaaaaaaaaattattgttaaagaacttaatcatccatcacctaacataatataataataaaaaaaaccattactattaattatttagctaaaattataatttgatattcctaaaaattgtatatatcattattattattattcctgattatattaatttaattaatctattcttaaatttaggttgagttagtaaatgtcccattcgtgtttaggtttaagttcacctgttgatcttccttcaacatcaagtattaatggtgggcttcaaccatattcaattgagtctcataccctttgaattgacaagcctttctttggcttcaatcaaagattggtgtctctgataggagcaccatcttgtaggggcataatagtgcagaatctcatccctataatcttatagattcacatcccgatgttaaagcctcaccaactcaatcaagatctccaaatgggtgaaattctacaataatcaatgaccaattacacgggtaaactctaaatcatttagtcataagttatgacatcatttttatagctttctgtacataatattcatgttttgtatttatatagtgtattgactataaatgaatacaagctttcacattagtattatgtatttattattttttttgttaaccccaaatgtataattttattgtaagtgtataatattcatactatgtatttatatagtgtattgattgtaaatgaattcaagctttctcatcaataatgtttttttctattagccccaaatgtataattttgttgtttgttttatatgaaaatggtagaaatctagaaccactaactcttgcctcgatcttcaacaaaggccaaccacaaatcatacaaaagcgacgagtaccagctataataacatttatattaatataaaaaacttttattaaaaaaaaatgaggacctcacatgatttcaaaagatgaaattccatgtaatgaaaagataatttttttcttatttatataagaatttttggtaattttttagtttaattttgtagaacatgaagcttgaacaaactcatcaagtcgcattattttattatttttccttttttatgtttctttttcaaatattaattaatgtaaatacccttctctacattatgaagtgatcgaactaatgaattttcatttgcaacatcaaattctccacgaggattcaaacatcactgaaatacttaaggtcatcacatgtttttcatcatacactataacaccccaaattaatttttaaggttagaaacgcaaattagaaatacaaaaaataagtaaataaataaataattttaataagagtagaaagttctttttgtatttaaaaaccctataaattatatttttcttgtcatctctttacataaaccctttgtgcatagagattagagaaattaggaaacgcagtgttgaagatttagggatttagggtttgaagattagttttttggataagagttttaaccttgagattagcattttatattaattaattaattaattttgaattattttttaaaaaaaatttgaaagatctcatatagattagggtttgttatttaatttttttttttagataaaaaagattgggaatttatgaacatagtgtggaccccatatttcggctcatgcgttttccactcaatggcgagctcgattttatttcgaaaaattgatttttatttgattaagaaaaaattgacttggagtcgccacttatttttgttttaattttaaaggggtaaacaaaataagaaagaaaaaccctaaatgtgactccttgtttcggaaaaggtggtcagtgaaaaaccggatccggttcgagggtcaggttacttatcgggaaggtacggtgaagaccatagcacccctctaagcccctaaagtcgggtctctactaaaaaaatgaagcaatcatgacaattgatgaggaaaacaatgaatacccggaactatcatgcacatagaagaatcaaaacatgtatatggaaataccggaatggggaatagatacgtacttgggtgacgagccacaatgcgcttatcaaaaagtgaagttagtgcacaattaaagaataatttcaaacatgtcatagggcagaatagaaacaatcatgcatgacaactaaatcaatcagttataaagtcgcatatgttgggctcccaccaatacccatttattttacatggaccaaatccgtaaattccattattcagaattacaaaatttgtttcattgcttatttcaaaacatttttaaaacagaggagcagaagatcgttttgaagaccagaatggaattaagctatttgagagaaaattagatttttgaaatttaattgaagaattggaatctcgaagagcactagaaaattggagttttagagtttatttggatattagacttttagagattgaatgtgggaatgagaattttcagaaactgaatttgaaagaggttggaattttgaaaacgatttgagggctcgggattttagagaaagattaagttgcgaaaattgagactttgggagttgaattttgaaagagatcagaatcgtaagttatttgagaaatagaaattatgaaagttgatgtgtaaaaattggaaatcttagaagtcattcgaagacggaatttataaaaataatgaataagatgataatgataatgataataataagtagcgggataaatacgggaattggagcatgggaaactgaaaattaagttcggagataggacacttggaattttagacagctaaatttagaaatcggaattttgaagaattagactttaatgattgagatttttaagagaaataaatgggtaaatatggaataacgttattagttaatcaaaacgatatttggacggatgaatagtgaatagtgagatttgtgagattgaaaactaaattggaaaatcggattttgacgaaagtgatatttgaacggatgaaagtgaatagtgggattttgaaaattaagtttgaaagtcgggcctttgaataattgaactctaattattggaatttttagaagaaagaaacgagtaaacgtggaatttataacaatgataacaaagatgatatttgagtgaataaaagtgaagggtgggatttttgagtctcaaggtttaatttggaagtccggttttgaagaattgaattttaatgatcgaaataaataagtaaataagtatggagtaatgatactaattaacaaaaataatgtttaaacgaataaaaaagaggatagtggaatttttctaattgagaatttgaattagggtgttggatttttaagggatatgactttgaataaataggtaggtatgggattataatactaattaacgagaataacatttcggtgaataaagatggatagtacaatttttggaattgaagttttaattaaggcatggggttttcgagttgataaatatgagatttaaaagagtatttgaagaattaaaacatgtgatcttgactttcttttatagattggactttgaataaataataaatacgggaataataattcgaattatgaaaatatgatttaagcaagtatttgaagaattaaattatagtatgagatttttgaaggattggtatgaataaaataggagaatataagataataattctaattgataaatatgagatttaaaagagtatttgaagaattaaaacatgtgatcttgattttcttttatagattggactttgaataaataataaatacgggaataatgattctaattaatggaaataagatttagacgaatatttgaataattaaattaagacatgggatttttaaaggattagactagataaatatgggatattgattctatttaatgaaaatgatatttaaacgaatatttgaagaaataaattaaaacatgggatttttgagagattagactagataaatatgagatattgattctatttaatgaaaatgagatttaaacgaatattttaagttaaaacatgggatttttgaaagattagactagataaatataagatattaattccatttaatgaaaatgagatttaaacgaatatttgaagaattaaattaacacatgggactttcgaaagattagaccttaaataactagataactatgggataataattttaattgatggaaacaagatctaaacgagcttttgaaaaattattaataaacgagatttataaaatatgataaatagatatacacgaaaaaagtaataaaaaaaataattaaaaaaataaataataataatgataataataataataataataaataattataatgtttaagctagcgaaattgaataatataagcttcaagataaaactataattaacaataataatttgactttcaattttctttaagatgagttaactaaatgtgtaaaaataagatgacaaataaaaggggatgattgaattaattaattatggatattagaggcttttataaaattgcttaaagtttggggcagcctaatgggctgacttgacgtggacctgggccaccttaataaggatggcaggcatggggagctatggggctatctcttaatgcaaatgggttgggccctaaattcaaaaccaagcccaaagccatcatgggctatcctcaaggcagccatctccagttgggcgtcaccctcgaagggagccttccaccatcggcggcacgatgaagaggggagctgcggcagcgcgatgaaaaggggagccgtggcggtggtctggtgacgtccagaaggtgttgccgccgtggtggctggtgcaggcgcgcgcgtagacggagcaggtggtggcggcctggcaacttcctacatcaaactacccttaattgtcatgtagtgtccaatttttcatatcctcacatgtgacattgggcgaccatgtggtgcttctaatatattcccaattattctttatatctctatgcatgacatttgactactccaaagtatgacatgtgacgcttctagtatatccctaaattaattcttatagtttagtttatgtaatttttttctagtccatttgcatagttttgaggttatccaacttttctaattattttaaattattggaaacttaattattttactaatgttttactttttttctaattattttaaatttaattggatttttaattgttttatttgttttacttaggttttactttctccaattatttataatttaattgaattttttactatttaatttatttattttcaaaaatcggaaaaaaaaattatctcaaaatccaagatgttacacaatcaatgtagagaaaaaaaaaagtaaaagaaattttatataattccaaataacatatcattttttttcacgaaaatcaatactaattcccctaacctcaaagaaacccacaatttttttgaaaaatttattgttaaagaacttaatcatcaactaacataatataaaaaataaataaataaccattactattaattatttagctaaaattataatttgatattcctgaaaatcgtatatatatatatatcattattattattattattattcctcattatattaatttaattgatctattcttaaatttaggttgagttagtaaatttcccatttacctaaaattattaacttcaaaacttgattctaaaaatatgtcaatttcatttcactaaaccaagattttattttatttattaatttaaaactaaacattttattataccatctcattacaattttttttttaataaatcctcactgatagcattaaattcctcaccaacattcaaacatcactataactttcttttattattttatcataccatcccattactcctcctatatcttgttgaaatggatcttcgtttgcagcatcaaattctccactagcattcaaacatcactgcgacacctatggtcatcacacattttccaacacctacatcatacactgtaacagctcgaattaatttccaaggttataatcgtaaattagaaatataaaaaaaatttaaataattttaataagagtagaaacgttttttgtatttaaaaaccccataaattacatttttcttctcttctctttacataaatcctttttgtatagagataaggggaattagagaacgaagggttgaagatcaattttttaaacaagattattaaccttgagattagtattttatatttattaattagttttagacattttaaattttttttgaaagatctcgatatagattaaggtttgttatttaaattttttttagataaaaaagattaaaaatttatgaacataggtagatttattaatgaagaacaacacatctctattttagcaccttaaaaaagttagctatgaaggacatgttcaatcacaagtcatcaatatagacaaaaaaaataaataaatataacattgttgttgcaattgtaaataaaaagagatgaatttttttaatgaaagacaataaagacttacatcattttcttgtcatcgaagctatctccatgtctcaagggttactacccactcatcatatatatgtatgagtgtagaccctaaaatttgtcctaaatttatttctatattaattttgaccttaattttatttttaaattttaaatcttgattacatataatatttttaatccactcatcatttaatttttaatttttattattttatatattattttattttattttattattactattattttttctttctttttcttttctttcttttctttttttatttctttcctctctcctctctcatcattgccccacgtcaaccccatagccccctctctgagtcacttccatattctctctcctctcacttttctttttcttttggactttttttgcttccccaaaaatagagcccaggttggtttgcaaatttatgacacgtggagtatagaatttcatgagagaaaatgagactcgaaaaactataaatagagtattgaatttgttgtaaacttatttgggtacatattttattaccttcttttattttattttaattttattggtttctataaatattattttatatatatttattgagtgtacataattgaatattgaacaaattaaaaattttgtttaaataaaatgattaattcagtaaacatgttttaataaaataataatttaaaaatattctgcttaataaaagaaatttttttattaataaaaatttagaaaaatgcttttagaaaaatccaaaaaaattattttaatagaatttgaaaaattgtttttaataatgattgcccaaaaatttctttgtttaataaaaagtgtccaaaaattattctataaacaaaattgtcccaaaaaataatttttaattaaaaattgttttgtaaataaagttgtatttttttttaataatttgtataagtcactttgatggtaatgttatctcttagtttgcaaacaaatgtttgttgttcaatcttgcatggagtttgaatattagacccttgcttgcacagttgctgaagtcatttggctcaaatctcttttgggtgaacttagtcttcaactccctaagacacttattataaattgtgacaacattcgcgttacttacctttctatcaactccttttcactcaaaaatgaaatacattgctatcaactttcactttgtgtgtgatcatgttgtcaatgggtatctcatcgtatcatatatctctaccaaagattaacttgcaaatgctttgattaagcctttaagtcaacaactctttcttcgaattcgatccaatattggtgtctctgatgggagcaccatcttgcagtggcgtaattgtgctgaatcttatccctgcaatcttgcagcttcacatcctgatattcaagcctcacaaacttaaccaaaatccctaaatggatgaaattttgtaatcaatgactaattacatgggtcaactctaaatcattcggccataatttatgatatcatttttgtaattttctgtgcataatattcactctgtatttatacagtgtcttgaccaaaaatgaacacaagctttctcatcagtattattttttctgttagtcccaaatgtataactttattgtttgttttatatgaaaatgttagccctaaatggatgacttcattgtttgttttatatgaaaatgacagaaatctagaaccactcacttttgcctcaattttca

SEQ ID NO: 11589 - DNA, 4406 bp, Vitis vinifera
  Intron number 3 from transcript GSVIVT01021301001 (locus G SVIVG01021301001) derived from phytozome v7.0 (chr-ID chr1 0; pos 3700497 to 3704902)
agcttgattttacaaacagtgttgacataactaaggtaatccattgttctttactctttaggatgctggtgtccttaaacttgtttcttttactggtcttgttttgaaagttcattgcactaattcttgcttgcttctaaaactgccagtgacaaaaacatttgctaattttattgtggattcgttggtaaatggcatcaatattttttttgccaatattcttgaatgcattttctttacctatagctgtttcattccttatgttggtgacaagattcaaaatcttgaccaagactggtatggctcggcaactaatatctgccttggcatgtccattatgattccagtgactgagtttgatattttgttgaatcgtgagacaactcagccaacttggagatgacttagtcatctttggatgattcgtgtgatgacttcgagaagatgctgagactaattaatctggtcatgttgcctttaggaacctctgtttgcgtttgggtatttgggctgagaatgagagaagggcagtggagaggaggtgaggtatgaaaatggaggctggaaagagagaggactagcatgccttgggatcctctgtttgcatcactttgctactgctgcgtcatccatgactgattcatgcatcttcactcttctgttcaaaacaaaatgggaagtgggtatttgtgcagagaatgggtaatgggtaattgttatatgatgggtatttaggtttaaatgggcaatgggtatgtggtgggcatttgggtttaaattggtaatgggtattggatgaaaatttcgctatatgttaaatgggtaatggtaattgatggaaatttggatttgcattaaatgggaaatgagtatttcagtttttatgaaataaatagggtatgtatattgatataaaaaatagatatgcccaatagcccaatagcccaatagcctaatgcaagggggccctctttcaccctatctctttgtgttggtaatggaaaccttcggtagtctaattgcaaaggccaaacagggagggttcattaggggcttcaagattgatggtagaggggaagaggagacttaagtttcacgccttttgtttgctgatgatacccttcttttttgtgaggatgatgtattgtagttgaaatattggaaatggattgtcattggttttgaattggcgtcaagtttgaaaatcaatttgcaaaaaagtgaaattagtccaataggagagacggaggatgtagatagagcaacttctctctttggatgcaaagtaggaaagattcctacttcttatctaggttccctttagggcccctactaagcattatggtgtatgagattcaattgaggagagatttaaaaggaaattggccatttggaaaaaaaaccttacctatccaaaggaagaagactagtccttattaagagtactctttcaaatctccctatctattttatgtccctctttgtaattcctagaaaagtgagaattagattagagagaattcaaagagacttttggtggggagatttgggagataggagaaagatccacttggtaaaatggctagatgtgtgtaaggctaaaatttttgaagggttgggactaagaaggctggacaatctcaaatcaagccttgctagacaaatggttatggaggttctttgttgagtgtgaaagcttgtggaggaagatcatttgtggaaaattcagggagatggggggggggggggggggtgtggtggttggactattaaagggaggagggattcatttggtatgagcctttggaaggacattagaaaagggtgggaagagttcagtgtcgaaactcttatctgaatagggaatggtagctgaataagattttggtgggatatttgggcaggagactttaagctgaaagatgtttaccttactcttttcaggatagcatcccacaaaaatgctacagttgcagaattatgggaaaaagaagggggcgaaggggagttttgagaggttcaatttagaggacccttctaagattgggaggtagaggaggtgacccactttttgggatttctttacccgttaaaagtgcaagaaggcgaggacactttttgggggtggagaataatgtagtttttcttggcaaggagatttggggatcccgtgctcctcccagaacttgcttttttgcttgggaagctgtataggggaaaatcttaattgtagatactttaatgaagaggggatgacaaatggtcaacaaatgtaatctttgtaaagatagtgaagaattagttgatcacattttgattcattgtgccaagacaagagagctatggacctttttgttagccttttttggattggtttgggtattttcagcctaagtgagaaatctcctcttattgtggaaagtgaaggggtttcaaaagaagaaaagagcaatttgacgtttggctcctatttgcttattttggtgtatttggaaagagcgcaatcgaagggccttcaaagatgagagctttctgaccaaagattaaaggatctcttcattcaaatgcttttggggtggtctagggattctttgttgttggagttcctctctatgttgaatttcctagatactctttattgtggttagctttgccctgttattgtagaccatctatgtttgtgctttgccttgggttgtttttgtgtatactacctgtaagcatgggagggatggttttggacagatatcttgaagagcagatgaagcagttttgatctgcaacaaggaaagtttctttgcttggtccataagtggaattcaaatttggtgaatgacatggaatcattcatgagaactatggaaaggtgactaagctctttttgttgaaagaaagatgtggggtttttttctctttacacagaaaagtttagacattttggctgaaataatgggattaaaacactaggtcttacaaaacaaggaatgagataagttctccacatttcaatggtaggtttaaaataaagaagggttaatttcactcggactctcgaagtttggtgtagatacaactaactaccattggtttcaaattttgtcaattagcacccctataaatttcgtctatttataaaatgtattttttaaagatattataggtaggtgtgttttaacaattttataaaaaataaattttattctcttaaaaataaatttatatatgaaatacatctataggggtgttaactaacgaaatttgaaaccaatggtgccttagtgtatttccactaaacctcaagggatatgaatgaaattaatgcaataaaaatcaacaggtttgctggatttgagtgcaaagcatttgcaggggaatcaacaaaattatatattgtctgtgttttcttttgttgattgaaatttgtagaaccattctaattttctgaattgagtacagtgggtgtctgatttgattttgatgtagggtctgtttgacacagctgtagttttcaattaagggcttatctgagaggagctgtatagggaaaaggtagctgttcaaaatagaaatctttttgtcagaaacctcttcctaccttctctcttgctgaagcatctctaacccagctttgtggaaagattctctaagctccaaatctgctctgtcttgaagtgtttcagtcaacacaacttagagcactttagcagagaaaatacttcccaagcactgaaaagtggactaaactggacccagggtcatactcagtcttttctcattttatgctttctggcttctcaaaattataacctttcagattttgattcatgtacgcgtttgtttgttttaatagtgtcagattgaaataaatagaaataagagtctttttgtgcttggtaattttgtttaagctactgaagtagcatatctttgtgcagtgtgagccatctctggctcatgtcatccatgaagtggtatttcaatttgctgatctttaagaagctaccagcaagcaattgcaacaataaaaacttcaggatagcacttgtgtacaaaagtctcccattaatgttataatttctgtggctgcaatgtgtttttttttttgtttttttgaattgtaattatgtgccatgttttccatctatcatgtgaacatagttatgtttgttgttctgattatcttttctttccatccaactgtactcctagtttcttctcatttttttccttttagcaagtgatgcacttcaacttttaaacaaatcagtttaatattcttatagtgggctgatacttacattccaaatgtcaaaacactgtaccttggttatttagttaattttcatccattaatatgtaatttaactggacaaagtaatatcccagggaacctaccgcattgcatc

SEQ ID NO: 11590 - DNA, 15936 bp, Vitis vinifera
  Intron number 1 from transcript GSVIVT01019074001 (locus G SVIVG01019074001) derived from phytozome v7.0 (chr-ID chr4 ; pos 17041038 to 17056973 reverse strand)
taaacttaatttttttaaaaaaaaaaaatcattttgtctctatgtagtttgattttattttattttttttggaattaattagtttgtcactttttttccttcttttaaaaataatgttggaattaattgtaatagatttatttattaacttaaacttggaagtgataaaactaatctaaacatgctcaaaacttaataacatagatcaaatatggaaataaaggaagaactaaaacataccttcaaccattgatggtttgggaatctagaaatcaaatttgatattcaaatgggttgaggtgcttctaaacccttaatcaatctcaaaatgatggtgtctatgtttgaatagagattagaggcttaaggacctaaccacgaaagttctatttatattcactctgcccataacagagtcaatgccgtaattcatggctattaatgacaacaaaaaaatggaaaactaaatcaatggaaatcctaaaatttatggaagattatgggctagatttttggaccatttaggaaaatctaacattctcccacttggtccatatattccatcattcaccatagtaagaaacaaaatacacgaatcatggcgataggttctctaaaacaagtattattttccatgtatcacagtacattatgtctcttaaacacttgccttcattacttaatgaataaaccttatgtttattctaggtccaaacattagaaatatttcttaaatgaatgaatgtgtacacaaattagaaacaaatacgagaaaatattatcacataaatagagtttcatcacaaataacatttgtccttataacgaaaatcatacaaaggagccaagtcccattctatccacatgatccttgaatttcgatggtggcatgccttttgtcaaaggattagctatcatcaattcagtgttgatgtgttcaataacctctgttttctctttaacatgttcctttatggctaaatacttgatgttgatgtgtttgcttcgattaccgctttgttgtttttagccataaaaactgtagctgaattgtcataatatatcctcaatggcctagaaattgaatctacaattctaatcccataaaggaaattcataatacaccatgagttatagccttaaaacaagatatgaactcagcttccatagtggaagtagcagtcaaagtttactttgcactcctctaggatacaactccaccaacgaacctaaaaatgtatccaaatgttgatttctatgaatcaacacaactagtgaagtccgaatctgagtaaccaatcacctcaaaattatcagtccttctatacataagcatgtagtcctttgttccttgaaggtacctcaacaccttctttgtaactctcaagtggtctatacttggattactttgatatcttcccattatcgcaacagaaaatgcaatgacaggtcttgtgcatacctgaacatacattaggtttccaacaacagaagcatatgagatgtttttcatttgttccctgttaagatcatttttcgagcactagttcaaattgaacctatcacccttcataataggagctatacttggtgaacaatcttttatccaaaatctctctaaaactttgttgatataagtctcttgagataaacataaaattccttgaaatttatctctatgtatcttaatgctaatgacataagatgcatcacccatatccttcatgtcaaagtttttagatagaaattgtttcacctcatgtagcaaacccttatcattttttgcaagtaaaatgccatccacatatagaataaggaaacatattttactcccactgactttctggtatatacattgatccataatgttctctacgaacctaatgaagagataacatcaaggaatttcaagtaccattgacaagaggtttgtttcaatccatatatgaatttcttgagcttacacaccaaatgcttaccatctttggaggaaaatccttctggttgttttatgtaaacttcttcctctagatcttcactgaggaaagtcgttttcatattcatttgttgcaactccaaatcaaaatgtgcaaccaatgccataataacatgaaaagaatctttcttggatacaagaaaggtctccttgtagttgattccttccttctgtgtgaatcatttagcaatgagttttgctttatttctttcaatgttgcccaatgagtctttttttgtcttaaggacccatttacatcctatgattttctcaccatcaagcaactcaacaagattccagactccgttagatgccatagaattcatctcatatttcatgacataataccataaatttgattctttgcaactcatggcttgtgaaaacgtttcaggatcatttttggctctaatgttatagtttgatacttatagatacatgacataatcaccagaaattgttgatttccttgctttagtagatctccttaatgttgaatcaatattttctaaaggatcatgttgttcaactagttgtttaacaatttctaacatttattgaacaacttgatcaactagatttttcttagcataacttatgaaacttcaatgattggttgttcaactcccatttgaacttgaggggtgctgtgaatgataaccaacttttcacttgaggtagaaggttgacttttcttagagattgtgttctgggattgactagtctcacttaataagtcattcttaagaaattttgcatttcttgattccacaatcctagtgttataagattgtcaatagaatctgtaccccttagaccttttgacatatccaatgaaaaatccacttatggtccttgggttcagtttttttcttttgtgggttgtaaactcttactttatatgggcatccccaaatgtgtatatgccgcaaacttggtttccaacctttccataattcaaatggcgtctttgagacaaccttagttggaactcagttcaatatatacactaccattttaaaagcttcaatccataagaatttatgaagcttaaagttgttaagcatacttcgtagcatgtccaataatgtttggtttattctttctactatgccatatggtctaggaaactaggcatggcatattgggtaactatcccatgctcttgaataaacttcgtaaatggaccatgtgtttgtccatctttagtgtatctaccataatattctccacctctgtttgttctcactatcttaatttgctttctgcattcattctctactttgaccttaaaagccttaaaggtatctagtgcttcattattgttatgaagcaagtatagatacatgtatcatgagtaattgtctataaaagagatgaagtatttcaaacgatacgagtctatgtttggactacaaatgtctgaatgtatgatctccaatatgtttgtgctccttttggcacctttctttgacttgttggtttaatttcccttaatgcaatccatacaagtgtcaaaatcaataaaatccaaagcactaagtactccatcatttactaatcttttaattctttctatggagatatgcttcaatctctgatgccacaacagagaagaatcttcattcataacacatcgtttaacaccaatgtgaacatgcataacattatgagtagcatcttgcaaattaatagagaaatgaccatcacacaatgtataattcctaacaagatcatatttataaaataaaccgaatgatgtttttgaaaagttaaaggaataaccaaaaagtacaagtcttgaaactaaaatcaaattcctagagaaacttggaatataaaatgtattttccaaattaaaaacaaaaccactacttaaaactaaagtgcatgttccaatagcctccacatgtgaatgcatcttgtttcctaaatagatgtattgcttacttcccactagcttccttaggtttgtaaaccctacaaggtatttgaaatatggattgtagaaccataatcaatccaccaggtgttatgattaacatcaaccatattagattcataacaaacaaataagattggattacctttcttttcaagccatttatgaaatttagagcaatctttttttacgtgtcccttcgttttgttgaaaaagcacttagatttttttttttttttatctctcattggggtggtattttacctttcccctattgtttagcttggttatggttctttccttatgttgccaataatgcactctcacccatttccattactagcctccattcctcttgaacacacatggttggaagtgttgggaacctctgatcactccgtttccatgccttggatcatgtagggtgtatgcatctattcttaggcatatttaaatctatcgcaatggaaacacatggctataaaaaccattattgataccacagaaatcatggatctagagaataaagccacataccttttattcggatgttctcggatcgattccaattagtgtagataactctaaagtcgtaatggattttgtaaacaccatgatcttccgcttgatgaattttcttttgtctaggcattgaaatggtgaagatctcaagggtagaggctactttttttctctggattgtagagagaaaatggcaagacatggaaacctaaacccctaaaagggtatttataagtttcctactaggcttaagtgacaagtgacttaagcccaccatgggcttgggtcacttaatctaatctaaaaaggttactaattgattaattaaccatctagaaccctaattaatcaattagcctagtccagatataccactcacttatccctatgtaaccttatgtaattaccaaaatttccttatacacaaaaagtgaactaaaaacccacttaaccctcataaatcgtgtcatcaaggaatatgagctcaaaacggggaccattgagactcataggagtattgaatccctcataatcaaattctgaaattgactcaacatcccaccatagagagtcaattgcactctataccctatgtaaattacaacaagacaccaagtgctcgggtccgtgacctactacatgcagactccccatgaactcgtgtccataatctaacaaggtagtgttatcacctattaaaattacctctcaaatccttgatttacaaaccttacttattatgtgatcaattgacatactttaactccaaggaaaatatgtcaaattctattaaaggaattattgtggccacaaatttcatgatcacatatcctttggattacccaagaggacacattgtcttaatcccatgagatatcatggtacctctattcagaatacttgttgccaccaacctccatcaacaataactcaatccatagggatatatgaccacttagggtcttacccatagctcaaagtctcatgttgattttggcacaacctcaatatcctctcaaggttgaatgtctatgcaatatagtagcttggtgaatcatgaaatttaatagtcttacatcatgattcactgtaggtcctatctagtgtgcatcacatacactaattcactcacaatgagaaacccatcctgatggccaagataagtcatacctccaattaggaggtggtacatttcaatctctactagattgcccaaatccatgaaccaattgtgaataacttatctacttacaaaaaactcatgacttgtattttttatgcaacttctaatgcacccaagttatgtataatgttagagatatggactaaatgctcaaatcaatgtcaatacaccaaagggatagtaagtggatagttaagtctaacattgttacatcatgtcttgcttttagggtcttaatcccaacaagaagttcattgatcgaccatttatttgtatgtgtgttataagagatttttttaaagcgtccatattgttttagaagagtgttcggtatgtagtgcacaaggaaagattcaaacatctcaacctcgagttttcagccaagccgtaatgtcccttatttgcatgatgtgctcacacacacctctcacactaatgagctttaaggatgaaaacttcataatcaaggtattgataaatgccttatctgaagtctcaaactgctcatcagtagccttcagtaagaccttaactttattatgctgatcggatgaaccttaaataccagtagaaattttggtctttatgaatatcacactaaggtgattagattgttcccatcgttcataaagagccttttcatttgcaatgttggttgcaataatgatcgattcatatttcctaatagcataatcaatgttcatctaccccaaatgaaggagaattctcttctttcatactttatagttgtcaccctttagttcaagaatatcacatcttatatcagaaaaattcgcaggttgcataactgcataaaaattaaacattcatgcttatataacagtaatttgaggctaataaacatatatcatgttttacatatataacatgtttcgaaaatatgaatctagtgacataaaacttgtatatgggctaaagttctaattcaattagatccatttaactttatgataaaactatcaaattatattcctttcttaattcatgtcggtaaattaagaatataatttgatattttatcctaattaatcatacaaatataataaaaattctcataggataaaatttgttatatttaaatatgattaatttcaatgtcattttttctaaatgcgatccttaaacacttaatatataattttgcataattaaaaatgttgtgactaatccctaattaattaaaactatatagagcactagacatttaattttattcacaaaattattcatataaattgaatgcaaccataagtaatatttacatatatgaacattgtctaaatttatgtaccaaaaaatttcaaattgcatgtataatgaaaaaaataaattatacatacaaaaatgacataattttaacatataaatatccaaatctcaattccacaaaatgttatttataaaatcccaaatttatgatttttttcacaaaatccagaatttttaaatttatggaaatgtagttgtatgtttttgcacaaaacgacatgttgttttacttgtgttaccgaaactttctccaaaaaaggacatgtcatttcatcacccaaaaaaaacaacgtgtcattttgcctatatgacaacaaccttcaactagtccaaacaatatggcgtttttttctaaacactcaaaatgacatgtcatttggcatcgtcttcaacctccaattgggtcgttttcgacctggttcacaactcaatcttttctaaccttttggacaccaaaattaatgtttcaaatcatataaatgttaaatccaattacctaatgatttctaatcttatttttcatcaaaaattccaaaaaaaaaaactttcggatacaaaaactcaaattttccataatgcgcataatcaaggcataggcaatattgtggctttgataccaattgtaattgataaaaccaatctaaacatgcttaaaatttaataacataggtcaaatgtaaaaataaaggaagaactgaaacatacctctgaccattgatggtttgggaatccaaaaatcaagtttgatattcagatgcgttgaggtactttcaaagccttaatcaatctcaaaacaatggtgtatatgtgcctgaatagaaattggaggcttaaggacctaaccatgaaaactttgtttagattcactttgtcatcatagagttaattccataattcatggttgttaatgacaataaaaaaatgaaaaactaaatcaacgaaaatttcaaaattgatggaagattatgggccagatttctaaacccatttaggaaaatctaacaaaactaacttgacttaacatcagtttgattcgatttagttcaattacctctattcaacccaaaattaaactcatgttttttttattttatatttatgataaatctcaattgataaacattattatacaatgctcaacaacaatgaagaatgtgtgagaatacaactattagttgtatattactagaagtgagttagtgtgactattgatactaattttctccaaaaaaaaaatgtaaaaccattcataatattcattaaaaaaaataacccaaaaaaactttatttttttttttttaaatcttgacttaatgtggttttatttgatattattagattcattcaattgacatatttttaataaaaaaaaatgttggaatcaattacaacaaatttatttatcaactcaaacaacctcacttaacatcaatttagtttgatttagttaatttggtcgatctaaaattacgcacatatgtttttcactttttaattgtcaaaaaactttaaaaaaaagaactcaatattatcattccatacgtgcctaataatgaacattaagaaagaaaatatgacgtgtgaatgaatctctaggtgacaaagttactagaaaatgatactagctattagtgtcgatggaaagtattatgtaagctattacactcacaaatcttggtatcaattattattattattattattattttgattaattttatttacttcttttgttcaggttttggctaaacacacatttatgtggcttaacacacatacgtgggtggtagcaaggctcctttatgtgtcttgctcatgtctaaaaccttgcattatgttcctttggtgtggctaggatcgagcaacactttcctttttgacttgagtcatggacacctctttccctcaaagagcattttaaaccattctcgaagtgtttagggtaaacattaagagtgcttgcgaagattaatgatttttcataaattaaagaaaattataaaaaaaaatcaaaaatttcacttgaaagccccatctcatagctttcttttcaatgaagaaaatactaacatcccaaaattcaacacttgaattttggttgagttgagttatgtcatgtgttggattgaatgttgagccatgtgctagaacgtgttaagccgcatactaagactttctaagtcgtgagttgggatgttcaacatgctttaatattctaattaagccttgtgttgagatgttctcaaccgcatgttaggacattctgagccctatattgggtgttgccttaatttgccaaaaatgtgtgttgcactttcagtcaccacgaatcccgtgtacttagactttctaagttgcgagttaaaaagaactcaatattatcattcctaacgtgcctaataatgaacattaagaaagaaaatatgacgtgtgaatgaatctctaggtgacaaagttactagaaagtgatactagctattagtgtcgatggaaagtattatgtaagctattacactcacaaatcttagtatcaattattattattattattattttgattaattttatttacttcttttgttcaggttttggctaaacacacatttatgtggctaaacacacatacgtgggcggtagcaaggctcctttatgtgtcttgctcatgtctaaatccttgcattatgttcctttggtgtggctaggatcgagcaacattttcctttttgacttgagtcatggacacctcttcccctcaaagagcattttaaaccattctcgaagtgtttagggtaaacattaagagtgcttgcgaagattaatgatttttcataaattaaagaaaattataaataaaaaaaaattcacttgaaagccccatctcatagctttcttttcaaggaagaaaatactaacatcccaaaattcaacacttgaattttggttgagttgagttatgtcatgtgttggattgaatgttgagccatgtgctagaacgtgttaagccgcatactaggactttctaagtcgtgagttgggatgttcaacatgctttaatattctaattaagccttgtgttgagatgttctcaaccgcatgttaggacattctgagccctatattgggtgttgccttaatgtgccaaaaatgtgtgttgcactttcagtcaccacgaatcccgtgtacttagactttctaagttgcgagttgggatattcaacatacttgaatgttctaagcctcatgttgagatgttcttaacacatgttttgacatcctaggccacatgttggatgatgccctaatgtgccgaaaacaatgatgaaaattttaggatagatcaaggatatatcatcaatatatcgtgtattgggagctttggaagcaaaattttgtggtgatatatcaaagaggcaaaatttctagaaaatctctaaaaatcaccgatatattggtaatatatcggtaacgtgataaaccaacgatattgtgaaataattgcttaatgttgccaaaaatcattgatatatcgacgatttattgacgatttttatggaaatatcaacgagggtggaggtcatgatctaacaacccaaatgatacttgtgttgatccaacgacctagatcatgcctgtgtttgcaacggtcatctacctcccttaatgtttcatctaacagcttagattaaatctaggtggtgatctaacgactgggaagtgatcctaatgactatttgataatccaatggtcagatttcgcccaatccaatagctaaaattgttttctaacgttaaaatgacattccaacagttattttggcccaatttttttttttatataaataatttattcttcattcatttcatttcatacttcaattgctctttattgctcataatttttttgttattattttcaaaatcttataaatttggggatttataaatcaagtttgtgaattaactccaaattccaaaccaaggttgctcaattattgtatgatatgtttgttttcaagtttaattatttttgtattaaagtacaattaattagtagattatcaatagatttagtaaattaacttagcttagttatatatttgattcacataattagtagatttgcaataagttaatttgaaattaattattttattttatttttatattcaattgtaattaattagtatattttcaatagttttagtaaattaacttagcatagttatatatttgattcatattgtaggacctcagacgctacaaactctcctaaaagcaattgctgttaggaaattcacataccctaagcttatagtgcattcacccaagcgcccatgacgaacgacgaacacaagggaagttgatggatgcggtcaaccctccgatctaccaacaatctcccaccccccagcgacacccaggggttcgaacccatgacctcggctctgataccacttgtaggatctcagacgccagcaactctcctaaaagcaattgttgttaggaaagacccataccctagccttatagtgcattcacccaagcgcccacaacaaacacaaagggagttgatggacgcggccaacccttcgatctaccaacacatataattagtagatttgcaataagtgaatggaattaatgatttaattttaatattttgcattattactaggcattgaacttaaattacttcaatttcatgttatgtatacttctaattgaatagaatgactagtgcaagtggaaatataagtggaggtggtgcgagtggcatggtggggcaagatccaactttgaagcattgttcatcggtggagggggacagaaataggacaatttgtaactattgtggattgttgatgaagaatataggcatcactcaattcaagttccatttagcacatagagactcgcacaacaacaccaaaaaagtacctcctgaagtgaaagaagagaaatgagagatgttgcataaaaaaactaaagcaaaagcaaaaaaaactaaaaatattaaagagatctatgctcaattacatggcataatgaggggtagtcatacacatgtcatagatgaggataatgatgatgatgatgatgatgatcaagatgtgtacatgtatccgacaaatacgcacctggatgagtgggatgcttattgagttggggtttgtgcttcgaaagtgacataatgagattgacaacaacatgaaacctttgtgggaagaaaacataaaataggagagttgtcacgtcttagtgatgcaccgacgctaatgtggaaatcataaaatatgtgacattcgaacccatcaccacttattaccccttcactctacaagtattttgtagaaagataaaagaatatcaaaaatatattcaagggtgactcaattaaaaaaacgatgagatgcttaataagaaaaattttcatttatgagagcattgcatctcataaagcaaactttcaccacttcaagaatatgattatcggtgcacaacaagtaggtaattacaaattactcaatttttatattgtttgagtagttgtagtcttttgtgacatgttttaaatatttcttacatatgaattgtaggaatgagaatcaagtctccatctccatatgaaataaagaacaagtacttggaaatggagtacaatgaaatggaaggttatgtgaaccaagaaagagaaaaatggaagacatgtgagtgcacaataatgtcagatggatggaaaaggcccacgaaattaagtataattaatttcatagcctattcaaaagggaccacagtattccttaagttaatcaatgtatcaaacaatatcaaagaccacaaatatatatatatatatatatatatatatatatatatatatagataagctactgaagagtgttatcaaagatgtttgggaagaaaccgtggtcaacattgtcatagataatgggtcggtgttcatgaaagcaaacaagttgttgatgaagaagtttaacttatattagactccatgtgcggcgcactacatcgacttaatgtttgaagacattgacaaaagacctagtgttgcaaaggtgataaacaatgctcacaaaataaccaacttcatttacaacaatggttggttacttgcacaaatgagaaatttctatggtagagacattattcaaccaggagctataaggtttgctatcaattatattgctcttgacaaacttcttaaaaaaatggctgatttgaagagattttttataagtgatgaatgagcataacacaaacttaatcagacaaaaatcggacgagaagtggagaaattaatgtttgaccatctatattgggataaagtggcaaaagtagtttcattatatgagtcactatacatggtggttcaactcgtggattcagaagatgtgcccacaatgccctttgtgtacaaacttatgcaagtgataaaagagaacctcattcgtcaacatgctagagaatgaatgttccaaataataaaaggtcattgggagaaaacactaagacatctacttcatgcaacaagtaattaagtattatctatcttcataagttcttactcttaatttatataattttctcttacaaaatactaactctacttaattttattgtggcatatttcttgaatccagggtttcaatacaagtgttgagttggtagagatcccaaactacttcaagtggttaatgacatttttgttaaattaaacctaattgctgaatcgcttggtcaatttgaaaatgaggtaaataaaaaactgttattttacagaatctaatcaaacaatgatttcattcatcaatttatttgaacttttattaaaaatatgattttgacatattgaatgttgaatatgttggcatcttagatctaagcaacaaaagcaataccaaattttcaaaaattgatcttttagagttaaagtactaacctttaggtttggatgttcctaaaccttaaattccaagtattgaagacgaccttgaagttattggaagtcttgtaaacccacaatctttcgtcgatgattcgaccttgttcttagcacacttctagtagggaagaaagaatggtggaggctatgattctctttatctctagatgacataagacaaaagtgatgggaccactaacccctaggaggtatttataaggttcctaattaagcttaagtgaattgagctcacataggtttaggtcacttaatttagcctacattaggttctaattgattaattaatccaacaggacctactaattaatcaattagcccaatttagagaccttgttcacttacccttatgcaaccttgcataattatcaaaattcccttatgcacaaaagtaaatttagaggcaatccaaccctcataacccatgttaacaaggtgtatgagcttagagcggggaccatcaaattttgaaatttattcaacatctcactatagataatcaactaaactatagtatcctatgtaaataacaatgagacactatgtgctcaagtctatgacatgttatccattatgttccgtctccccatgaactagtattcgtagtctaacaaggtgaaagttattagtctttcaagactacctatactattcttgagttacaaatccccccattgtttgttcaactaatatgtcttaactctcgaagagtctatgtcaagtttcacttaaagaactactatgaccatagtttccatgaccacacctccttaggatcactcaatgggatacactgtctcagtcccatgagataccatggtgcctccatgaactactattgtttgctaccggtttccactaacagtgacctaatccatagggaataaattatcaaattgcgatctcacccattggtcaaagtcattgctaattttagtataaactcaatattctctcaaggttgagagacaacacaatgaagtagtttggtgaggtcgtgactacttgatggctttaagtcatgacttacttaagaaatgtacttgatattataaaaacgaccacatttggttctcaaaaaatattaagaaaaaatatattaacaaaattaatgatttttcatgtttgggtttcccataaaaaatatataaaaaataaatataattaaaatttattaaaaacttatacattttaaaattattaagttaatatacaaaataagtgatgtgaatttaacgagtatatggaaataatttattgactttaaatatatttttattttctcccatatttttcctcaaattttctagaaactaaacataactacaaagaacttgagaaaatggactagaccacaagaaggatctttgtttcataaactcataatgtttcagatcatgtgatcatcatccttttgttaaaggtatattaacttaattgttaaccgatttattactcattaggttaactttaatttaaaactctaaaaagggttagaatccttatgttatggtctcttatctaagtgtttgaacctttaaaaccttatagttggcctaaaaccctaatattccctcaacctaatccaggtgataagagacttaaacaagagagagaattaattcatgtgattcaccagctgtgttcagcggtatcacaaccacctgaactctctctcccccattcccaacatacaaaactgatcagtggacccaacaacccaactctccacccagagttcacaaacaacgtttggagaaagttaaacaaactgggctccaccgtctttccatctgcctgatataaactaatcaaatggtgttaccaaaagtaggaaaaagcttaaaagtctaatggaagtgccaattattttccaccaaagatccttcctgtaaatattaaaaacacacatgtacatcacttgtcttcttttggattaaaagatcacaattctatgcatttttcccatcctctcattataagtacaaatatcatcactcgttatcttcttcatagaggcc

SEQ ID NO: 11591 - DNA, 893 bp, Vitis vinifera
  Intron number 2 from transcript GSVIVT01032269001 (locus G SVIVG01032269001) derived from phytozome v7.0 (chr-ID chr1 1; pos 14303938 to 14304830 reverse strand)
tcaagaacaccgttcgtctattaattataatccaggtatttaaatttctttctttttgtggaaagatttgtttatttttgttgaacctttccattgtctttaatattctaatttgttgacaccattgtctttaatattctcatttgttgacaatgaagtggctcgtgtttgatctcgacggtcataaattgattaagaaaaattaaacttaatagattatatttcttcctacaactagtatcttaaatttgactgaatcaaaaggaaattcacgtgtttattgtgccaaatttttttgcttgaattgaattattggatgaagtttcttgaggataggtttccttgcatgaagtttgaatcctgctgttttactggctacttgcttgctttatttgcctatggattttggtcttgagtttttggattccatggccctcaaattcgtggaaaaaaaatgaaattccatgatacaagattgggttttcaagtgccagaattgaaaatcaaaaatcaaaataaaacccaactccatgcagccaaacttgtcctaaacacttcttggaggtgttagttccattgatatggtggtagcatagaactaataaattggtgggatggggtttatggtcaggtgggatttggttgatttgtttttcagtgatgtgttgtgtatgcatgagagtaactaactaactacctaactaacttgaaacaagctctagctaaataaattggttaaacaatatatatatatattcaatgatgtgttgtgtatgcatgagagtaactaactaactaactaacttgaaacaagctctagctaaataaattggttaaacaatatatatattttatttttcatttttggctcaatatttcagttgaagtaggcc

SEQ ID NO: 11592 - DNA, 6530 bp, Vitis vinifera
  Intron number 4 from transcript GSVIVT01031636001 (locus G SVIVG01031636001) derived from phytozome v7.0 (chr-ID chr5 ; pos 19351817 to 19358346 reverse strand)
aagctccaattcttaaggcagaatcaaacccaaaggtgtggctttcttgttcttttctatctattccttccttctctctatttcttcttttatttttgaagtccttgacatgtaaaatgctaccatgagaaaaaaaatttgtacctcactaacaagatattgatgttctttagtgtaataactaataagtctaacgacattggtaggcagaatcttttagatggttcagtgtccattttgatagttaaaaaggcacattatatatatagttaaatgcaaaggttttgtaggactatcaaaatcattaccatttatgtttgttacttagggattgtgttatgaatgtttggttctaccattatgtttgttactttgggattgtattataaacgtttggttaaagaaagttattggcttcctcacttgaccaacctattagcttctttactaggagctaagctttcacaagataatatccaatgataatatctgcaagaccctctataacctctggttgttcttgatactttcccattttattatattttttgttgttgtccccctggcttgggaagaaaaccttctagttagcggctgtttcagattcttttcatccttcaaagtgaattggacgctttatcaacatctctaatgatatgttaccatttgccattgattttcagctctcattccagtttaaaattggggaatagtttttttgtgtatcttcaactcccttacatcgaattttcatttcatcaaacttatttaaaaaaaggtaggtattttttttgtaacttttttttttcttcaaaaaaggttgtcccaataaacaattagtggttgtcctaaaattctatgattggtctccacacttgttcgtgaaatttgagcttgtccaataaatttcatatagcaaattgaacccccttttcatttgacatgtcagaccaaccaaagtacctttccaaggtggctaagcaatctaaataggcttggtgcattaatttttctagcaaaatctagtacttttatgggtaccttatttgtaatatcactagccatgtgttgatcatgcctctcaatccaatttaattccctcgcatcattcgtcatatccaagagagtgggttgtgacatttaagatgatgtcttgccctaacatcacttgttggaggtggatctaaaccaaccccccctttgctctacattatcctcaacacatgctccgttgtctttgtagccattagttgctagtttggaagtattagtggctgaatctttagtgttgtaatgatttaaggaagaatgaaattagggaagttgtgattttttaaaaaagaattaggtaatccggtgatcaaagggatttgttgtaattgagttagaaaagttctttatttaggtgctaggatttttgtatatatatgagtccttgtataggtaaaaaattaaggaaaataattttatacatttcattccttccatatcttttcttctacatggtatcaaagccttaggcttgtcaatctgggaagagaagattttctttttcggctttcattgcaagttgaagattggagttgaccttcattgttgacttcaaagttcgagttgaagactataatcgtccttcattgtcgaccacaaaatttccttttatctgagtcaagccattaaaacaaacaggaagcgaacgtagggccaaagaaatcgtcgccatcaagctgtcgccctcacaccactgtcatgccattgaaatagcgttgcaaccctcgtttctaccttgcattgctgtcgtcccactaaagtcacgccatcaccctcaatctccttgcatcagtgaagatccaccgtcgtcattactgatagagagagagagccctcgccctcactgcaaaccaagatcgcgaaccttttgctttcgcaacagaagatctagcgactacaaggtattttcagcctggattctcgaatcttttgcttgttgggtggtggcaaacaatgcggcttgcgttgcaggagatgctcacctgtagggcccgacctgcttcctacctgaaagaaccactcacagctagttggactagtgtggtggaggaaagattttagaaagggattgctttatggaatatatatatatatatatatatatatatatatatatatatatatatatatatatatatatatatatatatatatatatattttttttttttgatcagaaatgaagaaaaatatattaagagaagaaaagatacaagagaaggaagagatacaagagaaagagaagaaacaagagaaggatgagaggtcctttccacaaaaacaaaaactgaacaaaagagaaaacacccaactttagaaaactaaatacaaataaaaaccccaacactctcaaacttttgaaaggcaaaccgtagttcagttgagttgtaaaacactaagaggaactctgctataaattgcagtacaagaggcccaaagagaggaatagaaaagaagtaagtcccataacatctcttctgttctccccttatcctcaaaaatcctattgtttctctcttgccacaccattcataacaaagtgaggcaagtgatttgccaaagtgtcttgcctcttaatgaattcccctaacctttaaaagcaataaccatcatgtccacaatactccttggagggatcgaagccaaccctgctagattgaacagcttgtgtcagagtccaatggtaataggacaatgaagaaaaaggtggtcgatcgattctccatttcctttgcaaagaatgcaccattgaggacagagggatttgtagggtcttctcaattgcaacttgtcattggtgtttaccttcccatgtactactaaccaagcgagggccttaacctttgagggggctattgaactccacaaaaacttggccggaaggaacaagataggatttgagacttttgacaaggccaagaaaaaagatttcattgaaaacaagcctgatgatggcaaagaccaagctcttgaatctgccaaagaaggagagaaaaacattgaactaagggaggatatgattctctgaaggagatcaatttctgtatcagtaagattacgacgaaaattaaaattccaagacagtggaatggaattgctaaggacatttgagacagtgaggtttttcacaaaaataactctataaagaccagcaaattgagagcacaaagtttggttacttatcaaaaagaggaaggcaaactctaataaaaaaaaactttgttcagcttgttgattttcttcatgcctctttttgttgtttcaaagaggataggtgctagattggaaaagattcaaagagtttttctagaaggaggagaggctttggagcataagtagcatctagtgaattgatccatagttgcatggacaagtggaaagggggtttgggtagcaaaaacttatccaccattaataagctcttcttgggaaatggtgttggtgatttgtgagtgaaaggaatcctctttagaaaagggtgattggagggaagtatgagcaaacgggtgattggtgttctagagaagtgagggagggctatggagtgggtgtgtggaaggcaagcaagggtggatgggaggttttcaacggtagaataggtttcaagatgggttacgagaatagggtgaaattttggaaggacaggtggtgtaggggcactccttggagggagattttatttgagctctactctatggcctctacacaaaatgaatgggaaattgatgtataggagtggggtagctagagccctaagtttttgagatagctgcatgatcgggaattagaggtagaagtattttttggaagattataagagcagtccagtagtatgatcactgaagataattttgtttggttgaacatgaggaatgacattttttcagttaagtccttttcctctttgtcatatgggagagggggtgggtgttttgtttgacatagtctggaattcttggttgccatcgagggttagcttctttgcttgggaagctgacttaggttaggatactagctttggattagctcatatgtaagggttgaaagattctaaacagatgttacatgtgaaaagaaaaagaaacaattgatcatatcctccttcattgctcaaaagtagtctttttgtggcagttgatttatggttttttaggtgttcaatgggtgatgcattcttcaattagaagtgcccttttgagatgacacgggtcctttgtaggaaagaagagaaaaaaggcttgggaggttgcttcatggtgtttgttttggaccatttagaggaggaataggagagattttggaattgtgagtggaccaagcaattaaacattcattcttgtaaatctttttagaaggaaactctccttgggtggcatggagcgtttgtggggaaaacctgtaaaaaggcttggcaaatgacccccttatttattttttggtcaatttggaaggaaaggaatttgttagtttttgggaatgaggagctttcgctttaaagactgaaatattcttttgtatgtaatctttggtcttgggttagggtgtttatagttttgagcccttcttctcttgttagcttttttgattggctaggctctaagtaagggaaggtgaagtgttttgtttctttcctccccccttggttttgagcctttgggctgcttttgtatactccttgtatacttagagggcactgttttggtgcttcctctttccgtttaatataattccatttctctatcaaaaaaaaaaaaaaaatctttttagaatggattagtgtttgtaggggattattccttttctgtattaaactttgtggattggttaggctctaagtagggcttgattgctgttttttatgttttttgcgccttttggcttccttatatatatcgtgtatgctttcccatgcttgctatgattgataatacaattgttatttacttataaaaaaattgttcttgaatttggatttctaaagcgtcacccttctccattataatataaatgttgtcgatctatcaacttctcctagaccttgatctacttttagttgccgtggtcctatttttttggctctagtattaaatttgatgctatattttaaaagttctagtgctatgtaagtcttttctttgttgtgtagtgatatgggatgttaaagaagacaaaagaaaagaaaagacaagagaagacaaatccttggcaatcacaccaagctttctagcaaattacacctaggaaacaatcacattcaagtaggggtgggaatttgtaaataccttttttataggctgaattgctatgctttttcaagaataaagaaatattgtttcaaatggaaggggttatccatgttttttcctctgttatttcccatgttacatgggtttaggtatgattgttgggtgtgactatgtgtctgctccttggatgtttagggacaaggctaaatggacttttaacaacaaaatataggtacttggatatggcatggtttaaaaaaaaaaaaaagaaccaatgggaagcaaaagcatgttattactgaaaaagtccccctttttccctctcttttccctaaatgttcttattataaattatccacaaactattttaatgaaattatttagaaatcaatcaaaaaattgataaaagtgttctttctttttctctcttattcttgaatatcttcataaaaagccagaaaatttattacttacaatgtggtagcacctattaaggataattaagaaagaccaaaaaaaaaagagagaaatcaattacaaatcaaagtagtcataattgaagccaactaggactatctgatgaggatcccaaccccttgtgtcatgtggtgtcgccatggttatgttaggggaagtttgaagaatccagtttatcacaggttatttgtctttgaagaatacatgtgcctggttcgttcttcaggctttataacagtctgtcagttttgcagaacatttgttttgttttgagtcttgacatatttatgggaacctaacactaaatgagattctcagtttggttcttgctttaatacctaaaccatgattatgctattctacattctactagcctgatgcttgggcttaaaagttctgtgctgaattttcactaggttggtttttgaaaagcaaaaatttctctacttttcttctaaactgcctatgtttcttcttcatctaaaaagagttttataagtttaaatgctttcatgaactcttctgtattattttttctagtatgttatataattcccaaatctcaaaccagcatgtggcattgtgtttaattaggtaaacagtaaaaaattgtctgttgatgtcttatgcattgattgtgtatattacctttgttatgatgattttaattttaatttttttttttataaaaatattttctgatttttctgctggatttaaggctcatatacgtaggcatttgagtcaagaagctcg

SEQ ID NO: 11593 - DNA, 6156 bp, Vitis vinifera
  Intron number 2 from transcript GSVIVT01032150001 (locus G SVIVG01032150001) derived from phytozome v7.0 (chr-ID chr1 3; pos 22095154 to 22101309 reverse strand)
tgtccgttgacttttgtgcttgagttgaagatgatgataagggaccaaaaggatctgagaagggacactttttgtactgtgaaagtgattatgaccgttctgttatatttaaaaagtttgagcctattactagaactaaatttctatgaacattcttatacgtaaagccatcaatccacgagccttcgtatatatcgagtaaaagagttttccaatatatatcacaaaaaatgaagtgtctacgcatttgtcatcgcatgaatatgacataacttatgtatctaaattgataagcaattagaaatatttgtattacttgaatctgtctttcacaatgattcaaaaattacctgaatcggtatattatttgtgcaatttacaaatgataatattgagaggatgttcacgttttaacgaattcccttcaaagatgaagaaaatgattaatatccattattttgatattcttaaatgtaattcattaatagaaatgtcaactcatggtattgataaattaaaaagtttatagaggttgacttattttattatgggtcataagagtagattaagaattggagaattgagggggcttttagagatcacacgtcatatttcaaacatgaaaaatgtggtgagtgttaacgatgcattataagctaatatgaaagatcagggttatcttgatgaattaatatatgaaggataagggttatcttaatgagttaatcttggattgggatgacaggtgtactgatggggttatataaattggttcaacaacacatgatatactcaacaagttacaacctcatccaaatttaaaacaactctcgataaaaagctatcccaatgtaagatttccaaattggcttggagatcctttagtcttgaatctcatgtcccttgagcttcggggttgtggcaattgctcaacattgccaccacttgggcagctaacccatatgaaaaatctacaaatctcaagaatgaatggagtggagtgtgggtagtgagtttatgggaatgcttcctttcaatctctaaagacactatcatttgaggatatgttgaattgggagaaattgtaatgttgtggagaatcccctcatctccagaagctttctatactatagtgttccaaactcactgagaaattaccagaacagcttctttcatcggaggaacttcaaattcataaatgtctgcagctgcttacggcttcactcgcagtgcctattaattgtgagttgaggatggtggattttggtaaattgcagttgcaaatgtcagcttgtgacttcacaactcttcaaacttcagaaattaaaagtttagatgtgtcccagtggaagcaacttccaatggaccacacaaacactcaattagagaatgtgattctgtggagtctctacgaggaggaaatcttgcaaaccaatatacatgatctaaaaactatggcaattatatttctagatccctacacaaagttagtttacccactacattgaaattactatcaatctctaggtgttccaaactagagtttctcctacttgagttagataattcttttacttatgaacttttcttttaggttatgtttgctcaaaaaatttgagagaaaatgtaagggaaagaaaataccaatgaaaagtaaaaggaaagaaaaaatgaagtaaaataaaaaatagattaaaatttggtaaattatttttatttgttatttcaaactcattttacttattttaactcatcgatataaatattaaataatttaaaaatattttagtttttaattagttttaatgatggttgattttcttttatgttttttataagacaatcaaatatgaaaaaataacttttttttttttacatttttttctttctttggtattttttaggaactaaacataactttaagttccaattcaattgctagtcctgttagtttgatttaagagtttctttttcttgaaccttcacattttcatgctctattttgatttggcggtttgagaaaaattaaatgaaccatttataactattgaaaaattaagaaaaaaaaaagtaaaaacatggatattttgtttgtttatttatttatttatttagttttttttattttcatgttctctgtttatttcttatatacaggacatagaacaactttagggtgtattttagttagctgctttattaataagtaattcaagttgctttggttttttcttgctccaatatacctaattgcaaaatctagcaaaagtctaaaaatgtcagctgccccttacattgttagagcttagggcaaaatggtgacagactagggcaaaataacactaggttttaggatggtgccattttttcaaggggtcttccaaaagttaaaatggtggcaccatggaggaaaatggcgccaggctataaggtggcaccattttctctagaatgctcttcaactccttcaacatttctccaatttttcaccaatctttcctaattttttttgcatatgtctaaatcatttgaaaataaatgagattgattttcaaagagtccagaattttaaaataataataataattgagttgatcatttagaaatctttaaccccctcaatcaacctaaaaatgtttattggtcaaaataggatagagtcgttgatcttcatgcgactttgatccttcgactctactcatacccactcttgtgttatggacgacccaagtggttctcaagattatattattattgaaaatatttattaacattaataactaatagaaaatgtggtaaattcgagcaaacacagaaggtagcataaattgactaattgggggacacttaatgttaaaatcaagtttaagatgtgatatttgcccttgttaccattcaatatatgacatcaatcaatatttgataaatttattttttgaaaatttgttataaaaataaattatttttctaaaacaaatttaaggtatttttagattgtaattttttgtaaagtgttataaaaataataattgaaaataagagaaatatttttataattatttttaaaaagtcgtttctgaaaaccggttttatatttttaataaataaattttaaaaatgacaaatacactatctttacaaagaattaaccgtgaaaactgtttcttatattcaagtttcaaaatagaattttattaaaacaattcttaaaaatgattcctccttgatacaagctcaacacttttcatttttttctatgttaaaaaataaagtaataattttagtatttaacttcaaaggcttttgaccataatctcattatcaaaactccttaaaggaggcaagagtatgtatcaatgataatgaaaattataaggttaagaaggtgacctagaaggtatgtacttccaaaacaaatgtatgaggtatggaaagaattcttttttttacttgagacttaagacgtatctcctcagtgattagttcactaaccacttaatcaatagagagaagtggattacaatgcaaaattatcccatgcaatgccctaaaattactatgaagggtcataaaaatttgaactagttgttcctctttacaagcaatgcaaggcataaaagcctagagctctgctaattccataagagctatttggtcccgaagatcagtcatagtaaaataaaattcttgaacactcatatttttctattcaatggctcaaatatcagtctctaaccgatactattttgcaaaattagattatgtatataatatttccaaattatcccaaatttccttaaccgtttcaaaatttactaatcgtgtacctatcgaattctcaattgagttgttggttcaaataataatttttgattcatttacttcccaaatgtataattgttctacatatttttttttatccttttcattcttagggttgcttagagtgtcaataatagtctcacatctttttaccttttagaaaaattttcatcacataactctaatacgaaaatttttctatctaatctcacactaataaattgaagggaatcatttcttttactagtcataatgaataattaacaagcaactaccaaacaaaaaaaaacatatacgaatcaaataaaacaaatatgaaatccaattctaagatctgaaaacaaaaataatgtgatcggtgaaattttataattagacatggcataattttattttatttcatttttttattttttttatttttttgtgctttgataccatgtgattgaaacacaaaagggagacaagcaagcctagggttattataatcacttaaaaaagatacgtataacacaaatagagtttaaataagtttacaatcaaaggaaataaaaaggaaaaagattaactccttccaggaaagataataattcaaaaatagtaaataaacaactctaataatacaataccgagcaagaaccaaataattatttaaaaaaaaaataagttaaaatagtactttgaaaaataggatttctaaaaggtaaaaaaaaaaaaaattgtgttttgaaatcgcgattgcatttgaaagctgttttcatgaacaattttctatttttaagaaaaaatatatatatagaaacattattgacaaccaaataacaaaaagcaattttttatttttaaaaacataaaagagagtttattgaaaatattattccgattgttttcatttattttctaaggataattttaaaaaaataattttataaatacgtaaaaagaataaaaataaaatattatgataagaattattttaaaaatatttttaaaaatatagaaaatatattaagaatattttaacttcccaaataagtttattagctttaaaaaaccattgtcaaaacctatttatcaaaactatttttaaaaaatatttccttagtgcctatcactttagtatagattcaaatataataattttaaaaaatataaaataattatgtgtcttataaaaactatttttaacattagtttcataatatgttaaataatgtattttttatttttttcaaaaaagaccgttttaatagaggttgatttgatttgtaactctcgaaatttagtataaatatattaaagttatgttgaaaatatcaagaataatattaagaaaaattacttttttcacattcgattgtatcaaataaaataataaaaaataaatataattaaaatttatatatttttaaattattaaatttttatatcaaagagttaatataaattaaatgggtttgaaatagcacataaaactaattcattaactttgaaactaattcattaactttgaatttatttattctcttaccttttcttttctcctatttccatccttacactttccctcaaattttttaagtgccaaacataactttaagtcatcattggtttaaaatttggtcgattaacatccctactcatatattttacgtataaactttatctcgtatgataatactttctcttcaatttctttgtatcattaattgtcgaagacttggagtcaatgttacttgttgcgcaaggcagaattattatcatcccgtctttgtaggtctctcctcagagagagtatcacttctttcttctcgtattctcttactgcaatacaggtcgttcgctcttggaaagatggccgaacaaattgtatacggtgttgataaccttttgatgaaggtgggttgtgtggctgttgaagaaatcggattgatgtatggtgtcccaaaggagctgaccaagcttcaggagacgctgtccaccatcaaagatgtgatccttgatgctgaggagcagcagcagataagtgagctggggaggagccgtgcaatagaaagttgggtgaggaggcttaaagatgttgtttatgatgctgatgacctgttcgatgatcttgcagctgaagatttgcggcgaaagaccgatgtgcggggaagatttgggagacgggtaagtgacttcttttcgtcttcaaatcaagttgcttttcgtgttaagatgggtcatagagtaaaggaggttagagaaagaatggatttgattgcaaatgatatatccaagttcaattttaatccgagagtcataactgaggtacgggcggagcatagggggaga

SEQ ID NO: 11594 - DNA, 6305 bp, Vitis vinifera
  Intron number 5 from transcript GSVIVT01011324001 (locus G SVIVG01011324001) derived from phytozome v7.0 (chr-ID chr1 5; pos 8515956 to 8522260 reverse strand)
ccccctccaaagagctagtcagagaaaaaattcaggtactctattgataatcctatagactgatgaaacccactaatattttggcgtggcttttattgcaaagtaatgtaattactctttcttgaaaatttgtttagttgaatatattcttaggagtatgatatcaatggaaaaaagttgattcttgagattgtgaaaagaaaagtaatttagggaggaagatgagacttggaatataagagatatgcacttcttggtcttctctcagtattctccaagaggccttaaggattccacttcaagaaatagaaggaatccaccttgtaacaaaataacgattgtaattgaattttctttgactcaaaatttctgccttcatggaaaacgagaataaataaacaacagtgctcttgttctaagaaattccacttataaaacaacagttctcttgttccaatgtgaaatgtattcaatatgccttctgtagaaaagagatggaagaataaaaggttgaaaaattcttcttaaaaattgtatagagacatgtacacacacacatatatatatacacaaaaatcctagaacccaagttcaggactttcccaactcaattacaataaaatccctttgattatgggattgcctgcctaattctctattcagaatcacatctttcctaatttcaattttccattccccctcaagttggggtgaataaatgtttttcatttccagtttggatatgcttgcttgaaactttgtaccgtttaaatcttttgtgagtatatttgcaagttggcggttagtagatatataaggggtataaatcaatccactgtctagtttctctttgataaaatgcctgttaatttctgtatttcgttcgatcgtgttgcactggattatgtgcaatactgattgcagatttattgtcatagtaaagtcccattggcctatcccatttaatcttcaaccatagtagttcacagactcctttggtcattgctcggaattctacttctgtgttggatcttgctaccaaactctgtttcttgcttctccatataaccagattcccaccaagaaatgtgcaatgccctcatgttgaaagtatggagttaagacttgattattattattattatttttgataagtataatttgattttagagttaagacttgattgaaatagtctctggcattatcggatcaaaacctcttgatagtgacaccaaactggttttctaccatgttatgaaaatttggaagaacaaaactcgcatcaaatttgtgtttaagtatgaaaatccaagagaccctcgtagaatcatcgataaaagatacgaaccaatgtgcactagatatattagagacaagggaaggacctcaaatatcactatgaattaaatgaaaaggttttgaacttcttttattagatgggaaagggtgaacgcttgtgttttagcaagttcacatacatcacaatagaagctctcaacatttaatttattgaatagggaaggaaacaaaagcttaagagtttgaaatgataaatgtccaagcctatgatgatgaagccaattttttttttcatttaaaagatggtgctttgaaaggaaaaatacagatgactcacttggtatctcaaggtagtatagcctgttctgttccttagcaagtccaatcctctttcccaagtcttggtcttgaaatacacaataagtaagaaaaaatgacacaatgcaacccaaatcttgtgtaagcttttgtatagaaacaagattagtggacacctttggaacatggagcacatttctgagtatgagtgtaggactaatttggacatctcctatacccgcgacagagattaaggaaccatctgctatggctattttcctactacttggacaagggttatagtttttaaattggtgtgatgaaatgggtcatgtgatttgtggcacctgaatccataacccatgatttgacaaagatttcatccgagacttttaatccaatggaaataggaaacttacctgaaagtgcaagtgagtaggtgcttgaaggtttctcaagagatcccaacaaaactcttattttttcaatctcctcctgattgaatctgccttgttccagggatttttcttcatctggctgagtagaggacaagtttgcttgcccattattcctctattgtcctccattgtaaccccactctttgctagatgtagttggggtttaccgtgaagtttccaacatttttcttgtgtatgtctaggtttttgacagtgagtgcaccataagttgtccttgttatcacggtttgaagcctttgactgatcaatccttttgttattcgcaatgctagccttatgatcattgcctttgttagcaaccatagctgagccttccatattctaagattcaagcatgccactctttgctagatgtagttggggcttaccatgaagtttccaacatttttcttgtgtgtgtctaggtttttgacagtgagtgcaccataagttatccctgttatcacggtttgaagcctttgaccgatcaatccttttgttatcagtagtgctagccttatgatctcattgcctttgttaactaccatagtcgagccttccatattttgaggtttaagcatgccacttctcctgctttcttttgctcgaataatggagatagtctcattcaaagttggaagctctttgctaagtatttgaactcaaacttggttaaactcagcattgaaaccaattaagaaatcatagacttgatcctttttgatatggttctttaggattgttgcatcctcagggcattttgtctcaatacaacgatagtggtcaagttgttgccataggtttttcaacatattggcttgctctgtaactgtcttgtttccctatttagttgctccggtcttaacttttatttcgtacacttgggctgcatctaatgcctttgagtatgtttgatgaattgcatcccagatgtctttagcagttgtcaagaacatacaagtgtcactaatgtcaggcgtcatagagttccacaaccatgccataatcattgagtcttgttcatcccagccatcaaaccaaggatctcctctacttggtccagttccgagaaggtgacttacttttctgtttcccttcagaaaggtacaaataagttgtgaccatttagataattctcccgtgttatgagtggtaatcactccttcagaaggattggtgaaggcaatagttagtgataccacatgcatttttccatttttttttttggaggaaataaaacaagcctttttaaaaactccactttcttttttttcttttttctttttttaaaaaaagagaagaataaacctgggggtttaaatagcacgcatggtggggatcctaagcgaggagaaattgaccatggtgtgaggaaatgatgataaggttgtttgtggtgtgagtttgagacaaaggtagcacaaggaaaaaaccgatgatgaggggcgacaacgagggttttgatgacgacttgattagtaatgtgacgacgatggtgaaatttcaccagcgcaaggagatcgaaggctcataaaacgagagagatcaacgtggcctaagaagacgagcaaagtcgaggtggctagggcttgcaagagtgctattgagtttgtctgcaagtagtgtgatgcttgcgagaagtttgtaaagatgcgaagccgagaacacgatcttgatttcgcgatgagtttgcaaggacgtcgatggtgtgaggttgacggctatagtatgatggcaacgactactctattcacctcctgtgtttgctacaattgctcaactcggataagagaagattttgaggttgacaatgaaggtcgattttggtcttcaatttggaaaatgaaggtcaaaaaagaaaagcttctcttcctagatttacgagcctaggctctgataccatatagaagagagattgaagaataaaaggttgaaaaattcttcttcttaaaaattgtatagagacatgtacacatatatatacaaaaatcctagaacctaaattagggactttcctaactcaagtacaataaaatccctctgattacaggattgcctaattctctatttagaatcacatctttcctaatttcaatcttccacacctttttacaatctcaaagtctcttcttcacgcatgtttaaaatttccctataggattggtataaaaggtactataaaatagaaaaatcttttaatggtcttaaaatttcagaattgccacccttggccaataaaattcgcatggcatctatcaggactgtggacccatgtcacatccacacatacttgaaagctgataatcttgcatcatttttcatagaggacctgtatcctgttgaaaccctgatgtagcttgttatatagaccaatcagactacacagtttgcccaatttcaaatgaaatcttgcctatcaaccaaagaagtgaagaagaaaaatgttgtctttgttgataatttgcttctgcctatgatcatgaatctatgaacgataggtcctggtcttgtcattgtcatcattattctaaatgctgttgtcatcttcactatcatcatagtcatcgtaatttcctcatccctgccatctaggattaaatagggtcctatcttcccatcttcccatcttttaaatctataggtcccattcccatttaagcacgaattagaatctttttacctatttccaaaatttatccttctaaaacctctaaacaactcatgttggcagcttctttttttaaatagacaacaacttgcacttatgtccttgctagttttttactcaaccgttactaaattctcctttaaaaacgataattagaagagttaaatatacttgttccgttactgcaattgtgcataaataacatttattctgctaggtcaagactgttggtgcaatttgatgttttgatttttggcctgaagcaaggattatgagattaacaataacaacttggagtaaagagtttctgaaggtttgaaggttctgttgtcttgttattccacatttctgttccagattgagtattttgagtctcaaatatctttgataagtctgatattgatgggtttgaaagactcatttagtagtaagaaatatgacggaaagctaccgtacctggtaaggccagtacctctaccatgaattatgaattattggaaaaactagggaaaatatggttacacaaatgagctgcatttgaaaaatactaaagtagccttaatgagtgctgagctatgtgagattgtcatttagaccttcattttgatcaagaaagtctaagggaaatgatatgggaaagaaaaaggagaagaaaaaaattgtgaagacaatgaaaattagatttgaactcaataaattctttctccaatccttctacatttttttttttttatataagagtgaagaattagaaaatatagatctatctaggaaaattttcaaaatatagttctctaaaataagtttgagaattgttcttaaaaacaattatcaattgtttttaggtataaaattttgtttgatatctcaaatatgaaaagtaatttttttgacttgtttttatgatagtacttcacacttatgtacagtacaaaagttttttaaaattattctctatatttttaattattacttaaaatactgtacaaaaaataattgaaattaactaaaatttgttttaaaaaactatctgttttaagaacaaagttaccaaaaattgttgttaagtttgttaaacatgttcttttaagaatagtttccaaatacgcccaatagtttttgctgcagttcatttttcttcgtctatccacagcaaaccaaataagagaattaggattccttaatatttcttccatcatcgttttcctgggactttctgagatctacatggagccttagggtgggtagggaggcattttttaaagtaaagtgtagcagccttgtcgtgaactggagctaaaccacagcttttcattgtctagtgcatgatgattttgtcactaatgacagccaagagtgcataatgaatacccatgacactacctgtagtgtccggtctttacatgagtgtgaacctcctgttttatgatttgatgattccaaattgaaggaaaaaacaatgagtgaacagtgttttttcttccctttggcttctatgattcatcaacaaaaggataaataagtagattgttcatcttgcaggagtgtgatatcaacttgg

SEQ ID NO: 11595 - DNA, 5208 bp, Vitis vinifera
  Intron number 1 from transcript GSVIVT01032645001 (locus G SVIVG01032645001) derived from phytozome v7.0 (chr-ID chr1 3; pos 1843631 to 1848838)
aggagctcgcgtcctccggtcccctcgcttcgcaggtgaattagggtttccgtttcttttttagtttcgtgaatttctttttacgttattatgtttcgtttgtgtgtggaaaaattaagatctggaactttgggttgattttggatcgattggtcgtattgattgagaatttgagctcaagggtgcgcttgggttttggaaaatgttaaagagggaaactacttttggttgacctttacgtggctggtttactatttttttctttaaatttttttctatgctttaagagttatggtagggttcgatatttgatgtaaacgaggggaaaatccataacgaaatgtatgtataatgcctagatatcaagcaaacttactaggaaggtttgaatcatgtagttttattgcttctcccttttattttcatttcttttttaaaataatggatgggttaagtttaggtatttgatgcaacacagggaaagtccataataaaacaagttttgaattaaataaatctatgtaacccttatagtattttctttctttctttcttttgagttactggatgatgcttaaatatcaagcaaatttggtggaaacaggtgcccatgggtatatttatttaatggtttggagagtaaaacacctatttgtctgagattgtgacatatcagctattgcttttgagccctttagcatagccatagctgttataagttctctcaatacgcaatagtgagtacatatttcatgtaaatcactgtcttcctggtccattttacatttttaaatgaattttacgataaatatatatgacataataatcacaataaatgatttgtattatatccagatacagttcattatttgaaatatttaggaaaattgatttgattttttttatattaaaaatatgactatatcatgctttaagagctgatctatggcacagaaaaatggaaagtaagatggagatatcctaagctgaaacattggacagtattgttaaaggcatgtgtagaagattggatatcatgtgtatttactgtttcaaccaacatagaagtgttatttaagtgaaacttatgccatttgaattattagttgatgataatgaaggtagaaaactttttcttagtacattcctttctgtctctctctaaattttttttttttttttttgggtttttttctcttttaatgatgatgatgaagttgggaaattacaactcagatcatcacatgtagatgcatatatgtcatagtccgtacaattatgtgattataattgtatattattacagtttctccttttctatatctgtttcaaacttatagaatcttggaaattttggcataataatttttattggcaaacgagttggaacttggaacttgtaattgtaattgaaaaaaagtttgtttttctgcattttacaacgagtctatgtagtaaaatatcaggcccagtgaaataatttcagcaaaactctagtacttgatgtttgtatgtgttgcatgggtttgggtgtgagtgatgaactgttcggtgtgtgattgctgctgggtgtttatatataaataagagcaaagagctgtatatgaaacaaaatatgcttatccaaacaggatttatactcacacacatgccatatgatgtgaacatggataagttggtttgggtgaagctgaagattctatgtacttcagatgtttacatatatatatatatgtgtgtgtgtgtgtgtgtgtgtaataaatgtcattgttgattgcttataagaagatatattgctttatgcaacattcttacaaatgtgtttcgcatgtgcatgcacattttttctattatattccaatattagaaatatcttatggtatatgatataatatgatgtacgataaggagaaatagaaagcaatacatggtgtgatacatgagttggcataaggtgaaaaaggatgtgcaagcctaaggtcaaaggggggtttgggaagtttttttgagaataaatctcccttgagaaaatgactttggaggtttctaagggaaagttttgttttttgacataaagtcatattgaacatctatgcgacacaccctaatgattaggacaccaacgtcctagtcaagtggtcgcatcattgcctttggaaggccatttgtaggttttttagagtttctctagacatgctcgttttgtggtgagtgatggggctaggatttgtttttgggaagacttgtggcggacataacaatttttgtgctcttaatttatgaacataagaattgtcaaatttaaattatccaatctcatctatccttggtatctcttacctttttttttttttcttggaaccttaattttcatcataacctcattaacttggagatggaggaccttgaaagactcatgtactttctcactcatgtgtacttgtcactgtttgtctcagatgtgagagcttggttattattttctttttgcttattacaataaaatcttttctctttgctctatctagtctatcaattccatttctttctctccaactaaattcatatggaaatctaaaattcgatttaagtcacattcttttcttggccagtagccaatgagaaggttaacaccaatgacatgctacagataagatgaccttacaaagtccctagtcctaaccattttatcatacatatgagaagtaaagaattgattaatcatatgcttttgtactgtttgttgacattggggctatgtgacaagctatttagactagctaggttaaattgggttcttccttggagtatatgtgatatgatgactatctcccttagaggtttggggagcaccattagaggcaaagttctattggaagttgtttgtttcacattgatgcgatattattctaattaggagatagataaaagtagaaacaggaaaaaggaaaaaaaaaaagaggattcaaagatcatgaaacaaaaattcccaagaaaaactattgaaatggaagccctctctcgaccagcctgttgacctttttattaccaatttagaactctaagcaaaagagcatcacgtatcacttgaaagatgcaaaattctccttgtataatgatcatgtattcaaggtgctagtttatttcaggacaaccatgatagaactagcttctttccttgggaagtaacttgggacaagattttaacattggatcaacttgaaaagaagactttgaatatctgaaatagatgctacatttgcaaagaagaagaatcagttgaccccattctctttcattgtttgaaagcaggctttttgtggctgttgatttatgctttttttttttggtggctaatgggtgatgcactctttggttaggggtgctcttttgaattggttgtgggtcctttgtaggaaagaagaggaaaaaatggtttggaaggatgctctattgtgtttgttttgaaataagagagcttctgaaaagtgtgaaaaaatgcactaagcaatttaacattccttcttctatatcttttagattaagttacaatgtttataggggattgttccttgttgatgctgaactttgtggattggttaggctctaggtagcacgtagttgctgttttttgtgcctttgtgcttttgctttttttttttttttggtcttttggtttctttgtatgtatatatatatatatatatatatttgataggcaaaaagaggatatgtattaaaagctccttagagaaggcgaagcaagtacacatgaagtatacaatcaaagcgcataggcaaaaacttaaggagcaaagaaaccttctccttattgggaactcaaccaatcgacaaaatctaatatggatggtatgtggtcctctatatacaccctagcctaattcacaaaagtatacataaaaacagatttaattgcttgattagcttgcttaaaatcattaaaagctctcatgttcctttccttccaaatagtccaccacaagcataagagagcaatcctccatgctttctttcgtttcttacccacaaaagagccataccaacccaacagattccctctaaccaaggaatgcaaaactcacttcactccacttccaaaagggaataaatcaaattccacaatattcttactttaaagtaaaaaagaagcaaatgatctatagttttctcctcgaatttgcaccagtaacacttattcaggagattccaactcctcattttaagttgattaagaattagaattttgccccaagacgcttcccaagcaaaaaaactgaccttcactggagccaagtccaccgcacaatactaaatggaaaaggatctctaggtcctttggaaaaggagcaataaagagatctaactaagaacctgctgtccttggtttcattccaactcaaattgtcctttacatcctttttaactaccaaaggttgtgattccaaaacaattttgacttctttgtatatatcgtgtatatcttcctacttttttttgctgataatacagacccacttatctatcaaaaaaaaagaaaaaaggaaaatcctccaattttgcctttctgaggcattccaataaagcctgaatctcggccttaatagctagactgtatcttgctggcttcaacaaagacatgatgaatcacctgaactgtcagaggccacagtacccatccagatacgttaacagtcaccccataagcaccatcaaacttgagcttaaggctttcttcagacaaaggaagatacgcagatctgacagcgtcttcttcgtatagctggaaaatcactatctcagttttggaagctatagtttctagttttgacaattcatctagatttgtttttcccttttctttgtttttgaaaagggagtctaacagttgggatttatgagcaataacagtcatgaacttgtaatgagctgttatctatgtcatatgttttgttatttcatttatcaaacacaggtgtgagtttcaacattagagttgcaaattcatttaccatgttgcattgttatgttcattgtataatttgttgattgttgttaaaagagtatgaaggtagagctaggagcttataactttaatattagttttcttatatgtctattctttgtattttgcatttttgtctttgttctgcagctttcggagattgtgaaccaggggaaattggtgtc

SEQ ID NO: 11596 - DNA, 814 bp, Vitis vinifera
  Intron number 1 from transcript GSVIVT01028201001 (locus G SVIVG01028201001) derived from phytozome v7.0 (chr-ID chr7 ; pos 4579080 to 4579893)
gcaaaaccgagtgcaacgttgtctttgtcacgaaggttccggtctttcttttaccttttgacacttgttgaatctgtaattgtttgattcttgattgagtataccgtttggttgctgagaaattaggggaaatgaagctgtcgggttaactagtcaattatttggttgagttgagttaaaattatggttttattctttttgtaaatgaattaaaaacagtaattaattggaaaaatttagatttcattgtcattttttttctctttccctccgttttctatgggcaaaacaggctaaggttgataaatagaaaaaacttgtgagagtaagttaaagttgcattcccttgggataaagtatttgataaatggaacctagttgcatttagtttgttaatttgtattctgttcaatttgagcaatacacatgggtctattggtgttgctattgtttaaggttgaacttcaagactttaagtttacgatccttactttctgcactttatcaaattatatgaagttggttctcacgagttccgagagttttctttcctgttctgcttagttgagtgtttatgattcttttaggtatatttgttggatttgtgattgttgaattcacacaaaatattcaatttaaatgtgatttgatttttcaataataagaacataaatggggatactttggcattcagtgttgctgatctgaaatatgcaactagaaagagggattggtagatatgaatgtttagcattcagttctgatttttattttgatttctacaattgtgcaggccttaggagattatacaaga

SEQ ID NO: 11597 - DNA, 3012 bp, Vitis vinifera
  Intron number 3 from transcript GSVIVT01028660001 (locus G SVIVG01028660001) derived from phytozome v7.0 (chr-ID chr7 ; pos 11749863 to 11752874)
aagattgtctatattttgttgattcagaggtatgcattctgaattttttgaactatgagttatgaaccatatgctatatcttgagctggttccttgtcattttctttttctgctgaactggctggttttttaattactgcatagattcatgggtaaagagaaatagttttctttttagtaagcatactcattcctcagcttatcccgtaatacagttatggttttgtatagcttctatggaggtgttttctttggaagcagaagtcactctgcttcccattttgaattcctatgcacttgctttgttaattatgatttgaataggttgcctaagattcttgttttctttgcagcagtaaactacaaatgattaaagactattcatgaatcactaattggtgatcattccgaaaataattctgaattgcagcttgctttgttaattatgattttgataggttggctaagattcttgtttgctttttggaagtaaacttcatttgattaaagactattcatgaatcactaattggtgatcagtctgaatggcagcatatgcttcttttgtccgctaatttatgtttgggtgtgcttgtagtttccctctgaagatgggatttcgaagaaccttatcttagatataaaagtccattgttttattgtatttggaaggaatacaatgaaagaatctttgatgggtgcttccggttgtagggtttttctgttggttagggcagcttgttgttagggtggtgggcatttctcctcttttccttctttggcttgcttttgggccaaatttgtatactccatgtgtagttttttccgcctttttgcaagcgctttaatttatattttcttacctataaaaaaaaaagagaatctttgatgggaattgcacctgaaaaatgtttttatgaattctttatttgaatggtctggtagatcagtagcagagtgaagcctttattttgtagatttcattatccggatgtttctttggcataaagagactttttgtttgcttatggtctggtagatcagtaggagagtgaagcctttgttttgtagatttcattatccggatgtttcttaggcataaaaagactttttgttttcttttattttcatgttctttttatacatattgtgtacgtggattctgccccctttccattgctcacttaataacatcttatgaaaagaaaagcaagctaacatcaatgacctgctccaagttaggatggtaggatggctcttggtcatggctgatattcctcaggtttgaagtactagggaatttcttgaccaaaccaatgtacttacaggtggaaaaagtttcttttcttcagctaggatcctctaggtgcttcaaaagatattaaccgattaggcacctttctccctctagatttaatgagtaatctagcccatttcaagtgatgcatctcctttgtctccaaatccatccttacaaaacctcctcaagcatcgcccacccttttaaagaactcttttccccatagattcaccagaagacccaacagccttacccacacatcgccaatgcaggtgccttctctaaggcaaccaacattcggctcccacggtccaactgcaatcgtcttcccttaaataagctagatcccaaaaacaaaactcttttggccttggaaacattttcaaactcaaacgaaatgagattgcctacgaacaaaagcagatttaattcagaccccaagattctcgagcccacaaattcagcatgtccaaaactggcaatcagtttgaaaaaccatcccacctccccactagacacttcttgagaagccccaaattaggtagacctctcttggctcactcccaatccacacttcatcacccaactccctcatatctctgttcaacacctctgcaaaggaagcaaccttaaacagattgtcacctctcttttcctcctgacacctgattggctcctttgactcctctaaaggcctagacacaaggactaccccaatgctcctaagacttgaagcaaggatcttccaacccccttagggagcctttccttctggaaaaaccaaggaaaccctttttgcctctatgcacatagctgagcacaacagaaaccttccagctttgttgctacacaactccagcttgtagcccctttcccctccatttgacacccttttgagaggctccctgaacttcccttcacagtagtcttccatcccctcaagaagtaaagaaagatccctctccccaaatctgatccaggaggaaaacccccgacccctctctacaatcctctccaccatcttaccatttaaagactccaaaaagatctcaaaggactttgattccacaccaaaccagaaacttccatcaagaggcctctccttcagccttgtttcttccatcacatgctatgacatattgtccaggaaagccaagacagatgcttcaaacatgatgctaaagttctagggaagatttcaaggtttgaaggctcaataacaaacatccctttccccatgcactccttcattcatgattttgtacatacagattgtcattctatcacaatagaggagggcatttttattttataacatataatttaatttaaaaacaaaaaatagagaatgaggtggctgtggagacacttttggcaggtgcatttaacatttccctaatttcttttaacatgaggcaggaaaatttctgaaatgccaccttttgacaaaaatttactaggtcactgcatcctatgatattccagtgcaatgaaacgaaactcaaatttattattagagagcttagtaacccaagatataaaattaaattaaaactctaggtcaacgtattacacctccattcttacatgtgcacataatatgaattgtttaatatagtggtaagatctattatattgtcggttcagttctatttgttttagttcttccaccattgttttttaattgttctggttgctatctctgaagaacc

SEQ ID NO: 11598 - DNA, 12217 bp, Vitis vinifera
  Intron number 2 from transcript GSVIVT01012998001 (locus G SVIVG01012998001) derived from phytozome v7.0 (chr-ID chr2 ; pos 10418234 to 10430450)
agctgcaacgtgtctccaagcagctgacatacctggtatggttgtttctctatgtgttgccactttttcttttttatgatagctaatcattcctttcttttatttttgcacccctgtttccaggactgagtaggttagtatactttgcatcttgatcattgctttagtatatttttggatttttaaccagaaccatcacaattgttgacctgcatcttcctcactcaagacgccatgcaggcaggctgacatccttgcacttcaccagtcaaataggcggaccgtttgaaactgtagtataggttgtgcaccctttcatgaggtgctttttaataaatttttatttgcctataaaaaaggattgggtcttgcatagagatgaatgctagctcatggagaaaagttataattacttgcatgatttatgcttcttcatattttgatagagttttgcttgtatagatccaacctacaacacttatattgggggagttgaagaaaggaaatgccaagtttagttttccattagagatgcagtcatattccacctttaccatggatttagaatcttttgatgctttaggtaaggcaaatggttttgaagtggtggtggtttttgcaccctgaaagtaaatggttagaaacctaggattagaacagttaatcttcttaaaattggtggtgtggattggaagcaaagagaatgattaaatgaaaaggaatttgcggtttccaacattctgtttgctggtgacccattttcttttgtgaagcagaaaagtaatagttatcatatttgagatggactccatcatgctttgaagtggtcttagtgctgaacgttaacttgatcaaaagtgacatctggtgtgaaaggtggagggtgtggagcaattggcctcatggtctggatgcaaaatggtgcaactctgagctacctatttgggcttatccttaggggtggcttttaaactgttttcagttctggaacctattgaggaattatttaagaagtggctgacctcttggaagaggaagtgtctatctactctttagtatatgtatgttctaagatgcttagttggtggattgttggatggaaggattaagttttcaagctaggtagacccctatattcaagaggggcttctttgattgggagataaaaactattatttttgagatgtaaaagattttatccaatgaggctaagaggggttgcaaaccatgcaccagggatgtaaacaaagaccaagaagacagaaggaaaacaaagaaaaaaggaggagaacaaaattttctgcttctctttactactcaaaacatcaataaaatctgtagaagtagagcttccatcttctattgatcttctagcctattcaaaaacatttttcagcttcaattgtgattgatttaagcataaaaattatttttgttttgtagcttctatatacaacaaaaaaccatactttcgttttcccttttctcagcatccctctatgcaactactcaagttattcttaaatatttgggatgagtcagattatacatagatcatcactcaatgtctatgataggttttatcgattggttgagccctaaggaagaagagggagcttgtttttgttttctttttccttggatagccttttgtgcatattaaatacatcatgtgtaccttggtgtaccctttctaaggtgcaattaatatattatcttttattgcctataaaagatattgtcttaggaagtactccagaaataccaaagggtgagaataataaaaaccatgaagtatgtgctatactacaattcatactacttacacaaatcaaaaccaatggactaaaatccttcccttttgcatgagttggtccaagggggctggagcttgttgcgccctttttgcagattttagatgtagcggcctttgaccataggactgttttgggaggcatctcacaagggcttgttcttagatcctaccaatttctacacaagtttggcatgcaatcttgtctttttctcaggtagagagatttggcattttaaagtgccatccaaaattagcttctttcatttgaaaggttgataaactaagtggatgtcaatgtggttagtagatattatttgtgtcaattgtagaccatattcttatttattgtagatggtcttccaatttgttgtctttgatattctccctttttggggtgtctttagctcttcttgagatagatagtgatgttttattgtcttcacatgacattttcaaggaaaagaaatatgaggtgggacgaaagattgttccattgtgcttcttctgagaaatatcgaaaaagaggaatagaaggtcctttggcggtttggaatagtcatttagttgtaaacagtgtttgaaatataatcggagggcttggacatgacaaatagcacaaatatgttgatcatccgatttttcaggattttctctcattttttgctgatttaacgacgatatattgaaattcgcggatggttcgatgttattgacaatttttttggtgccatgtcaacacctttcaatgggtttcatctaaaaattcaacctgtttgtgcattggccatgataagacagtccagtaagcccaacaacctacaatataagcattgctactatagggcgacaacctttgaattgggctttgctctctttcaaattattgatgtgggatggctatactttacactttaaaaagctcacttcactacacacaggaccaatactcaaaccgaggacctcacatttgtgagcaatgccttgtgccattacaccatatctttatttgtgttgaattcgtgtatgaattcatatatatatattataaattaattaaaataaaatcattataaataagttgaatttaattattttatcatgtattttatatacaaaccaagtataagacaaatataaatttataaataaatttatctatatttttaaataaaaaaacttacttaaatatcagtatcaatttcttcgataaaattatatgtttatcatttactagaatttttttacaatattctcatgagttttaatcaatttttcggcttatggatattttgtgtcaaaatatccaccgatagtttttgatatatcccaatatatctataaaatcaagttaccgatatattcgttgaaaccgatattttcatccttggttgtaaaagagtaacttaatatcatagttttaaatggtgcgtttagtgtaaggtattgtgatgtggttgccatagcttcaataaggcatcactttaggagcttaactacatgattggagcaaggcactccaaaaaagcgccccacaaagtacacaagaagtacacaaaggatgcctaagagtgcctaaaaaaagagcagggggctaataagaacaacaccccctcaatcatagcccaaccaatctacaaaatcaacaacgaaagagggaccaaaaactaaaaaccccttagcccacgcccaagggttacaaaggaagtaacatttacacttttgaattgaatgaccctcatcttcaaatgctctattgtttctttctttccaaactatccagaaaatgcacatgagagtagcctgccgcattattttcctcttcatacccacaaaagatccatgccaacctaacaatgtctctctagctcaaaatagaagcgcttacgacaccccaaactgagaaaacaagtgccagagactccttgcaatattgtaatgcaaaagaatgtgatcaagaggcttttcctctgaatgacacaaataacatctgttatacaaagaccaccctctcctttgaatccgatctaaggttaagatcttattctaagtagcttctcaagcaaagaaacccaccgtcggtaggacccatgagctccaaattatactagtaggaaattccccttgtctttcctattacaaagctttgtagagagatttaacagtaaatttaccatcctgcaactttgtccataccacctgatcctcaacatctctacacatccttcttccttgcaatctctgaaagaaacgctccacgtcaaccacctcctaatcattgagctgcttagagaaacggggatcccaacctccctctcttgaatggttgcaatcatcttccacccaaacttccttagataaggatacattaaataaggagggcaaagtggtgcataaaggatcgtcgccacaccagctgtgcttccaaaatccaactctcctcccatttcccatagaaaaagccatattgtcgcccattgccccccattctctcttgatggcttttgataaaccaaccccaaacctttccctcacttcacaagaatgccactctccctcttcctccccatacttcccacaaataacttgtctccaaaaggcctccctctccattgcaaaacgccaactccatttgcataggagggccttattgagcaatgtcaaattcctcactcccaaaccacccttatgtctatttgagtagacaatagaccaacttactaaatgaggcttcctctcaagggcccctcctcctgaaagaaagtccctttggatttgctccaacctcaatctgactccccttgggacgcaaaacaaagacataaaataaataggcatactagaaagggtgcttcgaattagggtaagcctaccctctttggaaatatagtctctttcaaatcaataaccttttccgaagtctctcctctataccatcccaaactgttacatccttgaaacgagcgcttaagggaagacccgagtaagaagaagggagcgcactaatcttgcaatcaaactcttgagccaactctcctacattctccactctccccattggaatcaactcacttttatccaaatttatcctcaaccttgacatggcctcaaaccacataagtaaccaactcaaatatatatatatatatattctctagatcaaatggcttatttgagttggttacttctgtggtttgaggccatgttggtatatatatatttattcttaatccatgcaaaaatgacatcattttgagacttaatttttgaaaaaaaatcaaactgaaatgatatcgatttgcctatacctttttgtgaaaagcagaaacaaaacaatgttgtttcgttgagccctttttgaccttgaagattaatcttagtcatggatcacacattagtgcaggaggggggaaaaagggcgaggggtggggtgttttggggggataagtgcccttttaaaaattgcaaatattgacttgcaaattttatccctgtgattttctcttgtttttcttttattagtttttttaacaaatgatatataacaaaagcaataatgatgtagcaacactctctcaaaccgtttaagcaatgcaagtcacatgcaaataagaaaacaattgcaaatagtttaagcaatcattcatcgataataattaatttcattaactcccataactataggaacaaaaacatataaggccatcatctataatagtgagtatattcagccacatgcactaataaaataccattgctcttccaaacattgcggattaatcaataatatattattcaagtagaataaaatgaaattgagagtgtagagagagacgggagataaaagtacaaagatacaaagatttagtatggaaaatcttttagactatgattggtgtgataggataggatgagatatatatatccaaggatatcatatctcattggataggaaatacatatttaataggacatgatgttcttggatattatatccaatggacataatgtggtgggataggataggatgagatatgtatatcctaggatatcatatctcattggataggaaatacatatttaatggacatgatgaccttggatattatatccaatgagatatgttatatcatgtttatatttaatttgtgaaataaataaaaaataatatgaaatatatattatttttcgatgtttaaaataaaaattatatcacactccaatattttctatttaaaaaaaatgaaaaatttcttatgtttaataatattcatgattagaatatttaaactttatgaataatattttttatgttatgttattcaatatataaaaataatatatgtatatattaagtaatacatatattaatattattttataaatgtttttttggtttttcttttttaaccataaatttaatttataataaaaaaattttattttgcaaaatgagtagataaaaaaataaatttatgatacattagatatgcatatcccatattttagcataggattaacatatcctatgtagaagggatataaaaaaaggggtggataatatatcccaccacttatcctatcctatgtttggttgaacatatgataggataagtgatgagattgtttatactatcccatcaccaaccaaatatgggatatgatataatatccttttttttatcctttcccatatcatatccagtcaaccaaatatggtcttaaaaaataaaaaaccacagatctctaatgattacaaaatccattttgaagaaaacactaagtgcattttttttttcagaaataaaaacatattcattaaaaatatgagattacaagagaaggaagtcctttcactaagtacaagtttttaccttgtccaaaaactttgatcctcttttagactgcttatttaccttttgaactttagcttcacaccatgttcatatggagcacacttggaattaccatagaacacaatctccgcctgctcttgatacccaatcaaaaagaacattggggtttaccctaacaatgtagaactagagagaaaggatgaaaagtagaattgaatcaacctattttattggcaaaatcatctctcactcaatttttttttgcaattcaaaatattttcccacaacctaaacactcccaatttggagaagttgaagttcaaaggctttatcacatggttgctctttttctctctcaagcccttacatgaaaaatttgttttaaatagaaagtaagaggatcaatccaacgactcaaatttgtaaagaaaaattgtatgtcaatcaattaagcttgaatcaaatattagactacacttgagttcttaagatggatcaattgctcttagtgtagggaaactcagatctctctgttccttatcctaggcttaggttagatgtatgaaaactccctagggcatttaaatcttatgcaacggaagcaaaaatacaatttttaacagtaaaggatctaaaaaactgctatagaaaactttacctttgatttgaatgttcctacatcagatatgtttggagaggatcaaaagtgaagtcttgtaaacccatgatcttctgcttgatgattctacctcaatccttggcactcaaacaatggggtgtttgggagggtggaggctaagggtctctcatttctctagatggtggaagaagactaactagaaaccttaaccacttaggtgggtatttatagggttccccattggacttaagtgacatgagcccacatgggcttgaatcacttaatcaagcccaaaagggttctagttatttaattaacgcaacagggttttccaattaatcaattagcctaatccaaatatactgttcattaaccttacataaccttatgtaattaccaaaacgcccttatgcatataagtgaacttagagcgtttccaaccctcataaattgagccgtcaaggcatatgagctcgagcggcgtcccttgggatccataggagtattgcatccctcaaaatccaattttgaagttgattcaatattctattatagagaatcaactacactttggtatcctatataaataataacaagatgaaactcaagtttatgacctattatctattgcatgtagactccccatgaatcgttgtccgtaatttaacaaggtggtgctatcaccaatcaagattacctctccaactttgaattacggatgccaccaattaggtgattagttgacatactctaactctaaggagcatatatcaaatttccaataaggaaatgctatgaccatagcaagattgaagaaatgccttgcagttgaatttgagattaaagacttgggctccttatggtattttttgggaatagaagttgctagatcaaaaaaaggaattgttgtcactcaaagtaagtacattgtagacttgcttgaggaaataggaatgagtggctgcaaaccaagcaagcccaatggatctaaaccttaaacttggagaactaaccaagggagtgccagttgaaattggaaggtaccaacgacttgtagggaagttaatttacctttcccacacaaggcctgacatagcattcacaaccagtgttgtgagctaatttatgcactcaccatgcgaaaaacatcttgaagcggcatacaggatcctaaaatatttaaagagtacaccaagaagaggtctattgttcaagaaaagtgataagagaagtatttatagatgtagacaacggaggttcaatcacaaataaaagatcaacttttggttattgtgcctttctttgaggcaatctcgttacatggagaagcaaaaaacaaaatgtgggagtgctaagtaatgcataggcagagttcagggctatggtaaatggagttgtgagatgttgtggctgaaaagagttcttgaaaagcttaagttaaattcggaacctcccatgaagttattttgtgataacaaggcaacaattagcatagcaaacaatcctattcaacatgattgcacgaagcatgtttagattgatagacattttatcaaagagaaacttgaaagtgacgttatctatatgccatttgttaccacaagacaacacataactgatgttctaactaagagcctttctagactagggttcaaaactctagtcagcaagttaggcattattagtatctatgcaccaactttaggagtgtagaaatattaggattatttgttaaagtttctgttttgttttccaataaatctgaactaattaaaactgatcaaatttggaatttcagataaggtcaaagttgttaggttgttcaagttgttcggtcccagatttgtggttttttgtttcagcctatttattcctatgtaatttcaaaactgaaaaataagaagaatatccctttttcgtctctattttgtgtacatctattaatgaatctaaaatttgttatatcgtgtcttgctttccaaggctctatcccaatacttagctatttgaatgatttttgaagatttacaaccttggagcttctaacaagattttaagcacaaaacacacatttgaaacctgattgatcaatttttacaactatctacagcctcaaactgcataccattacctctagctatctttaagggtggataatgatttgaaaatcgagttgggagtctataatagcattttgacttggaattgccaacatgctatgatacttgtagacccttagctaaccttatttgaagaggaagcctaatgagtagaagatcaccttggtccacacaaaaccaccgaaccaagaagaagaagatgttgtgaagaagtgtatatggctgagagctctagctgttaactccaaaagggatgtgcacctggctaagagcctaacttttgactccaaaggggagtgccctttttctttgttcttgttccctaccaccccccacttttcttgttccccatccacccccactttttcaattccccatgcactcccatgtaactccccccattactcattaacatttgaccttttattatatatatatatatatatgtatgtatgtatatatgtatgtatgtatatatgtatgtatgtatatatacatatatattatatttatttatttaaaaaagaaatatcgtttggatttttgtaaaaagaaattaatttcagtatgttctacattgaaaattgtcttttacatgattttctttttagtgatgatcattttatttgcatatattttttttttcctttataattgaagcaacaataaaatatatatgcatttatgaaaaattatatatttttgatcagaatatatgaaaaaatatttgcatgttaaaatttacaatattttatagaattgcccatgtatgtctcactttgctcagacacatgccttggtttgtgccttactcctgtgctctaaatggcctttgtgccttgagtgtgccttgtgaactatgcctaatactgtctttgtggttcaaaggtttagtgatggatgtagaaatctccttagttggctttggagatagtttagggtcttgtaatcttgttgaaccagctgctccatgctttcctttttgttctgttggctttgaatacctcttgtgtgcttaggttgtgttcccttttcgttagaaactttacgcatgtgcacacccattaaatacccacatacacacatacttattagccccatggtctagaggatcgacaactgtcacagtattggatcattttgattcaattttatgttggtgattcatcttggttttaagtgaaacacaaaaggctgctagttgatcccaccataccaaatggctgtaactatgcatatgattgtcaagtggagtatgagatgatttgccaacaaaatacacatacccatacccatgcagtgaatctgaacaatgatgatcatcatcatattcatggtttctacaccttccctttgatccccagcatagacctggagatggtcactctaatcatagccgaatctaaatggtttcaggattcttttgcacccccccacccaccccccccaaaaataacattttattttcaagacaggtatgggtgacacatttgagtattgcgcatacatgttagtgagttcttgtgagctcaaagcaaaatgatgatactcatgaaaatcttatgtaaggctctagtttgttgtcttctctgactcaagttaagttccaatatgttcttggactgtaattcatcttggtctcctccatattgctaatacatattaacaagttcttgcaagatcaaggcaagatcaatgatacttgtgaatgtaactgagtctaatttaaactaattgtatattaaaatattcaaaaaaattatgaaaaagaacagacctgattctttgccgaggaagatttaaatatgctacaagatgataaattttttttgataggaaacgacaatggaatatattgataaaaagaaggtacaattagaaggatgagaaatcctcccaccaaagaaaaacaatactacaagtaatcaaatataagaaatgcaacaagagaataagcaaacggtctatttacacaccgctaaccaatcaagttgtaacatgttaagaggtatccctttaaaaaccttagaacaaaaagcccatagagaagccaaaaaacgaatagagtcccaaagaaaccctgaatatgaaggaatgaaggttcatctgaaaactgagtaagaatgaaacacttgatctaaaatgatgttaccactgaaaatttagataaaagtgagacagattttttttatttatctaaaagtttactagatgagaacttgtaaaagctgtaaagtctatgacagaaataaggaacatcagaaaaaggatgaaattatgttgcaaagggtcatcaagcatggtctggctgatgcttgtcaaactagaagtgaaaaattctaggcattatcaattgaataactaaaggtaaactggaaacatttaatggccaaatatttctccagatgttcttcgtgggtgtttcttaaaaataggattatgcaaccatgcatatgaatttacaatttttcatggtgtcttattttattttttggggtaggaagcattcctgtgtttgtttgcacaacattgttattttctaacaaccatcaaccattagaaaagaataataccgatgtgtttatggttggcatatagtttctatggaatgtttttgttcatataatctgctacctattgatcttgttttaacattttccaaatccgaatttgtccatacaatgctgatacgggaccatgaccttaatcagtttaatcctctcaaagcttgatatcttgtgaaagagtttattcgtgataaatggtttatacatttccaggagcagga

SEQ ID NO: 11599 - DNA, 4836 bp, Vitis vinifera
  Intron number 1 from transcript GSVIVT01033492001 (locus G SVIVG01033492001) derived from phytozome v7.0 (chr-ID chr8 ; pos 20265585 to 20270420)
cttcagcatcatcatcggcttcggttcagtcaactgtgagtttttctgttcgttcatgatggtttctttgatggggtttagtttggattgccgaaagtttgtgggatgattcggttggtgggtttcagtgagttcgaatttctacttgatggtcgtggtaaaattggtaattttgtggattgaatgattaggttttctagtttttgataagttagggaggacatatctctatccttatggtttgatttcaatttcttgtatttttgttgtgatcaatttttattttcttgacaatgtggggaaatgggttacgttactttactaaattgcatgactaatatattatttcgcaaatttaagaacaaaattggttaggaaagaaattgctttaggtttcttgatggtttttttggcgggtttatgaatgtgaagtgtagtgaatatacggtaagaaaaatgaagtttctgccatcatttacgaggcaattctctttaggtttaatgatgataaaaaaatttggttttacttgattcaaatggggtaaacaaaacaatacatacatgttgggggtttcattactttgacactctgtgtggattacagaaagtatcaggcaaagaagaacaagtaggaaggattggttatttttgcaaagtgagaaggaaaatgtaatataatgaaaattatttaaaagtttatacatatacattttcaattttttgataagcagataaaatctgattgatggtgccaagcaaaaaggggtgcaccttacatgagtacataagaggcgcgaaaaaacaagaaccaacctccccactaaaatacaacacaactctaccaaactatctaccaatgaattctattattgtgcaattttccacatgcaatataaaaaaaaaggaatttttcacatgcaaagaaactgtagatcactcccaaaggaacttaataaaaatctctttagttttttatctgattgctcttttccattaaaggcatgattgttatgttcttttcagatgcaccaaaacaagcaaagtggtgccgagcaccaaacctttttacattgtttatctagcctctggaacttatagcctaacaaagagtcttcgaccgaggaagaaatgacccattgtaacccaaaaatagccaacaacattttccataattgtctggttatgctgcagtgagttaaaatatgatttgctgattcttcactttcactgtgttgatcacatttgattttcttaatacatcctccccttataatcatatatatgattaatattttcatacctcccaagaggataggttctcaaaggagcactagtgcccccaaacttcttgacgggaaacaactctctctccttagcacataaggatttataaaaagatttcacttgaaatctcccttcgttatcatctctgtctgtgttacatgggtttgggtataagcgtcgggtgcaaatacgtgtctaggtgtctgatcctttacatctcaaattttaggatatgagggcttgattgaaaaatgattttgagtggtacttggatatgacacaataaagggaaaatttcaaatagaagtaaagaattaacatatccttgaaaagaaaagaaaatatccaaaacaaaataaaagtaattgaaaaaggatccccacacccacactcacacccttgtcatatcatactgacacaagtatgttaggtgaaattaaagagttcgggtattggagctctttcccacctacaaactcataacattagtaagtctaaagaatggagctacctcttcccttttctaatcttggaattgccttctaaagagcaagtaccaatgattgccatccacctctatcgcccacatatctaccactccaacattcttggaagagaatatgctaaacaacatagggaaagcctctttcagatgttgatctcccatctaataatccaatcaaagtttagtccttccattttttttgagcaaaatgcaggtctgttgatcaactcttgtagtccttcctcgtgtctttccacacctaatccaaaagcctttgtcacttcttttatgcatcaccccccttccacctcaccatacttaccacatattctttttgacacactatgatgctcatgagtcattaaagcatttgcttagtaatgccttacttaatatgttcattttctcaattcccaattccttatactttttatctttgtgaattgtattctagtttacaatatgtattcttttcaaaattggaaaagtgtgtaaaaacctaattgagtttgaacctatttcttatttgccttcaacttttctttcctttaattttttagctttatcttctttcacctatactttccttcaaaccttccaagtcccaaaaaagagtctcggaattgtggcaattggtggttttcgtgttgaatatatgcaatctatccttgatgtttatattacaagcttttaataaagttcataagggaaaaatatgggatagatgaaagggggtggtggtcttgtgaagtgagagatgggtatttgggctatggaaaatgaccaaggattgagatctctttaatagtagaacctctttttctatgggtaaagagaggaggatggagtttggaagcataagtggtatagagatgagtctttgtgtatatctttttcctctttgtaatcattagctatattgaaagaagcatgggtagtggatttatgggactagacaagtgaaaggggtcactagaatccttgtttctctaagaatttgaacgattgtgagttggatgacgtggagctttcttttctatattacaagggaaggtgatgattaaggtggtttgaatggattcgaggaatggaactttttctatcaaagatctgtattttgttttagagctaggcagatcgattccttttctaatgggagtaatttggaattcaatggtctcgtttgaagcaagtttttttgcttggaaggcaagttggggaagagttgactttaaatttgcttcaaaggagatgatgcttgttgctaaatggatgctttctttgtaaagttgagggagaatctgttgatcatatcctccttcactatgctaaaacaagggtaaatcttctaccatcaaagagactctcttaggatgattgacttctttgtggggacaaaacaaaaaaagacatggatacccactctcttatgcactttttagagaatatgaaatgaaatgaatcaaagatcatttgaaaatgaggagcattttgaacaaagtctaaaaaacactttcttagcaatcttttttgtgggttaagttgtacatagatgaaggtttgatgtctttaattgattttgtagattggttgggttttcactaaaggaaggagaagttttttgtgttccctcttttttcgctatgcctcatggcggctgctgtatataatctatgtatttcaactatattacatcattagaaaaatgaagaaaaaatcgactttgtggttaagagataggaagtttcgattatgcttttgaaagtgagaggagggtgggagggagggcatctccattttcccttttcaagtggatatagtactgagatatttgaattcttctcatccatgtttagttttttggtttgctgttttgtttagttgttaatgggattgattattatgctttttgaaagagagagaagggaaggatggagggcatctctattttcccttttcaaatgaatagaataatgagaaaattgaattctcttcatgtttagttgtttggtgttattcccctggtgaccctttttcccattttagaacagagttggactttttttaatttattctcttctctttctgtagtgattttatacaaagtttatgattgaacagagttgcttttttctccatacaaggacgtaatttttgtataattttcctctttatttcatggaacctacaactttcctagtatggtccaatttttgcagtaaactaatttgtataacctaagtggttagagctcataatttgatggtgctgtgatgctgttttggtagttgctagtggaagccctaaatagtgttttgaaagaaggtgggaactgaaactataatggtccatgaatcattggctaggaggtggggcttggatgacaagactggacggggatatgggaagttctgattttgatttcacatagtaaagaaggcccattagaaaaatactttattaattgttaattggaaaatacttttctcatgaagaatacttttcaattaataatacttctctattagtaattggaaaaactcgtcagggtagcccagttggtcaaggtgaccattggaaagtgtggttccattaagtgacacatggtcctaagttcgaatcctgccactaatgataccctgaatttacccggtgcgagttgttgcggagcgatgagcaccctgaggtttgggtcctcatggagagtcctaagagcttggccatggaaaattccttaattattaaaataaataaattattaattggaaaatgtagctcgttttttttttttttttttttgataggtggaaaatatagctcgttttgataataatagttcatatactcattggtatgtatggttttcctatacattttcagaatttttagaatataattgactctaaagttgtgtacttttatctttctctaactccaaggttgtacctcttctttccctccctccttcctcagttaccgatccttacatttatacttcctataatttttcagggtagcacattgaagatcaatttttgtcagtggtg

SEQ ID NO: 11600 - DNA, 3018 bp, Vitis vinifera
  Intron number 1 from transcript GSVIVT01032373001 (locus G SVIVG01032373001) derived from phytozome v7.0 (chr-ID chr1 4; pos 26789045 to 26792062 reverse strand)
aaagacatcattaactgtcacgtatacattttcaagtctcatcgtttatatcataatctcatttgtttttactctcataccttgatcccatttgcttctacccttgctcaacaacatggatctcactatacatatctttagtagtttagattttaacttgagtagctaatattgtgaaatcaaacctaaacatatgactcaccattcacttgcagcctgattggcaggtctttgcacattgggtattgatgtgaaagacaagaaccagtcctctttatagcctcatcatctacacaagtcccagggatttgaggactgatggttgagaaggtaaagaaatgcagaggacaacagaagacccacctccatagttttcttacattgtcatccacacaactagggcattatcatgacaatcaacccttcattggcatcacaaattcttactaaagaaccaagactaataatatagaagtcatttaatttgcatgagagatgaatctaaaacaaacccaaaagttctaaaacttaaataaaacaaaatcaaaatatatcaacaatatttcaataacaattcttttcaaaaaataatttatactatctaaatatccattagaattcataattttaattaattttgaaaaaaaaattaaatataagatttgatgttcctcccaaattgaaaacccaagaattaatgaattaaagtcaataattaaatcacattttaatcatgaatccataaatctaaagatgcactaatgaaacttagcttaaaaaattttcaacattttctcgaaaataaaatataataagaaattcttattattacccaattatcaaatttttaattaattattaattaatcattataaacttattgctattgtcataaattttggtattagaaaatatgttaaattactagttttaaaatatgttttaagcatataaaaataattatatatttttatttttcttacattgatgtcatgcattttttttccttgaatgtgaaaaggcacactcaaccctcttcaccaccaatccctcatttcaaaatgagtcaaataatagggttttaaatttaacccatgatttagatcaaagtataaaaataaaagtttatacaatgtgatcaatccaaaaattgaaatattttggataatagttcatggatggattaaaactcgagtttaaacaagaattttgataacttccaaccccattttgaataaacttataataatttaaacttgattggttgtgtttgaatccattcattacctcaaaactctaaacattttcttaagtatttttggtcaaaactatttttgaaataacaagagtacgagaaaggatttgaagcatttaaattaagagtataaaattaaaattttgcctaaaattgccaaagcacaaaaacactcacaaactatttcttttcctagacacaaatttcaagcaacacgagggaaaaaatggaaaaggaaagaaagggaaaaaccaaacatttaggcacctttgaacatgtaatttcaaaaaccttataatttacaattgataagaatatatgaaagagcagtgcatgagtaagatgtgtatgtctttgcctacaagaagatggaaagggtgtttttcttcaatgattccaaagttccaaactactttttcaaagtgcttttacaaagcaatcaatggttaaagaccttgataacaaatttatatgacatgggaattgcatataagagagtcagagacagtgatcataatacacattatttcaggtcaatggaaagtgacaacattatcacatttttgtcgattatggaaatgggcatgaaatcaatcaactttaaacctaactctagaagattttattcaaagaattttaaacaaaattccaaaaaaaaattattagaaaccctatttaactcatataaaaagaatttttatttttaataaattttttataatattgatattagtctttcaaaaaattgattttggttttaatttcatattccaattaaagaaaaaaaaaacggaaatcatcttaagtaaggaccatctctaggccaatctctaatggtaacaatttgggtcatttttttcttttcaaaccttaatgttaaagcgtaataatgcatttgagagtgattttagaaaatatttatagattttttaatacttgaaaaataaaaaattttaaatattaaagagactgaaaacacgatttagaattattataaaacacattctaatccttttttagacaataagtagctacttgctactatgtgcttcaaaaaacattttcattattttattcttcttcatgaactatccgttaaacaagttaaaaaacaaaccaaaaattaaatgggtttagtttgaatattaatttaaagttaacccattcggatatttaaaaaatatttatttaatttttaatattattaaggtcgcaggtccatagcacaagggttgccttgtttgactaaaaacttagaaaatatttatttaatttttaaaatgtacgtacaaatcataccaacttgtttgactaatgtgcacataagccgcaagcattaaaattattaaaaaataaaataaaattagatgccaacccgtgaatgtttcaaaagcaatcttaatttttaaggtaccatgtcaattaatctgtaaatgtagtattttcccaaatatccaaatcaaatcttctggaagaggataataataactaaacgcatgtgtcagagcattgcaaatgatcttgattcatgctgccaaagggaaggtgagcgggtcattttttctatagccattgaagatatatagattgacagatccttgctcatcaactaagcttctgctctacatgatataagtaggtgaaaaaaggtgtttatgcagatgagaatggaggctttaagagtgtttgcagttgggattttggtggggtgggtgttgggtgtggtaggtaaggaagtcacgggtttacccagttgccatttt

SEQ ID NO: 11601 - DNA, 5210 bp, Vitis vinifera
  Intron number 12 from transcript GSVIVT01027630001 (locus GSVIVG01027630001) derived from phytozome v7.0 (chr-ID chr 15; pos 14880139 to 14885348)
cttcggtacgaacatataagccatagatataatttatgatatttgatacctgttactgaaaatgcatcatactgaccatttagcatccacatatttacaattacagtgtgcgccaattgttttttttttattctgcttccttttttcttatacttaatgttgattatttttgttcatttttttccttctttagcattgttcgatcaatttgttctgtcctgcttaattactgaattgtgcatgtgttatgtgaaaggacgcaccataggcttggatgaatagagaagaacctatcttaattcattaattatgaattatggaattcttgcctttgacatatattcctttattgctaaaaaaaaatcctgtattattttgtgtaattgtatgtgaaaacatacatttctctttagttatatttccctcaacctcttttttcttgtcttttccttcgttttttataatcaaaatgtttattgccaaatttcattgttaacttcttcctgagtttttgacactttaaagttgactcctgaattttggcatatttctggtgccaaatggttttccaattcttggattctattatgatgcatgcatggggtggaattagcagaagctccttatctcagaggtggaattagttaaggtcatattgagaaatttggattcactttggggaaaaattgaacaagatttcaaatagcagctatattatggaccatattggatctcagttgcaggaaacttctaacccaggtgttagttctgttcctgattgtggttcctgcagaagctattgggacttgaaatcatttacaaaaaccttgattctattatatagaacctcaattcaccttctgaaaatgaaagaacccaaatatttccttctgtgaaatactttctagtataggaatagaaacaaatgcattttggctatgctggtagccagttttcaattacgtgattaaaaaaataggtgatcaatggtggagagttgttcatcaacatgattgttaggctgccctatcattggagacaaaagggttgcaacacaagctttgacagtgttgctggccatgaccataaagtccgggcctaaatcaggcccttcaatcattttgaacctgttgaagcattagtagggcttaaaatgaacctagataaaagtgaattggttccaatttaaggggttacagatgtagaagatttggcaatggggttgggttgcaaggtggagggaattccatcttcttacctagttttgcctctgggagcccttttcagattggcagcaatttgggacacagtggaagagaggttttctagaaggctattgatgtggaaaagataatatatttctgaagggtgaggcttatgttgattagaagactttgttgagcttgtcaacctattacatgtctttgtttgtaatccctagaaaggttagattgaggttagagacgattcaaaagccttatttggttagttggtcaattgttttctcggataagaaaaagaagggggggttggtttgggcattagaagtctctcttttgaattgggccctccttggtaagcggaactggagatatgtttctgatggggaaggtttttggaagcaaattatggaggagaagtataggaaggaaggagcaggttggcacccttgtgaagttagagatgcttatggttggtgtttggaaagctattaggaaggggtgaaaggctgaccctctttgcatattttggacaatttggtgggaacaaaatcaaagagtttttgaaaatcagaaatggactgatcaaaagataaaacattctttttttttttttttaaaaaaaaaaattttagcttgggttagcatgtacataagtgaatgctcaatgcttttgtttgatttcgtagatcgggtgggtcttgttgagagttaaggtggtttttttgtgtcctctctcttttgaggccttcccttaagtgctccttgtacatcctatgtatttttgtgtactttttcctattattaatttatacatacctatctttacctacatatatatatatatatatataaaattatgttccaaaagtacatggtcttgggttttgtagtaaccaatcatttgaaaaggctggagcatcatactcatatgaagataggttcaagtgagacgtatgttgccttgaagcaatgggatttttaacccaccaccttagcataaacttccctcaatacaatggaccctattattataatgtggaattcagattctgttcttttcaaggagaaaaaaaattttagagggacaatttttctcctctagagatgagaataccccaagttataaggttgttcccgaaagataaatatgagacatatctcaaaatctgcatgggaggccactattagctaacaaactgatgaaatgtttcctaagaagttactgttcttttggatttaaaaataagttgttttgaatgatggagcttcagctgaccagcaatccatgggaagctgctggactctaatatggtttggggtagtttatgggctaaaaattaatttagaaaaaagcaagccaatcccaataggaggggcattgaatgtggaggagctagttttggtgttgggctgtagggtgggggcacttcccacaacgtatttgggattgattttaggtgcctcttttaaatcaaccttagtgtgggatggggaagaaagattccaaagaagatttgccggatggaaaagacaatacaccctgattaaattagcttgtcaagcaactcaagcctatcaatttactacacatccttaatcattccaagaacagtgattttgatacccgagaagatacaaagagactttttttgggggggaggggggatcgtcagaaaacaaaccccatcttgtttaattggtcaattgtttgcatggagaagaaaagtggaggtcctggtattaggaatctagctatgctcaataaggtcttgatcgacaaatggaattggagattcgcaatgtggataagaaaagtggaggtcttggtatcaagaactcaataaggtcctgattggcaaatggaattggaggttcacaataaaaagggaagctctataggaatgggttataatagggaaatttggggagaagcatggggatggagatcttgtgatgtaagggataatcatggagtgggcctatggaaggcaattagacaaggatgggatgttgtcaaaagcttgtttcatagtggagatggaaggataagtggtgtgataagtcaactttgagagattccttttcctctctttttgctatagccactgcaaaggcctcttaggtagtggctgtgtgggggcagtaaggggaaaggggatgctagaacccctgttttgtaagacagttacatgactgggaacttgaaagaatggaggaatttctcttaaggtaataaacaaagtggaaagtaggaatgatggggatagggtagtttggttgaaaacgaaaagtggtatgttttcaataaatctctgtacacctttttgatgctgaggagagattaccacttttcgaaggatataacttaaaccttaggtgctaccaaaattgggattctttacatgggaaacaacttgggatgggatcatcaccatagatcagctgaaaaagtggggttggaccatggtgaacaaatgttccttctgtaaagatgaggaagaattgacaagccacctttttgttcattgtaccagaacaagaatcttgtggcagctagtcttctctttgttccagatagaatggttaatgccaacttcagttaaagggaccctcttaagttgacatggatcatttgtcgggaaaagaagaaagaaagcatggagggttgtcccttcatgcattgtttggatcttttgaggatgtggaagagacagatcaaatgcgaaaatagtcctttttacatctatttctggattgggtgaggttgggcttaattgaaacaacaatatccatggtagacctagtcaattggatgggtgctgtgtaaggggaggggttattgttttttgtatattgctttctttgttttgttcttgccttttggcacccttgtatacaattcatttactctggtgtgccgtttttcataggtgatgttagcatatctttttaacttgcttatcaaaaaatcaatgggaagctgctattggctaaaagtagaaccagcctattgagttttatggaatgcaagagatgtgccatttggataatcaaggttcaatgtcaatataatttcatacttctagaatcttcttgtgcttttgtgaatctgtgagattcaaattttggcatctcaaaatgaaaccagcagcaagtctttgaacaaaaattttgatacagtaaagaatttaaagatctctaatcaaatttgaccgaagagtgaaatttatgccaatactagattaatatttgagtgcaacttgtacagttatgaggtattgtatttcgatttagctcttcatatgcattctactgagcctgtatatgtctcatctgatttcatagatggaaaaaatctcacaaaggcattatccctgggaagtctatatatgagaggaactggctatccttgaaccattaattttagtatagcttgaggtttgagtattgtggacaagcagttaagcaacaattgtcatttatcatggtgaatttgtaagatggaatgatcgctatttgatttgaagtagcaaaatggccttgggagttggtggaaggaagttggtttaaatactctctgttcttgagccagctgctttcagatatgcaatgggtttttaaaaatataatctatgagttgatgctatgagtggacgctgccagctttctgtttcacatgaatatgtaggtagataatcaggataaatattctattcttggttgtcaatttttcactgcaccaaggcatcttaagagtgctataactaaaccaattgtgcttacatagtgtaaaaggtgctgtttttttttttttttgaggctaatcggtttagtgttatacatatattatctcacatgagtttggaagcttaattttttttttcctgatttatagatgtattttaagtagtccctatgtgcaatggtttactgaaatgcagtttatatgcagggaaacacaactgcgggcattttattccacaactg

SEQ ID NO: 11602 - DNA, 4963 bp, Vitis vinifera
  Intron number 3 from transcript GSVIVT01009219001 (locus G SVIVG01009219001) derived from phytozome v7.0 (chr-ID chr1 8; pos 6365434 to 6370396)
accaacaactggttaacccaacttcagaagtcaaggtattcttcagtaaccaccactcccatcttcttctgtaaatttatccatgtttaaagaagcatatatagttgattttgtatgcaagcacagcattgcagcattatatatagaatgctttatctaattgtttgtgtatgtatttatcaacctatccataaggtataaaaaaatttaagacatgttcaaacaacaatgcagttaatagacaataggcaaaccttctctgtacttgcactggtgtcgctcatgttggcataggaatctgagagaacagtatcagaaaaatttgttaggcaagaaccaaattaaagatttgatttgtatgaatgaacaagatttggattagacttactaattgggaaggaggaattacagttcaaattcctgaatttttaccttcttgcaaactttcccaacacgaattatacaccttccacaaatccttagctccctaggactaatcaaagagcaacaatcaacattcaattcaactgcccataataaggatggggattataatagcaataaataatcggtctctaaggcatacaagaagcaacaccagtccataatgaagcaaaaatcttagcattcaccaagatagaattgattatacctgtacctatcctatgcaaactgaatcatttaactcccaaagagttcgaagaatagaaattgcaaagacactgcttttgttcttaggcactcaaaattttttaaaaagttatagatttgtatggaaggcttgctaatccatgctaacactactttttttggagtgaatattttcttatatttctacttcacatgatataggagttagtaaaggccttttttgacaaccacagttgaacaaatatccactcaagttttcaaaggcatccacatatgtgcatatacgcaatcagtgactctattacaaagtggacagttgttttgatgcccaatgtgcttttgccttgtcatttcacatcatcaacacattgagtatcaacatctctcattcacatttgattttccacaaatgctcctccttttcaagaatccaaattcacctttaaataaacactttgatcataaatttatgttagatgtactccaaaagatattaaagatggatgtaacttggatgcaaccccactatacatgaaacattcatatcataaagtaattctgaagaaacaggttcctggacttattttccaatagtttcaaagaagtaatacttatatggactcactgtcagagtgttttcattgcatggatagtcaaaacatcattttattggagcacgttgaggaggaaagtttccagttggcataaagcctgttagtgaagtattgtaggtcagatatgtggatcactgttcttcacaagcagattatgggaataactagattgcaaatatggaatttcctgttgtcaccatgcagctacatatagtttttgaagttgacattatcactgtctcaaataaccatattcatgctcagaaataaagagattctttgttcgtcttactataggtaagcaagaacaaatatgtttaaaatgctagaaaagggggcacgaattacgcattgtgactaagtggccaggagttatggaaggactttgaagtgggagagggccaaaagaaggaaaaaacattaggagattgcattgtgcatcaatgggagatgtgttcttttttattagattagaagaagcaaaacaagatccatgttatcaacttgaatggttccatgcatatgcatgtaaatatgtatttatgcatgaatcaaattatgccaattatataacttctcattctcacttcctcaattcacttttttggactccatgtttcaggaatcctaccagtggataggatgtcctctcatgcttatcatgatagcaaaatatgaagatgatttgatagcagttgctacataacccacaaaactccaatttggagctctatatgtataggattagctcttgattccagatcaacttgataattagcaagcatgatagttatggtgaggcatcttatctaaagataggaatagcaatacatgggcccatgaaagtaatggaagggtctaagaataagatgttatactttcagtgtttgcccttccataacttttcatgggaaacatgtttgccctgcctgccagaggattagttaccacttgtgtgccaaatatcatgttggtctagtattatggaccacttaattcccagtcaacatgatatttggcaagtgtgtcagcatgaggacacataatacaacaatagccatgacaagcatgatagaaaatggatcccacataagataatgagcagtgtacacctaacattgttttgcaccaaatgcaatctgatccaaactgtgtgtatgcatcaacaagatcacatatttattataatttacacagatatttctttttgtgtgtgatgttttgcaattttccatcacaaaataaaagacagaaatatacaagagttgatttacttgtttaacaaaagtaccacagccttttatattccaatttttttggactaatgtgaaattgcatctgtggctacaacaaaaataagaatagtattttgaagtaccttcctctcaccttcctcccttatagactattatgaaacaatagatataagagttattttgacacatgagtcaaaatacctatcaaattgtaaaaatgaccttccccctttaattttgttgagaaatgaccctctttggatgcttttacccctctctatttttgtttgtcttcaaaaacatattttcccacttattttatttatttcaagttataacactttaatttatttggtttaatttttctctcttttttataatgattttatctctcatacaattcattattgttttcattagagatatttatctagattaaattttattcattacaaatttgataaatgttattttctaattaagaatgttcacttgaactgcactgaagttaagtttggttcacaaagaacttaattaagattaagttttcaatcataatggtaacctgaactatacaatgattaagtttcctttataaataatttaactagggtaaaatttccgttttatcaacaaagaatttaattataataacctaaaatgtgttgttattaagttttattttaaaaagaacttaactgaggctaagttttcattttatttacataaaaaaacttaatgaactctacaatcttatcttcatattttagaaatttagatgaaactacaaaaaaaatctatcaaacaaactgcaaaaaaaacctaataaaaaactaaccaaaattgcaaaaaacctttaccaaaatctcaaaagaaaacaccaaccaaaatctcactgcaaacaacctcaaccaaaatctcaatagaaaacatatgcaaaaaaaccctaataaaaaataattgcaaaataccccaacttaaagcaacccaagaaaccctaaacaaaaacattattaaagtttaaataaaatttcaaaaaagaaaaaaaaaaaaaaaaaaaccaacaacaacaacaaaaaccaatacaaaaaactgcaacagagaacaacaacaaaaaaccctaataaaaataaagaaaaagatgaaggatcttgaaaaagagagtcgtgactgatttttatccattgatatttgttatgggttttatctccactgaaaaatttatggaagaaaggagaaaacatggtgagaagaacttgttatcagaatcggatgaaacgagaatgggagggagatgtcattttgaaggaaaaaagaagggtgataatgtccaaaatgggtcatttaaaaaaaaaaaaaacaaaaggggttattcttcaaatttcaagagtatttggttatactagacaagcttgcccacctaaaaaacctagaaaaccacaagatccaacagcacgatgatagaaagaaggtaaaagtgaagccttgggatattagactccacataccacgctcaatcatatttatgaaggaaccctatatttcatggagtaacttcattataggctagtacctctctctgttttatgtgcaggcagaaaacatttttaatatcatgctacctctaccgcaccttggactataatgaactctaggacacttttttaagaggcccaacaaaggctagaacctttcacatacgaactcaccaatgttcagaatcccagagaagtcaaagcattaacagctggattctgacaaccttagtcactacatgcctgagcatttcttagaaacattctaccaagttttatttcctggtcaatttataaccttttctttgtcccaaataaagacaattgcttgaaaaaacagtcaaagtgaattcttgattttaacccaacaaaatttcatccaaagcaggatataagaactgaagatgatatcctaattaatgttgtggttttgaaagtttttcttcttccatgaagcagcaatgtacatctagcactcctttcatttatcagaatactgaactgaatgtatacttttttctttctcctttttagaaccagaacatcctacagcaatgtgaatgacttaaaaaagaaatgattggttggatttcaacacacgcacacacacatcctggagtttaatatgtgctcacttgtttaagttgttgcctttggaattgtttaccaatgcaatcttttacttctactaccaaccagtaagtcactgactccaggaaaagcatcatccaaggaagatgcttcttctgatcttttgaaattttatccatgtatgttcaggttacttctgataagtgtttagaacagtcagttctccacttccgtttgtctatgatgaacatatatgtcttgtgtatgtcactaatcatgccattctaattgctagttctggcaacgggaggcagca

SEQ ID NO: 11603 - DNA, 2601 bp, Vitis vinifera
  Intron number 1 from transcript GSVIVT01024306001 (locus G SVIVG01024306001) derived from phytozome v7.0 (chr-ID chr1 6; pos 706823 to 709423)
tatcattggatttctttgttaagtgacaacatctaatggctcaatttatacaagcaacatctaatgaattaatggatatggattttacaattttatggagttctaccatagaaaaattctcattgatatatatcatggtagaggaaataaatgaaggaaacatgagaggtgaaatatttatacaaaaaaatatagattaaaattcatgaagatatgaaaagaaaaaacaatcgaaactaacctataaaacaagttaaatagaaatttaataggtttggcattaaacattgtaagtttagtaagctattaaaacaaacaagatttaattggggtgttgaaagaaacactatgaatgttacaaaggaagtgtgataaaactatttacaagtatatatatatatatatatatatatatatatatatatatatatatatttagatatatccaaagacatcccaatttcaaaagagaggatacgagcataacaagtttttaggacttacctttaataaaactactaatattggagtgcttcaccatgcatccacttaaaaaccacctgaaactaatgatgagatagaattggagagtcaacttattcacttaaacactcatatgaattttgatgccaatagcactagctatagtaatcctactcatatctttgatggatcaacaagtcaccattgataacaaactgctacaagtgtaaagaatagaaaaacaaaaaagagaataaatcaaaatacgttggttatgcccttcaagcatgagttgaggcaacaaaggcaaaaatagatgcctctttaaacaaccaaaaactcataaaaaaatattcaattatagacattccttagttagaaacataattaagctttatttttatgtgttgaaagtactttgtaaatgttttaaagttttttttttattaaaacaaaataaagatatttggcaaagttttgagattcacttctaaaaatttagaaagccttttgatgtcagtttagaacaatcacttattaaatagggaatttgaaattcagtttttaaaaattatattctcaaagtgttttcttttatttacatcaaaacattaattaaaaaaaggttgtaatttctaatcatctcaaaatcattttcaaatggattttaaaaactttcatattcatattatatgtacatctttatgtgctataagtttctatccaagttttattcgtttataataattttatttatttatatcttgattttactcttatcaaaggcctagaattcacacacattcaacttggtattttccaaacacgtttctgtttgcagaatatattttcatatttgaaaggatcgatacaaaagttgagttggaaagaaggtgaaagtacaaggaatttagtcaaatccaatggcttttgacgactaaatgaaatccccattttgtctcaaattgaacaagagatggattaagactagttcccatctcttcttcccaaaatatttttgcaacaggtcttgccacccaccaagtactcacctattaatatgatgttgttctttcgtccaaattcaatcaatcaaaattgtgggaggaaggcatgcttgattgatcggttacaaaaaccaatcttgcatttatacttagtcaaataatttttcattaaaaatcgatgaaaaaaatcatatgatttaataaataaaactcatattcatatcatatgaaaaagtctcatttatattttatgaacggtaaagattatatgatttaataaataaaacttatatctatatcatatgaaaaagtctcatctatattttatgaatgataaatatcatatgatttaataaataaaactcatatccatatcatatgaaaaagtctcggctatattttatgaatggtaataaaactcatatctatgtgacgcatatttacattacatatatcatctacatattaatttttgaaattatgtttttatctattttttaatttatttttaaaatttggtgaaaataatttttatttattctttaaaaattgttcttcatttttctttgtttttaaaaattagaaataaaaaacaactaccaaataatatgctaaaattttgaaaagaattttctatttctataaagactgaaaaccgttttttaacttcttttaggtagtgcacatggtcaaatgaaattacattaaggaggctaacaactcccacatcccaccaaccctttgaccgcacaccacacttgtcttgggttttggctggtaagaaacatccgggctccatccctatatccacgtggattccacgtcacgttgcagcatctgagcctttggcgtagacagattaagggtctggattggttttcaacaaaccacatgaagccagttcgccatccagcccacctaccagtgaccctgtgggatttcaaagactgcagggctgaaaagttctatataagtagaagcttcattcaccatacaccttagtaagttcagagcactactgtctagttcctctctctctctctctctttccttcttggttgtcgagagaaaccagctttttgaagttgtttctttgtggggattctaagat

SEQ ID NO: 11604 - DNA, 14962 bp, Vitis vinifera
  Intron number 6 from transcript GSVIVT01015656001 (locus G SVIVG01015656001) derived from phytozome v7.0 (chr-ID chr3 ; pos 15026634 to 15041595 reverse strand)
aaggtgaaaatagtattcctgcatacttttgaattgatgttgataaatgtttctactgtattcattcgttgagtgttatttgttcttaagtaattttcttggacagttcatcaaatccatgtagtggctgcttggttggtctgatttataaaatatactcatattattatagcagcatgattttagtttgttactggctgggaatataattgaaatttcccatatattgtagttcatggttgttctattaattttgtacttctgtcaagctgtcaattaagagagtttaaatagtttatttaacacaaatttctcagaatagtagtttgtttgcataatgggattgttaggattgttcaggaataaacctacaatattagtgactatacaccttatgaatttgcatcctatacttgtgagagaagtcgtattgagcttaaaattttatgttcttcacttacaacttttatctaatttcaagcattgatgatagttactaggtccaggaattttgtttatggctcatctggttggttttatttaacccagaagacaccaggttttactgaatggcaccacatattggtggctccctgatggtgggtgatcaagatcacaagagataaagcatggtccatttacatttttatagcactaaatttggtgattcaaaactttgttctaatttcttacattgttttctaaatttggaaggcaatagaaaaggtaatgaattgaatcctgatccccagaaagagaaataaaactaacaaactgaggcataactagttatggagttttagaccaaaaagtgttacaactgttgtaacacattgaatgaaaccagtggaaataggaaataaatagtgttatgccctttcatgatttttccttgtcaaggatgcctttgaaactaaaatagtttttatataaatattttctgcatgttgaagatcattttatgtaaaccttacttgatgaaaagaaatatagtatcacattaaagaattatacatgggcttgggataacaaagatttttagaattttgttcaagaactcatgagatctcaaatttgaaatgcatttgatatggtacataactcatgttgagggctctggaaatccaaaataagagtaaagttgataactagtttaagtgtttgcaagaaaaaagaaatgattctcttttcttacttttccttttgtcatttcattaccctctatatggttagtttatcattccgtaaagaatgaagcagtaaaaaaaaaattactagatcaatgtctctgactcttgaaggacagattagatttctagaatccaataaattcttacctgaagacttctttcttgctttcttaattcatcatttcatcttatataggtttcttttaaatcctatggatcattagggcaggatccatcttttgtacttgtattttcaggttatcacctatgtgataatttttctgtttagtgcccttggctgttttttttttgtttaagcataatattaattgttgaataccttgatcagatttctaatttaaattaatcctgccttaattaattgctggattagttaccattgttgtcttattttgaaaaatccatgtggcctaatcatttcaagccttgtataaacttttgacatgtgggcttcatcatggtatgatcaattattgaatatatcacgttcctaggtcttagtgtcacatgatcaagttgtttctttcttgactaacatgacactaggtgcaccttgcctctaggccttaatgtatggtttgtggcatttgccacatactttttcccgtgctcaatgtctccatatctctccctatgccataatgctgaacatttggactcaaatgcttatctaaaagtagatccccaagtaacctaaatgcccatggaacatggcttccagcttgtgttggatactaagggggtctctcttcctttaccccctagggaaggtgactttatgtatgcttgagaaggattatttttttagaatatgcatggcttagtgttgactaatctaattgaagataccgaggaattaactgactaattttcaagatttaattgaaaataccaagcaactaatttcttgatttctaggattatataattgtataattccttgattttcaagattgtatagttgtacattttttgctttattttctcttgatttttagggtaaaggatttctaggaactattcaactttgtttgtgtaatttagtttcgtaattttgtaggattgtataccataaatataatatcattttataaaaaatgcaatgaataaaatcattcttttccgcatagtatttgaatatgttcaaggtctctaaattttcttctaattttttttccaatgtctttcattgccatcacccttttttacttctttactattgatctgtctctatttcactatgtcaaaaatctcataaaatcaaaccttaaacactacattttaggaccaactgttggcatcttagatcatgcaaagcggaagcaaaatcaaaccaaaatttgaaattttggatttaaaagtcttatctttaggtttagatgttcttaaaccttattttccaaggttggtgaaactcttaaagatctcatgtctcttctaaccgaggtagcaactatcaaccttttaagattacctctctaatccttaaatcttaaatccacatatattatgatcaattaacattcttctatccaccaaggatagatgtcaaattacattaaaagaattactatgattatagatttcatgataatgaatgcttatgatcgtctaaggagacgtactatctcatatccatgagagatcatggataatctatcgtgaatagctattactacttgcttaaaccaccagttacctaatctagaaggaatatatgatccattatgatctcacttgtaaggtcaaagttattgatgatttaatcattagtgcaatattctcttaaggttgagaacccatgtaatttggaaaagtcatatcaactcaatagctatttatttaaaactctccatagatcctatttaatatgtaatcatacacactagtacacataccatgggaaacccatcttgaagaccaagactagtcatcccacctctttgaaagaggtgcactctaacctctaatgcattgtccaatccataaactagtggtgaacaacctatcacctttcatgtacaatacaagcaatataagcctaaatgctcatacaagtgaataaatacataggtaatacaaataggatagcaaaacttatatcaaataaaataatatatcaagtatattatattatgtctttgcttttaagggttttatcctaataccaatcatctaccaatgactatgtggtatggtcttaacatatgcacatgttctgaaaggaaaagctaaactcaataacttgattggaccaatgctaagtaaagatgatcccaagttcattgtttggggtgaggaagacacattgatcatatcctggctatggaatatgatgtaacccaaaaccagtggagtgtgtatgctcttaacagtaggagaggagttctcgaattagtgaaacaaacatattccaaggtcaaagttgctacttagatttataagataaaagctaagattcactctacaaagaaaattattttatccataattgaatactataatatactatgtgaaaagagataaaagggagaatcctaatttttattattgaaaaactattaataatacacattggacttgggtatatatacacatgttagtgggacccacaatacaataaagaaagaaaagaaaaagtaaataactgaaataactgtacactatctaacactccccctcaagctggagcatatattttgtatgcaccaagcttgttacaaatgtatttaattttagaacctctgagagatttagtaaaaatatctactagttgatcattttaattgacaaaactagtcgccacacaacttgatgcgatcttctctctaatgaagtgacagtcaacttcaatgtgtttggtcatttcatggaagactggattggatgcaatatggaaagcagcttggttgtcacagatgagcttcatctgttcatcctttccaaatctcaactcccgaagaagatgtttcagccatatgagttcacatgttgctagagtcatagctcaatactcggcttcagcactagatctgaccactacatcttgtttcttactcttccaggatattagattacctctaataaaaacacaatacctggaagtggaacgtttatctgtaggtgagccaacccaatctgcatctgtgtaaccaacaacctaggtatgacctctgttctcatacaaaacaccttagcctagtgtgcttttgatatatcgaagaatgcggattacagcatcccaatggctatcacatggtgactataggaattgactaacaacacttacaggaaaagaaatgtctagacgagtaatggtgaggtagttcagtttacctacaagtcgccgatatctcccaggatctcctaaaggctccctctgtcctggtataagtttgacattttgatccataggagtgtctaccggtttacagtcaaacatacaggtttcttccaagatgtctaaagcatacttcctttgggaaagaaccacaccgaaactggattgagctatctcaatccctaagaaatacttgagtttccccaagtctttagtctgaaagtgggtgaaaaggtgttgctttagtttctgaatatcattctgatcactacctataatgacgatgtcgtccacataaactaccagataaatacactgccctgaagagttatgatgatagaaaacggaatggtttgctgtactgcggaacatgccaaactcttgaacaacagaactaaaacggctaaaccatgctcgaagagattgtttcaagccatatagagaatggcgtaacctgcacactaaaccagactccccctgagcaacaaaaccaggtggttgctccatataaacttcctcaacaagatccccatgaaggaaagcatttttaatatctaactgataaagaggccaagaatgcataacagccatggagagcaatagacgaacagaagctatctgggcaacaggagagaaagtgtcaccataatcagaaccataaacctgagtatgacctttagcaactaaacgggccttaaggtgatcaacctaaccatcagggccaaccttaactgtgtacacccaatgacaatcaactgtagatttactagagggtaaaacaacaagatcccaagtgccattggagtgtaaggcaaccatttcatctaccattgtttgtcgccagcctggatgggaaagagcctcaggggtgctcttggaaagagaaacagaagatataaaggaaacaaatgcagaatagggtgaaatggtaactcaaaaaattgtaaatgggatgaggattacgagtagatcgattaccttttcgaagagcaatgggtaagtcagcaaaagggggcagagccggggcaggaaaaactgaagggataagaagtgagtcagtaggtacctcggccaaagaaggaggaacagcaacatgatgacggcgatgataaacctgaagtgggcaagaaggcattgcatcaggtggggagataatgggaaggaataagacttcaaaaacaagaagagactcaaaggtggagaagaatggtgagtcctcaaagaaagtgacatcaacggagagaaagtagcgatgagtctcagaggaataacaacgataacccttttgaagtctggaatatcccaagaagaggcattttgtggctttggcagaaagtttgtcctgtccaagagtgagaatatgaacaaagcaagtacaaccaaaaatacgaggaggaaggaaataaagtggttggtcagggaaaagaagggaatgaggaatctgatcgtgtaatacagatgagggcatacgattaatcaaataacatgctgtaagaacagcatccctccaaaaacgaaaagaaacattactatgcagaatgagagtacgagttgtctcaacaagatgtcgattcttacgttcagctaccccattttgttgaggagtatgagcacaagaagactgatgaaggatcccatgttgggacataaatggagtaaatggtgcagaaaaatattttctggcattgtcactacgtaacacacgaatagaaatattgaactaggtttggatttcagaataaaatttctggaaaatagagaataattcaactcaatttttttattaaaaataaccaagtacatcgagaatagtcatcaatgaaagtgacaaaatactgaaatcctaaagtagacgcggtccgacaaggaccctaaacatcagtgtggacaagttcaaaaggagattttgcccgattattcaaacgctttgggaacgagacaaggtatgtttcctaagctgacaggactcacacgcaaacgacgacaaagatgaaaaacgagggaccattttttggaacttggatagactagggtggcccaggcaactatggatgaggaggggagcatcagtggaaatgcaaactgtaggagttgaaggtgaggtgatgtgatagaggccttgagactcacgtcctatgccaatcgtcttccccgtactctagtcctgcaaggtcacaaatttatcagaaaaagtgatagaacaattaagagtgcgagttattttactgataaaaataagattaaaaggacactcaggggcataaaggacagaatggagaggtaggaaagggagaggatgaactaaaccaaaacctttaaccatagtttgggaaccattagctaaagtaacagtacgtaaggcagatatgtgatccttattaccagatatgtgatcagaagtgccagaatctagaatccaaggtccaagagaagatgtgtgggtaagacaagcagaagcattaccagtctgggcaacagaagctgacttggtggcctgatagcggagatagtcatcatactcactgttagtgagggaaataccctgagatgtggaggaactgggaggctgaggtggctgaggatcagatgactgggccacgtgggcagtacggggaggccgcccatgtaattgataacactgatcacgagtgtggccaagcttattgcaataggtgtaatgaggacgttggcctctaccttggttaccattgcgtcctcctcgagagttagtttgagaaactaatacagaagaatctgaagtgttatcagatggcaaagtctgagtggaggagatatggaggaggcaagcaaacacatcatctaaggatggaacggaggaactgccaagaatctgattgcggacggtctcaagatctggacggaggccaataagcgtaagaaccatgaagaacttgtcaatctgtgtttgttgatccctaacatcagagtaagaggcatcacggtcaagaattcctccttaagaaagacaatctgaccaatataagtagataaatccatgtcttgttatctgacattgacaatagaagaagccaccttataaagacgttggatatcattcatgtatagccctttctcttgattccaaaatttaaagcatgttttgtaggcccgaagatgaaacagaatcttaggatcaactgattgtcataacacactacataattatgcatctatcttcctccattgtactctgtcaacctcagggatatccgcctcctgtgtaacaaggtgatcctcataaccttgacccataaaccaaaggtccacagaggtagaccaggacaaataattttcactgccaaccaatttctccgaagtaatcataggagatctagatatgacagaggaaaaaatggaacttttagtagccatatctacttatctggagaacgaaatatgtttagatcgaagagaaccctaatacggcttcgaatcgccactgaaagaagaaaaaccgaggatccgcggctataagagaccaaatagtaaagaaaaacaaatgtggcactattggaagggtagaagaacacttcctaagacatgtgcagggctcagggtggagaggaagtcaccagaggtcaccggaaaggttatttagagggccggcggagacaaaaagccccaaaaaaatgcacttgcagggctcaaatggcataagcacagatggagggtggctagacggcgtcaggtgaggctggaggtggaagcatgtggccggaaagttctccacgcgcccttacaagccgaagcgtgaaattcaagccgttggagaagaaacgcgcgtggacggtgcatggttgagaatctccttccaatgctttgaaaaaacttgaagatctcctccttgcgcacctaatggtatggtcggtgtcggaaaaggacttcgccggaaaaagtcaccggaaaagttgtcggcggtgagggttttctgatggcgatacgattgatcggaaagctttaggagatgggaaaggtgaccggaatgaaacacggttactgaaagatttcccataattgattcacggataaaccggaaataattaggttttttttctccctaagctctgataccatgtgaaaaaagagaaaatggagaatccttaatttttgttattgaaaaactattaataatacacattggacttgggtatatatatacatgttagtgtgacccacaatacaataaggaaagaaaaggaaaagtaaataattgaaataactgtacactatctaacatacaataatgtaatgaaaagattatggtttgaattggactatcattaaaatcttaaaatgaagaatagtgaggatattgctatgtttcataagtttattgaaagagagttaatatttgaattccttagatttaacatagaatatgatcaagtaaatattcaactacttgggaaggaataaccgacatccttgaatgaggtatgctctaatccttgaatgaggttttctctatcataagggctgaaaaaaaagagaaggagcttaatgttggacacttcaaaaagtgatgggtctatctttgttgcttcaggctcttaaagtggtttaatccctagcataaattctagtagaggagagcatccacgcaaccaagtaacaaggataactttggtgtactcattacaagaaaccaaggcatacaaagcagatgtgtcaaaagttacacgggaaaccacaatccccccacagtaatgatagaaattggaaccaatagtagtccaaacaatatggaggctaagcaaatatgacacttttggaagagtaacccaaccatgagaattcaaatagctcagagtttgagggactcaaaaaggaagagattgaaagattttgaaggttcctcccctctctagacaagcctagcgcaccatattccctggctagattaggtaagtacttcatgactagttctttgagtgcctaaaaaaaattgttggcatggaattaggttataaacttgggtgctacagaccacgtgagccataactctcatcaattctcttcatacaactcatgtcctgaaaaccaaaaaatcaacgtagctaatagtagtttagctactatggctggacatgggactattacccctctttccctaaaatctgtactgcatgtttctaaactctccataatctcctgttaactcatcaagtttccaaagatctaaactacaaagtaacatttttcccaccccactgtgtttttaggacctggatatgggaaggatgattgtcatgctaggaaatagaaagggctctactatcttaatgttaggagtgaaaatggcggtggttgcatacctctatctcatctttcaagtttttcatcaaataaagtccaaatctggttatattatttgtgtttaggacatcatccttttctttgttaaaaaacatgtttcctttaatatttcaaagtttggatattgatgactttcattgtgaagcttgttacttggctaaacatcatcaagttccttttcctttgaacaataatacattatctttttcgcttcacattaattcatattaatgtttgaagattctctcgaattccaaatatcattggagctcgttgatttgtttcttttgttgataattattcttgtgtcactcagttatgccttttgaaaaacaaatttgatgttagttctattttctttacctttcacaagatgattagtaccattttcatgtttaaataaagggcatcagatctaaaaaccaaaaataatactttaacttgatctaatcctcttacctagatagagaatgaataaaacacaattcatcaagtacaaatactccacaatagaatagagtctcaaaatgaaaaaatcatcaccttctcaagggaacctatgccttgttatttgagaaaaaagtgcctaaatcatattcaagggaacaatattaattgttgcttacttaatcagtcggttatctttgaaagtgttgagaaacaaagccgtactaaatattctctctaaattctttcctaattttcatgggttaatgacatccataataaggtattcaaatatgtctcctttatctatattcatactcaaattcatgataaacttgattatcaagttcttaaatatgtgttcattggttaatcaccaacaaaaagagggtataaatgttatcaccctactaagaaattttttcatttctatggatgtcacttttactatgaaccaatgtttctttactaatcctcatctttagggggaatctttatcattaaatgaagataaggctaacttaagctttctttatttgccaaattcatcccttacaactcctcccgtagttaccaaatctacttctacaagggttgacacttttgaacctaaggacgacaataagaaaaggatagaattactaccgtgccactacaagtctactcaagaagaagattgttgaaccttgttttagtgcaaacccaagaatcagaactccgtgataggtattgaatctaaccccactcattgtcttttgtcaccaatgtttgaagacctaaatttgctaatagctcttaggaaaagagttagaaaaagaacccaacacttttgtttctaaatctatatcttttgatagattatcctcacaacacctagccttcattacctaattaaatcttattaaaattccattaattgttgaaaaggtacttaggaaacaagaactagaggaaagctaagggtaagaggatgagtgctcttgaaaaaaattaagatctgggagattgttgaattatccaaaaagaaaaaactagtggggcataagtgggtgttgattgtaaaatataaggtagatggaaccttggaaagatatccttagcaactaatcttggttggtctctacagcagtttgatgtccagaacactttcttacatggtgacttagaagaaaagatctacatgaaagcaccttcagtgttcagtgatagattcaagggtaatgaactatgcaaattgcaaaagatattatatggcctaaaatatctcctagagtatggtttggaagattttctaaggttataggacactggaagttttgacaaaattgaggagatcgtgttctctttatcaaaaaaccgacaattagtaaaatcacagccttggttgtttatgtggatcatataattgtatagaggataatattgaagaaataaacaaacttaagagacggttggctagagaatttgagatagaagacttgggcaagctcaaatatttattggaaattgaaatggctcattcatgtaatggtaatttcatttcccaacaaaagtatatccttgatattctcaaagaaattagggtgtttggatgcaaacttcttgacacgcctattgagcaaaatcataagcttggagaagcattagaacatgcaattgtaaatcggtacaattaccaagggctagctgggagattcatctatttaggcttgatatagcctatgtagtgagtgtagtgaggaagttcatgcactcctttgaagaggctcacttacaagctacacacaaaattctgcaatacctaaaatccactctatataaaagaatactcttcaagaaaaataaagagttaagtttggaagcttacactaacacagactaaccggataagttgtagaccattgatcaacctctgggtattgtactattcttggaggaaatttggtgacatggaaatgtaagaaataaattgtagttgttaggtctaacgataaagtagagttcaaagcaatgacattaggaatttgtgaactaatttagctaaaaataattcttggtgatctaggaatgaaattgaagggaaatataaagttatattgtaataatatataaacaatcaatattgtttacaaaccagttcaacatgattgtacaaacatgttgaagtggatatctagataatggattgatttgtattgcttatgtttcaacggatgggcaacttgttaatatcttaaggtctatcaagtcactcatttcaagagataactagcatgttatagaatctactcacttgcttaaattcttatctcttcaatattaggaacttgtcttgggtgcttgatggcatcagagtcatggaaatggtcattgattttattttaagacttcatctatcttaggagtaatggttttcatagacatgatctggagaaacccatttcaattagaggaaaaggcatttgagggtaggatttctagtgatttctcaattagggttgtaaatccatgaatagactctagattacgttttgaaatgagttcaatattcaaatctatgccatcctaatatccccaagataatactattaatagtgaagaggtacacttaagctactgagtagatatttgattgaaaatattagggaattaactttctaatttcttggattttatagttatataatttcttgatttttgagattatattgttgtatatttcctattttatttttcctaatttgtagggtagaggatttctaggaattagtcaactttctttgtgtaatttagtttcctaattccataggataatacactattgatattgtatcagtttgtcaggaatgcaatgaataaaatcattcttttctgctttttgatattgaagcttatgggatgcaaatatgggtaataggcacaaccaaagatccaaacataactatggcttggcagctttagatataattctcccaaggtgatcggaagtagaggatgagtgtggaaagatgatttataaggtaattaatatgattcattagtagtacgagcttcatgccagaatttcaagggcagtgatgcttgagtaagcaatggaaaaacggtctgaatgatatgtcaatgcttgttctctgctttaccatgctgctcgtgagtatgcaggcaaggagggtgataggctatgccatgttggttatggtaataggtgaatgaccaatattcatcatcccaatttgtttggacagttttgatcttttgattcagatgcaactcaacataggctttaacaaaataaaaatttgaccattacaagaaagaataaatgtttcctccaaaaaaattgttgctaaatgatcttctatgctctctcaaagctatcactcctgacataaccctcttaagactaatatgtctgtcagatcagaagcagggctcaaggaatctgaattggacttggtgcatcttggtgattgagttagtcctcccaccattaggtaccttaggactgagttataggtcttcatttggtggttaaaattaagaggcttgtcaaggctagcttgacatgcatagagcttgccacagccagaataagatcaaagggcgcctctgtgtccttttgacatgtgtaatctccaaaggcttctatgtcaccatggtgtcattaatgtgacagttacctgtttacagaactacaaaataaaaattccctctcttaagatctcactaatttttcactctcctttcttttgatacatcctttcttatacaagactagtgccacgctttccaaaaccctcgcaccgatcattttgctcgactcttctctccaactttgacacctcaccatcccccaggtctaatctcctacatttaagaaccctacatcaatgctatctcaaacttaagccttgctgaattcattatgctgatgcctattctattgaggtgttatcccagaatttttaattactgattttataagagtggttgataaactggtttgagtatcacttctttgaaaagaaaattcaattaatgaagaaagatatagctcaataattggtctgtgacagaaaatatatgatttgcaaactttaattcaatggggagtgaagattttgtaagtatcatactgttttatgacatattcaaatgaagttatgtcaaggattttctacttgctaattatcaataggaagaaatatcacacatacttaggaaatactcccaccagtgaggcaactgactattcttttcctttaataattaaagatcagatgaagggtagttatggctcatatatttgttcagttttttttttttttttttgttcttcttcttcttttaattctctcctatttttctcattgatgaaagttaagataataattacattattttcagcaaaacacaggccttgtgaaagaaaaagaatttctaaccatcaagccttgtggccaaatcaaataactctacttcttctttaaaaggattcttttaacacttccacttgcttttgatacttaattagttcatgagattttgttgttcctttatgttgacttaattggaagtgaatttattagttcactaattctttttcacttatgctttataaagctct

SEQ ID NO: 11605 - DNA, 12007 bp, Vitis vinifera
  Intron number 2 from transcript GSVIVT01003434001 (locus G SVIVG01003434001) derived from phytozome v7.0 (chr-ID chr7 ; pos 15001627 to 15013633)
ggtttctttacttgcaagcttaaagcatcaaaagggtaattcctgtaccataataatgttgtttccatttatctagacatgatctcttttcagtgtctaatattgttgatttatttattagtcttttttgtggctgcaagttgtgggatatatcctctttttcatttttctgtttttctcaaatttatatcatgtgcttcagttttaaataattattgtgataaatatagggctgtcttttgttatttcatgttgtagtcataacaaaggatgtaaacatattaaagtataacatacagtttgatatgatccttccctttgtctgaattcatgtcaatgtgtattctagttatatgaccacctttataactaaatcagttttgtagatattattggaccacttttactgtaacagactgtgattggaagattaattttcattatttcccttcatttttttttctctctttgaggctagtaaggttagttttagaatatttttgcttaaaaatagggatgagggtgggctagttggtcaaagctgattaactagatttcaaaactctatgtttttaatgctatctttgttaatcatggttgattcttatcatttttcctaggcttccaatttaaatagtgtatcttttatcactacatctgacaatttgtaatagtgacttcttactatgaaaaagaagctttgcaaaggtaaggttcatggactatctagttgacagcttaatgccatacaatgaggaggctaagagtaaaaaggcaagttgagaagtgtacaagcttgagcagaagctttgaaatagtaatgcaatcgactgaacttgtctttggaaatattaaccttcacttaaagtttggtgcatacttaatactatgtgaatggtcgttggttttagaattaactggtttaaacttgtcattcagtttccagatctgctcttcttaaacatattgtgttaacttttcttctagattcatcttatagtgatactagtttttagttgctttttttaactccagatatgacttccccagttgttttttttggtactgatacgacttgcccatttgtgttgttttgcatggaatattctgacttaatttggtagatcttttgctttaagaaaataattatatttatatcaagggacaatctggagtcaaggttgttcttactttcttcaaataggtcattgacaatcagatgcaagatagaaaaaaaagagttagaattgagctgaagaattgagggaggaaaaatgtgaagaaaagtaggcagcatccaatgagtttaatgaaaagtaatttagcaagttcaaatgggcaagaatcaaggggtaagtgaataagatatatgggatagtgaggggtaagcgtgtgaacaatttcaaaaggagatttaccagtggatctgttagttgagttataagaagactccactatgggttggtagatcccaattgcctggttttttgtccactacctaactaggtcttctaaactacagacaactgcttcagttaggtcatcagtatgtgtgtcaaaggtcgaataaaactttagggtagttcaaagaagttttcaaggtgttttccaatagtagcagacaaatttaacttctctgtcagacactacagaagtgagctatgaagttagagaacctacataaagaacaattggaccacatgaggcatcagttgtttcctttgcaagctgtgaagtgaaccatctcagagaattaatctaccaccactaagatcgagtcctatccttgggttgttttatgcaacctaagaacaaaaactcatgctaacatcttgtcatgaaggctgtgttactggtaaaggtgtgtacacaccagtgttttgctttctagctttggttaattggtaagtgtgacactagggacaaatatgatcatgccagcttttaaggatgctatcagaaccttatcttcaaccaggaaaatggttttgttccttctaaaatgacttgctaaccccccaacatgcaactctcacacttgaaagttctttattgaagttcagggaatgcaaagcctagtacccttaaatatgaagcctcccataatgatgaagtctacatgaccttgattgggagacttgctaaccctccaacatgcaactcccaaacttgaaagttcttaagtgaagtttggggaatgcaaagcctaaacccttaaatatgaagcctctcctaatgatgaagtctacataacctcttcttggactccctcatggaagagtcatgcttcatcctattaaaactggtcacctcaacccttgtggtttttagtatttatgactcttctaagatcatcaccaactttgcttccaacttcaaaacctgttttaaggttcacatattacttagctagctctcaaggaaaaaagacctgcctaagctgatttgcatgctcttccttggtttggctatggattagggtgtcattaaaatagactaattgaaatcaccccataaaagggcgtaaaacatgggatgtgactctcatgaaggtgctcaaaatgttggacaatcaatgcaaaagccaaaggtgagtctcgtacccaagggacatttccaaccagcaaaccaagcatgtcgtctagcctaggtatggaaagcctatatttgataagattaatcccttttctattgacacatattctctaatctcacatttattgtttgctgatgacacgttgattttctgtgaggctaaagaggatcagttgacatatttgtgctggctgttaatgtggtttgaggctttgtcagggttaaaagcgaatctggaaaaaagtgaactgattccaattggtagagttgagaatgtggaagagttggctgatgagttcggatataaagtaggaaatttgcccccctccacctatctaggaatgcctttgggtgctccttttaaatctgtcggtgcatgggatggaaaagaggaaagatttcgaaagagattggctatgtggaagcggcagtacatctcaaaagggaggaggattaccttaattcggagtacattgtccaatctaccgatctattttatgtccattttccaactacatagggcggttaggatgagactggaaaagatacaaagggattttctgtggggtggtggggctcttgagcaaaaaccgcacttagtaaggtggtcgattgtgtgtgaaatcaaaagtaaaggaggtttgggggttaagaaccttggttctttcaataaggctctccttggcaagtgagcatggcgctttgcaaacgaaaaaaaggccctttagaatcaagtgattagaaggaaatacggggaggaaagaggaggatggagatcttgtgagtctagggaggcctatggagttgggttgtggaaagctataaataaggtcggaaaactataaataaggtgggacaacttgtaacccctttttttggatttgaggtggggaatggtaagaacgtgagtttctggaaagataagtggtgtggaaccatccctttatgcgaggctttcccttcattatttgctatagtaacgtctaaagaggcttgggtttgttaagtttggacagccgagggggaaaggaggggaagttggactcctagtttcaataggctgtttaatgattgggagatggaagaagtgggaagattacttttttggttggatgggaagatggttagggtggatgaggaggataggatgagatgggtggaatcaaaggatggggtttttttggtaaaatccttgtatagggcgctgcagccggtgtctcttgcttcattcccttcgaagattattgggatttcttgtgcacaaccaaagataagcttctttgcgtgggaggctttgtggggaagagtcttaaccttggaccgcttgcaaaagaggggttaggctttggctaataggtgctttctgtgccaaaagtgtggggagtcgattgaccacctcctctttcattgtgaaagaacaagggaggtgttgatgttgctcttctctttttttggagtttcttgggtttttttcatattcggtaaaggaaacccttttaggttggagaggctcttttgtgggcaagaagaggaaggtggtgtggcaactgggaccgttatgcttgttttggattatttggaaggctaggaattcaattgcttttaaggacggtgtactgtccattcaaaagctgaaaatttcttttgtgtatttactttggttagaaaccaaattgtggataaaagatggtccttcgatcttaatagattttatagaatgggtgtgtatgcgttaagggagagggttttttgtgctttccttgtgttttgagtccttttgtaagggggtgagttgttctaaattgtaactctgtgagttgcttctttagcacctctttgctatatatatattgcttattgataaaaaaaaaaaaattgacacatattctctaagatttgatctttctttgcctataaaaaaaaagatctgatctttcttaggggttaataggataggtacaacacaaaggccaaggctatgcttaatgaaccctttttctaagagtccctttatttgtttgttgatcttatcccttgaagtaggttttagcttatagtaggggaagttcagaagttggcaacctaggataaggttgatggcaagatgaatgtctctcattggtgggaaatcactaggaagctcttcaggtatgatgtcttgaaattcaaagagtgaattactaacttttgaaggcaaataagtttctggatcaaaaagtgcttccttagccattgaagcaggttttagcttatagtaggggaagtgcagaagttggcaacctaggaaaaggtatatggcaagatgaatgtctctcattgatgggaaatcactaagacgctctttaggagcgatgtcttgagattcaaagagtgaattgctaacttttgaaggcaaatagctttatggatcaaaaagtgcttccttcgccattgaagcaggttttagcttatagcaggggaagttcagaagttggcaacctaggaaaaggttgatggcaagatgaatgtctctcattggtggaaaatcactaggaagctcttcaggagtgatgtcttgaaattcaaagagtgaattgctaacttttgaaggtaaataagtttctggatcaaaaagtgcttccttagctattgaagcaactgtcccacctaactctctactctcatgtaccaacttgtggttcaaaagatataggagttctagtgagaggccttagatgccatgttgtggtctgtgatgtcttaatgaggctttgctaacctaagaagatgatcttgatttagacttgtgtacctttttttgacagttttgtcagcatttattcctatgatggatgacatcaagatcattacagccaagggcatcctagtagcacatggtccatgtccgtggataggacattacaccatatattttcagaacaagaacctaccttaatagaaactaaagatcttctaggtacaagtaagaatgtcttttctccccatgctatcctatatggttgtagtggctcaatttgtaaattatcctagacacaactaccccaaaaatggcattaattgaacaaccacaccccctttccctccccatccaccccaaaaaaaaaaaaaaaaaaaaaataaataaaaatcaataactatcttatatactttttttttttttttgataggtaaagaaaagatgtatataaagaaaagaggagacaccaaaaatagtgccctcagagcatacaagaagtatataaaagaagccaaaaggctcaaactagaggggatggatagaaacaaaaaacataacctgccctcgctttgagcctaaccaatcaatgacgcttacaagcaaaagactcaaatctatagacaccctaacccaagaccaaaggttacatacaaaagaatttttcaatctttggagcgaaaactcctcattaccaaacgctaacaaacacaccaaagagggagaagagaagactccaaagaacccgagtctttacacaatgaagaagaaggtgatccaccgtctctacttcagagaggcatagaaaacacctattttccaagaagtgcccctttctttgaagttggtccaaagttaagactttctcccaagaagcctcccaagtaaagaaagtcaccttaggagacacactcgctctccaaatgctaccactagggaacaaaggagaatctccgggctccaagatggaataaaaagacttgaccgaaaaggtcccacacttcgaatttatccaaatcactctatcttccacatccctgcgcaccctaaaagcttggatcttttgtagaaaacactccaccaactcaacctcccaatcattaaaggcccttgagaaaagaggggtccatccacccccatcactattagggttctaaccatccgtcacccaaacttccttagatgaagaaatggagaatgaggaagggaaggactcacaaagtgacttatctccacaccatttatccatccagaatcccactctctgcccattacccacttggtaggccaacctaccactcaaataattccactccttcttaattgctttccataatcccacaccatacctctcactcactgcatgggagcgccaccccccatcctcttcaccatacttgtgactgatgacttgcttccaagaggcctctctttcattggcaaacaaccaattccacttgcttaagagagctatgttcatcagagatagatttctcacacccaaaccacctttcattttctccaagcaaaccgtgttccacctaacaagatgcggtttctacacaagagcaccaccaccccaaagaaaatccctctgaatcttcttcaatctcaaccttacttgtcttggcatgcaaaaaagggacatgaaatagataggcatgctagacgaagtgctacgaattagaatgagtcttcctccttttgagatatatggtcttttctatattgctagcctttttcaaaatctttcttcaacgccatcccacactgcctgatttgaagggcccccccgaaaggcagacccaaatagcaggaagggagaccacccactttacaccccaactccaaggcgaagtcttctatattatgcaccttacccattaaaattaactcgcttttctctagattgattctcaaacttgagcaagcctcaaaccacatgagaagccaactttgataggatatctggtcttgagacgcctcacaaaacaccaaagtatcgtcaacaaataacaagtgcgagattagaatcccctcaccactcctacctctcaccctccaactagataagtaagcccccactaacagccctcctcaatagacaactaaacaccttcatggttatcacgaacaaataaggggagagggatctccttgtctcaatcccctcgaacttttgaaaaaacccgaaggagatccatttactaaaacagaaaatttcacagtagagatgcaacattctatccatttaatccatttctccccaaaacccatttttctaagcaccgcagacaaaaacttccaattcacatgatcatacgccttccctatatccaacttgcacaacacaccaccttcattgcttttcaatcttgagtccatggtctcatttgcaatcaaaactgcgtctaaaatttgttttccctccacaaaggcattttgggacaccgaaatcactttgcccaatacctttttaagtttattagccaacaccttggccaacaacttataaaggctgcccataagactaattggcctaaaatctttcaagtcttctgcacctcccttcttagggacaagaactaggaaagaaacattcaaagactttacaaatctgcccccctcatggaagtctctaaaaaaacctaaaacctctaccttcacaacttccctacaaaaaagccaaaacaccatggtaaagtcgtccggacttggagctttgtccttactatctggtatactttacctttgcattgacattaatgtacattgggatctaattctttcaaaaatctattggactttctaaagggtcaaccatttggttatagttctatccttctcaagtaccatctaacttgtgatgagggtaatgtgatgtaatgtgcccttaccatgataatggtagcacttaatggtattcccattcctaaagtaattgctagagatctccttgcttactcattgatgtgattgatagccattcctagaggtagttagacttagattgggtactattttcggagctgtcttttttttgaataaaaaacaaaagatttgttaattatgtattaaaagaacatgaggatgaggagtcctccccaaaaatttacaaaaacttgataaaaacttgataaaaagataattgaactcctccactatatgaggaacctacacaaaaaggtctagtccacatagaaatatacatagatgtcatctccttaagtcttaactaagctcctctcatggttgtccaaacccttttgatttacacactgaatgccaattaggctaaataacattgagagaaatgtctttaaaaacattggtataggaggctcagaaagaggaataaaagtgaagtagatctcatgacattttttatgtaccctacttatcctcaaaggtttcaacatctctctttttggcacattgttcaaggtaatataagtaatatgagaaaaacaatttgccaaaggttcttgcctttaatggggtttcttatactcctatttgaaaagatcattgtgtcacatatactcctgggttggaccctattaatcttgacttgtcgaaatagaccgtgtcaaagcccttaagttattaggcaatcaagaaaaagatggtcaatcaacttttaacttcccagacataaaacacactaataaggacttaaagatttaaaaggttttggattgggtggacttcttaggtggataggacatgcaacattgcaatattaagctaaggtcttaatagaatctttccaactctaaggccttgtgataggccttttccaaggcttatgggaagtgtagattcacttcacttctaatttctggcatcaaacccttgataataaacctagtgctgtcatttgtgacacctcaataacatcatacatcagtattggttccttcaaatttagtgatgctagaggtctaccttttcaagtttagccattgatctagtatctcgctcttaaattcagtaagaatgtattttttgcgctacttttgtttcatttcagaccatacctttagttggctcttgtcattagtgttctaagaatctttgtactttttttgagcattgtttagcaacctggatgagctttgttttgcaaaacatgctctttggatctttgacaagttctaccactcaaagtagtcctccatttcattcaaccaacatagaaaagctatagggtttatcctcttatcaaatctaggtgcatctattttgactttctaccaatatcatctaacccatcaagttggtgcctaggatttgttgtttcgattccaaaaaaaggtgaagtcgaagatataaaggagtttagacttattagccttgggtagtttgtgcaaaattctaagtttttgaaaatagaccaaagaaagtgattgggtaagtggtattagtctcattatgtgttaatagaagggagataaaccttagatgtggttccaatagtcaatgaaactatagattcaagattgaggaatcgtagaaaggaagttgtctataagttatacattgaaaaaccttatgaccatgtaaatgcacctttgatgtaggacaaccctaggatggttgcctacactcaagggtaggtgggctagggttttatttttagggtgtaaggagaggaacaaggaataaactttatggtagagaaaattataagataagaaatagagagaaagaagaaacaatgaagaaaagatggaaaaccttagagtctcactaaggccttctaggagtctcacctagaagaaaatcaatggagtctcaccattgagggttgcaaccttgcaatgaaagaaagtataatattatttatcaaaattcatccctttgatttacattgattagcctatttataggcttctctaagaaatccaaagtctactaggactctaataacctatcatgactcaaattctaattatattaatcctacttaaagtttacttaggtcttccctttcttccttgaataaactttaaaaggctttcccccatcaaccttcctattagagatgatatctgggttttgggaaaaaaatggattgattggattcagttttgcatttcaacaagaaggttcttagttctagtggatggtgtttcttcttggttttttcaaagcacaggaggtttgagttaagggaaccccctattctcatatttatttgtgttggtaatggaggctcttatcattctcttgagaaaggcagaggaaggtgacttcatttaaggtctcaaagtaggacaaggaggtggtgaaggagtggagatttcttgtctcctatccatcaatgattccttacttttttgcaagtcttgtttagatcaattgatttatatgactactaaaatatataccaaaagcccgtaaaggcctcaaccctttggtggacaaacttaacatcattgcacagtcttgacaaaattcagttgtttccctaactggctgatgggaagacaggttgtaccagtcatgtcaagtcggttgattagtaatctattgatctatttcatgtttcaatgcaaaaaaattctttgatttcttccttgacttagggcctctgtatacttatattcaggatttagtttactgttgcccaggcagaaggtattaaaaatattaaaatagatttttaaaagcttgaaatgacttttctgtctatatacctgaaagttctcatctcctgtttttcattcactgagatgaagttgaggcaagaattgaaaatattttaaggtataaagctgttatatgccatccagatttatgtttatgattgagtatgctttctcattgtcatgaatgtggtatgagatacggaagtttaacgaagactggtctgtggtgtcacttcttgctttgaggcctaaattaaactctcatttcccctagttgtttagcttgtacatcataccctttacttttgtttctcttttaggcagttgggaactttagatatcatcattcatttgttgtttgctttgttaacaggcttcttatgaagctctcagttctaagttacaaacttataagaatgggctagttaacaaggttagctagatgcatgaatttgtaattcttccttttgtatggggtgtgtaatgtgtttcaatattggaaaagttgtatagacttttaacaaaaggatattatcaccatactttcagcattctgaacagtgttgaggggttttgttccctttttccccttttgggaactggaacaaagaaaaggtgcagaagcttttaaaagagattaagtggcctagttttgaatctatccagagtgctgtgataatctcagaattgttttcatggtggaatttctacagcgtggcgtaaaatttgatgctaggttgtcatatttagtgcccaaatatttcaatgaactgattatcttgcatggtcaaccaattttatgctcagcctttttcattttattgaggttttaactttttggatggtatttctgtgaaactagtgatttttctgttcctatgtaatttgtaagcttctggagtcttaaatggttctttaaatcccattgatttgattgtggaaagtatattaatatgagacatcataaaatgttctgcgataatttaatgctgatgggtatgaattgtcttattccaggggcaga

SEQ ID NO: 11606 - DNA, 1621 bp, Vitis vinifera
  Intron number 3 from transcript GSVIVT01034979001 (locus G SVIVG01034979001) derived from phytozome v7.0 (chr-ID chr5 ; pos 648540 to 650160 reverse strand)
aagctgtggatatcgtccatagtcatccacgtgcagtaagactttatcctctgcattctttttgcaataatgcttttctacattgaaatgtggttcaatgtttttgtgattctcttttgtaggcattatatgaccttaaaattcaagtttcaattgtctagggtttgttcattaaatggttgcatggtggtgaccctctaatgtacattatttgcaattctgtttcatctattcctggaagatctctgaagtaattttttttttccttaaattgattttctgggtacagagcttaatatctggtaaatcatttgtgtatctgcctcttttaatagagcaatcatagaaatcttgtcagtaatttctcgcctaatgcctttgtagtttgcactcatcaagaaattgtttttctttaatttctcatgctattgatataaatggcctgatgggtcattgtgcctgcattagttagtggtcatctagacctagtttttgagggtgagcttcatagtgatgcaggtgccattatcttcagaccgtttacatcagtgataccatatttgtgagaaattgaaagaaaaagaattttttggttagggtaaaccacaaaggcctaaagtgggaaattactgataaaatgtgcatgacttttctatttagaaaaggcagatgcataaacgagttaccaaatattaatctctaaacccttctatctgtgttatttttgtaacataccaatatctgatgtagatatgtgaaatgaccatcattatgggctccacgcaaatttgctgaactacttgcttggcaatgctttgtaaatccttttgaacttgctagcaaatatgaactcataaaatattcaaaatcgtactaaatcaaatttgttttgatcactgacataaattgatagggatatggagacagaataaagaatagctgtgaaactatgcatttgctaaaattcttttgttcacttgtcccaagggaaatgcatgcacgtttgaataaggataccttagcaaaaaatatgctgccctctaccattctgttcaacacaaattttagcgttggacctccaagttaagtgatacctgtgacagataaaatctttgcttgctagtgtctcaatgttctgaagaccctttcttcctcccttccctctgggataaatgaaacgggtcttttcgttgctaataattcacagctgacagatcttcttggggaatattatgaaaatttctgatgtaggcaatcttggagggcctttgtctcaatattaatacactgcctaatattagcataaataaaagtagaatctcttataagctagctgcagatagtttgtaggcaacagatcttaacgagaacattttgtactttttccagatgatgtttgtggatattacatccttatatgttgaactgcagttatatttatcaaaaaaaaaaaaaaaatgttgaactgcagttacttgataaagtagacattaaactcatgcacatgtgtataatgtgtatctcttcatataaattggttttggtaattctgcatatgtcaagctcacaagtttccatcattgcagggaagtgccaaacgacttgtaaaggcagccctcca

SEQ ID NO: 11607 - DNA, 915 bp, Vitis vinifera
  Intron number 7 from transcript GSVIVT01031499001 (locus G SVIVG01031499001) derived from phytozome v7.0 (chr-ID chr6 ; pos 17928638 to 17929552)
tctaggggttgagtttgtaaaaaaaccaggtaactcacctttttttaattccatttttcattgagcactatcatgtctccttaatgaacatcggtttcttgggtttaaattagtaggtgggggtaactggagatagttcagttcccgaatctgctagtatgcctgtggatctgttctttagatggatcatcaatgtccctttcaggttatattttggtttgagatgtgggttgcatgcatgaccattaaaaaacctcaagtctgtgtatatgtgcatcgaaaagaatagatgcacaacaggaacgtgagaatccttgctgaaaggtaataacataaagaaaacaagaatgggaaacccaactataaaattgaacttcgaaaagattttgagttttgaactcctcttagttagcaggttggccaccatgcttgcaatcttaggtgttttaaattgcattactttagttaaggtttttaattctttgacatcatgagaaatctctctgccaccaataattaatgaatggcagatacctctactgacactatttagtctctcaggaatttggcatcaatttattcaaaggtggttgatgcaaggttgaaagctggttgtaagataaatcttaaaccctgatgggtcatactttgatccatgaagctgacaccaaagaagttggttaacaaagctttatggttttggttctggattctttgcatctaattcaaggttatgctgttgggatagcataacaaacttttgtttgggttcatgttccatgatgcatcctctatttgtctgaccacctgtttgggtgctatattgaaaaaaagagaacatcttcttcaactatgatttaaaaaaaaaaaaaaatagttgcttttatattatctgtcatgctggctgcaggtaaa

SEQ ID NO: 11608 - DNA, 5696 bp, Vitis vinifera
  Intron number 2 from transcript GSVIVT01021671001 (locus G SVIVG01021671001) derived from phytozome v7.0 (chr-ID chr1 0; pos 9063579 to 9069274)
aagtgaaaggtactccatttcttctgcatcaacaagtgcagttacagaagagtatatacttcaaggctaggagctagcttgctaaaccatattccatgactgctgaacgcatcaattagaaatcagaaggtttgtgaaacggaatttctgtatggttctgctctccacttttatctaatgactaggaaattaaattttctctttgatcactttgattctaaaatttgttcaaatatttacaaagagcagttgtgtatttcatttgatgggttaaaacaattttagcatattgccaatttatccatctgttttcatttttggagccatagtgagtgaggtaacgaacatttatttttatgtgttagattctttatctattgtggacctaatcaatatccaacccccacatttggataggattgtttgaattgaattcataatatgtttttgaattcatcggataacacctcatttgtggataggctgtttgaactgaattcaaaatatgttcttgaaattatagaatggacagagagctagatatctcctcatttgaattgcacgctatgagtaagcatgattgagattactcccacttgtgataagatgtactcatccaataagggtttttattgttattttctatgttggtttttatattatagtatgattgacgactaaacattatcctctataatgcaaatctaagttaaattcatgcaagagtactgaaaatattttggaaaaggatggtatgtactcaacttgaagttgagaatttatttccaatatacacaaaataatcaaattgaccactaatcaatcacattacttatttgatcataattagaaggataagacatatttggatgataagctcaaagatgatgatatgttggagggtcctgatttcatgcagatccaaattgtaggaactcagtaaggggagcttcaaaatggaaaaatatggattatgcaggagctaggtactataggtgataggcctgggtggacatactcagcaaccttttgactggtttagcatcataaatgttctttgatagatgtccttagagcagaacgaaaaatgtctctaaaattaaatatgttgtgaagtatgcataagcgttgtaattttgctatattagaaactaaaatggcatcagatatgacgctaagcttatcataaaatgatttgatgaagcatctaaatggtcagtcatgttttgaaccaccttgaagagatgataaatggaatgagaaagggaaaaaggggtttaccatggcttatcacaaaataacctttttccttttgaatttcgtggtagagtacgaatagtgtggcccctctaacagacaaaaaattggaaactttagtgtggacttgcaaaaattttcctaattgacttcaggaaacttctatgtaacactgccgataaactgtttgacagtagaaaatttgcaaaatttgagatttttttctacaagtactcgtcttagaaatggtcacgcacatacacacttacacacacaatgtctttccaaaaggctagtctccttttaaaacagtcctgaactaagttccaaatggtgttggtcttgtggtcatacacatacacactcgtattgtctgtccaaaaggaaaatcgccttttaaaacatactaactagttttcttaaattttaaactagtttaaaacatcatatttgatgaaaaaaatataaatatgacttataagttaaaaaatatattctaatatattagaaagtgatattaaattagaaagtgttaggatcgattgataaatgaatgaagtgaatgcatttattgataaatgtggaatatatttataacgtaaaatatttctcattctatgaaaaatattactcaaatgcaacctcttaggcctgattcatatgagaagctagacaaagttagttcttatttagcttctttgtttatctttctccatgcaacttatgttttatttgtttgtttttatctctcaatgatgatcatttatacttacaacatttaatttttttcttattaaaaacatagaatattttttccccctttgtaattaggactcttgtatagctatggacctcattgagctggaaaggagaaaacaacttaccctaattctatatgtcatagtgaacatacttaatatatttattgcactttgtattgtcataaggaagtgttatcagaagtggacatagatggaaaggcctacaaatagagtatttttgcaagttgaaaatcttaattgatttgtggaagtaatacaacatgtatggagcaatataggatggataaacatactttcaccatgttatgttctatgcttcatactactggtaaattaaagtgttcaagatatgttgttgtagaagaaatggtttcattattcttgcatatttttacacatcatttaaataattgaattataaaattttgattcttaaggtttggagaaactattaactagtaggcatttcaatgtaatattgaatgcgtttattcgcctacaagaagtattactgaacaaattggaaccggtctttgagaactccgtagacaagagatggaaatggtttaaggtatacaaaatataaatttagttaatgaaaatttagttaattcataggtttcattttattttattttatttttaatttttaattttactaatgttagattttgaaattaatattatgttttttattcattcaaaaaaggtcccagagcatgtaccaagctacaccacaatcataaagacctttaggtactcatggtaaggtgatttcaattgatactcaaaaccattatccacaattctatcttaggagtcaataattacaagatctctctcacaatgtggtatattatttaatctaaatgaaaaccataaaacatttggagaagtcagtatatgttaatttgttgcttggcttagagtattttaagatatcatttgattcttttacaacatgaggtaaatattgatattactttaagtttattaatttaatggaaaatagtcattatgtgatgactatgtaaacttatttttgtattcaactttgatatccatcacaggtctaaaattggattatagaattagaaaacaagtttaagtataacattgtagaaaactcaatacaagtttaagtataacattgtagacaaaacattcaatgagatatgttgtatttaattgagaaaatgatttgactataggattgtaatgaaaaatatttatttcctaataaaattgcatataatttctttaatatagttcacaaagtttgttaggttgttaggattataataatgcaaaattatttaatacaaaggaaatttagcattgaagtttttttttaataacatattcattttgttcaactcttattatatccatgaaaatttaatgattaatgttttacttttgttttacatgtaatgatgttgaataacttcattcatatattcctataatatagttaagttctcaaacttaccttaaaatacagtttttatgttgtaggtgttgtagatctaataaagaagaaaagagaaaggaggattaataaaggagcaaatatggcttttgggagttatgttttaaaatattatgaactaaatgaatgttatatgttggagtaaattgttattgataattatgttattttgaatcgttattattcaattattagaaatttattttgaattaagctctacatatatttaaatttctattattttttagttaaatatcttttgaattagtttacattggaaattaatgagattgacacttttaaatcattcttagatcaaatgtgatgaacagtgaatgttgacaataagtattattagttgtgagataaattattatgattctctattcttagtctatgataaccaacttaggatgttggtatcaacaacagtttttatttgttgctaaattactcatttagtaatagcttttttcgaccattttaatctgttttcaaaaggtgtgttgctaaaagtctagcaagaattatttccattggcattagttttaagaaactaactattcaacatatttataccgttgttattatcaattgggaaaaatcaagtttcttgtacatgtataattattattatttttaaaaatagtaataaattctatatacaaaaaataagtttttgatagttacttttaaaattgttttctaatgttttacatctttatatatgtttttaaatctattttctatattttaaaatgttttttaaaagcaatttttatccatagtactttatttttaatcattctctatatttttataattattttttaaatatttttataattaattttatgacaacattagaaaaacaagttaaaacaattaaaatatattattagaaaatatactattttatatttttcagaagagaaagttattttctattaaaaggttccaaatatgtttaattttatgtgaaaaggttcttctaaacctacccaaaacatcatgtaaaaaaagtataattttccttgcatctttaaaaatcacttttaaaattttaaataggaggtactaaaattttttcataccttaattttcttaaatattttttaaaattatgacatataaaagttactattattttttattttcaaaatagaaaacaggaaatgtatacatgcaaacactaattcaattatttttttcttttaaattatggcattttctttgggttatttgattagaagggatgaaatcattccatttataaaactatcctttcactttatatatatatatatatatatatatatatatagagctcattttaaagaagaatgctttcacttttttcttataaaagtaacattttcttttaaaatatacatgtaaataattaaaatattgaaaggtatttatgtaaaaaataggttactcttcaagttaaaaaatgggagatgtaagttttacaaatttgagattttttcatcccttataatcatttaatcaattttcttttaggatagtatcgtgggttgtgtcaaaatttaggtattttactacattagtcaacccaaactcaacatgaataataattgtttcaaaaacataaacccaaataagtacatagtatttaaatagacaatacatcatgtaactcatttaacccatttaataatcaagttttcccatttaagaacataattaggttaatagtgggattattaaatgtgacaattcagatcaaatttgtgttatataggttgataaaaaaattacttatttattaaatgggttatataggtcaacacgaatttgaccaaaacccatttatactcgacccaaactcataaaaggtatgttaaatttatgttagcaaatcatattaaactttgtcaccctgctttaaaaggtaacttttactgttgttttcatcatgaactttcacttcatttattgctcaacaactttatcatggcccccattttctttaataaagaagattcccttcaaatctaataattggatgcagccagctcctgagttttgaggcacataagaggctacctatgatatgatccggtagtttcaaagcttaaacactgcataaaatggctatgcaagtaatactagatcatccggtcaccatcatcatcctc

SEQ ID NO: 11609 - DNA, 6851 bp, Vitis vinifera
  Intron number 1 from transcript GSVIVT01017371001 (locus G SVIVG01017371001) derived from phytozome v7.0 (chr-ID chr9 ; pos 7476900 to 7483750 reverse strand)
ttgttgtgctcaattagttaagccagtgaattgtgagattagctccaggatcttgcttctgcattctttttaagaaaatatttcccttccacaatctagttttatttatcttcattagtttttacctagatcgactagtgagtgggctttctaaaactgaataaaataaattgtgggcaataaaaagctacacaacttgttcttggagttattctactttcttgataaactttgacacgagctcaaatctctagtcctatgtaaagggtttaagagaacgtggcaaccgagattaattacttcatagggaagttattcttgaaggctgcctttcacttttccttatctttgctttccaatcctttgatgtggttattttttgatatgaacattcaatttggataagagataaaggtaggtcatgtgcaattggtcctgttactgttgtaacttatgtggagatctagttacaacttcaaattatatgccagctatttgtgcttatagctgtcattctactgtgaaaacaaggatggatgcccttgaaagattggatgctgtgcaaggccctttggtgatgcatggagctgttgtgattggcaaaagttggcatagtttgtgatcaatgtcgacaactagtaaaatatccataattattttcaaaggaatgattgtgaatccaatttttcaaaagcaataagtatctagttaaactacatctttgcttataagcaaggatccgatccttggttttatttgcaacttgattatttaagatgtgtgagaaggtgtaactttttagtcaagttgaaacggttatggaggatattatatattgaattaattttgttaccaagtgacgttaaaactagttttgtccatgttacttggtaacaacattaattcaatatgatcagagctaacaaacaaaaaagcatacaatcatgtatatgattcatcacacaaccactcataaaatgctaaaaaattattcaaaaaataagatcctgataaaaaagcttattgagaaagaagaagatagagaaaatatgattattatattctcattgatgatgacgaatatttatatacaaatatatttgaattctactctaattcaaactctatctcctactctaattcaaataaacaatagacttctactttaattcaaactctatctcctactctaatttaaactaatagtcaacttctgctctaattaaaactctatattctatgaaggataaacgatattcctagattctcgacactatccctcaatttggtgcatagatatccatcatgcctaacttgtttgttagatgttcaacaattggtctatgaactcccttggttagaaggcctcatgcggtcacttgattgtttgcatttgtcatcttcggtttcagatgcgagatcctggtctttatcttcttcagggctttttacagtcaaatatttctttcttgccttatcccattgttctggttctcctccagttttccctactaagttcatttggaattctcaagtccctttcaaagtcaagtcctttgtttggttagtggcacacaagaaggtaaatgctaatgacttgctacaattgagaagaccctacaaagctcttagtcctgatatttgtaagttgtgcatgaggcatggagaatcagcaaatcatcttttcctacattgttctttgacgatggggttgtgacacagattatttcagttagccaagacggattgggttccccctaggagcatttccgacatgttgtccatcaattacaatggttttggtttatctaagagagggatagttttgtggtacgttgcgtgcattgttttaatttgggttgtgtggcgggaaagaaatgcgaggattttttaggataaagtaaggaattaagagaatctttgggattcaattcatttccttgcttctctttgggctccaaggtttttaaggggactccccttaatgtgttacaacttgattggttagcggcatgtgattcctttgggctggtctaatctagagggtttgttcgttttttcattgtattttcttgattttgtattcttgtagtttagttttctttggtgggaggattcctcatccttctcttatacttcttttttctatcaatatatccctttgttgtttcctatcaaaaaaaaaaaaaaaagtcccttggttaggatgtgagctagttgctaggtagttggaacaaatgatgtgcatataatactagcttcaagtttttcctttataaaatgtctatcaatctccacatgtttagtcctatcatactgaactagattatgtgcaatactaattacagctttattatcccaaaaaagcttcaaaggtagcttattggttgtctcaactcttttaggacatgcctaagccacaacacttcacaaatcccgtgtgtcattgttctaaattttgcctttgcactactactggctaccatgctttgtttttcactcctccaagtgaccaaatttccctagataaatgtgcaataccttgagggtgatctcctatcagttattgaaccaacccagtttgcctttgtgtatacttcaacttctcgctgctcattcttcttacaaaatagtccttttcctggtgtattcttcaagcatcttaaaattctacaaactacttcgaaatgcacttcaaaggtgaatgcatatattgacttaccacactaattgcaaaggcaatatttggttgagtgtgagataggtaaatcaacttattgaccaatttttggtaccttgtagtatctatcggaaccccaatttctacctttccaagttttacattgggatctacagcggtatctgaaggtctataaccactcattcatgtctcctttaggaaatcaagaatatattttcattgtaaaacaacaattcccttctttgaccgtgctacatccattccaaaaaattatctcaaggcttcaagatctttaatttcaaattcagcagctaggcacttcttcaaatgattcatctcaaccatattatcttcagttaaaataatgtcactccacataaaccattaaaactataactttaccttttagagagtatttcaaaaataggtgtgatttgtttgtcctttacaaaagcctattttcttcataaagcgggtgagcctctcaaactaagtttgaggagattgcttaaggccacataatgacttttgtagtttacaaacctttgagctaacccacccttttatcaaagtaaggggtagatctatgtacacttctttctttaggtctccattgagaaagatatttttaacatccagttgttgtagtggccaattcaaatttgcaacaattgataaaacaactttgactgtatttaattttgcaacgagagaaaaagttgttgagtagtcaatcccatatgtttatgtaaatcccttagcaacaaggcgtgccttatacctttgtagagaaccatcggaattatatttggtagtgaacacccacttttagccaacagtagtcttccctttaggtagagttaccacctcccaagtcttattcttctcaagggccctcatttcctcaagaacaacctccttccactctggaatttttagagcattctccacattcttcagaatttctacactagaaagttgagaggtaaatgcgaccatggaagatgacaaattcttataagacatgaaattagacataggatgttgagtacaagacttaataccttttcaaaatgcaatagggacctcaagatcactaagagactcttcatgattaatattggaagaagaacatggtttagatggaggcttacatttctcaagtggtgagattagatttgttttcgagatagattcatggccttgtaaaaataggttcttccatcctttgaatacaatttctccttgagtagatgcgaagctcttgattgtttttacttgtattttcattgaatttagtattttcatgatcctgatcatgtgttggcattaaggtgggttgtccaacattttcaatagctagatcatttgttccttaagtttttctactaccaattgagtcatcaagcatgggtggttgtttttttgttttttctggagatttttctaggaattttcctagagtttctaactattgttgaactaacaatggttggtttaactcaaacacctcactaggaacaaaatctacacttttattctccccctaaggatgatcatgactaaaataaggtttagtttaaaaaaaagcgacatccattgttacaaacattcttttggtacatggatcaaagcattcataccctttttgtgttgaagaatattgaacaaatatgcatttggatgctctaagatcaaattttccatggttatgattatgaacatgaatgaatgcagtgcaataaaaaattttcaaaggtaaatttgttgaaatccatgaagtaggaaaacacattgaaaaaatcaagcggtgtttgatattttaaaaccctagtaggcatcttattgatcaaataggtggcggttaaaatagcttcaccccaaagatatttaggaacttttgttgaaaagaaaagtgatctagcaacttctaaaagatgtctattctttccttctatcactccattttattgaggtgtatcaacacaagaactttgatgtattatgccattttctagaaagtagtttcccaacaattgattaaagttttcttttccattattagttatgaaaatttgaatatttgtttgaaattatgttttaaccattttgtgaaaaattttaaacacttatgctacttttgatttttcttttagcaaatacacccaagaaacccttgtgtgatcatctataaaggtgttaaatcactcttttcctgaaaaagtgtcaaccctagaatatccccaaacatcattatgcattatagaaaagggtttagaggctttatagggttgtgaaggaaaaatgcacgatgatgctttgtaagttcacaaatttcacaatggaatgaagatggatctttattaataaacagttttggaaatagatgtttcaaatattgaaaattgagatgttcgaacctaaaataccataacattattttattttcattagttactaaaacagattcaaaacaagtattctgagcttgtctatctagtttgatttcatcttcaaagaaataaagtcctccactttgtctaacactaacaattatctttcccgagttcaaatcttggaattcatgtcgagatgagaaaaaattagcttgacactttaaataagaggttaatttactaacaaacaataaattacaagataaattatgaacatgaagaaaattttggagtgtaagaagtgaggagattttgatagatctttttctaacaatagccaaaagtgatctatctgctatttttatttttgtgtttcctacatatggactataagaagaaaacagatttaaagaatcggtcatgattggttgcaccagaatctatgatccattgactatttgaatcaaagctaacaagggttgtaggaagatgattacctttttgggctaaggaacaagaagggaattgatttaaagagacctgagattaagaagtttgtacaaatgctctatttgatccttagtaaaaggagatgtttctaaggaaggttgttgcccctttttatcgcttccgacttggtagacacgactctccctgccaggtttcttctttcagtttgatggcttgccgtgaatcttctagcaagtatcataagtatgccaggtgttaaggagcatgttatgcaagagccataatcttgcaagcttaagattttgggaaaattggtagttcagcataatattagagcttggtttggtggaaggtcatgggttctagccacctctccgcaatttgcatttcccttatttgtttgttggatataaatccaaattatgtctctccacatgcgggtatggggccacacgtgagagagggtgttaaggagcaggaaaggcatattgaaccaaaatcctgtaagcttaagctataaagattggtagttcaacactagggtttcttacagtggtcacaacatggtctatcacccttcttagaattccttttttctccttcttgatcaaactccttagtaacaagggcagaactatcaaattttgttctagcccttggtgactcaaagttcatcataatggatcttctagcatcttttcttctagctttgataccatattgagaaagaaaaagatagagaaaatattattattatattctcattgacgatgaagaatatttatatacaaatacatttgaatttcactctaattcaaacactatctcctactctaattcaaactctatctcctactctaattcaaactaataataaatagacaaatattaatatttaaattaaggataaacaatattcctagattccttacaaagctcataatattaagaatcatgtggaggttttagtttgttggttgacctgtagattacatgatggaactaaaataatacctgattttctaaacatttactcttcatagggtctgtcatattgatgcattattatgctcatgttacttcttgatcttagatatctacttctaccataatgtgttttttgaaataaaagttagtcataatcactatctttagctagctctgtctctgtttttcctgtttttcctgctatgttactttttattttagatagttacatgatttcataaatgagctttacttgcttgacattggaatcattgttggtgcagttcctgctgaaa

SEQ ID NO: 11610 - DNA, 7185 bp, Vitis vinifera
  Intron number 1 from transcript GSVIVT01038206001 (locus G SVIVG01038206001) derived from phytozome v7.0 (chr-ID chr5 ; pos 24336727 to 24343911)
ggtaagaatgaaattgacgaacaactaatcaataagggtagtaattgataaaatttgaaattaataatagtcaaatatattttacaacaaagattaatgagtgggaatgaaattaaccctaatcctgaaaacctatgagtggcctgggaagaagcaataatgcaagaaagggactaaatatgatagtgagatcttgggtcttcgtccaagctcaagcccttttctcttttctatgttaacatattgcatgtagcccacaagttgtgtaagtttgaatcgagacacctcattgtccaaaagtatctttaagtttacataagccatgatgtcaatattattatcttactctcatacaaatatgacagtgccacttcagaatgccgtgcagactgcgcaagtccaattgaaattttcttcctcttgttttgttattttctggctttttccaagcagtgtggtccgtgcttttcactacttcagagtttctatttagaatacctcactttaaaatagtacaaagcacgttcaagtaacatgccatcgcttttattttatgcataactacaagccattaagaaagttttcccaatttagttcgggtctccctttttcaatctgcttctgctctgaaacataattatattggaagaaaaagaagagaaatttttttacctgtttttgaaaacaaatttgctccaatttgataactgtttttgtaaacagatataaaaaatagttttcaaaaccgttctctgatattttgtaaaaaatctatttgaaaatttaaaatgtttttaacttagtttttaaaaaaaaattgtgtctattgttttaattttaatccttttatatatctatataattatttttttaaataatcataaaataagtgaaaacagtataaaataattaaaagatattatttgaaaatactatattttctgtttttaaaaatagaagatataaaatagtttttaattatcaaacatgttcttttgtttttttttttaaattttaaagaatagataattattctcaaaacagttatcaaacaaggtcttatattccataattataaaattatacaaggggaagaaaatcttcaaattgataaatggtagttttttcattcatgctttcattctttcatgtgcatagtatatatagaggctaatcatcattctaagaatgggaaagaatgatacaaggaaagaatgatataaggaaaaaacaactaatatcctaatatctcaacattcctaatatctcaactttccttatatctaaacattcctaatatctcaacactccccctcaagttggtgcatagatgtcacacatgcccaacttgtctaaaaattttgagaacacttgacttgagatagctttggtgaggatatcaaccaattgatcttctgatcgaatcttaggcaattccataatcttatcatccaacttttccttaatgaagaatctatccacctcgacatgctttgtactggattatgagcaatgtcacatgcggctttattgtcacaaaacaatcggattggttgcctagataagtaacctaaatcctgtaagaggagtcttaaccataatgcctcacaaagtcctagagtcatacctctaaatttcgcttctgcacttgaacgagcgacgacattatgcttcttacttttccatgtcacaagattaccacctacaaaggtaaagtaaccagatgtagatcgcctatcatccactgcaccaacccaatcaacatcagtatatacttctatactctaatgatcaacatttttagcgaacaaaattcccttcctaggagcattcttcaaatacctcaaaatacgcatgactgcattcatatgttgctctccaggattatgcatgtattgactcactacactcaatgcataagcaagatctggtcttgtatgagctaagtacattaatctccccacaagtctctggtatcttcccttatcggttgatacttgattaagctcaacacacaatttcagactttcttctattggtgtattaataggttgacatcccgacattccagtctcctataaaagatctaaggcatactttctttgagacagaaaaattccttcacttgatcgagaaacttcaatcccaagaaagtatttcagagatcctagatctttcatttcgaattctctagatagataattctgcagagcttttctttcttcaggatcatttcctgtaactaccatgtcatccacatatacgatgagtgttgtaatcttaccatgttgttttttcaggaacaaagtgtgatctgagttactttgacgatagccaaaagctctcattgactttgtgaaccttccaaaccatgctatcggggattgcttcaacccatacaatgacttcttcaatttgcacaccttctgacattacttttctgacaccatgcattacggtggaagatccatatatacttcttcagataactcgccatgcagaaatgcatttttcacatcgaattgttgtaatgaccaatccagatttgcagctaaagacagtaatactcgaactgtgttgatcttagctacaggtgcaaatgtctctgtgtagtcaattccataagtttgagtgtacccttttgctaccagtcttgctttaaatcgtttaatactaccatctgccttgtacttcacagtatagatccaacgacacccaactgacttttttcttggtggacattctacgagttcccatgttttattcttctacaatgatttcatctcttcattcatggctgttttccaccttggatcagctaaggcttcttgtacactggtagaaataactatagtagataattgatttacaaatgacttatttgattcagacaaacgatggttagacacatagttgctcatgtgatatttgactttagtagacaattcacgttcatatgtgggtttaggaatacctctattatgacgatgtggtaaccgtttcatgaatggatcaggttccaaattaagaacaccctcaacagacgacgattggattggtatttcaatgaaggcatctttagacccaaattgttcagatggtacaattatactgtctctcccctcttctatcacttcttcagcttttgggtggtcattactacttgaatctagagttgtatcactcatatccaattcacccgcttcttggttcactagttcagattgtccagattcatcctccttagagatatgataatcataatcgagaatctgaatttccttatggtactccccctgaagttcagactcaaatgaaaaatacatcaaatcttcatgaaacatcacatccattgtaataaacattcgttgagttggaggatggtaacatcgatatccatttttgtgcaatgcatatccaacaaacacacattgcaatgcatgggaagttaacttggtgcgttggtgtttgtgtagatgcacaaatgccacgcaaccaaaaacacgaggaggtagatttgtgacggttggggcaactacgacataagtaagagcttggagaggtgtttggaagtcaattgagatggaaggtacccgattgatcaagtatgcggcaaatgtgattgcttctccccaataagatatcaatatttttgctgctatcaaggaagcacgaacaacctctaacaagtgctgatttttccgttcagcaactccattttgttggggtatattggaacaagtagtctgatgaatgatgtcatgtccttctaaatacttttgaagatcataacttttatattctccaccattatcgctacgtagaacccgaacctttgcattatactgagtttcaatcattttatgaaaattttgaaacaacaagttcacttcatctttggtcttcatcaagcataaccaggtcattctggtacaatcatcaataaaagtaacaaaccaacgtgagccactcaaagttgggactttggatgggccccaaacatcaaaatatctaaccataaaaggaagcggacttttattcaaaattaacggaaatgaagcacgatggcttttagccaattcacaaatatcacaatggaaaccagaaatatcactttttgcaaacaaaataggaaacaatttttttaaataaccaaaggaagcatgtctcagacattgatgccacaaccaaatttcagacttttttttctcctcctcagatccatctgccatcaaggcttgttgcaacttatttgaatcttttgactgcaagtccaagtaatagagttttccccgcttaataccacaaccaatcgtctgtcttgtttggatgtccttaataacacaaaattcaggccaaaaaatgacaatacaagataagactgcagtgatttgagaaactgacaaaagattataatctaaagatggaacaactaaaacagaatccaaattcaaagtatcagtaagcgttaaggatccttccccaatgattggggttgtgttatcattagctgtggaaacaattttttgtgaggaaggtctaaggggtgaaacctgtctagaatcaaaagtcatataatctgtagtaccagaatcaattatccatgcactattaataacaagtgtagaagtatttaaaaacttaccaccataatctatagcgactaccaatgcagcggctttctcagcaacattagcctctgtttttatttcggcaatagttgcagtcgagattttcttggaatccttcttctgttgatcacgattattatcattaataacaaagtggtgataacctaaacatgatctaaaggtccatggttcaaaccctcagttcctcattgttttcctcatcacactaagagtcgttactttgaaattgtgggatatccagattggtaggataagtcttattgcagtgagtgcatttgaaggttgacttatcaatattagggcttgtcttaggatggttgatcgctgttggactaccatagcgacaaaatatccaggatttcaatttcatggctttgataccatcttcaaaggacccttcaccaacttttcttctttgaaagggctttttgatccaccagtcaaacaccaagtgaaatggtagttgtttcacacttgcataatgattttctatatttttttcaaagaaggattaaaatattaaggaccctataatattttaagcaagggattcatttgtatatttagctatgtttcaaatggaaacgtatgtttcaacttcctccaacattgattggtactatctatatactttataggtacctacaaaatgagctgacactgctggttctgaagagataaaagccagaagatagaaaaatgtgtcagatggtcacttgcttggcctttgattgttgtagaattaggcctttcgccgtctgcaagtagtctataaatactaccttctgcagatggcctgattaaagaagaaaaaagtctagtggggagaatgaagagtggtgcgagagttggtgaaactcatattattgtccttcattactgttcacagggtcacataaatccaatgctccaattctccaggcgcctagcctccaaaggtctcaaggtcacattagtgatcccaagagcctccatttataatgcccaagctagctccattaacatcgagatcatttgtgaagggctcgaggagcgcaaagaagaagaaagtatagaggactttgtttaataaataaattaaaatcatttatttgaaattgtttttagtgcaaataaactcgtttgaaatttcaagaaaaataatataacagataattacactacatatttggtggggccatttagccaaccaattaatttataaaccttcttctaagctataccaacaaaaacaatataacgtatacgaaggtgtgaaacacatacctaaaaaataatgataaaaattttatagtccatgtagatgcctgagttcatttggatcacctttgatcttatcgttttgtattcaatatcccatcttcaaattaataaatggtagctttttcattcattttttcattcgttcatgtacagagtatatatagagggtaatcaccattttaaaaatgggaaaaaatgatacaaggaaagaatgatataaggtaagaacaaataatatcttaatatctcaactttcctaatatctaaacattcttaatatctcaacattgaatgatataaggaaagcattcctaatatctcaacagaaaattacttttggatatcatgtaataaaaatatcaattaatcacaaagagtcaaaatggaatttatctttttaatttgaagaccttatttgtctatgttttgaccttactttggtattttttttttcaatacttcgagtctactcaggaatattaaaaacttaaattcaatttcatgtgggtgtcttacaattttccttacaaaagaaatctttcaacccaacacactttgataaatgtttctagagataatatttgatattagtgagtgtcttatcaatattctactacataactcaacccaattccaaataataataatattaaaaatataaacttaaatactatataattattaaataagtaacctatttagctcatttaataattaggttgaattaagttttgtataagtctatcaactaaacatatttatgattcaattaatctatttatttaaaaacaaatttaaaataaggtaaatatggattaaataatttaaaattataattaagttaattatatataaattaataaaaaaatattatttatttattaaacaaattatataaaccgacacaaaattgatgtaaacaattgtaaaatcgtgttagatttgtattgacaaatcataacaaattttgctgccttaataatttctacctggttatgattgacattgaaaaataatatggtcgggttcctctcagacagaatacgcttttcatgcaattgtcacatctttatacttctcgaattacttacaaaaaagggtccggtcccccactgtctgaaaatacaacacgagagacaaaagctacaagacagaaatccactcacatgggcacttttctccacctttgccttctatcatctgcagttctataaagacttgctctcatggctgattaaagcagtaagaggagagagttgtggacacaaaa

SEQ ID NO: 11611 - DNA, 4883 bp, Vitis vinifera
  Intron number 1 from transcript GSVIVT01018138001 (locus G SVIVG01018138001) derived from phytozome v7.0 (chr-ID chr5 ; pos 6962006 to 6966888 reverse strand)
gaaagcaacattaaggtggtgtttatttttttgctgaataaaaaaagtcaaaatatttggttttttctattcagctaaaagtaacctgtgaatatcgttcaatataactaaactgaatatattgataacaaatttactttaattatattggaagatgtcaataagttacttttaacttaatagaaaaagtcaaatattttggttttttctatttaaccaaaaaaacaaacaccacctaataattaataaagccaatgcaacaactttctaatgactttctacatatgaaacactctaatttatcttatttttcttcgcgtcaacctaaaagtgagaaaaatactccctattttcattaatatactcctattaagaaaatgactactctatttttatcatatattctcaatctttcataggcatttatctatttaaaaactaaaattttatctttcatcaaattcaaatttgtatcatgcgtgataactctcttatgctacataatttttagccacccctaaatttctcattcatttattttaacaatttccatttcaaaaggtcaaattatttccggctttctccgcatccccaagtcccttaactaagacaaactaaaacaaaacctgccctcccaattttcttaattctccaaaaccccttttttactcttttaaataaactagtaagtgtccgtgcgtgtagcacacgaggacaatatacaaatatatagtaattataaggaatataattagtaaaatcttttgttgagtttaaaagttctggttgtagcttcccagggctcaattcaagcagcaataaaataaaggttttcaaaaaaacactttttaaaaccatatgatagtaattctaggaagagtttctaattgtgttgcatactactgtggatatatgaatgatttaagtttctaatttggggaacatgtaaggcattttcaagatgaagagaaacaagaaaatgtgttgggagataagcttggcctatgtgagaaatggaaatttgcttaccatttccaactataagcttctcttggcctccatattctattttcattgtagtgttatcaagtgtagtagtcacgtgatttgtggcaccactatcagcataccagctagggttaagaatggtttccggtgtagccagagcaacaagtggagtcctgttataggtgttttgagttggcaacactaaaggctgaaaactttcatctaaacgatgccaatagatgaaggctatgtgaccttgtttgccactattagagaaaattagttaggattagttaagaattagtcttgatagctcatgcttaacatattgtaacaatacttaagttgtagaaatatacagaggaaatagagagagtctacttctttatgaagagaagacactttcttgatagtcttctaaaataacatttttatctatcttctctctagaatattcgttcttagaattttatcatggtatcagagcatgagtcttcttcaatggaggtcaatattagtcttgcaatagtgaaccctaatcctttgtcttccactcgttttgttccaattaacttcaatcactcactgtccgtgaagcttgataacaagaatttcttgttctagaaacaaaaaatgtcttcgcaattcgaggctatgggctttagaaatttttgttcagtgacgatgaagtaccaattcaatttctcaccagagaagatgcgatatctagaaaagcaactaaggaattccttgagtgggtacaacatgattaactactgctctcttggcttctctcatctgtttttgagtcgattcttcttcggtttagttggttgtgatacatcctttcttctttggggacgattagagcaatattttgcgtcttagactcgagccaaggtgaaacagtttaagactcaacttcagcataccaagaagggaggttcaaaattgatgaatactttgtgaagatcaaggtttgtgttgattcactagcatctattggtgtttctttgtcaaccaaagatcatgttgaatcaattcttgatggtttacccagtgattatgaatctttcattacctcaatcactttgaggaatgatgatttttcaattgaagctatcttgatggctcatgaattcaaagttgagaagaacaacggttctcttgactcatcttcttctgctcatgttctctaacactgtagaaaaagggaatggtttcaagcagaattattatgctgctaactcccaaggtaatcatttagattacaatggtggttttagacgagatggagactttggtcgtagaggtggcttcaatggtggtcgtggattcaattggaatgacaatggaagaagtaatagaggtggttttcgtggtagaggaaacagaggtggttttcaagcaagacctccttggaactctgataatcagaatgagaaaccagtatgccaactgtgtggtaaaataggtcatgtagtagcacagtgctattacaggtttgaccatactttccaggtaccacagaatatatcaggcaggaacctttcccctcaggcttattacagtttttcactccaagtaaatggtgttatcccaactcttgaagtctgtggtgatgacaattggtatccggactctggagcttcaaaccatgtgacacctaaccctgcaaatttgatgaaaagtgttgagtttgctgggcaaaatcaggttcatgttggaaatggaataggtttgtccattaagcatattggtcaatctaaattcttatctcctttttcatctaaacctcttttacttaatcacttacttcatgtaccttccattaccaaaaatctcttgtcagttttcaaatttgcaaaggataataaagtattttttgaatttcaatctaattcctattttgtcaaggatcgggtaacccaagttgttctaatggttgggaaagttagagatggattgtatgcttttgactcctcacatctttctctcagaccaactcaaagcttatcgaagtctccttctgttgttgctagttccttttcttctaaagtttgtacaacttctttgccatctacctttgatttgtggcatagaagattgggtcatccttcagctgcaacaattgaaaatgtcgtccaaatgtaatgttgcccatttaaataaaattgactccaatttctgttcttcttgtttcttgggtaaaatacataggtttcctttttctttgtctcatacaacttataccaaaccccttgagttaattcattcaaatttatgggttccaaccctagtattatctaatagtggatataggtattatattcactttgtggatgctttttcacgattttcttggatatttttactcataaataaatctaaatctatcaaaacctttgttaacttcaaaactcaagtggaattgcaatttgattcaaaaatcaagtccttgcaaacaaactggggaagtgaatttcgtgtctttcaatattatcttgctgaaaatggcattgtagaccgtgtttcttatccacacactcaacaacaaaatggtgttgctgaatggaatgataggaccatagttgaacatggtttaaccctcctttatacagcttctcttcttcttaaattttggggtgaataatttaggattgttgtttacctatcaaataggcttcccactacagtacttcatcacaaatgtcccattgaagtcttattcaagtccatacctaactattctttcctcaaagtctttggttgctcctattttcccaacttatgtccttataacacccataaacttcaatataggagtgaagaatgcacttttcttggttatagtctaaatcacaagggttacaaatgtatgtcttctaacggtcgagtatatattagtcgtgatgtaatttttaatgaaacctcctttccttattctaaaactattcaagtttcatcttgtttaccttctactgtttcctcctttacttctcatttttctcctttaatctctcctccaatattgtctccaataatgctaccagctcctacttctcccatttcttcaactaggtcaataagtgaaatgggtaatgttgtttccactcacccacatgcacctaatagtgttgatactactccagcacctgcacaagttcttagttttgttgtttctccttagcaagttgtttctaattcaatcattactcttgtacaatatgttgtctcttccattgcagttacaagtgtgactaggagaattgccaaggatgctgataatactcatctgatgattactagagcaaagagtggaattgttaaacccctaaaaattttattgctgcagtaagagaaccttcgagtgttacagctgtccttcaacaagatgagtggaaaaaggctatggtggctaagtatgttgcattacaaaggaacaacacttggtcactagttcctttaccagctagtagacaggctataggttgcaaatgggtttacaaaactaaagaaaatccagatggcattgttcaaaagtataaatcacgattggtcgccaaaggctttcaccaacaagctggctttgattttactgagacctttagtccatttgttaagccttctataataagagttatcttcaccattgctctctcaaggaattgggcaatcaagcaactggatgtaaataatgcattcctcaatggatatttgcaagaggaagtgttcatgcaacaaccacaggggtttattgatgagcaaaatcctaatttggtttgtagacttcataaggccttatatggcttgaaataagcctcacgagcctggtttgagaaactccatcgagcattgctgagttttgggtttgt

SEQ ID NO: 11612 - DNA, 16957 bp, Vitis vinifera
  Intron number 10 from transcript GSVIVT01028271001 (locus GSVIVG01028271001) derived from phytozome v7.0 (chr-ID chr 7; pos 5091074 to 5108030 reverse strand)
agagcaaggcctgaactgtatagcataattcgcaggtagcatacatgtatacttttatgtaaatttccaagttcattgtcaactttcttttttaagatggttcagattttttattgtgttaggaataagaaagatgattattttaagcattgatgttagtagtagtagtgtttgtttctgcatgcatttaattatgctagatcaaatgagtcaaacagtgattcatttgagcaaatgctgacagacacgcgagagtgtaggtatgcatgttgaattacaggacattaatatgctctatctcctcaagtatattaggcgttgttttcatagccacagtaactgctgccaagtaaaagaataagtggttccgcctattcagcatgtttgataatagaaaattgaccaccaccttttggtcaagtgttgggaaaaagttattgttcttaaattagtgttaggtttggaagtgttcgagtgaatgaagattgggattaggtagggtttccctaaggaatggagctctcttaggtaagtggcttcagagatttcctaggatcatgactctccctgatcaagtgttgttaaagactttcataggatagatgctaattgatgggattccaatgtcgaggttagatggttcacttatttgcctagaaagccattcccatggtttcacagatttctctcagtttacttgtttcacatttggtgatggctccacaattcaattttgggatgacctctgataggtgaataagacctgcaacattctctgtccaaatctctttctaattctaaaggcttgggaaatccctatttcccatatccttctggtctcgagtgtcctttcttggaattctaactttcagtataacctatcaaataagaaaattgatgacttcttctctcttttgctctttttgatttttgtttgtttgtcttcatcttttgtgaacaagacgaggggttttggacttcacttccttcaagcttgttctctcctaggtcaatttttggtgctctttctgataatgatcattgttttgctttgcctcaggctaatttttatttggaaagccagagttccctccaaagtcaaactaatgcaaggaattcctcaatctcatgcataggcatcaagactatatttgtcataattaatgcaaggaattccttgtaatttaaatttccttcaatctcaccagcaaaagttggtcctccatttatttcttcacattcttcatttctttcttcaattggcagttgtttacctttagtaccaggggtagtgtagggtttaaggcaatattgatttgtggccaacttcttcacccttgaaacatccttaataggttctgcattccttgcacatgttgttattcagacaccattttaagatttctttctagtagttgttaaccttcttgtctcaacaacattctcactcggggacaagtggtggaaggtgggcggagagagatagatcaacggctagaggaagttttcgtgttagggaagctggcagaaagaagaagggaggagaaaggattatggctaaagtttttccagtggggacacgtggaaagaaaggttaagaggtggggaacagctggttcctacctccctcgttgcccagtttgaattcaaaaaaactgaacattgggcaagttgggacaaagaaggcgggcgtagctagggccggcggggacgaggctttctcagatgagaatggtcgagcctttgagagaaaggcccagtctcttcccaatcctagtctactaactattgcaaaagtgggttgtaatttaaaaggcccatcgtggttgggccaaagaaaaggaggaaagaagccctttgataagatgggtttgttacgaagagaagaagcttctgcagtgggaaagaggaaagttgtatcagtatcctgatgatcagatgagaggctccgcgaagaaggaagtgaagtttagttcaaagaagttgtggactaccctttttcctccaagttttgatcgccgacaaggactttgaagtcgcagcgagcctcttttgcacgggaagccatcgtcaaatagcgaagagtttccaaaggaagaggctttcggggcgggatctcagttggaacgaggatttagtgcgagtcctctcatttattgtcaatagtcaaggattcaaaagcggtgttcaggggaagggacttcgttgtcaaaaggcgaagtggctttgcgcaaaccctattttgaagaagacaaagaaggattttcgggccgagtggggtccgatcttcgtggttcatcagtcacggttttgccttctaatccagaaatcagaggtaaagggctcaactttaaggggaattgtggaatgttggtagtggaaaacatggaggtaaattcgtcttcacattcttagtcacctttgtcttcttttcccccttcttatggtttgtcacttccttttctgagtccgtctgttccaaatcttcctagttcagtcattcagtctcagtttcctatggaaaatcgagtaatctttgaaattttttccaaaaaagacgatgatggtactttatgtcaaaaatctattggcaatcctaaccttgatgtggtggagtcccagtttgcttattcaaactagttgcccgagagttttaaccccattaagtctaaacccaatttgcctaatgaggtttccaacctggttacaattagccaaggtgatgctgtggtctccctattgggcgagttccaaatagaaggcctttcccccaggaaaatggctaaagtgcgtgaggttttaagctctctggatattaaggtatattccaggaggaagagcagatgctccactggtatgtgagacctgttggaactggatcagaggtttagtgtctgtgaggtttttccatgaaaataattagttggaataccaggggtttgggatcaaggaaaaaacgaagggtggttaaagattttctaaggttagagaatctgtatgttgtgatgatttaggaaacaaaaaaggtggagtgtgatagaaggtttgtgggtagtgtttggacagtcagaaataaggaatgggctgctcttccggcatgcgaggcttcaggtgggattttgattatttaggattctaaaaaactgcgcagtgaggaggtggtaataggatcctttttggtcttaatcaagtttgctttggatgaatgcagacctctatggttgtccacagtttatggcccaaacagtcccttacttaggaaggatttttgggtggagcttttagacatttttggcctatcttttccgttatggtgtgtgggcggtgattttaatgtcataaggagaagttcagaaaaattgggaggttctagtttaacttcaagcatgaaggactttgatggttttataagagaatgtgaattgcttgatccaccttgacggaacgcaccattcacttggtcaaacatgcaagagtctcccgtgtgtaagagattggatcgatttctttactcaaatgagtgagagcatttctttcctcaaagccttcaagaagttcttcctagaaggacatcggatcattggccgatagttttggataccaacccgttcaagtggggcccaacacattttaggtttgagaatatgtggttgcaatatcctagtttcaagttttcgaggataaagcaaggaagtcagagtttctttggaactctattgttttccttgcttctctttgggctttctgttccaaggcatttaagggactccctttaatgtgatacaacttgattggttagtggtgtgtactccataagaattggtcctttatagagacttcgtttgttttctgtgtattttcctgtaatttagttgtctttggtgggaggatttctcatccttcttattgtacttcttttttctatctatatatctttgtgtcgtttccaataataataataaaaaaatcctagtttcaaggagtgctttggaagttggtggagaggttttcaaggaaacgggtgggaaggtcacaagttcatggggaaattacaattcattaaggccaaattgaaagagtggaataaggtttgttttagagagctaaatgaaaggaaaaaaagcattttgaatgaaatggctaactttgatggcattgagcaagtagggggtctcacttctgaacttttagttcaaagagctttaagaaaaggggagctagagaaattaattttgagggaagaaattcattggagacaaaaagttagggtgaaatgggttaagaaaggggatcgtaactcaaagttttttcataaagtggttaatgacaggcgagataggaaatttatcaaggtgttggagaatgaaagaggcttagtgttgaataattctgagagcatcacagaggagattttactttactttgaaaagctctatgcgagtcctactggagagtcttggagagttgaaggcttagattggtcccttatatttgaaaagagtgcgtctaggttggactccctttttattgaataagggatttctaaggccatttttcagttggatagggataaggcgtcggggcctgatggctttaccattgcagtgtttcaaaattgttgggatgtgatcaaggaggatttagtgagagtgtttgcagagtttcacagaagcgggattatcaatcaaagcactaatgcctccttcatagttctattgcccaaaaaaaagcatgacaaagaaaatcttagactttagacctattagcttgatcactagtctttacaagataatagccaaagtgctatcggggtgtctaagaggggtactatatgaaactatccattctactcaaggcacttttgttcaagagagacaaatattggatgtagttctcatagccaatgagatagtggatgagaaaagacgatcagggaaggaaggagtcgtcttcaaaattgactttgaaaaggcgtacgaccgtgtgagttgggattttttggatcatgtgttggagaagaaggggtttagtcctagatggaggaaatggatgagaggttgtttgtctacgatatcttatgcaatcttagtgaatggaaacgctaaaaggtgggtcaaggcatctagaggcttaagacaaggcgactctttatccccttttttgtttactttagtcgtagatgtattaagcaggatgttattgagagcagatgaaagaaattcgttggagggtttcagggtgggtaggaacagaacaagggtgtcccatttgcaatttgcatatgataccattttcttttctaacactagtgaggaagaattgtagactcttaagagtttattgctagtgtttgggcatatttctgggcttaaggttaaccttgacaagagtaatatttatagcatcaatcttgaacagactcatctttctaggttagtcgagttgcttgattggaaagcttctggttggcctatactctacctgagtcttcttttgggagggaatcctaaggtttgtggcttttgggatccagtgattgagaggatctcaaaaaaattagatgggtgacaaaaaggcttatttattttttggaggtaggatagctcttatcaaatcttgcctcacccacatgccttgctacttcctatccttgtttaagatacccgcttcagtggctgcaaaaattgagagattgcaaagggattttttatggtcaggggttggggaaggtaaaagagatcatcttgttagttgggatgtagtgtgtaatctgaaggcaaaagggggattgggatttgggaagatttctctaaggaatctcgctctcttagggaaatggttggggaggtagcctagagagagttcagctctatggcattaggttattttaagcatttatggatcacactctaatgttgggatgccaacactatagtcagatggtcacatcgttgtccttggaggctgttgcacaagtctttcaggagttttccaagtttactcggtttgtggtaggagatggggaaaaaattcgattatgggaagacttttggggaggggaccaacctttgggatcccaatatccaagactatttagagtagtcacggataaaaatattcctatttcttcatttctcggttctactcatcccttctcttggaattttaatttccgccgtaacctttccgattctgagatagaagatttagaaggcctcatgtggtcacttgatggtttgcatttatcacatttggtttcaaatgcaagatcctggtctttatcttcttcagggttttttacagtcaaatctttctttcttgctttatcccaattttttggttctcctccagttttccctactaagtttgttgggaattctcaagtccctttcaaagtcaagtcatttgtctggttagtggcatacaagaaggtaaatactaatgacttgttacaattgagaagaccctacaaagctcttagtcctgatatttgtaaattgtgcatgaagcatggagaatcggtagatcatcttttcctacattgctctttgacgatggggttgtggcacagattatttcagttagccaagatggattgggttcccctgaggagcatttccgacatgctatccatcaattataatggttttggtttatctaagagagggatatttttgtggcaagttgcgtgcattgctttaatttgggttgtgtggtgggaaagaaatgagaggattttttaggataaaacaaagaattcagagaatatttgggattctattcatttccttgcttctctttgggctttttgttctaaggtttttaagggggctccccttaatgtgttacaacttgattgactagcggtgtgtaattccaatgggttggtctaatttagagaggttgtatgttcttactttgtattttcttgtttttgtattcttgtagtttagttttttttggtggaaggattcctcatccttctcttgtacttcttttttctatcaatatatccctttgttgtttcctatcaaaaaaaaaaaaaaaacattaggcgtctgtttttcagttttagggctcttgtttcttgctggtttagaggagaaataaactgaatttcattcaattgatgtgttgaaaattacaacatatacaacaggtttacatacagaggagaaactaaaatttatgtaatattaaaacaattgaagtaaattactaatgaggaaaaaaattatatataagaaaatatactatagagcaggaaaatcaattaggctaatttaggaaataaatcagccttaactaaggagaaacttcagcctttagttaagaaacaaatctctatgtacaggccatccaccagcttggttggttccatgtttctcaacacttttttttttgtttattagaaacaaaaaaaaaaattatattaatgataacaatggtaaaggtacaagagaaggatgagaggttcttccagcaaaatacaaattctaatcaaagtaagaagacacccttttatacaaatctatatacaaagataaccctcaactatctcaaacttttgaatcataaattgcaagccaattgaattgtataacactaagtggaactcctctaaaagcaacagtacaagaggcccacaaagaggagtagaagtgaagtaaatctcacaacatccctttcaatctccccttatcctaaaaaatcctagtgtttctctcttgccacacaattcacattaaagtaaggcatgcaatttgctaaagtgtcttgcctttgattgaattcctcaaacctctaaaagcaataatcatcatgtttccaatactccttggtggaacccaatccactcttgctaaactaaagagcttgtgccatagcccaatagttaatgggtaatgtagaaaaaagtagtcaatcgattctccatttcctttacataaaatgcaccattgaggaccaagggatttatagggccttaacctttcaaggggcttttgatttccacaaaaacttggtaaaaggaacaagatgagatttgagaaattagacaatgccaagaaaaaagattttatagtaaacaagcctgaggaggacaaagacaaacttctgaatctaccatagaaggagacaaatgcattgaactaaggaaagacatgagtttctaaaggagttcaatttctatatcagtgagattgcaatgacagttaaaattccaagagagtggataggaattaccaaggacaactgagacggtgaggtttttgacagaaataactttataaagactagagaattgtgagcacaaaggttggtcacccctctatagatcttcctaaaaatggatattctccccattccccaccacaagacggatatatggggagaaattctgaaaaacttgtgtaatagccttccaatgacaactgtgtgaccatttaaccaccatgttggtgtctcatccattaggatgtgtcccatagatactcgtaataacctaatgccaaagaccactcctttccctagggaacctccaaggccacttccctaaaagagtacgatttcttgaggaagtcttcccaattcccatacctcctaactcctttggcttacaaacaacatctcacctaataagatgatttttttatccttcctctacccttgaccagaggaaatccttttgcaatttctcaaatctttgaggctattgatactgggatcttgaagaaggagatgaaatagctagggatgtgagatagacttgattgcattatggcaatcctccccctagtgacaaaaaggcctttttccaaccatccaacctcctcgaaattctctcaaccaccagattttaaaaacttattgtcattgggttctcttctaagggaagacccagataagaccaaggtcactctaacactttgcaattaaggatcaaagccaaactagacaacaactcttgacttgtattaataccaaataggatgtttttttctaaattgattttcaattctgatacttgcccaaaaaccaattggatagcttgtttctcaacacttttattcacttgttttttggatgtgcttctagaaaactccaaaatgtgtatggaaactacacattttgcatatttgttctcaaactactcaattttttttttttttttgaacagaaacaaacaaattcatttatcctgaaagataaatgcatgaaggatgagcaatccttcaaggatgtcccaacaaaaaaaaaaaaaaaagcctcgcaatgaccaacccaaccttacaaataaaaaccaatgtatgaagaataaaaatatagcacactcaaaggggaagaaagtctccaacaaaggaagccaaaagcttagctctttgtttggctaattgatctgtgacatggttagctgaatggggaatctaagtgagggagaaacctaactcaccgacaacatctatgttttgcacatccaattatcaaactttcatggagctctttccttattaattgcctaagatataacagtaattgaatcatcctctatagttagggtggaaaggcctaaagctttatcttgcaacaaaccctccaacaatgcatatctttgcctcaatagccaaccccacttttgcctacttggagaagactctcagcactgtatcggagtgatccttaatcacaacttcaatacccattgaccaaggttacctaaggaacatacatcaaaatttaactttaccaaatctattggagggagacaacaaccaatcaatactttcttcatcaacctttgagaaacaaccactcttccaatctaacattaaaataaacaaagggatatatgcaaaaggcttggtcattgagtcccaaaaggaagagtgaacgtaaatcaagtcccaaatgacatccatagatctctatctatccttgaatatccttacattcctttccaaccatattaaggataaaacaaccacctaccaaagaatcttcccttttggaaggctttcaaagcccttaagggagatttccatcattttttctatgcctctaggagggacccattcaagattggtgaagcaaaacaatccttaccaaataactattgcaatgggataatgaaaaagagatgattggctgattcattactcttcatgcacataatgcaatgatatggaccaagagctttagaaggcctcctcaactgaaacatgttgttggtattaaccctcttattagccacaagccaagcaaattccataaccttcaatggaacttttgagttctagattaaattactaggtgcaaaagaggtcaagacaaaagagcagggggggtggggtgtggggtggtggagagcatagagagctttgtaaaaagagttcaccgtgaaaagtcttaagaatgtcaatgatcaaaccctttcatttgtaaaggaagaaaatatgcacacataagccagggaagagtggaggcttggtgtataaatttggaaggagtgcaatagaagaaatctttaggaggccaaactctatgaggaagatgatagacataatcttgtgatcatgatatacttggatgacaaaatctagtggacaggagatagatttcattgatagcatgtgttgttctcatgctttgaggggtgatggttacatggcttctttgttttttctaggagtggaatttgtctacatattttagacttggtttacactccctttgacattctgtaatctgttcttggtgctcgcttatgaaaatgtgctatcttgtaatatttttcctctaactggatgtctattttgatgatcatacaataattcagaagcatttcttcctctttaaccatcctacactaatgctatttgcaatgcctcttcaatctcccttctatgatgaatgatctgtcaaaatattgtgtgaatgaccgaatgccttggccttgagttttgtatattatatatagactttacaaggatgctatacatggaaagcaaataaaagcaaataaattcccgcatgattctagccctatacatgtaaactataatctgtcaaataatgtatgctaactgtacagaataataaatggagaaataaggaaataattgtgggctaaaataaggaaagaagaagtgtggacagcaagttgtcctttgacagcccccctcaaattgatgcaggttgatcaacaagcatcaatttgctacttagcaagcaatatcgatgacgagggagagccttggtgaagatatcaacaacttgtaagtcagtggaaatacgtggaagagtgataacacgagcttcaaaggcttcacgaatagagtgacagtccacttcaatatgctttgtgcgctcatgatagacaggattggccgtgatctaaatagcacttgtattatcggcatgtagaggtgtaggatcgatctcagaaaaatctaactccgcaagcaaacctcgaagccaaatgatttcagaacaagcaagagacatcgcccggtactcagattccgtagatgacttagagactctgtcttgcttcttacttttccaagatatcaatgcatcacctaagaacacacaccaaccagtgatggagcgacgggtatccacacaaccagctgaatcagcatcactataagcaacaaggcgagtagaattgcatgcagggaagaacaagccacgagtagaagtgccttgaacatagcgtatgatcctacggacaacagccaaatgaagatgacgaggagtctgaaggaactggctgacttgctgtacaacaaaagaaatgtccggtctagtaatggtgagataaacaaggctacccaccaacttcctgtataaactgggatcaacaagtaagtcgccctcctctttgtgaagcttgacatttaattccatgggagtatcaatagaagtagccccttgtagaccagttgtagccaccaagtcactcgcatacttatgttgattgagggaaataccagagggactatgatgcacctcaagaccaagaaaatatgtgagagacccaagatctttcatatgaaaggactcggagagatgagttttaagctaaccaagtaaagcagaatcggaactagtgatcataatatcatcaacataaaccaaaagaacaacaatacctatgtctgatttccgaagaaacaaggaagtgtcatacttgttctgcctaaatgaaaattgtaataaagtggtgcggaatttatcaaaccaggccctcggagcctgattgagaccataaagagagcgacgaagcttacacacatgtgaagtcggagagggaaacaatcccgggggtggcttcatataaatacactctttaagatccccatgaagaaaaacgttttttacatccatctgatgtagtggccaatcactggaagcagcaagagctagaatcgtacgaacaatagtcattttagccataggagcaaagttctcttcataattgacaccatattcctgattattcccaagtgcaacaagccgagctttgtaacgatccaaacttccatcagatcggaccttgactgagtaaacccatttgcaacccagaggaacaatagtgggaggacagggctcaatgtcccaagtgtgattggcctctagagcggcaatttcttcctgcatagcttgtcaccaacaatcatgcttggcaacatgtgagtagcatgtgggaatatcaaaattggacaatgcagcagtaagggctgaaatagaattgccagaactggaagagggaaatccatacctattcggaggtatagacactcgagaagagcgatgtactgaaggtgctggaggtgctgcaactaactgaatctggagcgtggtaggatcaaatatcgagtgagccaccgaaagagactgtgggcgggagcgtctcgtatacacaatacctggttgaaagcgagaactgagtggatgaagatctgagaactgctgctcaaaggaggggaggaccacagtagaagaggatacaggaaagaaatgttgattttcaaagaaaataacattcctagaaataggtgtacaatgtaatgtaggatcatagcaaacaaatcccttttgacacattatatcccaagaaagcacatcgaacagattgagcagataatttatgtcgctcatgaggaggtaaatgaacaaagcatatacaaccaaaaatacgaaggtgatcataactaggttgcttagcaaataagcggaaatagggagactccatatgtaggacttgagaaggtaaacgattaatcaagtgagtagcagtttttagagcctctacccaaaacatggatggaacagaagattctaacaagagagtacgtaccacatctagaagatgacgatttttgcgttcggcaactctattttgttgaggagtagagggacatgaacgttgatgaataatacccttagaagccaagaatgcttgaaactcagtagacaaatactcaccatcggaatctgtgcgtaatgtcttaatagaagtagaaaattgattgtcaacatgcgctaaaaactcaatgaaagtacgaaagacttcagatttagaacgaaaaaagtagacccaagtaaatctgctatgatcattaatgaaagtcacataatatttaaatttctcatgtgaactaaccggggaaggtccctaaacatcactatggataagatcaaagcagtgagatgctctacttgcatgcaaagggaagggaagagttttacttttaccaagtttgcaagaatcacactcaagagataaagaagaacgatccttattaccaggtaaatcagagttcaatacatgagataagatctaagtattgggatggcctaaacgacgatgccgcaccatactaagatctgaaacattattacaagcaaaagacctaatagaagaaagtggagaaaaatctggaaccggtaaaaatagtggaaacaagcgccccactttaggtcccttcgcgatcggcttccccgttacctggtcctgcacaacacaaccattaccagaaaaattaacagcacaattgttatcaactaattggccaacagaaatgagatttgtggaaagctgaggagcaagaaacacatcaatgaacttagaagaggcatcgccgatagcagctatgggcaaagagctaccattggcagtctgaatggaagattaaccaatgtagggccgaacatgacacaaagcggtgggattgttagtcatgtgattagaggcccccgagtccacgtaccaaagtttagtagaattgttaccttgaaaccccattgctgataatgctgaaattaacatctgttgcaccatttctggggtgcagtaatttggtgcaggaggtgcaggaacagagcacgcatctgaaggagagtcgtgtgctacagaagttgctacagaagggacaataatcgaagtctgaaatgcttgggcctgacgattctgggggcgaatacgacattttttgataatgtgacccttcttcttgcaataagaacaaaacttcttagggcaagtggcaacaatatgcccatattccttgcagcagaaacactgcaagtttttagaatgcataggtggtccacgtccttgggcggcataagctacagttgccgtcccggaactgccatgagattgctctagaatagcttgagtactaaggcgttgctcttcgcgaagtaactcaccaaaacaaatagcaagagagggaacaggagatctattcagtaaagaggagcagatagattcatattctggacgtagtttcataagaaactgatcacgccgggtagtcgcgtgaatagtctgaatagttgagagagcggcaataggaacatccgctgtaaccaaatcagcatattcatgccaaagagtcagaaatgccgagtagtagtcctggatggaaagactaccatgttgaaacatggcaatcacatgttctaactgaaagcgatgagcatcgttatcctgatgataaactttcttcaaataagcccacatagattgagcggagcgatggggccgcaagtgggtgacaatatgaggcttcactgaaccaagaagccaagacatgatgcgtgcatcaagcacagcccatgaaggagaagacccaacatcctgagatttgtcaaaagtggatggtttttcaacatccgtgccatcaatatgaccccaaaggtctttttccttgagaaaaagttcaaactgaaatgcgcaggtagaataatttgtgcctgtaaacttaacacacagagatgcggaatccatagaaaataaatagaacccgagacaaaaggatagacaaaaaaaaaaatcacagaagaaaactgacccatgacagccatagaaataccgagaaaaatggttgtggttgggtgcagcacggatcaacacagacttgaccgaaagacacgagaggcacctccgaaaccgagaaaacaaaaaataatttgagggaagaaaaattagcaaccttgctctaataccatgtcaaaatattgtgtgaatggccgaataccttggccttgagttttgtatattatatatagactttacaaggatgctatacatggaaagcaaataaaagcaaataaattcccgcatgattctagccctgtacatgtaaactataatctgtcaaataatgtatgctaattgtacagaataataaatagggaaataaggaaacaattgtgggctaaaataaggaaagaagtgtgggctaaaataaggaaagaagaagtgtggacagcaagttgtcctttgacatcaatttcaactattcccccattttttgcctatgttactaaagttaaattccatatactctgccttaatcatacttaaggttctttccatagttctaagcccaagtttcatcaactaaaacaatgccatcggcatagaacatacactgttggacctcatcctgggtcatcatagtaagttcatgaccaacaccaaaaggtagggccgacctcagtgtaatcctgtaaggctatcatgatgggatttgacttgtagttactgctccattataagtggcaatgatcacatcagtacatctactcagtaccgtcttttccataaaattcacctcattatcttaaaagacattcaatcacatgctttatctaagtcaataagaaccatgtgaagattctattcttccctgtaaacctttacattgatttcctggcttctagcttgcatggttgacctccttggtaaaagaagaaactggtttttctgggagactttcaatttttcatccttgatcatttactttcttccatggtttcatagacaaatttctgttgcttaatacaactgaagaatgagatgaaaaaagaaacttagaagctagattcaactggcaaataaacctacaaagacctattcatccatgtaataattaaaccatggatacacacctgaggacccaggggggacctgggtaaaaagtcaggctttgaatttgaccaactctcaccaagacttctcgtggctcaagttttgacttttacactcctgattcacgcaaatgaattacattcttatgaaggccacaacactgctgttcaaatttgataatggtatttcctgatactcgttattcttatagtgcaatctcttcatttttatgtatagatttgcagaatactgtgtctgcaaagacaccaacacggatggatttatgccttggagattaaaagacatattttctctggatgaatgatcatccaaagccaattttttggagtttatttgaagaatagtttttcctaacatatcataactattaattattgacatattttgatttttatgttgtatggtcttttgccatattgagttcaaatcttgggaaagttcacttcttacagtgcagtatttctctacaggttgctcaggagggatccc

SEQ ID NO: 11613 - DNA, 11132 bp, Vitis vinifera
  Intron number 3 from transcript GSVIVT01013258001 (locus G SVIVG01013258001) derived from phytozome v7.0 (chr-ID chr2 ; pos 6162613 to 6173744)
aagtacaaggtttgtaaatcaagagaaatggtaaatggataccaattatacccatccctgctgtattcactgtcaatattggtgacattattgaggcaattaaccctaaattctttaattaatgccccatttgggatagcttcttgatttttgttttaaagataagctagtgtttgtttttttaacttttgttgaaaacaacttactttaagatatatttttttttatactttttattgatttattatttatttcttaacttttatattaagctttatttagttttaaaaaagctttttaacttctctataaaactctaagcaatgacgagtttttagggcttttccaaatggtaagagtatatcatatcatatgaaattagaaaactaaaaaaatgaaataaaaaaattgataactatgttatgataaatgaactttgagttaaataaatcatgtgtatgtattttaaagtaagaatttagggctaattttattcactgtccgtaacattttgggttgaatatactgaatcatatttagtttgaaatttcatcaaataccccctctcccctttttatatgttattttcactcgtcttttcatttcatttaaaataagagaaatatttgatgaaattttaaacttgttttgaataatcatatttagtttaaaaactaggacaaatgagtgaaatttaccctaataatttataatctatttggtcgtgtaattataaaatagttttttattttttaaaaataaatatttgattttaaaattttataatattatttggtcgttattctttgtctccaaattttaaaaacaaagtgaaacagataaaagttatttttactaatttataaaaacaaaagaaaaatatggagaatttttttaaaaatcataaaaatactaataaaattaaatataatatcattattcttctctctccatgatccaatccatatctaaaatctttaatatgatttttttttttaaattatacatgttttctgaattttttattttttttacttatctaaaaatttttcattaaaatttttttcattaaataaatatattccaaatcaaacaaataaagcttattaatttttaaaaatgatttaaaattcaaaaactaatttaattagtattaaaaagtcatagaactcaataatattaaaaagtcataaatcaatttttattttgaatgacttggtgagtttcttctttgtatatattatatttttataatttttttcactagtaaaataaacttcaaatcaagcaaaacttaataaattggatttcttaacaagtttaataattttgaaaataacttaaaagctcttattaatatcataaatttataaacaaaaattggtgtataacaattatattttttctcatccacataaaatcatattttttgaatttttttactagacaaataaaatccaaatttaataagacttaaattattagattcattaacaagtctagtaattttaaaaaataatttgaatagtaaactcattaatactagaaatttatagataaatattggttaacaccgactctattattatttttctacacataattatataattataaattttttcactaaagaaatgaatttcaaatcaagtgacattttgtattgaatttattaatgagtttaataatttttaaaaataatttagaactcaaaaaatagatctaactaccacaaaaaacaatagactaaaactaatatattataagtcatgactttattgcttctcttgtatcgataactatattttcaatttttctcactaggtaaatagattctaaattaagtgaaatataatccataatttaaattctttaatatttttttaatttttaagaataatttagaattcaaataactgatccaccatcttggaagcatattgtcattgttgactttctgctattgatctactatctcaaagggaacaagatttactctaaaagcagaggaagcaagatttactcggaggacaatgattatacaattcaactgatttccacaagttttcttctttgtattttaactttttattttgcattttacttaaaaaaaattctctccttcaatggaggtttaccaatacaaaacctcattgttgttcattgaatttgcagggtaacagaatttcaccataattttgcttcaagcttggattccaataccatggaaacatgcaacactgttcatatgcggctttcttgtgttgcaaaagcggcaaaagtcatacattgaattacaaaaaatattagaaatattttctaaaattactataaaacggattctaattttttttaaaaaaaatttaaaatgttttttaaattttgccgaacattcaattttttttcaaaaacactttttagattaaaagtatttttttagaatcacttttttttttttaatttatcaagaatagttcatactattctttttgttcactgttcaacatacaaatacttttaaaaaaatattaattgccacgtgtgcttatttatttatataatatatattttatttttattttaaaccaccattctttactatgtgccacacaaggtatttacaattcatatttaaatcatataattattctttgacttttgtgcatatattctttactatgtgacacaaagtattgacaattcatgtttatatcctatggttattctttgacttttatcattaagaataattgtttatatcccatagttattctttgacttttgtaattattattattattattattattttaaatcaactcaattgaatattcaattttcctcaataattctacctatattcacaaatttccaatcttttttatttaaaagttaaataaacaaacacctaatctaggttgaaatttccaaagtattcaaaactaattaatgaatatcaaatactaatttaaaaattaaaattttatctcaaaaattaatctttaaaccctaatcctccaaatcatcacattactctacactctccaatctttttttttctccatgtaaaaagatttttacacagggaagtaaaaaaaatctaattcatacttaaggcttttaatgcaaaaaggcctttacaccctcattaaatttatttaattattattattatttatttctaatttactattttggtgttacatgttggtcatgaaactacttagagggaatgaatacataagtcttctttaatttagtccaaagttaccaatttaaaaaaaaaattatgatttttttttaattagattgagacttattaatcaaggcaagaattttaattgcactgaaagacaaacgatttatgaggaaaatgattaacaaaaccttctagagagtttgcaaatgtaaaaaacacataatcaaatattacaaaactatgatccactagatatgaagaatagttacacaaatttgttttgtgattattactcctaagacttttgcacctaatctcatgtccacaatgcaacaccatcatattccttagtgagcctctcaactcttcaatgcctcgaagagatgtcaatctctctcacaaactttaaaatggaatacaaaccaattttgaaatatttgagttaggaatgaaaagtaataatttatgactaatgtgagtttttgagagttcccccaaaagacatatttatagccttgtgaactcaaactcaatttagaaaatgtattttattaaaaacaatttactaaacttatagaattttgaaaatattttaaaaaaaatttaaaagatagttggaatatttgttttcttcttaaattctcaatttaaaactctttttcgaattaatcttattcttaatttttgtataagtccattgtatgtctttcacattattatttccaataacccaataatacttgtactatccgatattgattttgcattaatcttatgttaaccatcttctccaatcccatatcgatcctcatgagttgatcgaatagttcaaccctcaacatttaaagcgaagcgcgacaaaatttattcatgcttcacaatccaacatcttaaatcttcaaaaggacaatgtaaatcataagaaattatgtaagtactaaactaaaataaatgaaacaaaattattaacttattataaaacagcaacatcttatatatattttgcatgaacttgaaaaaggacaacttcaaatggacttattagtgaaggatggaaaggacaaaatgtcacaaaagattagacgcatgagcagggcctttcttctccaatatagccttaaatgggtcaccagaccatgtattcactgggaaaaaaacaacttgaataaggttaaagctggtccataggtaaaagtcttaatttgagtgagctttttgtttttgtttttgtttttgtttttgttttttggtgtgtttgttttttaatgatatgaaggtcctccacataacctatcaatttgaaaattagtaaaagcaaattttaaaaaggaattaggtcattgaactaaccaccccatgtggaaatgcaaaacaagaggattagcaaggaaaaaaaaatcatacactataaaacaaaaagattagcaaagagaaaaacttgtacccacaagagcatgagactctcactcatcatagctatgattagataataatcagagttacacgttgatttacttgcaaagcaactagagttatttaccataattttagaaaattttggagtttaaatttgagaattggctttagaatgcatttaaaagtgtttctattcaaaatatttttaatgaaagtgttttctcaagaagtgtttttaaagagaattatctattaaatattttttcaaaaaatattataagtgttgtaaaattataaagtgaaaggagaagaaaataagaaagagaaattagaacgtaagaagagaataaaattgattttcattagaggtatttcccttttatagggagtcacaaagagatatacatcaatgtggatgattatccacaagttctcataatccgataaattctcatattttataacactttcccttggatgatcataagaatatacttcattaaaaccttactaggaaaaaccacatgggaaaaaaaccttagtgaaggaaaaagagtacaatattattttggattactataactgtctcgttaaaaaccttgccagtaaaacctaatgggataaaacctggatgaaggaaaaaaaagtgcaatatattcatattatcattctccccctcatgtaaacatgattatgatttcttcaacatttcaaatggtagatctctcaatcttcgcattctaaaatcataccttaactttttcaatgtggtcgaagataacacatttgtgaatagatctgttagattattgcatgaccgaatttgttgaacatcgatctcaccttttttttggagctcatgagtatagaaaaatttaggaagatatgcttagttctatcactttttatgattcctcctttaatttgtgcaataaaagtagcattatattcatataactttgttgcattgcctctgatggaaggtagtccacatgtttcttgaatatgttgaatcattgaccttagccatataaattcacgacttgcttcatgagttgctagtatttctgaatgatttgatgatttggtcactattgtttatttgacagatcttcatgagatagctgtaccattgtaattaaatacataccctgtttgtgacctacctttatgtggatctgaaagatatcttgcatctgcatatccaagcaattgttgttttgattcccttgaataaaatagactcatatcagtagttccgcgtagataacgcaatatatgtttgatatcattccaatatcttcgagttggagcggaactgtatcttgttaataaattgatataaaagtaatgtttggacttgtacaattgacaagatacataaatgcaccaatagcactaagatatggtacttcaggaccaagtaattcttcatctttttcgcaaggatgacattgatatttttcacatcaagctatctgacaaccatttgagaacttaaaggatgtgctttatccatataaaaacgcttcaaaactttcttaatgtatgttgattaatgtactaaaactccatttggaaaatgctcgatctgcaagtcgagacaaaattttgtttttccaagatattttatctcaaattccacttttcaagtaatttgttgttcttgtgagctcttcaggagttccaacaagatttaagtcatcaacatacactacaataattgtaaatctgatttctgatttcttaatgaagatgcatgggcatatagggttattcatatacccttcttttagcaagtattcgctaaggcgattgtaccacatacttccaaattgctttaatccatacaaagattgttgtaattgtattaagtacatgctacgagactttgtataatttgcttcaggcaatttaaatcctctaaggattttcatatatatatcattatccatggatccatataataatattcatgagacgcatatctagtctttctgggactgcaaaactaattaataaatgaaatgtgattgcatcaatgacgggagagtatgtttccttgtagtcaataccaggtctctgcgagaaaccctgtgctattaattgcactttatatcttatgatctcattgttctcattgcgttttcgtacaaatacccatttgtacccaacaggctttacatcttcaagtgtttggactataggtccaaaaacttctcattttgttaatgagtttaactttgcctgcatagcttctttccattttggccaatcatttctatgtcggcattcttccacattttgtggtttaggatctttatcatttcttatgatatcgaaggccacttggaaagtgaaaatattgttaataatattattattttgatctcatttttctcccgtgtatacataatttattgagatctcacaattttcaggtaccagtgcctcttcaggggcttcttgttcaatatgtgcctcttcaggggcttcttgtttaatatgtgtctcttcaggggctatagatttatcaattttaaactgatcagtcattttgatggtctcttctagagtgccaagtttttcttgggttctcatcttccggggagttacatcctttgagccgacaagtctatcacgcttcattcgtatcttagattcatttgttaactgttctttgagccgacaagtctaccatgcttcaggcgtatcttagattcattttttatttgtcctatagggacatcaatctatgttggaatatttgcagtcaggatatatgactttgtcactttctttgtttcaatgaatgcatatggtaattgatttgcaaaattttgcaaataattgatcttttgaactcctagttcacattgattggtacaaagatcaagataagtaaaagtcaatgcattctaaataatttcacatcgttcttctggaactggctcttttcctcataacagcgggaaaattgtctcattaaaataataatatgcacaacatgtcattctaccttctaaatgtatggataaactagtcactaaataaaaaacttctggttttataatgtacatccatatgactttttaccccaggggaccgagttggtcttacaagattcttctggatctagtatcgtataaagtgtcattcatatgaaatcaaatattactagtgacatggtataagctcttctagagcctttaatcaggtttctatcacttgatatagtattaacattgtttgtcgtcaattttgtgcaattaatgagacaagagtttcatcaaagtaataagtcataaaatattgtcatacctcatctttatagagttgaagaaatattatcatagagaaagagttaaaatcaatggaaaaatattagtcatcgatgataacataataagttgtgtaaaagcaatgagagcatatataacaaaataaaacaaatatgaaaagataatttaaagttatatatttcttaaatatctcacacatttgattttgtaagtgtggagcaatttatacataaaataactagaaaatatttcaataatcaaactaattgtagtgatagatcaataattttattcaaaatattattatgatctaaatcaatgtgcaaaaattaattcataaatcaaaatttcaagagaatatatcatgatttaaagcatcttgttgcctcaaaactttaattgaaatactacaaatccatctgaacatatatgtaaatatataacataatatattgagaacaatagttgaacttattgcaatttcaaaattattttggataatgaaattattgcattaataaaaataccatatgtggcaacatgcaataatatatgtaaatttttctactaatgacagtataacttctaataatagaaatttataaaaactatcaaacccttacctatttgtataacttgatatacaaaaatattaatcttttgataatatgtaaatattatctatatgcttgttattatagattcaggctataatatatttccttataacttttggttatataaatttcataaagttatacaaaattgttagttaacaattttgttctctataacttctagttataagaaagcacatattaacaattttggcataacctttgattaacacaaagaatattaattttcttattttcataacttcgggttatgaataataatatttatataacttctcgttatataacaaaattaaaaatttttttgtatcttctaggtacataattgttcattgacaattttgttttgtataacttcttgttatataagagaattagaaattgtatgcataacttttggctatgaaagaattgttaataaaaattgttttccataattcttgttgtgaaaaataagtgagtatcaaataaaaataaaaaaccaatatttttcataactttgagttatgattattttgtcaaaataagaaaatattcaaatttgtacatagcttcaagctatgaactatttatgtataacttctagttatacaatataattaaaagaaattaaataaattaaaagttaatatctttcatagttttaggacatgattattttgtcagaacaagaaaatatttaaatttgtacatagcttcacgttatgaactgttttttttatataaatttgtgcataactttaggctatgaactattcattgtatagatttgtgcatagctttgggctatgaatttttattatgtagatttgtatatagttttaagctatgaacatttatttatttactttatagtttctggttataatattgtttggtataacttctagttatactgtataattaaaaataaataattaaagtatcatatacataacttctggttataggacttgcacatatttttcataacttctggttatgaatttactccataatttactccataacttctggttatagggattatacatatttatgtatttaaataaaataaatgaaaatagagatcaaagggtaataaaatagaaaatcatgatataagtttatcacatacctttttgtgagaaagaagagagaaaatcattctatttttatgaagggaataacatctttctatttctctaaagggaaaaacatctttctatttctttgaataaaagaacgtctttctatttctctaaatagaggaaaatcttggtatttcttttgtagagactacttgtgctgataacgtgttgtaaaattataaagtgaaatgagaagaaaataagaaagagaaattagaacgtaagaagataatagaattgattttcattagttttttgcgtgggaggcttcttgggggagagttctaaccttggattgtctgcaaaggagaggttgggttatgacaaataaatgttttttatgttatacatgtgaggagtcaattgaccaccttctcattcattgtgaaaaaacaagggaagtgtggatgttcttttcgttttttggagtttcttagggttttcctctttcggtgaaggaaacccttttaggatggagggactcttttgtgggaaagaagaggaaggtggcgtggcaattgggaccgttatgtttgttttgggttatatggaaggctagaaattcaattgctttcaaggattgcgggctgtccattcaaaaattgaaagtttcttttgtgtatttattatggttggaaaccaatttgtggatttcgaccttaatagattttatagagtgggtgtgtatgcattaagtgagaagatttttttgtttttttcttgttgtatggacccttttgtaaaggggtaaattcctttatattgtaattcggtgggtcactattttagcgcctctttgcaatacaattatatacttattgataaaaaaaaaagaattgattttcattagaggtatctcccttttatacatcaatatggatgatcattcacaagttcccataatccgataaattctcatattttataaatttttaaaaattttaaaactattttttaaattttattaaatattttatttttatttttaaaaaattaatctaaaaacgctttctaaaatcactattaaataaacttttatttgagtaaactttctgtttttttttttttcttttttgaaaaaataaaagtttttatataaaaagtaacaatttatattcaacattcaaaatttgatgtaaatttttttcaataactccaaattttaatcgattttttaaaattattatacttttaatataagcttttaaaagtttaaattacttacattttttattttatttttagtaatagaaaaaaaaatatttaattaaaaaggatcaaataatcttaaatttataaaagtaatctctttcacatttaaacttgaaaagtaataatttttttttaaacccaaaaacataagggatatttttgttaaaaattgatcatattttaggttgaaacatgtaaataggtaaatttacaatttgagacgtaaaaaaacaat

SEQ ID NO: 11614 - DNA, 891 bp, Vitis vinifera
  Intron number 1 from transcript GSVIVT01027385001 (locus G SVIVG01027385001) derived from phytozome v7.0 (chr-ID chr1 3; pos 15468345 to 15469235 reverse strand)
actgttttttgtgtggattgtggtgctctgcagtaactacactctctcttactactattattatactgcaatactttcataccaccaccttccttccattgagccttcatcaatggtgggagctcactattatgttagcttcatatgtatttgcagtaagtagtaaataacatgaaaataatttgaatgaattagattggatttggtttggaaaaaattttcaatttttttaaatgaaattttgattaaaaatattgaaaattatattaaaaaaatgaaaattaggaaaccttatttggtactaaatttttttacttgaaaatgatgaaaataataaaattgtatttgtagattaatttttattttcttttttttattaattattttaatagtaaaataaaaaatatgtatatagttaacaaaggagttcataaattgtattcttttgtttggtacccctctttttttacataaaaaaataattaaataattaaactatatttgttcattaattttttattttattttttattagttattttaacattttaataatttttttaataaatatataattaataagggtatttttagaaaatagaagatgtaaaaaaaattaaataaaaactattcttaaaaaataaaaatagaaaatgaaaaccaaaaaacttcaacctaaatatccaaatatatcctccaacttattttctaattttttaaaaataaagacagaaaattggctacacaaataggggttagatttttatttttatttttatttttttgaaattttaaactaaatgcatttcggaatttgataatttgttaggtaatggtgtttgctttccattttcagcgctgcccatatcatctctttttccgtacctttat

SEQ ID NO: 11615 - DNA, 21564 bp, Vitis vinifera
  Intron number 9 from transcript GSVIVT01015768001 (locus G SVIVG01015768001) derived from phytozome v7.0 (chr-ID chr3 ; pos 17193596 to 17215159 reverse strand)
ttctgttcttgattatcatcaagacaaccgaaaaggtgatgccccttatcaaggctttcatgtcaaggcctcccaaacacacgaatcaggtaatgtcgaattccacacctacacctcccttccgcttcacctttatatgcaacaaggatgtgccttggtaattacactgactgcattataaggcagtggttaatgtgcttgtattagtgatctttgtggaatatgaataactatattctgtgggtttcatgcttcaaatctcaattgattgttcttaagcagtggaagaaactaatgtgttctaaaattctaattgaactgattgatatggatttaaccacaaaatttaatttgaatcctttttaagaactcaacaaccaagctaattaagatttgtttcgcaatgattttaagaaacatttctaacttgtctaatacttaaaagcaattttttgaatttttttttaaataatagaaatgttagagacgtttttttagaataattaccaaatgggctctaactatcaatactactccatgatagaaaaaatattttagttatatttggtttttagaaagtattaaggaaagagaaaaatgttaaggaaaataatttttttatatttggttttatcataaaaaaattcggaataaaataaaatataattaaaattaattagaaatttatgcaatttaaaattatttaatttttatataatgaaggaaaatatgtgaaatacttttaaagaaatgtataaataatttattgattttgaatcaattttcctttatttttattttccttccacttttttctctattttcttttcctcacattttcacgcaaatttttcaagaaccaaacacaaccttgtgtttctttctttgttcctatcatggggtagtttaatctttgtagaagtatcctgcatgaggctttcttgtatgattatgtagtgtcacagaccagaagagcagtgcttaaatttgtttcaattcatgttttaaaaccactggtcatggctcatgtatgtatgcaataagaatgaaggacaaaaaatcaaagaaagaatttagtagatttctaagatcaatgatccatttacaaaaattgtcaggaaattgaaaagtaaaaaaggtccatcaaactaatacacattaattgcttgaggttaatttcgtttacatctcttgaaattttgactaaatacttctaactctcatattttttaaatttcaccaaatacttttcttattattttcatttcttattttcactcatccctcctctcaatcaaaataaagaatgtgtatgatgaaatttcaaacttacaaagttagatgcatttatataaaattttaggagaagtaaatgaaattaaccttaattatctgttaatgggtaattttcaataaaattttatcaaaatgtaaacagttaagtgtttctaacgaaatcttggaatttgactgataaaattcttgagaattattttgatgattgaatttggaaataaggtgagatttgaatttattagtaggtaatttaatatagaactataagataggttagttacaattggttggatacatttttgaaattgatgcttgaattggaatggttgggggtggaatcaaatcttgtaaggtttagggttttaatatttatatataaggtcggatttgatctttaattttataaagtgaataaaattaattgtgtgtgtggttttctttgggcgccaccttggtagcctcacttggcacaatatgaatgggtaaaatcaaaataggagcaagcaagtctacatgccacgacaacagacaaggggaggataaatgggaagtgtcgtgggaagatgaaatttaggaagtgtaggagcttgatgggacaagttggttgtgcaaaaaaagaaaaaaaatgttaaaggaaaatattttttcattacaaaagaaaattaaatataatttatatttttaaactatgtaattttgtataaaaaatttaaacaagtaaacaaatttgaagtaatataaaaaataatttattaactttacatttattttttatttttctttatttttatttttattttttttcctctctattttctttttgttgtattttccttcaaacttttcaaaaactaaacatagtataaaaataattatggttaaggagataaaaatggaattgatgcaatgaaccctaataaaataacaatgatttacaattaacaatagggaagggaataaatcatgtcacaatgatagagcaccttattgaggttgaaatcaaaatagaagggattaataactcttcttggatctttggcttatctatatgtgattacttagtaaaaagacaaaagagtccttttgataaaacaaatctcttttatcatatagtagtagtaataataataataataataatagaaaaataattttgtaacttatttttttagatcaaaccattaagctaagattcatgtgatcatacattgccaactaagagtatattttctacatagttcccttccaaaatcaatgaactatgaccacaatatattatacaccaaactgtgctcgtatcgtagatcagaaacatgtgcaaatcaacaagcacaatctaattccattagtccctttagaatcacatgcatttattaattatgtaacaaactagtcaaactttttaatactttatgacaattatttagtgaagccatctagtaagtcatctctatcaaagatgaaaaacgtcacaacataagttgtgatgttaactatcctatgactgagtcaagtcatattatataatatccactttaattaggcattgcaatgaactaaaagagtctgtccactttctttggtaattatgaactaattttttgtttcaaataaacaaataattatgaaatcttgtatatgtctaatgctatgcaccatggtcattgtcacacccttgagattcaccccaaatttttctctgagtgtgtggtgttaagaaccctttcttagccaaccttctctgaatgtctcacaaaagcaatgcaaagagaccaagtcaattacgtgaatcctttccaacttatgttattcaatcaacaactacaagatacaaatctgtctcaagtgtctcaacactttataagagttagagaacccacaaatgcctataacccactaagcattaatgtatattcttgtctttgatatgaagaagggtttatataactcacaccctgcaattacatattcaaatttcaaaccaggggcctactaatggttatgagacgtccataatcacccaactggagacacctctctgaaccaaggtgtctcttcgcatcaactatagcctatcagccacctgcatgttccctttgctgagtcaagttgttgcctcttaggtgctgcattgatcatcaacctttaagatgatgccactagctactgtgtcaagccatctctcatagagctattattgatgagtccccctaacaaggtgcctcttgtgaatgggtgcccatcaaggtgcctttgatcaatggctttctgaaccagcatcacacatcgactatctgattaggtcactttgatgcatcaacatgccttccccccatactgatgctcgagcccatgtcatgtcaaggtgcccatggcatgaggattgtgttaagctccatctgtttacaaggctagtggttcattaagcatgccatgcaccaccaatcccattagtctatctgttgtatcaatgcctcttgtcaagccatcttagtcacaacattgagccatgacattgcgcccattgcttagtcatccttatgcacaaggcattgtgcccttgtgtcatgcataggcatgtctagcctgagttggttgcatgtctagtcacctcattaagccatgtcatcatgcccatagcttctcaaaccaactcaattcacaagtctttagatacctttgtgttagcataggtaggggataggtcgcaccaagtcccatgccattacaaccatagggtgcatgccacacatgtcgtggagcccatgtgtgtgtactagtgtgttgtctgtgtgtcctaggcacacccaaggtcgtgtcaagttacctcttggtgcggccaaggcttggccttggtgtccccttgagtcacctaccccacccctttaaagagcattatgagctattttcaaaatgtttagaggaaagatcagaccccctcaaggagacataatggaatatttaaataattaataaatatattccatcaataacctcaccctccatctataccgtcatcataaccctctcaaggcttgagtttattgttggagattcccaagtgtgcaggatacgcacatggtgcgtgtgcacggtgcatgtctagtgtgtgtgcaacctatgtctagtgtgcactggtgtgcaggggacttatgcttggtgcatgcgcaaccttagcaatgtgtgccaatctcctcacttactttcttggggttaaaccatcaaacctccaggttctccttgctctctacctagggtccccatggctacaaagcctacccatgagcccctttttactccatcattgggtcaagaggctgacaaacccaccatcgcctactgaagttgatgcctttgtcgacttagtctacaagtatgtctggaaggcttcctcaaactgccataaagtaacatctctctctctctctctctctcaagttgcttttgattctgaagtcctcttccattgaaccagaaaattagttcatcgattctttctaatggctcccatggtcttatgatccaagatcttctccacttctcaatcaaaatacttcatgaccaagtgaggggtccgctttattgattcgtgcccagtcgggtcttttaataaaaaacatttataaatcctatgaccttatactagcgtagcaaagctactatagtatagcagctctagggtcgaactctaagatgggttttcactctaccagtgatatactcaagattagaaattgaatctgatgattttctttgtcaaaaacttaaagtttaaaagagaataaaatttgttttgaaagtagtgtttgaaactaaactaacaaagaactaggtaaaaatggaagaaagaaagtctcccggagctaaaggttgctaggatcaagttcagaatgcaaagtgggaaattccggatttttctccttgtattggggacaacaacataaaggatggttgtttcccgaaccggtataggtttaacaatgaagatttaatccataaaaagtcaatagaaatggtagtcaagttccattaatggctttagacactatgggtcttcaccttgagccactttccaatggctcgtacatgataactaatggtctgatgtggatctagcaataaatatccacagagacctaaaagcttaccatgtattggccattcaaagtgattctaagggatttaaagcaaaactttagatttaaaagtcatttatgaactccaactacctgtatttaaagcacgagagttttccactttcgcatctggacttttcacctaacttcctttagtccaagaaaccaaaggtttagcctctcatcctctgggaaaacatcctcagaggttgtttggcttccaagaaaaagaaaaatagaaaagagaaaaggaaagcaaagagagccctaaattttacttccttgtaaaactgtacaaaagatcgatcgtccacagaacaggctctcgagagatatttatatgaaaattacaataataatataaaaaggttatttatcctttttccaaacttaataactaaggaatcctaagattggtgggttacaaggagattttgggggtttagacaacaaatatctaaagcaaaatatctcaaaatatcccaaaatgtcggtggcaaatatcaggaagcttcaggagaacaccgcagcactatgcaaaatggctgctctcccatccgggtaggcgctatcagaggatccggatacgtacgtccggagaagttgaaacgctctccttttctatccgacgtcagaattccggacgtgaacatccgggtggaaatggcgacagccgggtacaaattggcggtagccgagtgcaaattggcggcagccaggtgcaaattggcggcaaccgggtgcaaattggcggcaaccgggtgcaaatggcggcgcgcatccgggtgcaaatggcggcagccgggtataattcctactcggatatgttgtccggatgccctccgatggtgtatcaggacgccctgtccgggtatactccttgcatagattccaacgaactctcctcaaactcagattgctttggtgataaaaaagctatcaaaacaccaaaacttaacacattttttattagaattgattgcaagggtcctcaacatgccaattggaataaaaatggagaactactacacaaaagtgcttaaaacataatgaatcaaatgcgcaaaatagcactttttgggtagtaatcatttatctacaccctttttgtgtcagagtcctcatgatatggctttagaaaattaacatggaagattgggtgaaacttgagcctctcgagcaatttcaacatataggccacttgtcccaccatctttatcacttcaaatagtccatagtattttggaatcaaacccctcagccttgtcttactactgatcttcttccatatttgaggggtcaattttaggaggaccttgtccctaacctaaaattctaagggtcgacgatcacggtctgcatacttcttcatctatttggctatcttttctaaattgtcccgagcttcatcaaacatttcttattgagactgagtcaatgagtatgttgtaggactgtttccacctgaattttgtttaactacttctaaaggcatccttggatgcaaccctatagccaacttaaagggattcgttcatattgttgaactcctatgcaaattataacacaactaggcaatgtcaagcaaatcaacctagttcttttgtgttttcgtcacatagtgtctgagatatttctccaatagaacattgattatttccatttattcatcagtttgaggatggttggttgtagaaaacttcaactctgaacccaagagtttgaacaactcaatccaaaaacgatttgtgaaccatgcatcctgattgctcacaatgtctttaggcaattacccaaagtatttcaccacatgactgaagaacaacctagtcgcctcctccatgggacatgcatcaagtgcagtacactacaatatcatctaggtacaccctaaaaaaggcatccaagcaatcaatcagaaatcattcatcaaattacaaaaagtagtaggggcattggttagcccatatgacattaccataacttcatatgagccataatgagttacacatgtagttttccccttatcttttgttgcaattcacacctaccaataacccgatctcagatccaggttggtgaaatatgaagcctttgataatatatcaaacaacttgattgccaaaaggattgggtgtttgttccttatggtgactttgttcaaggccctataacccacacacatgtgtagagtgccatcttgttttttttttttttttgaataacactggtgcaccatatgaagccctcatgggctggatcaaacttgcatccaacaactctttcaattgtttctatagttccaacaattctataagggacatcttgtaagggacttaagtcaggtgttttttttttttttttttttttttttttatcgaagcaacaactctatcttgtggttaatgggccactagggtggcaactcctcgggaagttttataagcatcacgtctttgaactcttttaaaatcctaactattgaatcaaggaattccatatactatccctccttgatcttgatcaaggctgcaacatcagtatcctggccctacttcagatccttctttaactagatagcagacaacatctcaagatggcctttatcaccatttttcgcattcaaaacttgcacaaagcaaggctgactttcttccaacaccattaggccaccaagataagagatctaggccaccttggcctttaggaagaagtctatactgagaagtagatcaacatcatccaagggcacacaaaatagattacaagtgcccttccattcacccacttgcacaaggacattcttggctatgtcatggatcttttgggttttttttttttattaactaccttgatctgactagtatcatccttcaattttagtcccaatttggctacctctctagtggccacaaaattatgagtgacaccactgtccaccatagccttaacctacacatcattcacaattgcatgcacatacattagggacttttgaacatgagtctcaccatgaatgacatttaaaagttgaaatggattgactctaggaagggactttaagtcaaattcttccttctcatctgcagtcacaaggatcaagagtttctctcgttttggggtagtccctagttttgtgtgggccattacatgtttttcttttgactgtaaatctttgttgtaaataaaatacaaaagcttaaatacatgataactctggccaagaaaaaccagagatagagttaccacggttttgtagtattttgggttgtcgtcctctaatatgtttatttgatcttataatcaaatgattaattatttactaaaggtaaaaaaaaaaaaaaatctaattcaaataaatcagaatgaaatatggataaaaatttcctaagtaaacctatttaaattatagaataattattgatttttaatttaattaatcaagattgggggtctatgatctaacttcgagtataaacctttaggcgaaacaagggtatataatttaatagtcttaaggtaatcaaaactaacgagatcaacctgagttccatacctaagagttgatccgtatcctaacttttaatatttcatttcattcaattacctaatagatgaatggacatggaatctaggtttagatataaggtttttaggcttttaccactctgtgtagatttgtcttagggtagataacggtgataaaacctttaataactaaagatcaagaattactaaaaatctctagtatcaaggaatatgtgattatatcatctcctaagtcaaactaactttagagggtattttgatctcaatactagtgctctaaccttttattcatctcattattaattctatttcacccattttttccctttggatctaaccctaggttttcatgtttcaccccaaaatggcttttgagcctcttatgggcatgtcctcacatacataggccttaaaagaataagaaaaaaccattcttgatttcaaagaaatcaaaaacaataatttattcaataagaaaaacaagaaagaaagaaagaaaaaaaaaaaagaactttcaaggttttcttttttccccaaagaattgtcaagccatctctactcttaaaaaaaaataaaaaaatcaagaactccttacaaaacctaaatatcgaaattttatagtttccaccaaaaaacctaacatttggcatgttccaattgaccacttattttacaatcaattacctataatgactaaaaaaaaataataaaatcatgatttctagtttgtgtggggcccacttaggagggatgaagtgctcaagatgcgatttccaaagtagaggaggcaaaatatcaatgtggcagtgtgtgaattcaaaattggggtcatttcgaattggattttgaattcataagttgaatttcaaaatcatttcgaaatggttcttcaaaatctgcatagctatcttcaaacgatcataacttcttcatttcagctccgatttgcacaccattcaaagcattggattttgaacttccaaagcttcgaaaaaatatatatagattgcctaaaatagacttcaaaaagtattctaaaattttcttcaaagttagaatacatgttgccaccagattttgcgttccaaatttccattcaacttgatgaatttgcttcatgcctcactatctatgttcgcttgtctttcttcatagtccatgagtcttgatttgcccatttcctcatttaaaccctttcttgatcattcaaaatctaaggtgattcaacttgtacatttttctttccttaaacctgagataaatctccaaaatgcaagttaaactcatggctaaggccttagcaacaattttgatcaagttggaagatttgagtgtcatggtgcataaattatatcaaatatgtgctattaatgcacatattttagctccaatcggtgccatccctcttggaatccaccaggcaatctgttgtagccatggtagtagggagatcatgaaccccttgccttcgaagtttggtctaagcccacccctacaattaatgtcaagcatcaaggaactgaattccttgacatagtcccttatagatccaatgtgtctaagtcttttcaatgattctctagctacccaagcagtgttggtgggaaggaactggtctttcaacttctttttcagagtctcccaagtagtgatttggggttttctagactttgcatcatccttcatcctagtttgccaccacagtttcctatcatcagccagatacatgctggtgatggaaactctctcaccattaggaacatgagcaaccttgaagaattgctccatgtcccacaagaaattctccaactcttttgcatttcaatttttattgaaacccttaggctctaggacccaaattttgggaggggcttaagagcctgaggaggatccttgtaataccaccttcttgaggtctgtaatgtcttctctataagactatatggtgcctttgaagtcatccaccaaggattggatatccgctttcaagctagcaaccttctcctcaaagaattggtcatgcaactttaacaaactcctctacacttggatctcccccacagtgtgctctacctatgaggccacaatgccattctcacttggccattctcccaatatttcttccatttgagcaatcctttcctgtagggcttccattccactatcaccaaccatctctagtcacgctctgataccacttatcacacccttgagattcacctcaaatttttctctgattgtgcactggtaagaaccctttcttagccaaccttctttgaatgccccataaaaacaacataaagaggccaagtcaattacaagaatctttcccaaccagtgttattcaatcaacaactataatatacaaaattgtctcaagtgtctcaacaccttacaagagttagagaacccataaatacctacaacctgcaaatcattaatgtctatatccttgtctttgatatgcatgagggtttatataactcacaacctacagtggcatgatcaaatttcaaaccaagagcttattggtggttatgcaactgccataatctcccaattggagacactcctttgaaccaaggtgtctttccgcaccagttacaacctatcaaccacctacatgttccatttgttgagtcaaactattgcctcccaggtgttgtacttaccatcaatcttcaataagataccactaaccactgtcttaagtcatctttcatggagttattattgatgaatccccttaataaggtgtttcatccccataagttgcctcttgtgaatggatgcccatcaaggtgcctctaataaatggctctctaaaccagtatcacacattgaccatttgaccaagtccatttgatgcatcaacatgccttcctccatattgatgctcaagtctatgccatgtcaaggtgaccatggcatggggcttgtgtctggctccatcttattgcaaggctattagagcattgcgcataccatgaaccaccaatcccactagtctatctattgtatcaatgcctcatgttaagtcatctgagtcacaatatcgagccatgacattacactcatggcttagtgtcacaaaatgcttcaagtgaccctccccatgggcttatataggaggatggaagcttctagagactcctggaacaatctacactaagccattggtgggaagagggtggaaggttctaaagatgcctagagatgtccacacatctctacactatggtggaaggcatgagaagagtctaaggctttctagagaattctagagatctcttgtacatagggttgtacatagaattgtgtagggcattctagaatcttcttaatttgtaaggaaccctccaaggttttaaagagttccattggtgcctataaataggcgagggcctcattttgccaaggcaccacccaaatcacttcctaaccaagcaagttcccaaaagcacttgtaaaggcttccttgagtaataacaacttccattctttaagagttgcctactatgccttctcaagcttccgagtcatgagcatcttagcctagcaagctaagcattgggagtcaggctgacttagcaagatcaagtgtcttgacttgtctaagtgtggcacgagcttaggaaaatactaagtccgtgataagtggtatcaaagcgcggctacgaaatgggcatagtaaaggaagcatgtcgggctctaatttggaggagactagtgagcaaactcatggaagagagattgagcctactgcataggtcaaggtcaggaaggataagtctcgtgatgccattgccaacatggaggcaaggctagccaaagtggagctagccatggcaaacacccgagaaatggtggacttgatcgagcaaggcatggagaagggcttagaggatctaagggagcagatccaagaccttcgtgagggggtactaggctcacaagttcagtcgatgtcacatgaggagttcatgtccttccaagacaagttcatgagcatgtttgctagcatggagtcaaggatcgaggccttggccactcgaatggagtcccgagaccatgaggttaggcaggagttggccatctacaaggctgttgtgtcggcacgagtcatggccacctaggaggcatctagggtggaggtgccgaagccacaagggtttagtggcaagcaggatgccaaggagttggacaactttttatggcacatggagcgatacttcaaggctatcgcactaactaatgaggcagctaaggtaagaactgcaaccctttaccttactgacacaactactctatggtggcgtcagaggtttgtcgatatggagaaagacacttgcaccatagagacgtggaaggactttaacagagaggtcaagaggcagttctacctcgatgatatggcttacctggctaggaaaaacatgaggcgtctcaagcacacaagctcgatatgcgactatgtcaaggaattctcttcactcatgcttgagattcctaacattactgagaaggacttgctagtcgacttcatggataacctacaagggtgggccgagcaggaattaaggtgtcgaggagttcaagacttagccactgttatggcaatagtagagtctttaatggattacaagaagggagacttctccaaggttgagtctttggaggatagccaggccatgggtaggggagacgaggtctcaaagggccataatactcttagaatgggatcaggcaagatgcctaacgttcgagaaggaaggggtaaagcggaaaggaaggagtttctgcctaaaatcaaatgcttcatatgtgacagtccacattgggcatgggattatccaaaaaggaagacgctcaatgccatgatcgaggagagggaacaggagggcgaaacacatatgggctcgatgcatctactaggtttcttccaattcaatccaaagcctcatacgcctaagacctccttactatcaagggtgaaagtaaaagaggcgattactactcaaaaagtgctattttataccttgaaattaactattttaaacacttttgagtagtagttaatactttttaactcaattggcacattaaagaacctaacaagggttacaaatcagtttttttttgctagttttggtgtttttgatagctttttgataagtgaaacaagtaaagaatgagagagaattttgtgcaatccatggcaatgcaagttgaagctcttttgttttggagcacatcatagccctttgtcaagctttgcaataggttgccaagccaatcaaagatgtaagaaagaaaaccaaaggaagaaatccaacatgtagcaatttcgcatagcatgcgaaatcaagaggagaagcaactgcaggactaagtcaaggacaatttcacacaccatgccaaatttcacatggtctgcgaaatcttcctgtgcactgactccgttagatttttatctccagatttttgtgtaaattactattctccttgtaatcaaccaatgataggatttcttggttatgaactataaagagggttggaaagacctctctatagaatatctttttgtataatcttttgagaaagaggacacttgtaattcccgtaggaaaaaatatattgagcccttgctctacctttttttttttttttttttttttcattttttttctagccaaacaacctctgaggatgatttctcaagggatgagtggctaagttttacgtttcttggagtgatggaaactaggtgaaggacccggatgcaaagatgggagttttccttgctttaatggtttttatttcaaggtttagctttaaatcccttagaatcaccttgaatgaccaatacttggtaagctttccggattctatggatgcttattgctagatccatggatgtccattagttatcaagtacgagccattggaaggtggttcaagatgagaatcaccttgaatggccaatacttggtaagctttccggattctatggatgcttattgctagatccatggatgttcattagttatcaagtacgagccattggaaggtggttcaaggtgagggtctttagtatttgaagccattaatgggaagcaactaccatttttcatgaaccctttggatcaaatcttaatagctaaatacaaaaccagtttgggagataaccatcctttatgttattgtccccaatgcgaggagaagattcagaatctccctctttgcctaaggaacccgatcctagtgacctaaagctccaaaagacattctcttttgtagttagcttcaattgctatttttgcttaacttaaaatcaactttttcaatcacaattccattttctttaaaaactaattttcataaggaaaaacaccatttcattaccttcactaaagccacttgtacgaagaaaacccatccctgtggatgatcctagagccactatactatagtagccatgctaccttagtgtaaggtgatttaggttttataaattttgttgataacacccgtctagtgcaagaatcaaatggcaccgttgctgggaacgaatcaaatggtgccgtttccggggatggtgccaaagtactttgacattacttttggtgaacacttgtgatcttcatcacaagtttggtgatttttcttttactaattctttttctttgtccctattttagcttatcttttatttagtttttagctaaccttaacctcttcctagaattgtattttttttgttttctttgtttttgtttcaatgatctctagttgtgcatgccctattggataaaagattttgatggaagacttgtgaagattgaaactcctcaagaaatttagttagaagtgtgcttgaacatcatggatgttccacctaaagatcataatagccaacatggtcaagaggataatttcaatgcataccgatccatgagggaccgcatgcattcactttgtatgagtgtaccttcatgcatagtgtctcccactgagcagttagtaattcgacctcacattgtgctactcctacctactttccatgggatggaaagtgagaatccctactcgcatattaaggaattcgaggaggtttgtaatacattccaagaaggagaagcttcaattgacttgatgaggctcaagctatttcctttctccttgaaggataaggccaagatttggctcaattctctaaggccaaggagtatccgaacttggattgatttgcaagccgattttctcaagaagttcttccctactcataggaccaatggtttgaaaaggtaaatttcgaacttctcagctaaagagaatgagaacttctataagtgttgggagaggtacatggaagctattaatgcttgtcctcaccatggctttgacacatggctcttagtgagctatttttacgatggtatgtcttcttcaatgaagcaactcctagaaactatgtgtggaggagacttcatgagtaagaatttggaggaagccatggactttttgagttatgtggctgaagtttcaagatgatgggatgaaccaacactagagaggtgggaagaatgaagtctcaacctaatgctaagggtgggatgtatgttttgaatgaagacattgacatgaaggcaaaggttgcagctatggcaaggagattggaagagctagaaatgaagaaggtatacgaagtgcaagccatttctgagacattagtgcaagctatgccttgttccatttatcaatcttatgagcacttggtagaggagtgtcataccattccaatagtgagagagatgtttggtgatcaagcaaatgttattggtcaattcaagcctaataacaatgcttcatatggcaacacctacaattcaaattggaggaaccatccaaatttctcttggaaaccaaagcccccttagtacacacaacctcctcaagcactttagcaagcttcgaattttgaacaagctattgtgaaccttagcaaggttgtaggagactttgtaggagattagaagtccatcaatgctcaagtgaattggagaattgatagtgtggagagaacattgaacaaaaggatggatgggatgcaaaatgatctgtctcataagatagacaatgtccaatacgcaatctcaaggcttaccaacctcaacatagtgtaaaagaaaggaaagtttccttctcaacctcatcaaaatcccaagggtatctatgaagtggaggctcaagagagagaatcttcacaggtgaggaaagtcaaagcagttatcaccttgaggagtggtaaagaggttgatcagcccacatccaagccaaagcatgatgaagagattgtagcagaaaaagaaaatagtgaggagattaaaggaaagagaaaagagaaaagtacaaagaaagatgaccatgattctagtgtggatgaagaacccgaaaggatagtcatcaaagaagatatgatgaagaaacacatgcctccatatttcccccaagctttgcatggcaaaaaaggaaccaataatgcatcaaatttttttgaagtgttgaggcaagaaaaggtcaatatccctttgctagacatgatcaaacaagtgccgacatatgcaaaattcttgaaggacttgtgcactgtaaagagagggttgaatgtgaacaagaaagccttcttgactgagcaagtgagtgctatcatacagtgcaagtctccagtgaagtacaaagatccaggctgccctaccatctcagtgagtatttgagggacttgtgtggagaaagctttgttggacttgggagcaagtgtgaatttactaccttactctatctacaagcggttgggacttggagagttaaaaccaacatccatcactctatttctggcagatagatcaatgaagattccaagagggatgatagaagatgttttggttcaagttgacaaattctactatccagtggatttttttgttcttgatacagatccagttgtcaaagaactaattatgttcctatcatacttggaagaccattcctagctacatcaaatgcaatcatcaattgtaggaacagagtcatgcaactcatgtttggaaacataacattagagcttaacatcttccatttgtgcaagaaacatatccatccgaaagaagaagaaggcccagaggaagtgtgcatgattgaaactttagtggaggagcattgtgataagagaatgcatgaggatttgattgagagtcttagggatcttgatgaagagttacctgaaccctcagatttgcttgttaccctgtctccttggaggaggagagaaaaaattctacccttattcaatgaagatgagacacaaagagctgctaaggaggagcccctaaagcttattcttaagccactacccatagagttgaagtatgcatacttggaagaagacaaacagtgccctgttgttatatcttcaactcttaccattcatcaggaagattgtctacttgaagtcctcagaagatgtaagaaggcaatagggtggcaaatttctgatttgaaagggatcaaccctttagtctgcacccgtcatatttacatggaggatgaagctaagccagttcgtcaaccttagagaatgttgaaccctcacatgtaagaggtggtgcgagttgaagttcttaagctgcttcaggccggtattatctaccccatatcagatagcccatgggtgagtcctacttaagtggtgccaaagaagtctgggatcacagtggtgcaaaatgataagggagaagatgtctctacacgtctcactacatgttggagagtgtgtatcgattataggagattgaatgtagtgacaaggaaggaccatttcccgttggcctttattgatcaggtgcttgagagggtctctgggcatcctttttattgtttcttggatggctattccaagtactttcagatagaaattgatgttgaagaccaggagaagaccactttcatgtgcccatttgacacctgtgcatataggagaatgcctttcggcttatgcaatgcacccgcaactttccaaagatgcatgttaagcatttttagtgatatagtggagcgtattatgaaagtctttatggatgatatcaccatatatggaagtgcatttgatgaatgcttgttcaacttagaagctattttgaactgatgcattgagaaagacttagtgcttaatcgggagaagtgccatttcatggtacaataagggattgtccttaggcacatcatctccaagcaagacattgaagttgacaaagcaaaggttgaactcattgtcaagttgccatccctaacaaatgtcaaaggagtaaggtaattccttggccatcccaggttctatagaaggtttatcaaggatttctctaagcttgcaaggcctctttgtgaatgattggtaaaggatgctaaattcatatgggatgatagatgccaaaggagttttgaagaattgaagctatttctgataactgcaccaatagtgagggcttccaactggcaactgccctttgaggtaatgtgtgatgccagtgactttgccataagagctgttcttgggcaaagagaagatagaaaaccctatgtgatctactacgtgagcaaaacattgaatgaggcgcaaagaaactacacaaccaccgagaaaagaattgttagttgtagtttttgccttggataagttttgtgcttacttggtggggttcttcattgtggttttcactgatcactctactttaaagtatatgttgactaagcaagaggctaaagcaaggttgattagatggatcctcttgcttcaagagttcaatttccagatcaaagacaagaaaggaatggagaatatggtagcagactacctttcaaggctagctatcgcacataattcccatggtttgcccatcaatgatgattttccagaggagtctctcatgttggtggaagttgctccttggtatgctcacattgctaactacctagtcacaagagaagttccaagtcagtggaaaacacaagataagaagtacttctttgcaaaaattcatgcctaccattgggaaaaaccatttctattcaagtattgtgtggatcagataataaggaagtgtgttcctgaagaagagcaacagaggatcctcagtcattgccatgaaaatgcatatggagatcactttgcttcttagaagacaaccatgagggtgttgcaatcgggtttctgttggccatcacttttcaaaaatgcccacaccatgtgcaagagttgtgattgatgccagagggttgggaagttgacacgcaggaacatgatgcctttgaaccccattttgatagttgatcttttttatgtttggggcattgacttcatgggaccattccctatgtcttttggttactcttacatcttggtgggagtagattatgtttctaagtgggttgaggcagtcccatgcaagcacaatgaccatagagtggttctcaagtttctcaaggagaacatcttctcaagatttggggtgcccaaagccataattagtgatgggggtacttatttttgcaacaagccttttgaaactctcatagccaagtatggggtgaagcataaggtagcaacaccttaccaccctcaaactagtaggcaagttgagttagcaaatcgggagattaaaaacatattgatgaaggtggtgaacacgaatagaaaatattggtttgccaagctccttgattcactatgggcatatagaacaacttataagaccatttttgggatgtctccttatcgcctagtctatggtaaagcatgccatctccctatggaattggaatacaaggcttggtgggcaatcaagaagctcaacatggatttgagtagagctgggttgaagaggttcttagacctcaatgagttggaggaattgagaaatgatgtctacatcaattcaaaaattgcaaaagagagattgaagaggtggtatgatcagttggtttcccataaagattttcaaaagggacaaagagtcttgctctatgactctaagatccacatctttccgagcaagctgaaataaaggtagataggtccttttaccattcaccaagggcatagccactgtctcaagccctttgtggagcctttgtctcttgagaaggaggaattcatcctccttgatctacatcaagcttgaaaagactagtttttggatggacttagtctttctaaagactatcaagtccatatttttttgttttattttttatttgagagttctcttgtaatgtaacttgttttgattttgatttcttgctttaatttcattttggtttgatttaacttaagttttttatgatcaattttaggggagacttcaaagcagttgggcatgtccttaaagattcttggcagaagaaaaaccctgaagaaaaaaattcatcaaggcattttgcacactcttgagaaaattttgtagggtatgcgaaacccttctcaaatagtaaagtcaactactgctagttttgagccctttaaatttca

SEQ ID NO: 11616 - DNA, 2959 bp, Vitis vinifera
  Intron number 8 from transcript GSVIVT01019755001 (locus G SVIVG01019755001) derived from phytozome v7.0 (chr-ID chr2 ; pos 3000352 to 3003310 reverse strand)
ctgctaaaactggtgacaattctggatctactaaggttacggagtaggatttgcagctgatgctttgtaatttaatgtcaatagtcaggcaactggtaagaatgcaccaggttgatgctcaaggttggtgtgtcttggtgctttcctagggttctcttgtacatgcaatataactagactcccttctcaacttgtataacaaatgtcggcctgtctaaaatgcttaccagtaaggctaattccggatattatacaagttaaacctcaaaggcagccattagattcaggatatgatcaaagagaataataccatgggagagttgattctctttgccaacagttgggtctttgtctattttatattttgctttgttctttgttcactctgttttttgtagatgatggtgggggtcctagggataaatctgaaattccaggtgatgactgagggtatgggggtcattttgcctactttgaaggttacgtagggaaaggtgcgaccgcccatgttttggttgctcccgcctaaatcatcaaccacccactaaatatttttacgagtttgtaaatgtttatttctttttcactaatttcacccactgtagtctgtattatgattttattgttaaactcttgtacgatacgcttttataacgcgcgaaaattcttttttttttttcaataaaattttgaaccaaaatattcttcaaaagtgattgtaagaacaaatttcgaaactactaaggccttggttgggtaacttatttctaaaatagttttgagaaataattttaacaatcggtttttgaaatttatttttcgatgttttattgaactgtttgaaaatttgaaatatttttaatatttttaaatatattttaaaattatttttatattatatgttttatttttaattattttatatgctagtataactattttctaaagcagtttttataaaataagtaaaaaaaaaataaagaattaaaagactattgataaaaaatatcttattttttatttttaagaaaaaaataaaaataagttttgattatcaaatatgtttttttttatgttgtcattaacaatagaaaattgtttttgtggtattaggattttgatgtcctcttgttgcaactccacctttactttacaaaacttataaaaataattttcataacaaaaatgctgactcatcaaaatgatttttcaacaaatatagtaaatactaaatagtaattattcatcataccatttattaaaaaaaataaaaatggtatcattcaagaaattgtgatagttgggagatttatttggtaatgcaaattaaggacccattcacttcaaaaatataaggggatctggaattcaaactttacatgtatgatactggcaacggttgggaatagtatactaatcgtaagatcttcttccaatatatatatatatatataaacaaatggggggaagaaaacaaaatgatttctgcaattcccaaaacaggaaaaaataattgtggcactggtgagtgattagtgcaccaactttctttaattaatgagcaattatttccaaatttgcccatacaaaatcagaagcaaggacgataagaaggtggtatgataaggggtaagattgtcttccaccaggtgggtccgtccttggaatgcatgcacgaaagtaatagaaaaaagaaaaagagaagagaaggaaacacgcagcacaaaaaacacatagcagcatatgatgacttgaagaagatggctttctttagtagacatggactgaagcgctgcagctatttgtctctctttgctcatgtgagagagtgtcgagtgggtaagagtggaatcactctttctctctctctctctctctctctttttctcttcagtttaaggcatgctgtttgtttctctctcttgtcttctcccctacaaggtcactttttgttgtgtttattgtgcttttctgttgcttgccttggttctgactcctctttctttttacccctgtacttttcttgattctttcagaattctaagtactcttttggttacagctgactgttttttgagatggggttttgagtgtttttttttgcttctcttatggatttctggagtctttgagcccaagagatttgggaaattgtcacttttcttgttactgtttgtggttttttttttttgctctctttgaatgcactactctgagatctagtggggtatgtccattttcgcaagcatttgtgctttttagcttagggtgcaaggaaatgtaaaggtaatgtttttaataattttgcttggtttctgtctgctttactcgttttggattgcttatagagatgaagtgattcctagtcaggtttagggttcagtttttaggatcaagctcagatttttttagcctttccagtatcagtttttggaataattagtgggtctgtgcttttccctaatttcttgcttgtaattgcttcaacagcagaagatagagcattattggtttttgaggtttctccaatttgagagaatggctttggtttccttatttctgcagatttaattatttatcagcattattatttctttactttctgctattccataggatctggttttatgcatcaattgtgattttttttttccttttaaaattttctctgtagatcttagaaccagattataactgagagatgaatgtctttttaccaatgccaattgatttttagggttgtgtaagatttccaactttttaatgggcttagaattttaagttgattcttcaatttgagccaattaaatagcacgaaacctaccatattcagtttaggaatttgatttcacttgttcaattctgatgtggtgggtggctggcatcttgcttctataggttctgatctgtttctcccctcatttgttgcagagctgtggatctataaatgcagcttgac

SEQ ID NO: 11617 - DNA, 2485 bp, Vitis vinifera
  Intron number 1 from transcript GSVIVT01001437001 (locus G SVIVG01001437001) derived from phytozome v7.0 (chr-ID chr1 3; pos 20986146 to 20988630 reverse strand)
aataccggcaaactttttgagttttccagtactaggtgtgccggcaaattttcaatctttgtgaaaaattttgaattttttttcttggttgcatgggtttgttcatcagtcctctgctttctctgaggaattttgagttctgtgcttgattccatgtatttgttgatcccatctgttgatgggaaactttgaatggtttttttagtcagattctgttgagttttactggaaccgtgtctatatatttgttttgttttgtttttatttttcaagtttattctgttttctaatacatattatttaaaatttaaattacttttttttttgtttaatgttaccaacatttaaaacaaaaattatttagagaattttgtggtcggtttccatttggttgagttgtttttttatttttttattttttttcttttaattattttgaaaattttgtggttggtttctattctgttgaggcttactagaggtttgatttttattttccttctcctattatatgtattaatacagaattgtacatttctaccaagttataaatggttgaagacttggttttctgtcgatttatttggagtgatagaagctgactagttatgttataacaacataggaatgcttaattgcaacaagaattttttgaattatttccttcttctttgaagcatagtttgttttctcaattggatttgattatattagatgttttgattataatttgctcaataagacattgtttctcagtgtttatgtggagatttaaaggttagtttgaattaggcctcttccaatttccttgcaaagcaacatctccaccatgtcaaattgcaaattgaaggtatatcccctcatcaacatgccaaactgtcaatcaatctctggctattgtgcaagcatgcctttggcaatttttaatggttttgcctcattcggatttactcgccgaaggcttcccgcatgccaaattgcctgtatgagtgtcaacagctcttatttgtcatcttacaaaggtctttcctggtttatataactggtggtgtcgtatgtcaacttcccaagctctggtactggattttccctgatgaacagggctccgatactatacttctgccttgcccttatctaacatcttcaatagctagtactggatttcccccaatgacctggaccctgatactactatacttctcccttgcccttatgtaacattgtggatgatgctaataatgtttgttgcaaggcagctgtgtccttcctgtactttttgactgtttggttacctgcattatgcactgattgaagtgatattgataagtcgaataaaatagagggccaagttgaactactggattataattaaggatttatggttcctcttctaacatttcatcatttctatgctataacgccccaggatttatgagtcaagagatgtaaatattttgaagaaggctcttataaactctatgttttcactctattctcttctcgtttatgcacgaatcaagtttggatggtcttctctgagcatgaaaactttctcctttttcttgtaacctcttttcaaaatcctttacatctatgttattactctgtcatgtccctctgttcttcctagaattctttgcacttgacatcagttttgatgttttattcatcgctgggctcctttactttatgtttatttgcagctgacgtgtcatggcacaggctgtggaggctaggatggtatttgatcgtcttcgagccccccaactttcgtttttgattaatgaaaacatccttcgaaaatgctttcgcagttgttatacatacatacatatatatatatatatatatagatagatagatagatagatagatagatagatagatagatagatagatatttcccttttgttcctatatatgatcatgtgaaattaagtgacaattgtgtgtagttttatgtggtacatgatattacaattaatcatatatttctccaattgatacacatggttatacatcttttaactagtagtctagtgattgggttattatgtcgttgttacccattattgtcagaatttatagtttaactgagttgattgacctttaacaatcaatggatgaactgatggtatttactaggctttgaggtaacactgttaagctactggattgtgtctattttatgctatcattgtacttgttgatattcagatttacattggttgttttgttttttttccaacttccagtccaaactctaggatttgttatggcaaagacgccatgccaaagaagctatcagggaatgtattttcaataaatatgatgttgaattggttgattgaacttgattaaagtttgtgtatgaaaaggtttttttgcatgaaagtgaaggaaaaatgtactcggcctgataaaatttgtgtatggcatggcacacccattaatatgtatgtatcttttttctcatttttgcagc

SEQ ID NO: 11618 - DNA, 2532 bp, Vitis vinifera
  Intron number 13 from transcript GSVIVT01034615001 (locus GSVIVG01034615001) derived from phytozome v7.0 (chr-ID chr 13; pos 14308729 to 14311260)
tctatcaataccgtgcctaagaaggtaaagattttgctatatcagatgcacttagtattgagtatttaaataaagatgcagtcaagtagcttactgatcacaagttgcttctctgtgaactatgtagaatgatacacaaatgtgatgttattacattatgaaccagcccactgcccaataattagtgtgatacctcttttttcttttacctccaggcaattatattataatcatccatctaattaataggaaacattaaattaatagtattgtggatattaactgttggtaactactaaacacaaccttactatgtattactaagtaattttctttttcaaacaatattagatatttgttagtggtaaaagtgtatctaaaaattctgaacaatggctgttataactatggaacacatattccttttcctagaagcattgtaatcttctgcaatgttaagtgtgtcattcacaaccatttatagggttaatggtgactctatgttaaaagcccaaacagcagagcactggccatgttattataccagtttctcatcaagcattatattcaatataatgttatagacattgtacccccaatagctaaaggaagtggctcaaataatagctgaaaatatttttttctcattagggggccagattctgcaatatttcacttattatgtgattgtagtgttagtccttgatatgtctatggggattgggggctatctttatagtacaaattattggtctaataagcaaacatgtatgagaggttagtgcagccaaatagatgacactgagatgtattagcgatctactagaaaagatagaatgagaaccaaatgaaattgtgataaactagtggtgccttcaaatggggagatgagaaacgctcaattaagaggatttgatcattgagaagaggactaaaaattaactagtaaggtttgatttgattcgatttgatgatgctacaaaacaagacgaaggcaaaataaaatgtatgttgactttggagcgctggaagtgcacagcaaagctaagctggccactgatcagatccacttcagaattctggtcatatgttgtgtaaatctctggtttattttgttttcattacgataaccctgcattagaatcttgatctttgaatgaggccgtgtgcttgtcttgtacatcttctaagttagtagtcattaatcatatgtatcactaaagtagggtaggtacccaaactttcaaaaagccaacactatctaggctctaacttaggtacccaaacctgttatcaatatatcataaaacgagaagagaaaaaagacttttcttgggtctgttttagactgtagcagctattgtttttgttccctgttccctcagtctcttattctagctagtcctccattatctcattttcttttctgcatacatataagccgatacctcttctagggagaaatcacatttgtttccatggtgatgttacagggttttcttattactacactacctaatccccaagtagaaacagggactccttgtaactcaattttgtcagaatccaaatcaaggatgtgacttggattttcaccctaacagaggagatgatacctcttgtatttacttgaccacagtatcaacatagatgagaaaggactcaggggtagaaagtattttcccaaccagaaaagcagattgagctatctcaggcttttttatggacatggttcaatttgaaagctaccctgagaaaaatatagcacagcattaaactagaatttcctcaatcctcaatcacgtgcacagaaaattcccattcaagatgaggggatcacaattcccttaatgaatcaaaggatggaagctttgtaaagttcccactcttttctagaaattgggcatattttaaatgtgacattgtgcatttattttcttttagcaagaacttatttcaattgcttattataagggatttgatatccatggacttattaattgaatggcaattggcatgtcactaatacctaaaaaaaatcataatttttttccttcgtttgtttgtttgtttgtttttggcttttaatattgtttattcctatgttgtactatcattgataggtaacttgttattccagaaaccttttaattttctgtttcttcttttctttttccatttcagttcatttttctttaaccgtcaacttttgtcaaaattagttcctattgaagtgctatgtaggattaattagttatttaactgggtgaccttagttttggtggcaattttggtcctgttctatcatgatttctgttcatatgatctttagctatgtaaaatttatgctttgttcatctatattcaacaagcttttggacttttctccttgtattcatgtctgccacttctgtatgttattggtaggaggaattaagtttctgctaatagtgctttttcatgtgcttgttgtaatggcctggatcacccatgtcaggtgattgcacagcttctgaagcctcgtgggtggaa

SEQ ID NO: 11619 - DNA, 5708 bp, Vitis vinifera
  Intron number 10 from transcript GSVIVT01031413001 (locus GSVIVG01031413001) derived from phytozome v7.0 (chr-ID chr 6; pos 18892741 to 18898448)
caaatcataacctcactgaaggatcctgacatcaggttaaacctgagtgctctgtattgttttgtttatttgttgacaatttcaaagctgtagatgcccttgcttataataatatttcggtactgagatttggtggcatagatttttcctgtgttatactcttcagtaactagtggagcatattagattttgttatctgaatcctctttgtgtgtgtgtgtgtgtgtgtgtgtatttgagttaggaaatgctttatttcacattttgttggagagtccaacaaaaactattggctagattccaatagtgaatgtgatacaaaaagggattttttttctcctttctgatgggaaagcaaaaacttttaaacaaataggaacttgaagacacttcatttgggttatattgctcgttaaatctggaaaaaaaaaacactgaattattattgtttcaatgaaagaaaaattcttgtgaacctggaaattttgccatcaaatcattggtaaagtgtgtggttctggttccatgtttattggggtttttttttctcctttcagatggaggagctattttgaaagcaaaaacttttaaataaataggaacttgaagacacttcatttgggttacatttcttgttaaatctggggaaaaatgactgaaatattattgtttcaatgaaagaaaaattcttgcgaaaaagaaacatgaacctgaaaatttcgccatcaatcattggttgagtgtgtggttcaggttccatgtttattgtggtgcaagccccattcactgttcaaattaaatatttggtgtttcttgggtgttatgttagttaagggtggtttggctagttggctagaaacatctgttcttaaagggaagtggggagtatgtaatacagctctgttgtgcttattttggtgtttatggaaagcaatgaagcaaagaatacctaatgatcaagagtggttggaatttcagttgcagcatattcttaataactctgtttgtgtgacttgtgcagaatgagaaactgtatttttagatttcattgatggattaagctgttaatgaagcacgagaagatccccataccccctttttctttaacatctgttgtttatccctcatataccttccttgtgcctaggttgtgcccatttttatttggtttcttctttattaataatatgcatgattaaaatatttaaaatttaactcattcatccaaccaagttgcatgtcagttagccaaacaaggagcaacgcattttgcctcctttgttggagacttccttcccccttgagtgtctaaatgcccatcgtttttctctactatgtatgttggtttttctctttttggggttaggtgagttttttatccagtttcttggttactttctaaccacctttgtacatctttgaaggatagtgcatccttcttgtattaatcaattgattgatgaatgaagatgattgtttctgataaaaaaaatttaaataaaataattttatattattgttgttaaatatatgaaaacaatttgtataaattaaatactacatatattaggattactttataagatattttgtacatactttttaagttttttgtttggactacaaatctaattcatttaatcaaaattttttgtttttcaaaatgattgatataaaagtcaagtttgtttagaattttcaagtccctttcaaagtcaagtactttgtctggttagtggtacacaagaaggtaaatactaatgacttgctacaattgagaagaccctacaaaggacttagtcccgacatttgtaagttgtacatgaagcatggagaaatagtagatcatctttttctccattgctctttgacaacggggttgtggcacagattatttcagttagcaaagacggattgagttcccccaaggagcatctttgacatgctatctaccaattttaatggttttggatcttctaagagagggattgttttatggcaagctgcatgcatcgctttaatttaggtggtgtggcgggaaagaaatgcaaggattttttaggataaagcaagaaattcagataacctttgggattctattcatttccttgcttctctttgggctttttgttctaaggtttttaaggggattccccttaacgtgttacaacttgattggttagcggtgtgtaatcccaatgggttggtctaacctagagagtttgcttgtttttactttgttttttcttgtatttgattccttgtagttttgtttttctttggtgggaggattcctcatccttctcttgtacatccttttttatcaatatattcctttgtcgtttcctatcaaaaaaaaaaatgattgatataaaaaattgggaaaaaaatagatgagaaaaatgaatttatgaatttatagtatcccacataaaggggaaatttttagaaaaaggttggataatatatcttaccatttatcttttcacatgtttgattgaacatgagatatgataaaagatgagataacttatcacattccgtcaccaaccatacataagataagatatattattctatttcttattttatcttatgttatatccatcccaaccaaacatgacgtagaattctttggagtatgagcttcaattgttagtctttagtgtgtgtgtttttcctaatataaattacaaacacatcgatgcctttctatttaattatatgatgaagatgaaagataggacatcctcatttccaaattataggcctaaatagaagtcatgtgaatatgagttctattacttttcttccccacccatccccttatcacctaagctaggcccgagttttatgtgctcattcctctctctctttctcttatgctctctcattctctatctctctgcattatacatggtagttgggtgcatctataagataaagtttacatatacaaccaccaccaccacagatggatggaaaaaaagtctttttgtctcctagatggaagaaaaactttaatacaacctttacttgtctcacattcctagttactttctctctttgtacaagattccatcaacaatggtgacaatgtttgagaaaatgtaaagggattttctttggtcaggagttgggtagggaaagagagataatctcattaattgggaccaagtatgcaagattgaagtgaaaaagtgttttggggttcaggaagatgtcattgaggaatagagccctcttaaggaagtgattttggagatttccttgggaatgtgatgctctttggcataaggtaaaattgagcatcagtggaatgcactctaatggttaggataccgacattctagtcaagtagtcacattggtgcccttggaaggccattctataggcttctaggatttctccatacatgctcgatttgtggtgggtcatatagcaagaatttatttttaggaagacttgttgtggggggatcaacctttatgttctcaatttccaaatcattttaaagtcatgttagctagaagttatcttatttatccatctttgttatctctttccctttttcttggaaccttaacttttattgtaacctcatttatttggcaatagaggattttgaaaggctcatgtcctttctctctctatcttgtgtgcccttgtcaatgtttgtccctaacatgaaagcttggtcttgtcttctttagatttatttacaataaaatctttccttttagccctatcgaatatatcgacttttatttatttctctctagaaaaattcatatggaaatctatagtctcgtctaaggtcaagacttttgcttggctagtggccaataagaagaccaatatcaattacttgctataggtgagaaaccttacaaaacctttagtttagacgattgcaccatatatatggggagtggaatcaattgattacctttttgtacactgtctgatgattatggggctatggcacatgctatttagaccatcaactaaaatttcgctgattttcattgaaaaattgggatatctgtccccacggatcccaaaaacaaagagaaaagtcgacttgttgaaaatctctaattttcttcgatttcataataattttttactttttctcaattttatgataattttccaatgttattacgaccatgttagtggtcaatgcttcttaaaaattaaagaggaaggttgggactctaacctatcttccacgtaaaagtgctacttaaccattagagctagtttgcccttatgatatatatatatatatatatatatatatatatatatatatatatatcatcatttttttatatccttaaatacatccaaactaagtattaaaatctgttttcacattttgaaaattaatatcgaatataacaaattttatcatacatatattgtttgttttacatttcttggagtttttctcaatatttctatgagttttaatcaattttcatcccattgatatttttaatccaatttccatttggtatttccgtaaaatccattcaccaatattttcacaatgtttaatattttaatccttgatttagtctagttacgctagattgggttaagtgacatgatgattttttccttcaagggtttggggagtatagttaaaggcaaaattctatggaaaattgtttacctcactttgatttggatggtataacggaaaacaaatgcaaagagtttgaggataagtgtaggactacaaagttgatatgggtacttcatgtatttatattccttattttaggtctttacaactatagctttcaagggaactcctctcaatgtcattcagctcaattggaatttagtgtgtaaatcaaaagggttaaaatagcaaggcttcggtctcttttggtaggagatgtattgatccttatagagtgtaaagtcgcttttcctttgtatagtttcacatggcattgtcttgatgtatatgcttcattagtatattagaaaaaacttatccttcttttcttttgatcaaagtttttatatttgggaaggattcttcatccttcacatattcttataaatccttatcaatgaatattttgtttctgctcctcaaacaactaaaattataaaaacaaccttcttcttgttggtacagtgttaagtgagccttcaaagatccatggttatggtgggctacctaattttaccatatgattaaagggtgctgacattagaatgcatgatatgttgaacttgtttcataggccatatcaattgcattttcttgctgggtaagacatagttatttgtgacctttgtgggattaggtgtcttctcatctcatcacacatgtagaaaaaatctcatttttaggtctttgtctttctgaataaaatttcctttattaaatgatgtgattcacagctttgattttgtccttatattgcttgcatagttgtctaaatgttgaaccctgtaaaggtttttgctttctcatatatctattcttgttcttaaaacaaatttccttcattaagtattacaattgtgatcttgttcatgtgtagattttgggtttcatgtttgtttaattatctgcaactggcaagatgttttactctaagcaagggacttacattagcttgcttactgacaatgattttaaccttgcagtataaggagacgagcacttgatctgcttt

SEQ ID NO: 11620 - DNA, 9276 bp, Vitis vinifera
  Intron number 8 from transcript GSVIVT01022289001 (locus G SVIVG01022289001) derived from phytozome v7.0 (chr-ID chr7 ; pos 18242772 to 18252047)
aaggtgtgtttgggaacaaaggaggtgataaggaggtaatttatctgcttacggttatgaactgcgagtaactcctgaacttcctattttgtttgattctcttatatgtgtgtattcattttattaccaaattgattctttttgacattctcaatatctagtactcagacattcgttactgatttgtaaagttttcccttgatttcattgaccttcttgatcttttcttgtggtgttggagtgatatccatcacatttttatcacatatgtgtttctcacatctctctctctctgtctgtgtacatgtgctactgcaacatcattaggataaggcacaattttctcttgattcattgatcatcgtcattttctgctgttgttgttatctcatctgtgtgtgtggtgttacaacattgttagaatgaggcatggcattccatcacctttgattggtgaagttttttcttgattcatttatcttcatggattttttttttcttgatgttgaaatgatatttgtaacatttttgtcatatatgtatttctttttacttcttatctctgtctctctcttcactctcccttctctatgtgtgtgtgtgtgttgttgcagcatcattcgaataagacatgactttccatgtactggatttaaaggattagtgcaccgttcagggcaacataacaacatccctttggaaatggaaaccaaaaagaaaaatttattcgagagagaaatgaaagatattttgttccaccacagaaaattatttgattcttgcagttcaaagaatttccataatacatcagaacaattatttatgggtttaatgattcctaagagcagattcattcttttaactatctgtttaatggcatctttggttgctaaagttttctcttgattcattgatgttcatgattttttgttggtggtgtcaaaatgatattcatatcatttttgttatatatgtatttctcatctttgtgtgtgcggttgttgctcttgcatgacttctgatcttcttttgatttgtcaagttttctcttgatttattgattttcatgatttcgtgttggtggtgttaaaaatgatattcataacatttttattatgtgttaatcatctgtgtacgcatatcatcttgagaataaggcatgactttccttgtttgtttttttttttttttttgaacagaatgaatgaaaaatttactgaaagaaagggtaaaaattcaacctgcgtcacagttcaatcctggatatttttttttttttttgataagtaagcagatgttatattaaaaaggcaaaaagccacacagcatacaggacgtatacaaagcagccaaacccaaaaaccacaaagagcccacaatcctacctaccctcaattggacgcgagccactctagaaaacctaacaatgaagaggactcctctccaatatacaccctagcccaactccacagattacatacaaaagaatttttgagtttctgtatagataagaatccccccctaaaagctaatctattcctttccttccaaaccgtccaaaaaatacacaacgggatggaagtccaaacctttttcctttttttccccacaaaagaacccctccaactgaaaagcatatctttaaccgtttcagggaacacccactgaatgccaaacaagactaagacaatctcccaaaggacccggaccactgtacaatgtagaagaatgtgatttacagtctcctcttcacacccacacaaaaaacaacggttagggaactgccacccccttctttgtagcctatccaaagttaagacctttccccacgtggcctcccaagcaaaaaacacaactttagttgggaccttgtccacccaaatgcccttattcgggaatacaatatcattcgaagcaacaaggaaattgtaagcctccttaaccctaaagatgccacttcccccacctttccataaaaccgaatcctcttctgaagagattttgtagtcccttagcatgtacagcaaattaccaaccaaatccacctcccaatcgttaaagtctctagagaaactgatattccaacttccttggccaaagctagggtcccaaacttcgttcaccgttgcattcctatgagctgccaattcgaacaaaagggggaaagtttgggacagcgctgcattgccgcaccaatggtcagtccaaaacctaactttggtccctttacccaccttgaactctatgttatcccaacaccaatcaacttccttcagaatctccttccaaactcccactccaaacgtcccacgagcctcattagtcctccaaccaaggccctcttgaccaaacttctccataatcaccttcttccacagcttatcttcttcaaaggcaaacctccataaccattttcccaacaaaaccttgttcaaacgggcaatcctcctaatgccaaggccccccttctccttttgagcacataccgcctcccagttaattaaatgtactttcctttccaagcttccccctccccaaagaaagtctctttggagcttttcaagtcttcttgccaccatcttgggcattcgaaaaagggacagttggtagatcggcatgctggccagcgtgctcttaatgagggtaaccctcccgcctttggagatgtattgcctcttccacaaggctaatctcctcctcatcttctcctccaccccatcccacatcgaggaagccttgtgaggaacccctaacggcagccccaagtacacattgggcaaagaccccaccctacaacctagctccacagccatctcctcaatctcttccacttcgccaactggaattaactcacttttggctagatttatccttaacccagacgcagcctcgaaccaagccagaatccagcttagaaaagtcatgttttctttccttgctttacaaaaaataattgtgtcatccgcaaaaagcaaatgagagatatttagctccatcctgcccctcccccaaaatctgcagcctgaaacgaatcccccgatagcagcccttcttaacagtgcactaagcacttccatacccaagataaagagataaggagagagggggtctccctgacgcaaccccttggtgcttgaaaagaaacctgctggcacaccattaacaagaacaaagaatttggcagtagagatgcaccaccaaatccactccatccacctagacccaaagcccaatttacgcagaatcttcataagaaaatcccaacttatgctgtcataggctttttcaatgtccaacttacaaatcaaccctttctccttacgtttttgccaagcatcaatcacctcgttagctataagcgaagcatccaatatttgtctccccttcacaaacgcattttggtccaatgagaccacccttcctaggaccttcttcagcctatttgtcaacacctttgccaaaagcttgtacaaacctcctagcaggctgatcggccgaaagtcacccaaatcctcgacgcctcctttctttggaataagaaccagaaacgttgtattcaagctcttaacaaaagatttttgttcataaaattccttaaatagctccaggatctcctccttcacaaagtcccagcattcttgccaaaaagctactgtaaacccatccgggcctggggctttgtccccatccatctccaacaaggcagaatgtatttcatcttcagagaaaggtagctccagatttccagcttcttgactacttaaatgacttagatgcagcccctctatgtcagctttccagcctgactcttctgagagaagctgctgaaagacattaacaatcccctccttcacctcctgctcctctgatagccataccccattaatcttgattctatccaatgtattatttcttcggtgtgcatttgccattcgatggaaatagcctgtgttcctatccccttcctttaaccaaagttccctggacaattgcctccaatgaagttcttccagcagcacccacttctgatagttttccttggcttctttcttcagctctgtctccctttctgagaggatcctctcactctccaccccatcccagtgctctacttgatggagagctaaatttttgttaacttccaaccgaccaaaaacttccctattccatactttgatcttcttcttcaactccttcaactttgaggccagtctgaagctggcagtccctctcaccacagtctcctgccaccacccccggagtaaattcttaaacccaacaactttcagccacatattttcgaacctaaacggggatggacccctcctaagacctccgcactctagcaatatgggaaagtggtctgacgtgggtcttggcagcctgctctgaaccaccccactgaaatgatcaagccaattctgcgtcaccaaaaatctgtcgagtctagcccacgactgactccccctacccccattccaagtacacctccccccttgcaaaggaaggtcagtcagctcaaactcatccaccatctgggcgaatcttctcatcgccccagtagtccttccttgcctacttctttccccttgaaaaagggtgatattgaaatccccccctaagcaccaaggaacatcccacagacccctaatcgcccctagctcctcccacaaacactccctttcctctctagagaaaggtccatacacgcctgtgaacatccaacaaaaaccatcttctacattccggactctataggaaattgagaattggcccacctccacatctaacacatccaacgtccttctatcccaacataccaaaatccctccagcagagcctgaagcttctaaggccccccaccctaggaacctacccgtacccaagcttctcaccacaccctccgacatagcttgaatttttgtttcctggaggcagaacacatccaccctctggctcctaatcagggccttaatcaccttccttttggagctatcattagctccacagacattccagctcagaagtcttaacttcataggacttctaatatttgacaccctcttccttgcctgccactaacctgccttttccctccttcgtagttgatagaacactctaatcttcttagctccctctcaaatttagatttttccaacaaagacttattgtggattctttcccttctctttctaattttacccagaaaatccatgatctccttctccagtccctctgtggaaaaccccaaaaaattgctgaatctagccaaatcgctttcctcccagctggcctcctcccaatcgctaccttcatgaggcttaggttggactggtctcaattcctctccgcttactatattgcaaccattatttgcctccaccagctcccaccgagaaacggttttaccctccgtgaaacccgaacattgagcatacataacggcgtttccccctgaccagcctcacacacagccccagaatagtcgtaatactccctttcaggagtccgaccatgaaaaaaacagagagggggagagagaccagagactaatgttcctttaaagttaagaacattcccatacctcgaagcttcctcaattaaggccagatcagtcttcgatttctccatagcttggctctctttttcaaattgcttacgtaaatcatccttctcccagaaaatggaagactctgatactggccttcccacgacatatggatctactctcactaaagaagaggcctctcccacttgggctttaccccctggccctgagtgatactgaccccttaccagcccaagatccacatttattccactatccttggtctgcccatgagccatccttgtgcacagcccataactactcggcccagccacactgagagaaaatgggcctggcccaaaggagccaaaagctaaatcatttgggctagggaaagggacctcaactgggcccttcttggaagatccacccagcactggcccgcttccactggtccggcccaacatcccatcatggcctcgaataaagcccaaaggacgccctgacccagacgactgacactgcgtcccatctgcagactgaatcatgacctcgtaacttgtgtcgttgccctcctccaccacgcgtttccccgcgcgtgttactgcctcaccccctacctcgacatctactgcagctttcttcccgctttgatcagtcggaaaaatcctcagaagcggtctgatttcccaccacagggttagcacgtagcacctctcatcaacccaaatttccaccgcactaggaaggtcgtcaccgtttaccttcaccagtatccgggcccactgcagctcctccagcttctccgtttgagtgtcgactgccaagaaacccccacattcctcccctactctttttagaatgtcccgatcccaaagcgataccggtaaccccactatcctcacccaggcctcgcttctagcttccccttccatcacacaccccgtttcggggctccaatcttccacgcgtaagggagtccccccaaccaacactttcccagatttgagagctttcctagcttcttccaaccactcaaactccagcaatatcttacccctttccagttttgccaaccctagcttacccctcaatccccacatacttgccatttgggttccccaccctttcagatcgtcacctctccctgagtttggattccaaaatccaacgagacagtggttcaacttgtttaaattactgctcaaggcctctttcctaatcttcaccttcgccactgctttacctttactccttggcgtctgttccacctccgcgaaggatttcctcagttccggttccgacaacctcacatccaactgttgcctttcctttctatccatgacaacccccaaattgcgtaatgtcttcgccattaaagaccatcctcctttcacccctcttcccttaggaatgaaaatgctgaaccttttactttccaagtccaccacgcccaaacgtagatagcaaccccctttattcgcatcacgcaacagcgaataggacctgccgttctcttcccaccttttttcccatttttcctcactcttctcttctaaacagaggagtaagcactccagaaacagccccagactcaccggtcccaacttgacccacgaggagatccctcttttcctctccaccattgtagctttcattttacctttcctctcctccactacgacctcgaacaatttcgattccactccaaagttgctcaccctccggcttttcctagtccccaaccatgtctcaccctctgtcccctcgcccgcacccacagatttctctgccccaccaactctctcttgctctctctctctaactttctctctctctctctcctccatttgtttccagttcaatcctggatattatgaatagtttaatcctatactatgatttttcctttttattttttggaactttttttttttttcagtagaaaacaaacatttgtccttccaaggcaacctagagaaaagaactagaaagaaaagattttcagcacaaaagatgtgagtttggtcactgtaaatgctagcaatgaaggggaactcagataaatcctcggggagatagaatagagaataaatctcaacttgtaggctctactgcttaggaacagttggtcctaactttgagtctggggcatatacgatacatggtttgggagggcttcatgtattcatggtttcctttagtcctacagagtgaggctggtgggtttccactttgtaaaaagggaattctaaaatgtgatttcttgactagagttcctcctagaaatcattttttgaacgatctcccaccaagaaacaaataaatggagaaaaatctgaggaggcttggtagatgctctctagaggttgatcttgaggtcatttgtgtataacattgagaggagttgagtccggtcttaaggagatttgtgtatgcctatgtatatagttctccttgtatggtggtggtgtctagtcttactttgatcaggttttgtatgctgaggggagcatctctcatccttctctcgtacttttcatcataattaatatatcttttgtttctgataaaaaaaattgctctctagaggccatgatttggcgatcctatatgtttaaatgcaatccataggtatttctaatacgattatgcaaaaatgaatcactctccttaaaactccaagctgaatgctccattcttaatttatagctacaaattaatggaggttattagtacttcatttaatgaatctgcaataataaaacatcttactagtgcactatgaatggcattgtccaattgcacctcaattccttcatgaaagtatttgaaagtacactagagctcaaaagccatactcttgaattgttcccaaggataagacaacttgagcggcgtgtaattcctttgggttggtctagtctagagagtttgttcgttattacattgtattttcttgttttcgtattcttgtagtttagttttctttggtgggaggattcctcatccttctcttgtacttcttttttctatcaatatattcctttgtcgcttcctatctaaaaaaataagacaatcaaacttagtagtacccaccatctgcaagaacagcgtaatgacaactttcttaaacagtcaattgagttaagaaggaaatgaaatttttgatagtaaatcaattgagttaataaggaaatgatattccatggttcctaacctgtctatgggcagatctcatagtcaaaactaggaacagagtaagaactaatggctttgaagattttaatggcagattaaaacattgctacttcttcctcaacccccaccctcccacatgcacacaccaacacaagcgagtttttttcaaacttcttccatcttatctaagaaaaagatggttgtgtttctgggttctacctcaagtttgcacaatcctggaaaaagaaaaagaaaataatgcatgtatttgagcgtatgtcaagccgcatcatatcatgtacctttcccctcccctcattttgtggacttgtgttgtttagctttatatgttcctaggtcatccactccttttccctttctcctccattatgacacatttaaatggatctgaataatctgaaatttatcttattatataattttttgtgtgatttatttatttaaggagtctgaatgaacaatcatgttgtacaattttcagtccattatacggagtaatttgcaat

SEQ ID NO: 11621 - DNA, 7754 bp, Vitis vinifera
  Intron number 1 from transcript GSVIVT01031739001 (locus G SVIVG01031739001) derived from phytozome v7.0 (chr-ID chr3 ; pos 3947704 to 3955457)
ttcaaacaagaaagaagtaaaagttgcataccaaagtctgctcagctaaaggtataaactaagccccaaaaaattatcagaaacaaacaaaatcaatataattcgtattgatctgttctcaattgtgtagatattattcgttttgcacccatatgatcctcatggttttaaaaagtacagaaaccatgcatttataactttgaaaacttttttcttatctaatatgaaatatcataattaccccttatataaatataatgtccttgttgtgttttatgaaattgcagggtcaagatcaaatatgagggttagggtttgggaaggcggggtcatgactatcatcattgccatgcttgccatcatttccacagaaatcgcactctcgcaccacgatgtatagatactgttgctcaacattcttcccagtatatttagttataggaacaaaatttcacaaagctactataaaatgcaaagcacagtagttgcatgtttctttggcacccaccaagaccacttataaagcaagatgaccccagcttacatatttccatgataatgcacatcatattcaacaaaaggatgcatgtttttaccatggtcataatatggattcctcaaacttcttttaatgagtccaccaaaagtaactgctagataaattattaggtaatcatgattagtgccaaatgatactgacagatgaactaataccccattaattaatcaatcaaggtctttttggggtgagagccacacatggattgcagcagcctgcatgctaattatacatcatctcatttttacaagacaaaaagacaaatacatcacttaccatcatgaagtgatctgagttatgacaatggattttctagacaagtgaacaatgccttcaataattaggaaggatcatgaaccttgaagggtaaaaatgaatgactaattaggaaatactttggtggtaagaccctccattttgaaaagcaagcttaaaaataaggttaggtcaaatcagggataaaataatttattttttaaatcgaagttaaaattataatttcaaatgattcatattaatattataaaagttttatcagatatgaaactattaatttaataccgattataaaactatccaactacaaggtgatatgggtatgcacttacatttaagggttttatataggtcaatgcctgtactattcttttatatcttgatgcaattccttttatttcttagtggattaccccaatcccatattgatgctagtgggcccatgcaccttgcctttcctttgaaagtacttttaataatggtcttgaaaagtcataaagttaaagagatgactattaattcttgtgtcccttttttcctagtttagaaaagtaggtttttatattaaactcttagattaatattcaaagttggtttctcaaaagttattttactaaaaagttcaaacaaaaaaataataaaaaaagcttaaaaaaagtttgaacatcctatggacatttgaatgttcttctttgtaatatttgaatgtctacttgtatttttgtacttttagctctaattttcaacatttatcctaattttgaattttttgacgcaaaatggttatttcttatactctaatacatccaacacatatataccttgaattcaaatcaattttgaagtaactagaaatcgaccataaccaataagactttcaaaatatatgatgtattagatttagtgcaataatgaaatagaattgccaacatatacaatttaatacatatatacatccatactgatctgatatcccttttgatagttttatgagatgcccttatctctcaaaacataacctaactaaatcctaatataaaactatcttaaacattatgcatcacttgcactactttcatcgataatcctattatctgcatacattcaaacaataaacgtgtgaagaataatacgtgacaaaaaaaatgtatataaaatggtaaagtatctcaacatgaaaacacaatcatacatatcactttcaaaatggttatcaaattcaactttatttgtttattttatcaaaatgacaaataaaaaatgtggaagtaggttagagtgatagagacgagagtaaagcaaatgaaagatttctaaaagagggaaaacataacaataatatattgcaaatcgaagtaagatacatgcatagagcactagagagagtgaataagaatatagccaaatcaagcaacaagatacaaccaaaaaccaaaatcactctctcaattaaaaattgaatgctcaagactagaagtccatatcacaaggcaagaatgtacatgaacttagatatagctgtaaagcaatctaatacacatctatcaaaaattgcccatttatgctttggattcaaaagtttatacccccaatctagaatttatgatagtagtgctagtaaccaaggaccaaaatattaaaatttactaaattattggtaattgaatttttgaattttatgaaaatattagaaataaaataaaattggtggacaaaaattaattaaaagttgtagaaatattggaaaaaactccaaaaagtggtaaataagtaataatataaagtagttttattgaaaaagaaaatatttatgataatatttgtaatatttaataataatatacataacttgaaaaacacatttaatattgaaataataaaaataatgatcaatctaatttagatgtataaaaaaaagcaaaaaaaaaaggatatatgtatgtttttttatttaaaaatatttataattctatttataagtttaagtttataaaatatactaagtatatttttatggtgatttttatattttaacaattagttaaataaaatttgaaaataagataattaaattaaattattttaatattttattttatttttatgaatcaaaagatacaatgaaaggggtacattatatttatgcataaatatagcaagggcaacaatgcctcagtggcgtggatcgccaatgtcatgtgggagggcttaggctcttgttccctcctctttcattttaattttaaaacttccctcatgtagcttgtgattaagtttcaataaatcaatgattagatgggaaaattatgagaaaatcattaaaaaaaatgaagattttttgtatggacatcacaattttcaggtccctactcaacggctctgaactcttcctctttagcttcaataggtaaagtaacatgctttacacacttagaccaagaagtctcattaataggtgtagggtactacaaaacaaaaaggtcataccaagagtttggtgaaatgttagctaaagaggagtcatgaaatactaaacattatattttatttttctttttcaatgaagccttaaaatctaaacgatttatttatttttatgatctttctcgtgacaaaaatgatattgtatcttactttcatctttttgtcccttatgcatcatttctttgcttattttcattacacgtgtttttctgaagtaacttttcatttggacttgtaatggtgagatgagttatatcaaacttttttgttttgagtatttcctcttcttcaacatatgacaattagttcattcatctttctttgtactttaactcgttttaacacgaccaaattgtatagaaaaaaaagtcattagaaattgtcatgtccattcattttaattctgtagtgttattgttcattttcatatgttcacaacactactatgagtgtcatattttattgtcatcatttttgttagaaatttgaggctaatccaaactatggtaatcaccttagagggggggggggggggggtgtaaatagggtgatgatttttttttcacaaatttaaactatgtaaaaataagagacaattatatgcaaatatataataaacaaaataaacacaattgcatataatttaaaagagttagagaagagagagtgcaaacacgagagtttatagtagttcggcacttctttgcctacgtccactctcctcaacctcctaaccgagtgagggttccactatcttgacgcttcaaccaaacttccaatctctttacaattggattatggttccaattcaccctcttggacttttggcttcaagcaccctttgcacttcttcaagagatatccctctcttgaacaacctctcaagggatacccctcacttgagaaaattcctcacaaagatatacaaataatgatctctcaaaatcctagtaatagaactttaagttcaaagatataagaaaaattaggattgaatggtgcactaaagatatgcaagttttggaataatgatgcactcaaaaatactcttccaaggctcaaatataatcaagaaagatttggaaaggtttagcttatgaaacaatgaagtttgaagtctttttatagaagaaaaaagtcatactagccattgggggttcgatcggtcgagctaggggtcgactggttgactagccgttaggaaaagtgaccgttgggcctcaaccggacctcaaccagtcctcaaccggacctcaactggttgaggttcaaccttgaccgggaagagaagaccactaggagagagataaactttttggcctccctcaaccggtcctcgacaggacgagcacaaccggtcgaccggttgagccattcttttggctcaacactcaacctttttcaatttaaaaccttttaacacaagtttgaaaatcatttaacacaaggttttaattgaaaacatgaaattatccaatttttaagatatttaaaccaatattactcttgaatgattttggtgtataaataaagaatgaaatgcatgaaagtcctagtgcaccaacaaccttacaaagagatcttaagaagctttggtcttgaaaaactcttctctttgaggtggtcttcttcttcatgatttctcatttgacttgatttgtctttggattgccactttagaagtcgtcttgcctaatcacacttgaaatataatcattagttctaaactttattttgttatcatcaaaatcaagattaaccaaaccttggtttcataattttgattatcaggatactggaaaggcatttgaaagttgttgacaactacttttcaatcaatttaatataactcattacattacctaaatctagattgctcgatgaattacaagagtaattggacattttaaaatcattagattcatgctattaaaacgttatcatttttcatataaaactttttattttttatttcttttaaaagtagtgtttgtaggtgtagactctcttaaagtataatctaaatccttatagctaagtttaatatcgatttcttccttccaattcctaaaattttcccaacttaaagatttaatattgcaaaatagctagtaataacaacaagaatccttgctacaaaataaaatttaattcttaaaattcgttgacatgtgatgaaaatatataaaagcataccaaaaaaatataactattacaaaaatcaattagatatcatttcattcataaaacaaatgatattataatttttctattgggttgaatcacaatcacacaatataaaattatgttattataattgttccattaagttaaattataatcaaaattaaagcattgaaacataaagaaatttaacatagttgggcaaaaaacttttaaaaaagaaaaagaaaaagaaaagaaaaaacttcatcgacctataatttttcatctcatcaaacaatataataggttaaaattgatagagtagaaacttaataaagtaatattacttttaaccttcatccatgataaaaatactagtttgagtcactttatcaaccaaattacaagaatttcaagttattactctcaattgattgaaggaaaaaatgtatggtgagtggttgttttcaaagtaataccacgttagaaaatttttgagagtacgtatcgagacatcaattaaaattatatttatcagttatgtttttccataaaaaaccattttaaattcatgtaggctatgctttcgttcattctatcttattaaagattcatgtaggttatgctttcatttattccaactcaaaaaaaatttagatacgttttttattttccttgtactttctataccatgtgattataattatttttattattgtgaatgattaaagaaaaagaaaaagaaaggtagtgtcttcgcattatggaaatgaaggaatttttaagttccctacatgataacgttagtcttccaatataagaatcttggatgccttataaattggttcatgtaactatctgtcgatcttttcatatacatttctaaaggaatgaatttataataaatttaaacataatcatgcataaccataaattacgaaaaatgctaatagaagctatatgggtagcaaagtttgacacaattcaccaacatgttatgaacccaatacgtttttcataggtttggattaaatataaattgatttagatcaaatttgtgttgatgggtaatttttggttaacctacataacacaaatttgacctacattggcttatttaaatttacgctatcaatctaattatattttaaaaccatttaatccatatttgacttattttaaatttatttttgaataaataggttaattgattcataagtatgtttggttgaaacattaatcataaaaataggaagaccatcactttgaaaatgagtaacttaaaaattagctcattgaataagtaaacaattgaattggattcgatttgatgatactatcaagatattgtcggtcaacaaattaatgtgatttgtaaaattcaataattattaagaaataataggattattaaatgggctaaatgagttacatgacgcgttatttgtttaataattagatagtatttgaagttatatttttaacacggttattattcatattaggtttaaattgaattatataatagaatatctagattttgacactacaagaattcaacctatcaacacaaattatcaccctaaaactatattttttcaaatttaatttcttaatttttcttattttaattggtataattattatactttatttgaagttggtgactctctaaaaaagagaaaaaatgataagaaatctttagaaatataaaaaataattgatatgaagtctttagaatggaaaccgcaatttctaagggttaaagatggaagtttgaatggaactttcctattaaatctgaattaagaaaatcagaccaaataaattgactaaaaacaaatggaaaatgagataaaattgcagtttcctaacactcatcattccaaaaactttaacaacgaagattgatggagcgggtggcccaccttaaaacgtctttatcatttgccacgtggcttgtaaggggacgcgggtcccagcgctacgccgttatcgatactgtgatacgtaagagatctcgacaccctcggctcatttgatatttcagttgcttcgaaccagcaaaatcctcgagtctctctctctctctcattcctatctttctctctccaggaattagggcaaaaccagatcttaatccacactctatactcttacaccgcaaccacatttctcacaatttcccgtttctgcgccggagatccaactcgccggagattgatccgtcgtttgatgttttctctctgtttctcgttgaaattctagt

SEQ ID NO: 11622 - DNA, 2770 bp, Vitis vinifera
  Intron number 23 from transcript GSVIVT01008242001 (locus GSVIVG01008242001) derived from phytozome v7.0 (chr-ID chr 17; pos 4221973 to 4224742)
tttagttgaaaaccgaagtgagtgtccgtttgtttctactatttttttcccctcatgcgtttgtcttttactcttgttatcagttagtatagtaaaaaagaaaatatttattagacaaaaatcgtacgaggatggagtgtttcctacaaggatgaaggaaaaaaggaaaagaaacatcaaaataattatttaagcatctaaaaaatttatgtggtaggactggcttggctagagcccaaaacatatatttgaacctaggtagatgatgctggtgcaatggaagaatccctaggactgagttctgaaatatctcttgaaaggtgattatactaccaaggatcagtgttaagattcccagcctacttagtaacatgggctaagtttcattaactctaatttgttcatttacttctatgcaaaaacttgattttctaccattcaacttagatcttttagacggtattagcactgggttattgtttacaatcttgagaagaaagctgtcagaactcatctttataaaggaggttggatgattgttcaagatttcattttgttattatatggctcaatggtttggcatcataagtcattttatgttgtgcttgaactttgatcgatagggaatgtattttacctaagaaaatgatgagaagaaacaaagggggtttattttttaatgttgggggggggggagagatttcattttgttattatatggctcaatggtttggcatcataagtcattttatgttgtgcttgaaccttgatcgatagggaatgtattttacctaagaaaatgatgagaagaaacaaagggggtttattttttaatgtggggggggcaatatacggtgtattattctgatgataaaaaaaatgaaaaaaccatcaacctgtcagggctttgggtcttgagatccatatttatggaagtagtctggtggcatgtgttaactgtaaacaatttataagtttttgttgtactaattatagtagattagtcaaattttgcgataaagtagtattttcttctataaccattttagttgattttttttttttggttagttcttaaaattttcaatttatttatttattttatgttgtagaactagatgatctggattagggttttccaggaagggtttggatttatggttgtttattaagttatatggaaactaaatcagaattaagaatctgattgagtctttatgtaattgtcgggaaacaaaatgagaatgaaaatgattgattttgagctattttctaataatatggaattaaaataaaatgtatggataatgaccttgtacacaacaaaaaaaaaagggtctatatttatttattttcaaataactcttattttgatgctatgttaatatgactttgtttttttttgtttatatatatatatataacatatcagggttattttttaataaatcctttctctttattagataattttaatgatgttaaaatatttaaatatattaaattattagataactttaatgatctttaaaatatctaaatatattaattattaaatgacttgatgactttaaatatctaaatgttcaaacatttatgtttaaatctaatgataattatttatttttagatatttaaatgtataatcccactatattttgaggaattacaatgacattccttaagttttacttgaggaatcccattcttcctttttcggggaatgggtttgtttgctttgtgtgggatgcactctttttttattctcgaagccaagtaaataagggaatggaatctcaatgggagtgataaccattcccttcatttcatttatttacttgcttccaaaaatcaaaatatgaagtgggcccacaaaatactaagaatctcattccatttttttttaggaataggttttcttagcttattgtgaggaatgtcattttgattcctaaaagtatcatatggggccacatttttatatattaaaatatttaaaaaataataattataattagatttaaaacataaatatttgcacatataattatttaaagttaaatttaaatatttttaaagtcactaaaattatttaataaagatagatgaattattagaaaaataaccttgaattgttattttaaaaaataaaaacaaagtcttaatataatattaaaataggaattatttaagataataattaaaatagatcttttttttgtgtaaagtcattataagtacatttcattttgattccttattgttggtaaacaactcaaaatcaatcattttcattctcattccgtttccaaatagttatgtaaatgttttaatagaattcctgattccgattcctttctcattttgattccatttcttttcgattccatttccttgtaatttagtaaacatgccataagtgtaatgagttgatttcattcccagggaatgaaataaacatgctcttagaacattgttttgctcaatttagcctgttgagctcatggttataccacggaaactcaatcttccatttttagacgatctatgctatgtgaatgaatgttaaaatgagacaaattttactgttgtaagcagaaattatccttgttggaatttgggagacatcacactccatagaattacaatgttgtcatatgattcttggggaatgaatataatccggacctctcattaaatcttttttatttttattttttaacctgtaactgcagaaaagcatactaaaaagagacggcgggctgtggca

SEQ ID NO: 11623 - DNA, 12238 bp, Vitis vinifera
  Intron number 3 from transcript GSVIVT01011225001 (locus G SVIVG01011225001) derived from phytozome v7.0 (chr-ID chr1 3; pos 9804062 to 9816299 reverse strand)
aattagcttcagaatccttctatggacccacatttttcacatgcatccctactcgatggtgagacttactttttaatgtgaaaaagttggttttgaaaaatttggagtcgctacttattttattttattttattttaaaaaggaaataaaacaagaaagaaaatcctaagaaaagtgactcctaagttttggaaaagcatatcttcgaaaagcccgagtttgggtctgaggattaggttacctattgggatggtacctcaaagaggtagcacctctctaagccttaaaaaagtctctactagctaaattaagggaaatgtggcaattaatcaattgattataagtacctaggtaggctaaggtgattttaagattagcatgccaaataagaaatcaaatcacaagcataaagaagaattagggtgtgtgcttggactgcttctcaagcactatcataagacatcaaagttagtgtagaaatatagcacacaacttgtatctaatcagggcaaatcaaacaaacgtctagaaactcaatagcataatcaaacatagatgtggatcataatgataagcatgttcatagaattttggaaagtgggtgatagagagcattcttgggtagcgagcatcaatgcctctatataaaacaaggttagctcaataataagtataaacaatctcatatatatcacaaagaggaattgaaatcaatcaagtatcaaacaatcatcttatcataataaatatcaaataagatattaagaatgttggacccccaccaaggtccaaattactttgcaagaattggttcaatgtgttccattatttggaaccatgaagtttattcatgcttgtaaaaaaaacaagaaagtcaagaaaattagctgaaaacaaagaagatgcaagccaggaggaaaattggcagcaaggagtttgttgaaatatgaattttatgcctaaaaaactcctaaggatgggattttaaagaaaaatggaattatttagttgaaaaaggatttgaaaatttgattcaagatagtaaattccgaattaaagaggcaaacagatgaagagatgtgcaccaagagggccatataggagtgcaacttggggatgtgactgtgactgcactgccggtggttgcaggtgctgctgttattctgaatttcttctaacaagcactgagacttcttctagggtcaccaaagtggaacggtcttcctgagacaactatattgttataccaggaagatatctcttaaaattaactattgttgtaacacctccataaccagcattcgtattcactgtgttctgtatttcttaccagtttatagttagactgttcaagtagacatctgagacaagtgtagactagtattggctggcttcataaatcaattattcaacatctggttagatcggcagatttaaagattttctgctaggcctctatttgtgggcatggaagctagcatctacttttccaacgaaattcgagatatgcctattgataattctccttttagcttgtcaaggccaccttcttccatggaactaggctcacactgttcagcatcacaaaccttgcagggtcctttaaaaccatttgacaagatcaaagtgaattcaacctgctttttagccttccgattgtggacattctgaagcaatgtatcatagttcgacaaacaaggatcatcaaagttgccataatatttctattagcatcattgtggttctccaaacaaactttcaatgcagtgcttttgagcctcgtaggtggaagagagtggaaaatcatcatttataggagagtagagctctttgggagccaaggacagttgccaacccgtatttacagccattaaatctgacgcctttagtgctatgtagtcagaaacattactgccttagaatatttttcccgaatctccaaaccatgaagtcgtaggggttctccaatctcatatctgatgatgaacacttggctaagggcgcttgggatggtgtccaccataaactcaactatgccagcattgggttcaactccattggtcacgcgtggttatagaatttctttagaatggaccttcttatgagaaagtggagccatgtatgacatcactgcatcatgagccattaatggtctagcaagagtaagctttccaattttacaatctatctctgacaacaattgccagatattggagataaaggttgaagtattcaaagatccaccggaatcaatttacgttgctgttgctgttactgctattgctcgcatcagatttgaattattcaaagatccaactgatcgttggtttacgttgtagatgtattatttaattttcaaatagttgatatgtaggaactggaagagggttactgaaagttctctatataatcatacacgctgtatacactaaagtatgaatggaaatatattttcactctttcctctgttaagttttacaccagacaagggtcgtttcattaactagaatctttgcatgctacttagaagctgctagctcctgggccttttccatgctgaacataaaaagtttatgtatttccatgaaaacaactctatacactgtctttcagtgtgttctgaaccgagaggccacacacacacacacgataaatgcaaaccgagaaggatagcgacagtgagaaccttttatagagatgtaccttgagaatttccaaaatgagcttctgtgattgttgaaggatggaaaatcattttatgtggtttggctccggacatgtcttgcctttgaaagagggtattggagggttgaaatcatctagaagacccttagttgaaacataaaaaataaaaaaataaaaaaagacatggaagaacatccccaatcataatgaatatcccacatttgccggaaaggaaacctcactgttggacctttcatgattggcctccatcattaacaatgttcagtggaaacacaatcaatgattcacatcagtattcttttaatctcggacaagattactcatgaaaatgctgacctgctcacccagtttcaaacaaaactgttctgtattgtcataccatatcttcttggcactataattatatcgtgccatcagaaaatgaacctaaagtttcatatgattttataggaaccacgacttttcaagaacgatgaagtttccatgcacattactcccaggcttcttggagttccttctcctttatccagttccatccagcaaagtcgagacattcccatccatgcagaaaacgtcctcatcatcatcacaaaccctgcgtcttttgagctgctgaaaccaaagtcatcgtcgggtgaagaaagaatttcaaatgccaattttttaccagacccagtggcagcaatcccggttgaatcttggcccaacaagaatgggcaaaagctccaaataaatgcttagaacacaaggtacgttgtgagttgtgagttgtgagccatttgaaagcatctactttccgtttatgaagcacctgtccccaaggattttgaacctgtttatatctcctcattctttagagaaactcaccaaatcccaaggaactcgtgtacatgcccttctttcttttcaccatcaacatttcatcatcatcacactcgatgcccatgcatacgtaacttgaatagcattttggctccagcatctttgcatttcgatacaatcaatgacaaatgaagccttaattaattgaccaaatggttcaaaaatctgtcaaaagttgaagttctgtcatattgaagtgtaagttccccatagatacctctccatcaacagcttcaaatggtcattgaatacctcccgggactgcaccaaaagcattggattgaatgtgtaatttcttctcaacttccaatggcttaaccatcacaagtcttccgtgaagaaggtgaccagagagaaagatggtgctcggcacatacattgcatcataaaatttgttatacacctctagaatgccagtaacttcaaaaccttcatcctgtattggctctgagatccataatgcaaggcaagttgctgtttacaacaagaatactaatcattcaacccccaatggaatgagatgcaagattgtcaatacgaaaatctccgcaaactaggcttgttgtcactgccgaactcataagtttaggttcctcaaaggaagccagacttacaattgctctggggttgcaaggatcatctttccccatgttgggcaaacaccattcaatcctatcttctggttccatggaccgcaactgtgttgggatacagatctttccccaaatcctttccaatctggcaacaccaacataaatgatatcacccttgcagaagctctgaacattcccaattgattttctgatctcggtatggcagtcactacttctgagtagagtatctcaacaatttcatgaacaatgaaacaacaacaaaccaaattcagaaactgtgcccatatgaaaaccaaaggcaatattggctaaaacccttctccttgagggtatgaatggtcatgggtcaggttaccactactacaaaaaatcaaatcaatggcgcttgatttcgtggcccttttcatatatgtcattgtttatcaataaaagaggttaatattggcgcttggggtagaaggcatgtttttggtgttttgtggagagagataatggcgtttctaaataaaatggcgcattttgaagtgtcattgaagcaagtatggtaaaccttggcacttgtaggaagcgccatcttctctttattatatatttaatccatttctccctcattcaataaaatacccacaagccacaaaccccaccctcaacctgagatccacacagaaactcccattgtaagttgtttgatgactcaatcggcaagctacaaccaatttttagaaagtacaataacaaatgcatccaacttgcaccagcatcatctttagacatcatcattgagaaggtttgaaacccttgtttccttgaatcccatccaccaaaaattaatctaggaagaatccgatgagtaaccatcggaaactccatcattggccaccaccttccttcgttcgatcattgtggccctctataacccaagaccacaaccaaggaccgaaatcgagagttcactgacaacagcaataaccatcgttgtggtttgatcctcttaatctctaatttattcaagtaaatatctttatccaaaatgttgggatcacttctattgattatagtgcattattattctaataagggtctttggagttgtgcaagattgagtttttgaagttgtgcatgttagggttttcaaaactatgatggtttgagaagattgtaggtagagagttcttgtttctgttctttgggttgcaaggtttgtctctctctcctttcattttttttttctttctgtgtaaatttgtttgctctattgtttgattatcattacttcaccaactttgattctggttttccaacctcttccacatttttttttttcattcattgaatttttttttagggttttcaacatacgacttctagtttgtgggtctgctttgttaatttcatttttcctagggttatcattgcttccgttaatgaaatgccaatttctccattatatttgttgccctatgaagtcttctttttgggtaaattgaagttgcccaggagacttgttttgtatttttggatttcttgctccatttgctctgttttatctctctctctctctctcccacacacacacacacatgtttacttctttggtgtgaatacttcgtatgacaaatcagttggttaaagtgccctttgtcattaatagcttggagccatgaaacaacggcgattcagacctcacattctgactgaaattgaaacatggtcccaaagccttccataagtccgaataaggtgaatgatccatacctaggaagtttctgagaacgcatctttttagttggttgatgatagatgggccaaccggccactgccttggatggacacaattatgttgttgctaacaagtccactgcttctagctccagatgagatcatcaactccccccattttcaaccaacaatgtcaagagaagaaagaatattcctcatcaagccttattttgagtgtttaagacacaatagtatgttatataaatggtgcttgaaatcctgtaaagtcttttaggattagtaaataagaaaaaacagtactcccacaaaaaaaaaaacacacataagtaaacgaataaaaaaaaaattggaagtgaaatgtgagacaagaataagcagtcctagtttcttgtgtaataataactagtgtgttttaattaactctagattaaggaaatggtatttttctgtttataataaatgttatatgggggttttactttccaaattacattatatatatatatatatatatatatatatatatattaagagtctattttgcacagatcatggcatgtatgtatggtctcttaatatatatatatatatatattaagagtctattttgcacagatcgtgacatgtatgtatggtctttggtttaagggaaaatttgcaataatggagtggcattatggcatacgtacagaaaacatacttttgaacatataggtagtgttttttaagttgttatattctcttggtgtgtgacttcttagaaaccccatacttgcttaggcattttctagatatcttaatagtttagaatctagattatctcataattagcatctcaatcattgcttgctttaatattattacatgcaaagtcttgaactattaatgtctcatcattattcacttgatgtctcattcatcaaagaacaaggaatcattgtttttttttttaactcaagtctcatgagtagcccttccttcaacatctcattgaaatctatagttgaacaccaaaaccaacaacaattctcaacaaattgagaatttggaaagaaaaaaaaattaattgatttagtaagttgattttcctcatttctctctcacttactctctagctgaaaatgtgacacattatttatttatttatttattctctcttaatcatatggagtttacatggaatttaaatagattttactatctcaaccatctcaaaaatgaaacaaattctttttccattttctaagataatattaaacatgactttgaatgtcaaattacaatttgatgaattgtaaaacacgtgaatcatgatgaaacaacactcttaacataaatgtaggaatcaaatttcattgaatatatttctaacctaagcttttaatttcattcattataatcaagacccactgtttttcattatttgttgatttatttatttatttccactctatttggcatagctagtaatatcaactcaaatcacctctcttatcttgtgcctagttggttctgcctttcagcactctatatatcaatttctataacttggatcattacaagaaaaaacttaatttgaacattattttatttaggccttttcttcaatatctttgtgtatttgattattcatattaagttgttatattgttagtcaaaaaatagaaaccaacatatgttaatcctgaacttatgaacctgtttgcactttctaaaagttctacactaaaaatataaatgtaacttggtatgtacttttataagtctatattttatattgtagaaaatttagttcaaagaaggatgttgattcaactatgacttccattatccttttgctttatcttattcttgttacttctctaattccaattgtggtttgcaattagctaatttattgataatatataagaggaaatgaaaaactacccattgtacaaactgctaaaattttcatttgttaattgttgatcaagatgataattaggtaatatttctcctattctttttaactaaatgaagttgttatctggttgaattattaaaagaacttgttggatggttgtataaagagtacccaggatactcaatgagggagaaaaaagattgggaatcttttgaactttgttcctcttatcttttttattttaatttttaggattttatcctacaaaaatatgtcaataaaatgcatgatgtctactgttatcattagtcttaaactttttgtacttgctaatttgtttaattatgaatttttatttagataaatataatatagtacttttccttatcattttgtatatctatatatggatgtagtttaatatttattttcaaaccaaaaagaaaaaaagaaaaatttaagaaatgcttcaaaagaagtaggaacaaaggaagatgttagaacatcaaacggttcctcaactctttaagtgaccttttggccttcttaaatttaggaagtattatatttctttattaggtaagttggaagtagattaattttttatgcttataagaacccaaccttattaaaaacaattttgaaaattgaagcttcaaaccttgggggtggttggttggttctaagttgtagtaggaatttacaacatttatttattggtgttttgtttatgaaataccaagaattgtatttcttaagaaatttatgctagacaatgtatatgttttcttttgttcctatcaattaactaggaactcaatctttaaggtataaaatgaatttctcattctaaataattcaattacatatcatatctcatcttcaattattgtaataccatggctaaattaagttttgcttgatgtcaaaattagtattactttagatagaagacaaaggattgtgtgtaagaacatgattttctttattgttgagaatagattaatgactgttaagtagggagttcaagttggcgagcaaacttgaataacctaaattattttttataaaggttagattggtaaccctacttcattcatcctgcactaacactataggctacttcattcaatctccccttcattatggataatcaatctacattggggaaaaagtcactttttgggtttatcctggcctcattcttctagtttttagctggtttttcattccaactatttgtctcaatcatgcttatccagaaacctttagattccaaacatcattctagaaagcttacctctcttttcaaaatggcaaactataactttacaaaacaacaaatactaatatatctatgcttagatctctagctcttttcaaactataagtatatcatattagtatcataaaactttttatattttataactccatcaaaggcatattggattgtggttctaactgtttatcatgtttatgtattttccttgtgtaaacaatggaaaattgatgttcattaatgccttatatttcactttgagatggtggatagattaaatgaaggaactatatttgtaaaaattgctccacttgattatggactttacaaggcaatatattgcagatttttttttttcattttttaattcttgatatgttatagaatttacaaggcaattttttgaaatagtcacataagtatatgtgaatttattccttattttaattcttgatatggttttcaggtttgttgtgaagtccatcttcaaggcacatgtagaaggccaacttaaggtaaatattgctttttaggaaacttatttagtattaggaaacatcaagaacttacaattagaagagttgttagtcatgttcaagggaatttttcaaatactcttcaaacattgtttaccaataagaagaatattagtttgtttgttttattgctttactttaacaaaagctaattaatgtgttggattattttctattagtatatcctctttgtttcaattatattggttgttacatgtataaattaaaagttctatatatatatatatatttttatttacagcttacaaaggaatttggcttacaagaagaagagaaatcattacaatgaagcgatgctgaaaatcatgaagatgatatcatttaaatcattaggaggttgaactaggcttttgttgatgatggtttctttttgtagttattgcactggtatttgttcttatattgtatttaaaaattttcattgaaatattttgatctaatgaacaaatttataatttgtatacaagtaattatactaattattcaaactaagccattgtatattaatatttggagatattttaatttgtacaattcaatttaattttatgatttatgatttcttttgcttttatttaattatataggaaattcattattttaaaaacataatagcaatattattattaaaataaaatgcttaaagatgacgcttatattaagtgtcattattaacataaaccaaagatgccgcttttaaaagtgtcattgaaaaacaatccaaatatgacgcccatatgagtgtcaacaatgacaattttataaaaattatttcagtaaaaaaatactcaaagatgacgcattcataagtgtcatcattaacgttattcaaagatggcgctttctggaagcgtcattattgactacaacatataatgacaggggagaagaggacgctttagagaagcgtcatcttatacttttcttgacgcttaaaaaacgtcattaattccttttttttcttgtagtgtacagtgctgtggagccttgcttatccttaggattccagttgaatgtgagaaatctatgcatatgatgtgcaaaaccaaagatacaagacatagggagaactagacaagagttggaatgaagatcataggaaaagcaaacaagaagaaaacaaggggaaaaaaaagtgtttgctaagccatgctccacgcattgtcaacaagcttatatataaaggggtaggaagaatctccatatatgaccacatagccaaaatggagttaaatcaccatcgaacatgaacagaaaagcaacaggagaatcaagactatgacaaatccgtgattgaccagaaatcaacaacaaaagtatggccactgatggccgcacccaatcattagataaatctcaatagcaacaaacgaaacaaatgtattaaagagtaggacttttacagtgaaggacttacctcttggtcgatagagaattgtgaatcctccatcctttgtagacgtccttctttcttcctttcatcccctccgagaaaaaatccaaaatacctcacgcgcccctcaccgtctccttccagttatctccttatgccctagctaccttcttaagaaaaatctaaaagccttttaccattttttccgatcctcttttttggagaatcctacctttctttttatccaccttatttcaccatccaaatatcacataaaatattctccaagatcctccactttctttattttcttcctaaaaatcattgagctctccttttttatcttcttgtttcactttcttaaaaagagaccatgcaagatgctttatgtgaccatgattttatttccaaagaaaggcatggtcttctgatctccaaaaatgcagcccgaatgcctcatgaaagataataaaaagaaaatgaggtagaaatcttgcagtttaacaaaaattagaaatcatgaatttttaaaataaataaaaaatagaaaagatcaatacatgtatagaaaagtaaaaataaaataaaataaaataaaatattagttcatgcaaatcaaagaaataaaattatcaatctcatgaatttttcatagtaaataagtaaatgaataaaaaaagaggtaagcaaatcaagcacatgcaagccctataagttatgagaaaatgtgagccatgcaagaattacctaaaatgtgacataggaggtccaagatgtgcctaagggtgtacatgaaagtgcctaagtgacctaaggtgagtgtgtgcaagctagaagatgcctagatgtgtctaagaagtgtctaagtgaacttaagtgctagaaaatgtctaggtgtgtctaagtgaacctaagtgatttaggatgcatccaagtatcttaaaagtgtacctaaaaagaaaaggaaaatcctaagtctaaatagggctgccaaaggtcacaatgaggagccaaataaatctctcaatcatagtctccaatgtggctcaaaaagtaagttgtgtgagtagtagtgggtaactagggaactgctatccaatactaaaagaacacctaaagcatgtgctaaggggacaaaatgaagggtctacaccttcc

SEQ ID NO: 11624 - DNA, 10869 bp, Vitis vinifera
  Intron number 2 from transcript GSVIVT01000095001 (locus G SVIVG01000095001) derived from phytozome v7.0 (chr-ID chr1 4; pos 3470729 to 3481597)
tggttgactaccttcaatcacgcttctcgtaagacaacaactaagtgagaatcaagaaaataaatacatgaagaggatttctgctgttcaagtgactatttgcaatgttccctcattataattatcatagtataataagagggccttttttttcccttttttctgtaactcttctgctgtggagctaaggcataattaatattaataaagcagtttgttgatcatctctctctctctctctctctctcaaaactatatccaggattggcccatgtttgtgtataaaatcgtcaaaaacaactgatacaaaatctctgttgcgttattggccatgggatatacggacaaaataaatcagttaagaggcaatacttcatggcatttctgactattaaaaggaagatataatttcgtgttaaatctgggaaaatgatacaaaagagaaactcacaattactgagagtcctttcttcagaaatgatcacaagcgggacataagaatatttgaccagttgtatgatacacaatcaaacagaacaaggcccgttgacagatttactgaactttacccgtggatttaagctggcatgtccatctgaagcatgagtcactggtgagaaggctaatacagagggagagagagagagagagagagagagagcttgacttggaaagtcttgagagaaacagatgagaaatggatgtagtagttgaagaatgattcaacttaattttgaaatagaaaaatgcatccattgaagatttggaaagtcttgtatccacggttttttttcttctcatcaaaagacatagattgtgacggttggagacaacctaacagctatgaactgtgttggttttcttgtaattaaggaagcagtagtttaaaagtttttgttaaagcatctcttccatctcattagtttaatactaatcatgacttttgagtaggcattaggggtgtaagtaaaacgaaaaaactaataaaattagtccaattaatccactaaaatagatgaaatcggttcgaattttaataactataaaagttggttcgattagagaattttaaaacttgacttcatcagtttaatttttgtttttgttttgtcttctaaccccaataacaattgaatcaaattgatattttaaagatttcatttcttgtaatttataactgttcaatatttaatgcttatttaattattattacttataatttgaaaactctattaaggcatttaattattattaaatcatggttaaatcaattttaaattcatttgttatatctaggttagaaattttaaatgtattaatttgtcagttaaacctaagttggttttaattactttaatttaaaaataaattggatttaagatctaatgtaatttgtatccaaccaatcatctaaaccgaaccaaattgattttaaataagtttggtttggtttaatttttccatcactaaaagattcctttgattgtgatttaagtataaacccaccattttgatttgactaattttttctccaaaaattgagcgaaccatacctctttacaattctagtaggcccctagtataaaataaaggacaacacccatttgggaagatttggaccttaaaggaatccttgacctaacaactgcttgctagccttcttgaatacggttgggcacatggccatgacccatgcatatacttttgtccaagagcttaccctaccacacataaagaactcctaaattcgcaaggagtggccaaacacttgaggttgaacattggagccgattaggatatgtaacctaggtaggcaccaaaaaaggctacaaagagaaaaatagatcacacccacacaaggttgtgtaacttcattggctagggagggtgtggtctaaaagcaatgatagtcagaatgtacaagcattgatttatctcacctacaagggttattcttgaaaatctactgactaccggtcgtgacaaccttcaccaaccaatgatagctttagcacagaagttcatacaccacttgaaaagttgtaactgtctaactaatggtgcctatgaaaaatgttagatgtaaacaacctaattgttgttacattagtttatgtactttcaaattgataattttgtttcatttattcttacttaggatcttataaggttgtatcttactctccattgaagacccaagatttcttcatgatcaactagaatgacataggtaagcatataaaagtctaggatagacaaattggtatttatgaagacatggtgtggatcgaagtctttaaaattgagttaaaatatttttataatagttttaaaaatatctttgagtgcttaagtgctgagagtgctcaagagttgaggatagcgctcaagtgcacatagtagagaattctctagaattttggaggtccatttttccaattttaaaaagctttatttttgggaagtttctagatctggtccaccaagttcctaagcttataactactttacttaataatgtttttggtttgatgcaaatgtttgaaaaaacctaatttgccttctagctcattctcaaaactcctaaagaagattaatgacttttagttctattgggttaagatggagatatgggagatctattaggagtaaatgtggtgctacattgcgaacatgaagtgcaatgtaagtgttggggaaagagacttagggataacttctattaggtaaaattgtggactgtactttcatataatggattggtgatttgaggtctttaaccctatacatctacatattgtgtagatagttttctatgtaatttttttttttgtctctcttgtgttgaatgttctttggtgtcccataattaaaaagagatagttaaatattcgaagtcaggcttgtaattgtcagacttatgattgtcaagcttgtgatacacatcatccatggagggtccacaaactcatagtggaagatgaaaaaccatgaaaagtcaatgattaaataagccacctaggtcatttcagtcaacaatgtgtagtatgtgtttacacctagaaacctaattgtagaccctcaattttgtcctcctaacacatgttctattaagtatttgttcgatactttatggcaattccctagttgcccattactactcatgtagtctatcttttctaagccaccttaaggactttgtttgagagatttatctaaccccgttgtgactcttggcagccctaatttagacttaggcccacttaggcatcctaaggcaccctaggcccatttagatacacttggcccattaggcatcaccttaggcccatttagatgcacttggcaccttttagcttggacacattcaccctaagttacttagacactctttcagaataggtcacttagacacttcttttggtatagttcacttaggcatgatcttgattttggttacttatttttcgggataagatgagcgttggcttgactttttattatatgaaatgaattttttattctatctttattttatttttatttttatttttgaaggtttatgagtttgacatttaaattattataatccgttgcattaatttaatttttaatttttttctaattgcttatgtctaatatttatttttatacccttatcaatttatttgtttatttactcgcttatttattcattctttaattccatgaattgacatctcaaatttttgtggctaatgtgatttgattttctatttgattttattctatttccaattacatgatttcttatttcaactttatttttaattttgcatgagacttggagccatcaaggagaggagatcacgaccaaatagggaaacttggaaggaatcccggctgcatatagaaagtgggcagatcacggctttaagaaggaatccgggttgcatatgatttgctttaagaaggaatccgggctgcatatagaaagtggacagatcacggctttaagaacgaatccgggatgcatatgatttgctctaagaagaaatacgggctttgctctaagaagaaatacgggctgcatatagaaagtgggcagatcacgaccattgaaaaggggggctgtcactttgaaggttcacaacacgcactccacatgaagggacaagatatggcaactgcatgatgaatcaatagaaggagaacccatgcaataattttcattcatacataggagaacattatcaagcacaggaatcgacaaagaggcctagattctcttccaagagccatccttaagtgaaaaaaagacaacaaactactggatatgggttgctgttgctgctgttgttttgttagtactgctgcttgtagtgctcggataccattatctcctctgaagattgaagatagagttaaatgagttacgggccaattttatgcttgatgagcttctagaagcaacttaagaagaaaactaagctattggaatgataggaactgccgaggttttcctattcgatcgatgtaagtggtggcatgggctgtaggccagtctttggccgaagagaagatgccatgttacccattggattattagtgggagccatatggaatgcttctgagaatgaagtggcggtggcatctcataattccctaggaatacgcctccatcagaattttcgaggaacagacatgcaccattagttttcttcaaggataatcgacatgctggagtgggatcagactctgctatggatgccattcaacaaagaaaccagccataagaggtctctctcatacactcagcacgctgccaaagaatgggaaggctaccaatcggtcctagagaggaatgagggttgatcatattgttctttgagtggagaaggcacaacactttgggagcatttagcacgcacccttgaggaatcctggacatgcgacttgcattcttaatccaaccacaccacataagggcaacgatctgaatgaattcatgcaccattcactcattctgaataagcagtttaccacgctttccataggaaggaagtggccattttgtgcacaacacacatatagtggattgtaagagagattcttttggttttttagaaagaaaagtcaacatgctaaggatttgatcacttaccaaacaagatacgactgcatccttagggaaatctccaagtagacttcccatatccacacgcatctccaaaaaggaaataaaaatattccatgggagtggggtgccatataaataagaaaagaaaaggggattttttttgggggagcagagagaacacacatggattctttttttctttggcaaagagagagttctttcaaaggaacgggtagagggatttttttttagaggatccaagcataaagcaaaatttttcagaggggaataggcagaaataattttcacgtggaactttgaaggagagcaagggacttcaggcagagaccagactattaccttagtcgccaaagaggattttctttttcacttcataggttagttttccattaaatattttttatttagtctagattttttttaaacaaatttcagtttttgattaattctttgtgttaaagtttattttgtttttaaattctcaattagtttagttctaacccgccttttaattttagtttatgatttaatttgaatgtgttagtgacttttattccttagtttaagtaatttgtgaaataaagtttattttttttaattccggattaacttaattttagtttatgatttaatttgaatttgttagtgacttttattccttagtttaagtaatttgtgaagtaaagtttatttttttaaattctggattaacttaattttagtttatgatttaatttgaatgtgttagtgactttaatttactagtttaaataatcttgtgagataaagtttatatttttaattccacattagtttagttttagtttatgttttagtttaaatgtattaataatttttattcattagttaaataattttattagataaagtttatgtttttaaacgagttttgattttgttttgtcccatctatttagttgatgtatttttataatcttagtttagtttattagattaattaattttattgataaaatttatgcttctgatcttgttttagtttaattgcaatttatttgttttgtttgcattttctttatatataatcttagttcattaatttaatcaattctattgataaagttcatgtttttaaccctgttttagttttgttttaatttatctatttagtttaggttttttttttatagaattttagtttatcaatttggttgatccatgtaattaatctcatgtcttttaaaattgtttatccttgttttgattcatgttatctagtttaagtggtttataattatagtttattagtttaattgatcctatgcgattgaattcatgtttttttaaatattaatcatattttttattcatctttttagtacatgagtttttaggacttgagttgtttaagttgattggttccatgtcattttcatattctgaacttgttaattttatttcttggttgatccacttttagtttgtatgtttttcaaagctttagataacttgtttaattgatcttaagttgtattatttctatcttaaatatataaattttcattcttggattgatcataatttagttcatatgtttctctaaaattttagttaattagcttaattgatcttatgttagtttttttttattcttctgtgttcgattccccatttttaactcctgattaatatcttctaatcttatctgatctaaagtcatttagtttattgctttgatagttttttgtgaagtttaatttttagaggccattggaaaatcatgaagattggtttttaccctcacctttattagttttgttgattactgagaaaattttactttgtgattttgctttattttgggttgcctatatttgatctttgcgaattgtttgtttgtgaataatatatttccctttaaaatacttttctcaaaatgttcctcacaaaaatctattttaaaaattcatttagagtccttagaatcaaaaatctcattttcttaaaataatatgcatccattatttttgatcggtttgcatctttctcggttttttaatgaaaattttggttttaaatcagacactaatccaagcttgtggtcccacataaatgggataattccaggttagatttgtgtatatcaattggggaattggtgaaacccctacataaaaaaaatcttttcaaaacttatttttgctaccacctttgttggttgttacaatcatatctatttttttaggaattgtatacaagacgtatgtgataattgatgaattagtatactctgataatttttgctatgctaattagataacaagcatgctaggatttatcttattatttgttatctaacccctcatgtcttgtggaagcacattgcgagttacccatgctattcgggtatgcttcttaagttcgtatcttaatttcataaattatgtattgctttatatatgattgttatgtattgcttcgtatgtgattctcaacctgttcagcatatctttttgattgtttgtttagcttgccatgtttgattaagagactaggataaaatatatgttgtgtgtcttattttccaaactaatcattgatgtcttttgatgacacttaagaagtagtccaggtgtgcaccccaactcacctttattgtaatttgatcttgtttggcatgttatttttgaaatcaccttagtctatctaggtatcttcaattaatcaattaattgccacatctcccccaatttagtcagtagagacctctttagggcttagaggggtgctacctcctagaggtacttgctcaataagtaacctgatccctggacctagactcgggtttttcaaagacacgcttttccaaaaattatggagtcatttttcagggttttatttcttgttttttttttctttaaaataaaaataaaataagtggcgacttcgacttttctttctaaaaattaatttttcacaaataaaaagtgagtctcactgatcgagtggggatgcacgtgaaaaatgcgggtccacactaatacttgatgactaacctaagctcaacctaaattaagaagcaatcaatgcgaggttaatccaactcaacctctgacttgaggtattcaatcaaagcccaacttaacctcatttctctaagttcgggttgagtttaggttaatcgagttaaatttgagttgattaagttgatagggttgcataatgtttataaaagctagtttttttctatatatttaaataaaaatttaaataataaataaaacaaagttccaatatagcaacaaaaagtaaaaaataaatttatatatctttctaaaaaatgaaaaaatatatgatataatataatttattattttaatttcttaaaaatttgagtaaaatttgggttgattgagttgatcgggttgcattattcaaaattcatgcataatgtttttttaaaagcttttttttttttttttttttttgtagatttaaataaaaatttaaataataaataagaaaaaaattccaatattgcaacaaaaagtaaaagataaatttatatatctttctaaaaaaaaagatataatataatttatttttcttaaaaatttaaaaagaaaataaatattattataaatgataatatacattataaatattataaaaatactaaattaggtttgggttattcgaatcttagcttaagcccaaccaaattgaattcgggttgaaaaaacctaatccaaacacaattcaagtatatcaaattgggtttgggttaggtaagcccatcttgctcaagttgcaccccctaacaccaataaaaaaccaaatattcttcgtggataattgacctaatcgcacaataaaaggctcaatttaagtgaattcctaggatcaagatgaccaaagaatgatggaggcaaaagtcaagcccaaaagtggaggcttaacacaactaatggaggactcaaatgattaggaaatcaaaatccaaaggcaatttcatttgagaagttcagaaattaaattttaaataaggtggaagccgagaagacaaaaactcaaattagaattaattttgatttgagtgaaggtgaaataataatcatgatttgaaggaaagcatgcaaagatattttgattgcattctaattctagtttaatttgagaaagcaaaattaatccttgaaataaaaaatttcaatttcatttcgatttggagagtagaattgatttcaagatgaaagacaaaaaggggaagttaatagctcaaatataatattctgatttgagaacaactgaaatcgaaattttttgagttgtaacacttcaagaatggtttccgtgacttctttttattagatattgtatgaaagtctttttgagttgaaacactttaagaatttcttccgtgacttcttttcattagatattgtatgttttaggatgttgccatacatacatacacacacacacacacacacacacacacacacacacacacacacacacacacacacacacacacacacacatatatatatatatatatatatatatattttaagcaagtttgtttgataataattttagaaaacacttctaatttttcaaaacatttaaaaaaaaatgaaacataagtaaaatacttttataaaaaacgcttctacttaaaaagcactttaaagagaaatattgtcaaatgcgttcgtaatcttttagatttgcaagtttttcaaatctcacataactgcatgcagaagaataagaaatggaagttgtaggtactttggtgaaagtgagttttaattttcaaatcttttgtgaatggaaagttgtgcaaggacccaaagctttttgtgtattttaaggcctaaatcaggcatcacccaagcttaaaaatcaatgttgttagaacttggaagtctcgtatgcatggatggttttctcgtaacattctctcaagagcgaggcactccatggttcatttagtagttacagatgaattcaagggtcttcaccataataataaataaaaacaaactaattgtctagtctatgcctgcattggctctacaatcttttataatgttaggtatgcaacaatgctaaatacaatttgggaaaaatgaccttgggatgagtgtgtaagatcagaagtattggttaagcactaatataatccttggaatgagtcaaggctacgagacggatgtgttgtgtgggatggatcaaccatgaatctctgctatgtaccttagaatgattaagcctgaagatgagtgcaagtatgcgggacatcaaaccgtataaatatgatagcttaaccttatgactgacaactaattggttttctgatgagataattaagtcttttattccaacaaatagtattagaactaggtcataggtttgagtcgcaagagccccatgttgggggaggaatgttacaacgctatggaaaaaatgatattgagtgtgaatggtcgaagatatataagtattgatataagcgttgtactttttagttcctttgtttatttgaagatgtctaacctaattggagagtatagtttttgcatacaatcttcgagataaacaattgggagtagttgttgaagaaccattcatcattgaaagtgaaaagaactgttcattgaagacttggtgagtttatgcatgtcatatactagtaaaacaaaggactaattcaaggactgttgtctataaattgagat

SEQ ID NO: 11625 - DNA, 13356 bp, Vitis vinifera
  Intron number 28 from transcript GSVIVT01037358001 (locus GSVIVG01037358001) derived from phytozome v7.0 (chr-ID chr 6; pos 15155960 to 15169315)
ttgcagatattatccaaggacgcaaattcaaccaggtttgaagcaattgcaaattgtatcttgtaatttcatctgtccatatttttgtaaattaattgttattatttgttagtaaactggaaaatgcaatgcataaatcctaaccttcagttcttttaacagtggtgagccaacatttccaactttgttgaagcaccattcagcagtacaactcaatttcagtttccctttactcatgtcatacaattcatcaatatgtatttttagacatgtagttattcagagatcttttacgcttgtagtcctttatttcatagctttggtcaccacaacttacttgaactaccatgctttgattgattctattactggaaaatgcaagggatagttcatcatagtggtttgcagttcttaagatgttattgttgattataattttgttgaattaggctttgaaaatcaatgagggtagggctaaaccttttatgacattcaatatcacaccctagggcctattctaaaaactattatttatgtgacctacccctgagcataagagtggcattctctcccctaaaatgatagtcttgtgacttgaacccatgacccttggctttgatatcaattcttagattgggctttgactatcttatctgaaagccaattggagtctagtgagggtaggctaggggcagcagtgactgattcctttatgacacttgacatcacacccacaagcctgttctaagagtcattgtttgagtgacccatccttaggcttgaaagcaactttgttgcaccctaacaataatgtttgatgtgtagtgtgcagttggaaggaagagttcttttcctctttatgttgtgccctttagtttttagttgatggcagcacctttttctccttgctggtatggatagggtagtcccttggtagaccagctccataatggaaattcatgtctcagctttctggagggatgagagtggaaaggtttatggtttgactacactaattatgttcaaggtgcttcaggggcacatagatcaaggagcattttaaggggcagagcctcgagtgggttatagaataggatgataccatgatcatttacttgttttttcatttcagtgtccaaaaagtttgatgatgtccctggtgcccttagccaactagatttcaattgctcttatggtgatagctatgcaaaggatattgaaatagagccccctctggtaagaaaaattaatcagctccagcagatgctatttgggaaaccttttcatcagttggtgtaagaattggaagggattatgggggcagaatcacttttaccctctccatgcctactagattcagatatacaatttaagggaatttatagatgtgtagtggaggaagatggatatggttacttcttcattgagagagattcgtagcctcttagagatatgggtatctgatgaaggaaatctagtagcttctcactctggaggtgaaaacttagtggctttccaagagagagcagcattggagcagacctccccgagaaatcttacttttgaggatttaaaaggagatattgaacctacttagctcccatctttctgccttgttgagtagttggcgacgtctcattttcccttttgtagtggggtgtgggttctggatgattctttgtgtattatggctcaatttttctgctgatttcctgtgtaagaaggatgctgcattcatcatccttatttgtgattcctttatcctccctaataatttcattaactaaaacaaaactatttaatgtttaattacagactatactgataaatttcaagaaatttgaaaaacttctgccaagaccttcttagaggctagaatatatttttctcttaacaaaagaaaaaaaaatacaaaatgtaagaaaagctgttttttttttccaaaatcaatcatgttttgttagcagaaacaataaactaaaccacaggatcttttcttttcaatacagcaaagcttctgccgaagtattatcaaggaacaccattcttttggcaacccttttgtagaaaagggaaaaaaaatgccgtatattaattaaggaagggaaacatgcttccttttatagaaaagctacaacaaatcaaactaaatctacaactgtacacccaaatttctaggaacaaaataaatttaaaatatacaaattatccctaaaaaataggtaacaaccagatcagaaaaattctgatatgattgagattctcaacactccccctcaagctggcttgaagatgtcattcatggccagccagcttgcttactaaatcatcaaattgcttatttggcaatcccttagtgagtatatttgcaacttgttcaaccgtaggtatatagggcataacaatcagtccattttccagtttttccttgataaaatgtttatcaaccttgacatgtttagttctatcatgaagtactggattatgtgcaatggcaatgacagctttattatcacaaaagactttcataggtaaagggctagcagccttaagttcttcaagtaattgtttaatccacaaaacttcacaaatgtcatgggctacgactctaaactcagcttcaacactacttctagccacaacattctgttttttacttcgccaagccacaagattgcctctaacaaaagtacaataccctaaagttgatctcctatcaattacacttcctgcctaatctgcatcagtaaacatatccacttggagatgtccttggttctcatgtagaagtccttttcctagagtcccctttaagtaccttaaaattatgtacactacatcaaagtgttcttgatttggtgaatgcatgaattgactcaccatgcttacagcaaaagcaatatcaggatgagtatgagagagataaataagtctcccaactaggcgttgatatttctctttgtcaatcacctctactaaacttgttggttggagtttcaaattcggttctataggagtttttgtagccttacatccaagtatacccgttttacttaataagtcaagcatatattttctttgagagaaatgaaaatacctttcttggatctagcaaactccataccaagaaactatcttagggaacccaaatctttatcttaaattcacgagttaaagctttcttcaatctctccagttctaaactgttatcaccagttagaataatgtcatccacataaactagcaacacaacaatctttccttctcttgagtgtttataaaacattgtatggtcagcttgacattgaatatatccctgacgcttgattacttttccaaatctctcaaaccaaaccctaggagactacttaagaccatacaaggactttaatctgcaaaccttttttttttttctagcttttcttcgaaacctggtggtaaatccataaacgcttcttcctccaaatcgccatttaagaaagcgtttttcacatctaattggtgtaaaggtcaattaaaatgtactgcaagacaaagtaaaatccaaatggaattgatctttgcaacaggtgcaaaggtctcttggtagtcaattccataggtttgtgtgaaacctttggtaaccaaccttgctttatatctttcaatgctaccatcgggcttacacttgattgtgaaaacccacttgcatcccactgtcttcttctccttaggtatctcaacaattttccatgttctatttttcaaaagggcattcatttcttcttgaactgctgatctccacttcgagtgtcctagtacttcttatatagttctaggaatgaataagtaagagatatttgaagtgaaaactctatatttcttgagagtctttgataagacaaatatttggcaatgggatatttggtacaattctcaactccttttcagattgcaatagggatatcaagatcagaaataggtaaaggagtggagtccataggaagattatctggattttgagaactaggagttgatgattgaccatgctcaagattgacttgattattctcagtattagaattaaacctgcacctggtataaacacgaagctcagtggacataggttgtagagtttctccccctgtttgtgatgcaattttatttggcatagataaatcagtatttccccctttttcactaattaaaacatttgttttttgatttattttaggaagaaaaatactaggttttggttgttcttgttgccaaaaccgatcttcattagagctctccccctgaagagtagttttgttataaaatggaatattttcaataaagttgacatccatactagcatgaattttcctagtggtaggattaaaacacttatacccttttttattaggagcataacctagaaaaatacattttttggttcttggatcaaatttggatcgaagatgagttggcacatggacgaacactgtgcagccaaaaatttttaagggtaaatctgaggtgaggtgtgtgtttggaaaagtattcttaagagtttgtaaaggtgttgcacagtttagaacccttgtaggcattctattaatcaaataacaacttgttaaaattgcatccccccaaaggtgtgtaggaacattcatatgaaacataagagctctacctatttcaagtaaatgtttgtttttacgttttttaattccattttgttgaggagtgtccctacaagttgattgatgtaaaatacctttctctaacaaaaaatcacctaaacaatcattataaaattttgttccattgtcactccgaagaatacttattttggtttgaaattggttttcaaccatagaataaaaatcctaaaagagttttgcaacctcagacttagagttcattagataaagccatcataggcgtgtgtgatcatcaataaacgtcacaaaccattttttatcagttaaagtagtaatcctagaaggaccccaaacatcagtatgtatcaaataaaaaggctttgagacacaatacaattttattttataagaattgcgatggcttttggacaaaaaacaagtttcacaatcaaaagaagtacaattgaatcctttaaataaacctggaaacaaatgttttaaatagaaaaaactaggatgtcctaatctgttatgccatagcattatttgatcatgcacagggattgaacaaacactatcaataaaaccctgagtttgtttattctcaaactagttgtcatcaaaatagtagagattgtctatcaatctagcactgccaatcatcatccccgagttcaaatcctagaattcacaaagaaaggcacaaaaaacatgacaattagaatcttgagataaacgacttacggataagagattacaagagagttttgggacatgtaaaacggattgtaaaacaatcttatcagacaaacaaatagagccttgcccaacaatagaagataagcttccatctgtaatacgtactttttttatttccagaacaaggtgtataagaaataaacaaatgagataaattagtcatgtggttagaggcacctgaatctatgatccaaggtgaagataatgaaagagaatctgcacacaaaagactacctgattgagctagagatgctataggagtaccaagagtcggtgaagcaggttttagcagctgtagcagttggtctaattgttctttgctcaatgagggtgtctcagcaacatgtgctttagcaaggaaacaattagagtcactttgcttattagtcttccattcaacgggcttccaatcagttggcttcccatgtaatttccaacaagtttcatgagtatggcatggtttattgcaatgatcacaccaaactcttggcttgtcatccgaacgacgttggttattaggattgctagaagtcgttgttgcagtgcccaataaggttgagttttccacaggtccaaagagcttcttcccaagcataacattcctccggctttcctcacaatgcacttcagagaacacttcacctagagaagggagaggttgccaaccaatgattctaccccgaacttcatcaaactcaacattaagcccaactaaaaatttgaatatctgtgaactttctaccatcttcttaaaatagttacaatcatccgtaatttttcattcatagtcattgaataagtcaagatcctaccataaacccttaagcacattaaaatatttggtaatcgaattctcaccatgacaaatatcgcccagtttgagttgtaactcatagatttgggattgattcctaaggtttgaatgcatctgaataatgtcccaaagagcttttgtagtaggataacacatataattcgagctaatctcgtcctcaatggaatttaccaaccatgtcatgatcatggagttctctgcatcccaagcggcatagctagggtccgtcttcgttgcttctttggtgtcaccaatcaaataaccaattttgcctcggcccctaatgtacatctgaatagattgtgatcatctaagaaattgttctcattaaggcgaattgtagtgatctggatagagtggcaatgagaattggatgtgggtaattttgagaaattggaaccaatagtgatggaaggagtagattcaaaaatttatgacatggtaaagagatagcaataaaaacgaaaagagaaaaataacagaactagaaaaaatgagaggaaaaagaaagggaatagctaattaacttggctctgatgccatgtagaaaagggaaaaaaactgtcatatattaattaaataagggagcgaaacatgctcccttttttagaaaagctacaacaaatcaaactaaatctacaactgtacacccaaatttctatgaacaaaataaatttaaaatatgcaacttatccctaaacaaccagatcagaaaaattctgatatgattgagattctcaacacctttactgggtccaccctaaaaccactttaaatttcagaagttcccattgcttgattgtgtaaagcaccaaagtacatgcttgtacctaaagaaccaatgtgataggtatctaatggagaaatattattgaatttcaagaattacaaaaaaaaaaaaaaccaaactgatactaagatagctattcaagaggctatcactctcccactagattcacagaacaaccagccctaactaattccacttttttcctatttaagctattccaatctataccaagattgttacccaacctatactagttggtagcacacttcttttcccttttctggcatacccataacatataggaggcctatcattacccccctcaatgtgagacaccttgtcctgaaggtggaaattaggaaaacgctccttaattgtgtcggccgattcccatgaagcttcaaaccgaggaagttctttccactggataagtacttcaataacaggaggattgttattgagagactggcgaatatctaagacctgatcagactccacaagccactccaaatcatcagcaagaataagggaaagtggctgacataaatcagctgaaccaagagcctgcttgagctgtgaaacatgaaacacaggatgaatagttgttgaagaaggaaactctaacttgtacgccattgaaccaattttttgcaccaccttgtaagggccaaaatactgtagggagagcttctcattgggtcgcttagcaagggaacgaagatggtaaggacgaagtttgagatagacaaaatccccaacttcaaattgaactgcacaacaatgggcatctgcagatgacttcattttggactggtcacagtagagatggtctttcagttcatttaaaattagatcatgctcttgcaataactgatccactgccaaaacaaaggtggaatccgatccataacgtagcaatggtgggagggtctcgcccgtaaatggctcgaaacaatgtcatattagtggtggagtggaatgtggtattataacaatactccacccacagaagccatgtagactaacgtccaggcttgtcatataaaaagcattgaaggtatgtttccacacaacgattgactacttacgtttgtccatctatttggggatggtatgcggtactatgacagagagaagtaccctgcaaccagaatagctctgtccaaaatcgactaagaaatactttgtcacaatcactaataatggaacggggaattccatgaaatttgacaacatcacgaacaaagacaacaaccaccgtttgagctgtgaaaagatgcttgagcagtgagaagtgagcatatttgctcaattgatccacaacaactaaactggagttataaccctcagacttaggaagcccctcaataaagtccatcgtcacatcatcccatattttttctgaataggtagtggttgtagtaatccaacaggtgacaaagtcaggaccttattttgttggcatactatacacttttccaccaactctttgatgtcattcttcatgacaacgcaaaaaaaatctcgtgtgagccgtttgtaagtccacaagaactcggaatgacctccaaccgcgctagcatggccctcttgaagaagtgccggaataaggggtgaggccttgggaagaactaagcgcccttgtagagaaggccatggtccaaagaatactgaggataagcatttggatcggccaacagcctttgccgaatcttagcaaggtgtgggtcagcttcaacttgtgaattgatcaacgaagtgtctaagcgattgggaacaatgagggcaactaactccatagaaatggggatgcgagatagggcgtcagctgctttattctccaattcaggccgaaactgaatttcaaaatcgtacccaaataactttgcaacccacttttggtacgactcattcaccactctttgctctagtagaaatttcaaactactttgattcgttctcacaataaagtggcgaccaagcaagtagtgatgccagttctgaactactaagacaatagccattaactctttttcatatatggacttttgtcgctctcttactgaaaggacttggctaaaataagccactagtctttgagtttgcatcaaaacggcacccaaaccataccctgaggcatcaatctccacaatgaagagctctctaaaatcaggcaaattcaaaacaggaattgttgtcatagttgttttcaatttttataaggcagcctcagcctcttggttccaattaaaagcatcctttttgagttgttgagtgaggggccaagaaatagctccatatcccttgacaaatcgacggtagtacctaatcaattcgagaaatcctttcaattctttaggggatttgggtgtgggccactctaccatggctgaaatcttgtaggggtcagcaacaacccccttggcaaaaaccaaatgacccaagtattcgagttgcggtttagcaaagagacacttcttcccattggcgtgcagctagtggttagccagaatggacaacacactttgcaaatgatcacagtgctccttcaagtccttgtaaaccaatatgtcattaaaaaatacaagcgcgaatttctgaaggtgtggccgaaatatacagttcattaatgactggaaggtcgttggtgcattggttagcccaaaaggcatcaccaagaactcgtaatgactttcctgggtgcgaaatgccattttgtggatgtcttgttgtcgaactcgaatctggtggtagcccgatttgaggtctagtttggaaaaaatggttgcgccatgaagttcatcaagtaactcatcgatcatcgtaatggggaaccaatccggaaatgtaactttgttaagagcatggtaatctatacaaaacctccgctctccatattttttttcaatcaacaacactggactaaaaaatggacttaagctaggccgaacaattcctgcctcaagcatatcttgcaccaatctctctatttcattctttagaatatgtggatactggtaggaatggacgttaatcagagatgcacccagaatcaattaaatggcatggtcaatatcacgacttggtggtaacctcgacatcggcccaaaaactcgttgatgttgagctaacacttttttgtctattttcgggaccttatgtactccttcactcaattccgaagtggtggaagtctgacagagttccacccataccccttggccatggtgctgcaatgctctaaccattgccttaagagacacctcagtccgactaaggctcgggtctccctttaacaatatcactatctttcccaatttgatcttcattgttagcatcttccaatttactttcacgtctcctaaagtccccaaccaaggcattcccaaaattacatcagtgttgcctaattcaagtggaagaaaatcttccactacagtgagcccctgcatcgaaatacaaactcccctacaaatgcccttccctttcacggatatcctagttcccatcatcaccccgtaactggttgttgtagttaatggaagtgctaatcattgaaccaaatgaagggataaaaaattgtgggtagccctactgtccacaaggatgattacctcttttgacccgattgtccctttgatcttcatagtccccggcgtagttaaaccaaccacagaatttagagataattccatagcgtctttcaactcaatgagtgaaggttccatagttgctctctcgtcaaattgattatcctcctccctctcatcttcgtgcaccaataaaacccttaattctttcttacagcgatgaccaagtgagaacttctcatcacacttaaaacagatccccttctctctacgggcttgaagctccgattccgtcagtctctttattggaatctcgcggtgctggttcatcattttctccctaatagccactgccctagtctgaaaattttccccaatcttccaatcaccttgatttgcagatgacaacattttggtgctctttgggtcccttggttcacgggccgcccatagggttaaatttctattttcgacccgttgggccatttccatcaagtggcccagcccaatatggttgcagaagacgtatctcaacccgaatctcaggaagcagcccattcacaaacatgctttccattacctgctcagaaatccctttcaagggagccattagaatctcaaattcctaccggtacactgccactgccccccgttgtcacactacaagaaactcctcacaaaggttccctccttgagtcggacgaaagcgaagcaatagccgtctcttcaaattttcccaactcccaaacgcctctctcatatcagtccactggtaccaagagagtgcgtccccatcaagactcattgcagcggctactaatttatcctcctcttctgtgagtctattctttgcgaagtatcaatcggctcgaaagatccaaccatccgggttttctcccgtaaatacggacatctccaaacgccatccaccatgccattccccgtttccgcctcacctcgtctcatccgttgctatccaacccccactggtttccccaactccagggatccattttgcatggtcttctcgttgagcagcagccaccgtgacctgccttgatgacaatgcagccaccgccttctgtgtctcttccagcaactacagaactcacattacgttctgggcaaggcccgtcactatcctttccattcccgataagcgctgcatctcctctctgatatctccaacttccttctctagagaatccacccagccatcattctttttctgagccatttggatcgatgctctgataccaaattgataggtatctaatggagaaatattattgaatttcaagaattacaagaaaaatgaccaaactgatactaagatagctatttgagaggttatcactctcccaccagattcacagaacaaccagcccaaactaattccatctttttcctatttaagctattccagtctgtaccaagattgttacccagcctatactaagactattacaacgaactacctgttggcagtacacttctcttcccttttctggcatacacataacgtataggaggcctatcacaatgtttttaatcatatgcaatatgtataaatatgttttcttcaacagttatataggtaagaaaaacgtttaatagtttagtgtaccttacatactttacggttagataatgaacatatttctatgattgagttattattgtaaagtcaaagtactacaagaagcaaataagaaatctgaaagctggaattaggattctaaataattcattctcgttgatttgattgaattacaacctatttatacaagttgtacagtaaggggaaaatgggaaataggctaaggaaataaaattaaattcctacaattactcttaactttcctatcttgctataaatatacagatctgatttgattttctattcaaattccatgattttagtccataatcaaatcagaagaaatattccatgctttccaatagtatctatagaaatttgcattataagaaaccttgcatatccttatattctgtcttaacatatcatatatggccattgttccccactaacatgtctgattttacaggaattctctatacaatagtctaagttttgagtgtgttgatattctttttttccctcatatttcttgaattttatttttttaatttgaatattttccatgattttccacatttactgagatactacaattgatttttattctttttttcctctcctcctctccatcccttcccccaccacaccccccccccctccttctttcaatttttggtacactttcttcttatttttcgaatgtatgatttaatacattttcttctaaacagtcactatagaaatgctcaaggattattatcaccacttacaaaatatatgtcattttccagtctcatggtttgatgattctgttttatattaatgggaaatatatttctaccacttatcctcaccacatatggattttatgcagtacagtcgatatgaatagtgctggtccatcactatcgatatcacatacaatacctctatatttctatatccttagcaataacaccgtaatatccgaactgatttttaatggttgcctgattcctcttatttgtgacttgcatgacactcacatggtcccgttctcatatcagtttctctgaagtatctttacagtgtgatcagattagcagtttcatatcactcatatggtttaggtgtattcctgttatataggttggaaagaacttgaaagaaat

SEQ ID NO: 11626 - DNA, 10222 bp, Vitis vinifera
  Intron number 9 from transcript GSVIVT01037454001 (locus G SVIVG01037454001) derived from phytozome v7.0 (chr-ID chr6 ; pos 13428330 to 13438551 reverse strand)
cagcaatctctactggtatgattcatcatcagtgattaccattgattcacatggctgaatagatttcctgtgcttattattctaaaatctcttaataatggcttctgttgtggaagaaattggtaacaacatgatattatgatctcttttcatgttttgccctccttttgagcacaaggtattaatctaggagctgttagaaaatgaaggcgacaggccaggtagtatttacaagaaaccttttttttttcataaaaaaaaaaaaaaaaaatacgttacacccattggaaactttttgtttttttttcttgaatgaaggtgacaggccaggtggtatttacaagaacctttttttccaaaaaaaaaaaaaaaaaaatgttacacccattggactcaaaattggcattcaaaagaagtgagttctccaagtagtcatgaactagtgtaccatggtaactgaaaaatgttgagcaaacagaatggattcaactgcaggctgcccagatttctctgatcacctggctgctccttatcatatttgtttatcttctcataaattgtattcttctttttaatataatttagcatagcattttgtgcatattaagattcatttacatcttgggaaatgattaggaaaaatagttatacaagtatgacgaccccaatcataaacctatgacaaatgtttcacatgtttaatatcatatttatctatagaatgaagcataaaggaacagggcttgcatccttcaattgtttagtcattcgaatatttagggctaatcaataaatgaagtatatttaaaatttttttacatttcattgcactaatagtcatacaatcaacaaaaaatagacttcctaatcttctaactgcaactctgacttttgattagcctgtgactgactagtgtgccaaatcgttaactagtgtcaaaccaattaaccaaatcgttaaatgaagttcttgtttggactatggatgtagggatcctaaatcctcttaaaatctagggaaaaaatatcaaattatttctgttcggatgtagtatgagaggaaaaggaaaagcagattggacttggagattcttggagagagatatcttgagtttctcaaagggagaatgccttaactctaatccggcctgttcacagttcttcatcaccaactcatgcagttgtggaatttggacttttctcaaacctcaggaaagagatggcaacattatctccaaagttgtaagaagtggctcacatgatctggcttgggagaacaacctttgtcatagctccagtgcaaagggacctatcaaaaaaaaaaaaaatagctccagtgcaaagggtactggaggaggggatgatccatctaccccttgctcttcatatataaaatgcaacattcaaagttgatggtattatagggccagctgatacaaagcagattgttgttattaactttcttatcagccaccgaccatctaaaggctttgactttcaagggagcctttgacttgaaaataaacttggcttgaggagcaaaatcggggacttaaatttagattgggcatggaataaacattgggaagtgaagaggatgctcattcaaaggcctaacacctctcatgtgggatagaaggggaaagaatgacattatgtaaagctaggaggagagaggagaaatcctcaatttattggttttgtcaaactttcttgtagaagtcaaactttctcgactctcgaacagcttcaaaagggggggttggtctttggctaatcgttgttgccttgtctagctcatgaggagtcaattgaccacatcctcctacattgtggcaaggcacaactgttgtgggagctgttggtctctctctttagggtttgttgggtgatgcagttcactattaaagagatgttattaggttggcatgactcctttggtggaagaaagtagaaaaaagtttggagagtagcatccttatgtctcttctggacaatttggaaaaaagggaataggagatcttttgaaaatgtggagctctctattcaaaggttgaaattcttgtttttgagtaacttgtgaacctggactaaactgtttataggtgaaggctcgatgtccatagttgattttattgattggttgggttcgttttgagggagggagtagttttttgttttctcttccttattttggcgctttatggcagctcttgtatacatcgtgtgtactttggtgcagccctttttggcgcttttcaatactactttcgtttactgataaaaaaaaaaaaaagagaaaaagagaagccatatataggtgaccctctcggtctatgctagaaatgaagttgggggtattgttaacacagaggctgatctcccttgcacaaaatcttccctgaaagtagactgatgagccactatcagcaataaattgagtgtgatgaatgaatgcttggtagccttgggttatagctttccaatgacattggtataaagtgcagacaaaaaagttggcatcccacccattattatgcaaacctaaatgcttttagtaacctaattccataggaatttcgcttccttgggaaccaccacagccagttaatgataagggttttattccttatatagaggtttcccctaggtttagcacccccaacagatttaggcatgcgaatcttagtccatccagtctatttgtctcacttcctttacggtccatgttggataaagtcgtccttggttttctcaatctaaatgctatttcccctgaggatttgtagatggaaaggtagcaagccagaatatgagctaggcagccttaaatagagtactcatacctcctaaagatgaatgagttctcttccatctgtcaagccttttatatatttttgtctacaatcaggtccccaaaatgggctgctgtaggactaccagatggtagaaggccaagataagtaagaggccattccttactccagtaatcctacacattatgaaggatgctaacctctccttgtgattggagtcaatattgattacttctgtctatgttgatctcaagtcctgatgtgactgaaaggtctgaaaatgaatgtaagattatggacatttttattgttgatactagagaagaagtagaagatgtcatctatgcattgtgaaaggagattctgactgtatttgtatgatgaggaatgaaccttggggtttatcaacaaaaaagtaagccaagaatagtttgatttcattgtcctgtttatagtatctattaatttttagtagtttacttttagttaagtttaagtttttatttctttgtctcttcttattatattgggaaagtgtttatttattttggtttttaaataatattcatttctcttatttatttatttttttaaaattcttgcaaggaaagataaggaataagaaaggtgtcctattagttggaggggcccttttgtgggtaaaaagaggaaaaagatttggaattccattccgttgtgtattttttggacggtttggaaggaaagaaataggttagcttttagagggggctctttagctattcagacactcaagaattcttttgaatgtagtttgtggagttgggctaaggtgtatatgggagaggagtcctcttcgcttttaggtttcttggagtggttagcggctccttaagggctggtgaggttgttttgtttttgcacttttggccttgtggatgctttgtatactccctgtatgcgttgcggcctttcggccttttttaatatattttgcgctcatttatcaaaaaaaaaaaaaaaaagaaaggtgtcccattaggaaagaatgtcataagggtcataagagtctaccatttgtaaagcaaagtcaaaaggagggctaggtgttcattctctttcgttgtttaacaagaccttactttgtaagtggtgttggcgctttgctagcgaaagagattcattgtggaagaaaattgtatgagggaagtttggggatgaggaagggggatggaggttagttgtggtgagagattcctatggggttagggtttggaaaaagattgggaagtagtgggagctttttaattcaatgatttcctttgcgggtgggcaatgagagtagggtgaagttttggaaagacaggtggtgtagtgaaaagccattatgtgagacttttccgaccttgtttgtatttgatgctaaagaagcttgggtagttgatttctgggatcattgtggtgaaggaggaaattagaaccttttttttgttaggaatctgaatgattgggagttgggtgtcatggaatgttttctttctaaactccaaggacatttagtgaagagggagcaagaggatagagtagtttggaagggagataataaaggggttttctttgtaagagggctatattctttgttggtgattgatgaaaccatccctttccctttaaagatagtttggaatccatggattccttcaagggtgagtttcttctcttgggaggcatgttagggaaaggttttgactttggattagcttcaaagaagagggtggactttggtcaacaggtgtgcattgtgcaaagaggagttagagtccattgatcatatccttccttactgtgacaaggcgagattattatgacaactaatgttttccatttttggtgtttgttaggttatttctaagacagttagggagaccctcctagggtggcatgattctttaatagaaagaaggcgtataaaggcttggagagcaactcattcttgtattttctagacgatttggaagaagagaaataagagattctttgattgcgagggattgtctaatcaaaggttgaaaaatttattcttagacaatttctctatgtgggttagggtatatataggtggaggttatatgcaaatggttgatttcatagattggttgggtcttggttgagggagggagtatttttttgtcctcttttttgttttttggttggtgctatttgtatacgacgtgtattcttttgtgcgctttctgcgtttattaatacaatctcttacttatatatatatgcctatgtagtttttttttaaagtggagcatccgatatctaataaagaattttggcatccgttatgctttctttgagggtgtgattgtctttctcttaaatgtggttgcttaggaagccctatgtgtgattcccttagaatgttggtttgattgctaagtatttctttacctcatttctgggctatcttttattcttttcacctcattttataatctaagaaaatcctttagtgtaaaattttttaagatcctctatcagttttcatattagagcttatgacagcactatgacaacttgaagtagtcagggttttagggagaaattgatgggtcggcatgtgatgatgaaggtgataattcctttggtgaagttggatctttaaatatcgataatcttcaagaaggtgtaacacaggtgcacccctaaacgaaataaaacacaacctagagtgcatgccaaatttatagaatatgattcaaaattcaatcaaagcaacaaaattctagatttcaaacaattaaaagaatcattgaacacaaaactgttgaagttattggaagtttcaatacgcaattagaaatttaaagaataaaagttttaaaaaggaaaaagaacatatatgaggtgacctttccaataaggtgtgggctttggcaggtgagatgctatggctaggattggttgcaccttgggcataggcatgctttagacacgtcttttaccaactatgggttttaaaaagttaatagtgcatgatatcatgcaacaaaatgatacattttttttgaaattaataaagagttattatattatttgtttaatgtatggtaagattagaaattgatcatagaggggagagagagatcttttgtatgtaatttttggtttttgactaagtcgattgtagatgaaggactcttcctttaatcagtttttttgattggttgggttttagatgagggctagtgattttttgtatcccctcttctttttgttcttgctttttggtgcctcttgtatatctcccgtatgctttgggtcagccttaaggcaccctttcttctaatatatttttttctgtgcgtttacttaaaaaaaaaatagaggggagagagaggtaaaataatcctatttacaaaacttcattgttgtcaaatgtcgtgctggaagttaagtgaatttattcttacaatgaatattagagaattttcatttgaatgatttgaatgttaatattgaaaataatgatgattgatgaatataaacttttgcttaatatttatttattttaattattattgggaaaggaatgataactaatatgaaaagttagcattttgaagatgacacaaaggcatatatatctacaacacatatgcctacttaaaagttgaaactaaaaatcatatctacaattttagaaagtttatttttgtggattttgcaatcaatttatacattaaactcatattttgttaaatttaacttccaaaactctagtatctaatattttcacatgatatgatatggtttaactccttaaatcctattatcttttgtgaaattggttgtatattacatggtacttcatgtttctagtatctatgtacatgtatgcatattttttttcatttatttttcactatgaaaagacttacacaacatgaattatttttcactacaaaagacttacaatacatgaaatatataaaaacaacacatgatacactgtacaagttaacaactgtgattgggggtgggggtgggggtggggtattttctcaatagttaatgctataatttggtgggactaggattactgttccttattctactatgatcagtttttattttttagttttagttagctcgattaatctcttatttctatgtgggattgctttgggggttttagttggattagttggttgtccttattctactaggtttttccccttttgaatagttttagttggattagtttggtcacttagctagggtttgtgagtttctgatctacatataagcttgtaagtctttcttaaagaatcataatatcataacagaatttagcagctttgcagaactgacaaattagacatgctgtgtcattcaaagcattggtcagctttattcaatcaatctagaaattcctcatcttgtaatcttgaattcagctacattgacttttatggaaatagatctaggtctaccagccagttgaatagattactgctatcattaaaggacatgtcaaatgataactgatctaattccagcttgatttatagaaatttttttgaaggctaacaatgttcttgggaagtgtatttcaaccatattatgaatgtgaaccacagccttaatgtgaatgaaaccatgtaaaagattgagataaaaactatattagtatgggcttatcaatgaaaggaaggctgaggagtgggtaaacaaaggaaaacctcattggttatgctgtgctaactttcaggcctaactggttgtgccatgctaattctttgtataaaatggatttgagtgggatccaaaaaaaggctttatgctttcaaactacaatagtaggagagggaaccaaaaaaagaaaaggaaaaggaaaagaggaagataaatatccacagttgggtttcttgaattgccaagaaaagaaaataacaaacaaaagagatcccatattaaagataacaaataatacattaggaaactccttaaggctatagattatagtggttacattttgttattagtaaagtgccatggcctttaagttgttttatgccttgcatttgacaattttaagtggatgtgggtgcttctcacatcttaggatatatgcaagaaaaataaaaaataagccaaggcaatgcaatagaaaaaaatggaaaagaagtgacaaagaagggaataaagaatcctcttggcataattcaagagacggaggttctaaacattttttttttttttgaataaataattaatgaataaatttttgacatgtaaggtatttgtagagttaattctaatcctaagtgtggtagaaaaaaatcctaattataattgaattattcctaataggaaacataaaataaaagcctaaataaagtaagagaactaatgtaataaaaaggcttgctttgtggaagaaataatatatctcaaaaggtgaaagacaaattttgattaagagcaccttatccagcttaacgatttacatcatgtccctttttgtcatccctttttgttaacttgtaaaaattatcgtgtatcatttttctatttatttttatcatgtattgtatcatattgtgcattgtaagtttttttatatagtaaaaaataaatatgtgtgcatatctattggaagtatgaagtatagagtaatatataaccaattttatgaaagataataggatctaaagaattaaacgatatcatatcatatgaaaatattgaacattagtgttttgacaaattcaaactaacaaaatatggcgctaacatacaaaatcatcacataatgcacaaaaaataaaattctcaaattttttagctatgatttttagttcattctaattaggcatttgcacttattgtattgttgattgattttctagctatgatctatatgcatcatcttcaaagttccaactttaccatatttgtcaccattccttctccattgaaaaaagaaattaaaaaaaatgctaatatattaaattcaaactttttatttgctaatcaccatcatttttgatatcaacattcaaatcatttaaatgaaaattcatcaatattcattgtaaaagtaaattactggacttctaatttagcatttgacaacaaaaatgtaacttttcatataaagttattttacatacgtctcctttctatttttaattttaaaatttttagtgcattttaagcaattaatataataaattcttttaaaaaagaattactttggtttttcttaaaaattatgtaaaatagttgaagatgtatgtattgttgtatcgttatatcatgtatcgtaaaatatgctttaaaataagatgtagattgcgatacgtattgatttccataaaaaatatatcgtgccattgtatcataagttaaagagttctaagttctaattgcctcacctgtttgttaggtattgacttcctttatcaatcatatatattaatgatatttgttgaagattattacagctgttgagtattattacagctgtaatatacagctgtaggagatatacaaatctaatagatagctgtgtaagttgtacagctgtaagtacagttatatatatatatatatagctagatgtatatttatgtatataatccctaatttgtagggattcttccttattctttcttttcttccttgttctttcctttatatatttcattgatggtatacttccaagatttaaaaagaatacaatttttctccacaatatttaaagtaaataaagacttttatatcacttcttttattgatgtgagccatttagtttttctaagagggtgtttttttttttaggttatttgtttttctactttttcataacttgttataaatttttggctgaataaaaaaagacaaaatatttgttttttatttaaatgaaaaaagtaacatattagttttgctttaccttttagtacttaatagaaataaaatattacaaaaacaaacaacctaatacttactattaagtgctatttagtttttttttttgatagataaattaagtgttatttagttttaagttctatttagaattaatttaaaaaaacaccacgtaattctattggaagtctgtttttgtttgattgtccacttataaaaaacaattattagtttgatttccatggctacagtttgtttactgagttccatttttatgtttctcttttcagattattgctgtgatgtttttattgttattaaatcttctcttttcattggacaagacagaaagttgtgtattgagtttcatttttgtaattctcttttcatgttattactataataacaataataatgttattattttaaatcctctctttgcagaaggacaagacacagaaacgcaggctaggtccaga

SEQ ID NO: 11627 - DNA, 28376 bp, Vitis vinifera
  Intron number 2 from transcript GSVIVT01009855001 (locus G SVIVG01009855001) derived from phytozome v7.0 (chr-ID chr1 8; pos 11804402 to 11832777 reverse strand)
agatcccacccaaaaccctagtgtttgtgaatgcatgggccattggaagagatcctgaggcctgggaaaacccagaagagttcatgccggagagattcttgggttcttccgtggacttcagaggacagcattataagctgataccattcggagcaggccgaagagtttgcccaggattgcatatcggagttgtgacagtggagctgacactagctaatcttcttcactcatttgactgggaaatgcctgctggaatgaacgaggaagacatagaccttgataccatacctggtattgcaatgcacaagaagaatgctctttgccttgtggctaagaaatataattaatggacatctagtgtatgttcctgtaaaagttatctgagaataatgtactcttaatcctgcaattttcttgtttggatcaaataatatgacctaatattttatggtattgatgacggtactcaattttatataatgttaattgcaccattttcgtattgaaattcagacgatgaggcgatcatagtgacatctccttggttattagaccatgggctcaatccatttttcctctacttccaagataagtagaaaatgcttaagaacaaagtggtagaaaatatcaaaccttaaagaaagattcagactcagattattttcatttttcattcatagtttgaggtccagcaggatcgatccaggaaatatatcgtccactccattcttggaagtgtctctctatatttgttttcatcttactgtcttattcaatgaaaagtcgtccatgcctacaagtcattcattttaatattattataatttgattcaaggtttctacaagagtttgttgtacaaaaagttaaaagggtacgttggtaattgtattttaaaatactcctccaaagcaatttataaaaacagttattaaaaattattgcctcatttttataaattaaaaacttgtttgaaacctaaaatattttaacatgtttttaatatttttaaataatttttatatctcgtatcttatttttaatcattctatattattgtataattattttttaaaatagtcctcaaaaaataaatagaaagaacataaaacaattaaaagatatttaaaaaaattattttctattcttaaaaataaaaatataattttttttattattattaacttgtttttttttttttttgtctttttttgttctgaataacaaaaaaatattttaaaaaatagttaccaaataatgaaatttaattaatacgtgaaatcagagaaatatatttaaattaaagaaattcaaaagaattctttgtcaaaattcaaaagaattctttgtcaaaattcatttattcagctacccatctccaagcttccttgtttattgtttttaatttttttatgaagttcaaaacgatccgacctaaaagtgaagcaaaatgctatggtttttttaatttcattaatgttcgcatgcatggaatggggtcccaataagatttgaatgtatgtttcaatttagaagacccatataatttagacaccccttcctcccttttatttcaactatatttagttgttcgaaatttgaaagaaaataaaatagggagaaaaagttaaagaaaagacaaaagaaaaaaaaattaataaattatttttatataatttaaacttatttaacgtattttacctcaattaaataatttgaaaatacataaatttttaactaattttattcatattgacttttttttcgtatttttatagaaggattaaacatgagaaaattgttttcagtgggttatatttggttcttcaaaaatattaataaaagaaaaaaaatgcatatattggttgaaatatgaaaaatattaaaaataaataaaatataattaaaattagttagaaacttatgtattttctaattatttaatcttaatattaaagtaatatataaaaataatttattaactttatacttatttttatattttttttcgcattttctttccttctacttttcctctttattttctttcttttacattttcttttatattttatgaaaactaaatattgtcttagtattttattcttttcttaatactttctagaaatcaaacctaaccttgaagtttttggtgcatttacctctaaatatcaagaaaaaaatcttaaatttttgtatataattataaagtgaaaacccttaaaataactaaagttatgtttggtcgacgaaataagataagatattatatgtatatgtaaggatatgataacccattggataggaaacttatatcttaagatataattttcactggatatgatattcttgaatgttatatttaaaggacaagatacatatacaatgaaatatgttatgtaatatttatatttaatttttgaaataaataaaattttatatatatataaaatacatgtgttaatattatttttcaatatatttataagtatttttgagttattttaatcacaaatttaattttttttataaacattttgtaaaataaataatataaaaataaaaaattactaaaaataccgataacatgcctttttttttttttttttttactttttaatttttgcttccaattttcatagggatccacatctggatccaggttccacttgtacaattgcagtgatcataaaagtccttcgaaactgtggtacttcacttaggtttaaattgtagccgagtccaaggggcaatccatgggccagcccaaaagatattgttgaattagggacaaaacctaatgtagagatttcatgggtttccattagtggtttgatttcagccaaagaatgtgtcccacgtgaattcatggagcagactgtgttttcactttttcatctttattgggctgggctacagatttttgttaatggtccgagtgagattataggttgcatggcccatttaaagcacaagaatggttacaacttattatagtattttgggtgtctctcatggaatctgatggtctaggataatttatagggaaaatcaaatttagatactttttgttggattgtaaagcttgaaccaactttggtgtgctttgcttgggatgttgagggtcaaactgctcaatcagctcgtaggggttgagttcctattatatattttatatgatgattgacaagtttgtccatattccatattttaacctttttatgttttagggttttgttttttagtgagtgcaatcgcaattgagaggttttttgagagcttcaccattgtactccttctcattcattttgattagtggattcttgagtgttggtgtacttcatgtatataaggatcatattgattgttgaactacattaaaaacctcgtgttttatgtgttcatgatttggttaaactagtattagagccttaggtttgcaaatccttggtttgacgtgtttaaccaaacaccgtagcagaagtaatgagatcaaagaaggattcatacaaaaccaagaaattcaatggtacgaatttcagtttctagaagatatagatagatgattatttatagtaccaaaaagatttatattttccattaggagaaaagtcatattcgatggatgaaaatgaattgaacttggtagatcgcaaagctcttggtacaattaggctaaccctatcgaaatcggttgccttcaacataaaaaacaagaacacaatagtgtctctcatggttgccttaacaagcatgtacgaacaaccctctacaacaaataaggtatacctgattaaaaagttgtttaatttgaagatgcctgagaataggaatttcaagcaacacttgaatgaatttaataagatcatggatccattaaattcagttaatattaaatttgatgatgagatttaagccttattaatccctggttaattgcttgagagttggaaagacatagtcacttcaatcagtagttcatccgaaaaatcgaaattggtgttttcagaagtaatggacatgattatgaccaaggaaatcaggaagtatgaagaaagtttttccaattcaagatcaacattaaacatgaagagcaaagacaaaaaccaaaataaagataataagtgtgacaaatccaaatcgaggaatgacatgccaaaatccaaaaattctaaaaattctcaacatcagatgagtaagaaagatatgaaatgttggaactgtggaaagaatggacactataagaatgagtgcaaggttaccaagaaggataaggatggtgacaacaagaccaatgcaaatgttatgttatgttagaagaatcggatgatgctttcatttgctttttgcaaagcaaaacaaaatcgtggatgttggattcaggggcatcatttcatgctaccttaagtagagaattatttgagaattatgtctcaggtaatctggaaaaggtatatctaggtgatgactaagcatgtgatatcattggaaaaagtgaagtacagatcaaactgaatgtgtatatatggaagttggatagtgtgagacatgttccaagcctaagaaataatcttatttctattgagcaattggcgaaagatggctatgtgacaacttttgcaggtgacatgtggaaaatcttaaggagagcaatgattgttgcccgtggtgagaagagtagtactctttacatgacaatagatggtttgtgaatctattgtaattgttgagagaaaagaagatttgaatctatgacattagaggcttagtcacatgagcagtaaaaggttggaaattatgcacttgaataagaagctatcaagtttgaagtcagttgacattgacatgtgtgaaagctgcatacttgagaaacaaagaagagttaacttcaagaaagttggaagaactccaaaagaagcaaaactggagttagttcacatagatgtttggggacccgcattagtttcagctattagaggaagatcttattttgtgaccttcattgatgatcattcgaggaaagtgttggtatactttatgagacacaaattcgaagtgtttaatatattcaagagatggaaagcaatggtggagaatgagacaagtatgagaattaagaagttgtggtctgataatggttgggagtataaagactttgagttcaagaagttctattatgaaaatggaactaaattggagaagactatgctagggacatcccactataatggtataccaaaaaaaatgaacaggacattgattgagaagctagaagcatatgtatacaggtagggttgccaaagcagggactatcaacaccattggaacacagaataccagaagaagtactatggactaaaaaagaagtaaagctttcttatttgagggtatttagttgtgtcttatatgtacatattaatgatcatggcagaaacaaacttaatgttaaatcactaaaatatactttcattggttatggtgttgattattttggttataagttttgggatgaccagaataaaaaagtgattagaagtagggatttcatattcaatgaaatttttttgtataagaatagagatgcaacaaagtccaacaaacccagtacaaccttaattttttttaaacctttatatctatatttatattttttctttatcaaattcattttcttataaaaattactttagaaaatatttaaaagatattatcactcaaatttttatattttttatttgaaattttcatttaatctcatgtttaatttggaaagtttagggctatttggtaattgttttcaaaaacaattttctatttttagaataaagaaaaaaaaatgtttaacaatcaaaaactattttttgctttttattcttaaaacaaaaaataggttgttattagataataatttctagttgttttctaaggatttttttttaaataattaaataaacatgtaaaatgattaaaaataaaacattatacataaaatttatgtttaaaatatatttaaaaatattaaaaatatgttaaaaatattttaggtttttaaatttgttttacaaaatattagaaaatggtttttaaaagctgttttcaaaattgtttttccaagctatttctaaaaatagttatcaaacagatttattttcttttaaaaaaatttataacatttactcaaattacatggtttcagttaaccctatccatattaaaaagcatgcaagccttttagaatgtgaaaatatattaatatttatttcatttaaaattttattattcaaatattgacccctaaacctaaaattttatgccattttaattgggttattcaggtcatagtcatctaacagcctaaaaatcattcagcgggagagctctaaggtagcccaagcctacttaggccctgtttggcaaaggttttgcctaaatggattacggtgggccgtttttatccaggtttctccgtttcggatttaggcccaaaggaacgaccttaatgaggtttatccaacgatgacccatgtgtaccgatgggcccaaatatttgtcttgaaagaagttgggcagcccaccaatgggcccaaaagatatttctctaacacgtagagggttaagtgggctttcaaaggacagaggtttctatcgatatattcaatccgcatgatcaaatccaacttgcgattggatttgaaaacaaaataatcattttagaagtccataaaaaataagctataaatgaaataataaactcaaatttcaaccaccaatgatattttaacatataaataaatatgatgattcttaaatttaaaataaaataatatataatataattataaataaatatataaataaaaatgtacgagtccaatggatataaatgtttaatttttttttcaacaattatcttctgttaagaaaagaattaatcaattatttttatttattggaaaataaataattattcagtttttaaaaatagaaaaatgatttttttttctcttacttagactaattattttatatgtttgtttaaaggaaaataaaataagcaataaaattctaagtggttcaaacccataactttgcctcaaaaggaaaattataaaaaaaaaaaaaaagttggttgggaatgataatgattggaaaaagtcacttatcttaataattcctatgaatgacaaaatttattataagacaattttaccttttaaatatgatttttatttttattttatatatataaatagtgcatatcttgttttccaaaaaattatttttctcttttaaattatcaacttactatttaacaaagttttagtaagaaaagtcaaacataaagataattttattatttagaacttgtaaatgataagtccaattgaatgctagaatttacgtgaagatagtttaattaattgtgtattattaatgtaatttattactttgtattagcatcataaattattttgtattatcacatcaatctaagtatatttaataaatttatcatttgttttggttacttctttgattaagtggggttgaaaaaaaattggaaaagtgacaaaaaaaatttgagaaatttttagaaaagtagataaaaagaattaattttcaatatcttttaaatagaaaccaaatcctaatgttatcatgtgatcatatatatataacataccgttaaaaatattattagctaataggataaacaattattttcacgagtagttatcaactaaataatatacaaatattcaattgaataacacaactattcatttgataatatgaaacgtgaaaaaattttaaaaattaaaataaattatattgtaatgaaatttaaaaaaaaaaaaaactaaatgatattgtaatgtgttgtaatgttagtgtaatatttgtattataagtataatatatttatgttgtacttatattttatgacaaaaatgataattctagaaatgcctatttatatcctattggcattggtattaatacatcatatcaatatattaacattattcactcaatgtagtaaaattatttaattatataaatatatatatgtaagtctcataaattcaaattagtacttcatttggtttcaaaaatgattcgaataagtatattatgaaatataatataaaaataaactaaatgatattgtaatgtgttgtaatgttagtgtaatatttgtattataagtataatatatgtatgttgtacttatattttatgataaaaataatagggagaattatgtttagggggtagatggacccccaaattaacaaaaggtccatgtaactcttcaaattgagtccaagacccaatgaaagtatagaaattgagttgaaggatatcatccttcagtatttccaaacatgccctttattgattttgagaaaaaaattaatattttttgaaaaatacttttatttaatttaatatttttaaaaaatatttttatgtaatttaatattttttaaaataattttatttaatttaatattttttaaaataaatttatttaatttaatattttttaaaaataaatttatttaatttaatattttttttaatactttaatttaatgtaatatttttgaaaaaaaaatttaatttaatatttttgaaaaaaaattaatttaatttaatatttaaaaaaatatttaatttaatatttttgaaaactacttttatttaatttagtatttttgaaaaaaaaattatttaacttaattttataaaatattttatatatgttcttaaagggtatatttatccattactatttcatatccttcaactcaatttgaagggttatatggaccttttgttaatttggggcccatctacccccaaaacataattctcccaaaataataattctagaaatgcctatttatatcctattggcattgatattaatacatcatatcaatatattaacattattcactcaatgtaataaaattgtttaattatataaatatatatgtaagtctcataaattcaaattagtacttcatttgatttcaaaaatgattcgcggaataagtgtattatgaaatataatataatcatataaaactatcatttttataaaaaaaagtttaaaattttctcaattaggttttattataatgtattgtactataaatatatttatattataattataacatatttttgttatacttttattttataatagaagtaagagtattagagatgcttttttatacctcattgatatccaacatatcatatactactcatccactcaatgcattgaaaataaaaaaagaaaaatcatatataaaaattaagaaaaaaacactatgcaaagaaaaaaaaaatatagaaaaatcatataacttttttaaattaatttattataagaaatacaaaacattcttatcattttcttatacttttagacaagtgggcacacaccttaaatgtcattacaaaaaagtgaagtgtttaaaatgttttgaatttcaaaaacttttagttgaagggcatttttgaaatttcaacttattattatataaaatggatttggatggaagttttgaattttggttaattttttatattattaaaattgattatttgaagtgttgtattttgtttaaatgcatgaaccttattaaataaataaataaatctataactatgtcaataaagtcatcatataggagtccaatcataataatatcaacatgagatgataatttaaggttgaaaatttcaatttgaaaataataccaccgataaacgtttaacttaatggacgggaaataatagtattaatatgatataataatctaaagttgaagacttcgatttgaacaccatcattacttattgaataaatggacgcgaatacgatattctcataattaacctcaagttatattcataaaatttatattgttttcaagtcttactctcaaatcatactagaaatgacctatggtaggtctctagtaaattttttagacaacataaactaattttgaaaattaaaatatcaaatttgtgatccaattaaagtcattaaagtcttattcttatcatttttagtcttataaaccattattgtcaccgtatttaatgagacataaacgtgaatcattaaatctaagtaaacaaaatagcaaagaaatatttaaataataaaaaaagaaaaattatcatcaatcggacagtgtcatgtattttttttaggtcttatttattataccctaattttatttgttttatcttagttccatttgttcatatcattgttcaaaaatctatttaattttcaataccaagcattaatttagcatttttcatgaaaaaaatgctatattttagaaaaatgtatttttcattaagagtcttactgaagacaaggcagtgacgaagagatttctggccttatcctaagattttagaaaaatagtataataatttttctcactacccactaacccacttctctcactaccttccaccacccactctcccataaatgaaaaactcatgtataaatttgatcatttccttgatactttcgtactcaaatatcttcacgatcattgcgacgttgaccagcatgataattacattttgaattttctgagcatgcactaagacagtcttactgtagacaaggcggtgacaaaagatttctggcattatcctaagattcctaagattttagaaaaataatacaataattttaaaaattattatattttatattttatttatattattttttaatattcaatattatttttataatattaatgacaattaccctgatgactcctatcccacttataattttttgtctccctcacttgattatatatttttttaaaaagaaaataaaataagcaataaaatccaaggtggttgaggcccatggggcagaattacatcaatctttattaagtagtacgacactaatacaaattaaccaaaattcaaagtgttgtatgttacaccttattaaaaaaataaaaaataaatctatgactatgtaaataaattcataaataaacggacaagtaataataatatcgacatgatataataatttaaggtcaaaaactttaatttgaatacaatcttgttccattgagtaaatggacacaaataagatactcacatgattaaccttaacttatattcatacattttatattgtttccaaattgtactcacatatcatataagaaattatcacttataggtctctcataaatttcttaaataatataaactaattttaaaaactaaaatattaaatttgtgatccaattaaagtcattaaattcttattattatcatttttaatcttataaattataagtgttaccatatttaatgagacaaatacaaatcattaaatctaagtaaacaaaatagtaacaaaaaattataaatattttctaaatcaccaatttgagcaacaaaaaaaggcatgttttcgatacctattgaaaaattatcattaatcagataatgtcatgtattttttctcgggtttcattgtttacatcttaattctattcgtttatatccttatatctgggttgcttttatttttcaatatcaagcatcattaaggtaatttaacatttttcatgaaaaaaaaatttataatatggaagacacttcagtatattcaaacgaagcatgcgtcttcttggaggaattccaggcctaataattgaaacgtgaagtcatcagccgcctgattgattcagaagttgagttccataattccattcaacaaaccaagtggctgattccataattgaaacgaagatttcttcaaatttattttcaaattataactccttttaatgtcatctaggcgtataagttcttttttgacttaggttgaaattatattttaaaaatacgattttttattttatagtgaagttttattttgaaaatacggcttgtcaacttgtatttgaaattaataaaaaatcgataaatacatttttaattttctgagcattaagagagtcaaaatgaagacaaggaagtgaccaaaggtctatttgaaaattattttctagaatagctttttgttttcaaaataaaaaaaaaaaacaaaaaaaacatgtgtaacaattaaaaaactattttttgttttatgtttttaaaaatagaaaataggtgttttcagataacatattttagttgttttcagttattttaatttattttttaaagttattttaaaaaataattataaaaaggaatgattaaaaataaaattcctaatataaaattatttttaaaacatatttacaaatattaaaaatattttaaaaatattttaaatttttaaatagacttttgttctataaaatataaaaaaaacagttttaaaaatttattcttaaaaattatttttttagaaccattttaaaaattagttgccaaagaaggttgaacatatttctagtcttatcctaatatttccaagattttagaacaatattaaataatctttagaattatcatattttatattttatttaaattattttttaacattccatactttttaaaatatcaatgaaaacatcagtttaaatacggaaattattttttaaagataattttgaaatttaatagaaatggtctctttgaaaaacagattttaattaaatttttaaaagatatggtaaatttgaaaatacctttaaatatgtgttaaaattcaaaatccgctgatttctagaaaagtcacaggggtaaaataaaaaaataaaataaaaaaaggattatattagtatacataaatcgacttggggtaatatggtcagtggagtgatatgaaagaaattgtttatatatatgggatgtgatgtgccacctatctcacttataatttaatatgtctgacacgtcacgttttgtcttgtatggaaaatttaagcgtttatatgttttaaaattaaggccttgtcttttgagatctgctccacatactgaattattgggttgatgaaaattggtatttcccatgttttaaatgcgtttatatggtacgcacaagggtcatgataaaaaacaaaccgtggggtttccaaggattttctacgagagtaatgcagttttaaaaaataattcttaaattaccattatgaaaaaaataatttcaaatttattgtaatttttatcatataaaaaagagaacgttatttccttttaaaattgtctacgatttatataccaaagaaatggtcttttaaagatataatttttaaaattcatattttaaaaaatttgcacactaaaatcgtcttttgaagagatcaatttcttaaaaaagaaaaaaaaaatcatctccaattattttttaaataagaaaattttcttaaaaaaagaaaaaaaaaagttgggagaaattgtctcttcaagagacgattttctcctttaaaagcaaaaattgtttaatatataaaaaattatgattattgatatatttatcaataataatatttataaaaatataaattatgtttaatatttagatattgatttaaaaattctttttaatcttcaatttttttatttaaattaattcaattaattataactaataaaattattttactttgatattgttttttatttataagataaataatatttatccaatgtttttttttgtttcttttgctttgtaattaaaaatttattatcaattttatgtgaaaaatgcgtttataaaaaacaaatttgttattaatttatcaaataattatttacaaaataaataattttgtttttttttttaatttttagagtaattttattatataaaatttaaaatttaaaatattaatctttaatttaaaatttaactataaaatgaataaaatatagaaaaataaaataatttattattcaataaattaattttcaataaaattttcagcattaagagatataattttttaagtattaatcaattttaaaagaaataataatcatttgtatattaaaatattttatttagtaattataaatgataagcaactaaagtaatttgaaaatataataaaatatttcttttaaaataatttaatacacttaaaattagaaatgattaactattttttattaagaaaaaatcgaggaaatattttgttatataaaattttttatttgttttcaagttttaatgttataggtttcaagaaaatcgatcaaataaaaaagaataaataaaaattaagaaatcattttttcaaaaactatatatccaaataaaagcctgaaaattcaaatacacaatatcataaatataaacaccaagtcaatccttaatatcaaatatttttaatattaaagaatctaagtcacctactatcgtgattataagaaaaccaataatattgttcatgtaaatactaaaaccaacaaatatcccaacaattaataaagtaccaaccatgataaaaaaaaaaaaatcaatttgtggaccccgcatttcggttcaatgcgtttcgatttttatttcgaaaaattgatttttatttattaaaagaatgacttggagtcgccacttatttttgttttatttttaaagggtaaacaaaataagaaagaaaaaccctaagtgtgactcattgttttggaaaaggtggtctgtgaaaaatcggatcgggttcgagggtcaggttacttattgggaaggtacgacaaaaaccgtagcacccctctaagcccctagagtcgggtctctactaataaagtgaagcaatcatgacaattgatgagtaaatcaatgaatacccaaagtgatcatgcacatatgagagtttgaatatgcataaacaatgatcagatggaaagtaggtacgtacctcggcaataagccaccatgcactatcaagagagagggttagtgcacaattaaggaataatagcatgcatgtcagagagcaggataaataaatcatgtataataaccaagtcaatcaattgatcataagatcatgtatgtggggcccccaccaaagcccaatctatcttgcattaaagatgagtgacagttcaggagacttggtcgtcagtattatcggagtttgcttttttattgtgggcggaaaaggatccagtgaatcacgagtgtttgacgagccaagctgtccggggaatctgaattgtcggctgtggatgctctccgggtaagcgctatcagaggatccggacatgtctgaccggggaagtttaatcatcctcctctcccatccggcgtcaggcgccggatgtgaaatatccggagaaggtggaacgtcggccggactgaattccgacggatgtgaaatatccggagaaggtggaacgtcggccggactgaattccggatgtgagatatccggagaaggtggaacgtcggccgaacataattcttcctcgggtggaatgataaaaaaaaaaaaaaaaaaaatgcaggcacgaccccacaaatcaaaagcatgtgatgaatcttttctcaaaattttccagaacagagagaatgagtaagtatactccaggcatcgaggataacccgcaaacaatcaagaaacagaggagagcagtttaaaatagtcggtgtaaacaagttgaaagccaagttagaaatcaagcacaacatggaggcaaacgaactcagattccataagaacataataaaatctccaatgctcgcatccaaacaccaaaatagagtcttatcgatatccaaaaacaaaatagagaaggtaatgaatagggtccatacctgaaaagcttcctcgcagatcgaagctcacttgacttcgagcccctgtttttatgacccttctggaaaatgcccagatcaggaccccttttcccccaaaggctcccccctcgaactctcctctcctcttttttttcttctccttcttcttttctctttcccaactgctctcctattccttactcagctggtcaccatcccaactaacgccatggccacggtcagctgctccgacacatgtttcatgtagctagcttgaagaaaataggtcctccacttctggcaactggccctctccataacagaaagaatacgctcctgcagattccttgccaggtgtcgccttttggttgcttcttcaaaagcactattgtgattccttaccaatcaatcaggagacagcatgtggcaccttgagagccttccacctgcaaagatgagctgtaggaaaaatgaggtataatgaatcccaaacggggtctacacaattattatcatgagttcaaaaaactaataatcttgttcatatgaaccatcaacaaagaaataatcaaaaaaatctatatctaaatattaaacataatttatatttttataaatattattgttgataaatatctcaataatcataatttttttatatattaaatttagtaaataaaattaattaattttataatatatatttataataattatattattaaaaaatatatcattaatttaaaaaattgtagggaatagaaaattagattttttttttgggagaaaatcgtttattgaagagatgatttctcccaaacatggaggaaatcgtttcttcaagagccaacttctcccaatggtctcttgaagagacgattttagtatgtaaatttttttaaaaatgaattttagaaatcgtatattcaaaagacgatttttttgatatataaatcgtttttcaaagagatgattttaaaatgaaataacattctctctcctacttggaaaacactatgataaatttgaaattattttttccataacggtagtttaggaattatttttttaaactgtcgtacttttataaaaaatatgagtttccataagggtgaagagttaggaaagaggagcgaatttttgataagagtatgacagttttaaaaaataattccaatctattgtaattttgttcagataggaaagagaaaataaattgtaagtgaaaaatcatctcttcaaaagatgatttatgaacttttaaaaaaattataaaaaaaatcatctttgcaaaacacgatttctaaaattccattttttatatgagaaattgtctcttaaagagacgattttaaaaaaaaaaaaaagaagtgagaaatcgtctcttgaagatatgattttcaaaaaaaaaaaaaaaaccttcaaaaagtcaattttcccattctttattccacttatacaataatacaattattataaatatatattataagataattaattttatttattaaatttaatatataaataacatgctaaatttaatataagataaataatatttgtctattatttttttctctcttactttggaattaaaaaaaaactattatcaatttatgtgaaaaatgagttttaaaaaaattgttattaatttattaaataattatttataagatacataattttgttttgttttaatttttaaattaattttattctataaattttaagattaaaaatattaatctttaagttaaaatttgattgtaaaatgaataatttcacatctttttaagagaatttaacttaccacaaagcctccattacacacattatatcatttccccaagtccaacaatgtactacacccatagtccataggagaatcttacttattatgtaacgacccgcacccaaccatgtagatattgtccgctttgggcccaagagggccctcacggctttaaaacgcgtctacttggttaagaggagcctctacatatatagcgccaggaacttcctcccctatccgatgtgggacatcacaaatacccccccatgcagacacaacgtcctcgttgtgtcccatgggattgcagggccaaacagacaaagccaaacaaacccccacaccggggtcggggatcggctctgataccatttgtaacgacccgtacccaaccatgtagatattatccgctttgggcccaagagggccctcacggctttaaaacacgtctacttggttaagaggagcctctacatatatagcgccaggaacttcctcccctatccgatgtgggacatcacatattacactccacttcacacactattacattacaattctattggaacactcaaccaatttgtataccgtttaaggtgttgtcatttcttctgaaatgtttaaacactccagcaatttgacaatttcaagtattgtcatttcttctgaaacattcaaacgttcaccttttatcctacacactacacttatcatactttttctcaatttcacttacaatataaatcggcttcaaatctcttcatcttcattttctcatttttccccatttgaaactcaattttttactatccaatttttcactttccatctcattgctctctgggaacttcttcgcatatttcatctcttttcttcggacactcacactggttatcttgaaagataatattttggctttatttttatttcaagttattttgtaatgtatggtttttattattatataagtttttaaatttatttgaattatgtaatatttgtttgaataatatttattcgaaattattattttaaatagattaaatcattaaaaaaaataaaagttatgttattttattcctaggtaatatttttgcctttgtttcatatttattttataatgcatgatagatatttattgttatatatatatatatatatattaatttattggatttatgctaatttttttagaatattatttattgtaaattattattatatagagatgaatagattaagtcattcaaaaaataaaagtgatattagtttatttaattaatatgaactaattggattattgcttatatttatcaatcaaataatatgttttataaaatattaaaattaaaaattaaaaataaaataaaataatagtaaaatgagaatagaaaataataataatagaataatcatatatctatatatttgcataaaatatgatttaaaaaatattaaaatctatagaaatacaacattatccgaaattattaatttatcgtatatattttttaaaattaatgttagtcttaaatcattgaaaaaattattgtaaaacaatgagatgtaaaaataaaaataaaaataaaagtataaataaaactaaaatgttatttgatttattaaaataaatatttaaatgtatataatataaaaaaaaaagtaattgtgtgtaatataaattagtaattgtgagtattaaatatacataatatgtaaatgtatatttaaaatgttaaatagtaaaagtatatttaaatgtatataatatataaatttacatatttaaatagtatgataacatttaatgagttaaaaaaaaaattgtgtcatgctctgaatattaatcgtacttacaccaagttaaatatggtgttttaatatctagtttcctttccaaattgaaggaatactcttaattatgtctttttgcctatttgagatgatggtgatgtgagcataatgtttactgttgtcgcacaatatcctcctccaaatactattgaaatgtattatcaaactttttcaattgataattactctatgtcaagtaactttactaccccaatgcgtattgaagatgtaggtccaagtcaacaaatggtagaagagaacacatcttcccttatgtatatgcaaagttatgataatgacatgaaacctatagttatggtagatttggcagggatcactgattcaattgtaatggcagttgaaaattatgttgatattttaccttaaaatgatgatgacaatgtggagttatttgatgaagatgatggtaatgaggatattatggacatggaggataatgaaaatacagaaaatgatgcatcattgctaggtggtggtgaacatgatgtcccttccccaatatttagagaattgaattgggatgtaattaactccatggtcgacaaggatttggcaacatgcactagattatggaatgaatcaaatgaattgtttaagggtttgcggtttgagagtaaggtagacttacaatatactgttaaacgttattctatatgtaggaatcaatatttgattgttattgaatctgagctagatatgtgggccgtaaattgcaaaaagtggtctgagggttgtaattggaggtttcgtgcatgtcgttataaatttcatggtttgtttgagataacaaagtacacaggtcctcacacttgtgtttaccttaaactatcacaagaccactcacaattagattccacattgattgcacaagaagttcaaaatgtagtccaaagtgatcacacaatttcaattgttgcattacatcaaatagtgaaagataaatttggttatattgttcattacaagaggatttgggaagtaaagaggaaaacaatcataaggatatttggtgattgagatgaatcttaccaaactttacctaggtgaatgaatattgttaaacttactaaccttgagactaaggttgtttggaagacatcaatactagtaggttgcaatggaaatgtacgttttatgcatatgttttgggcttttagggcatgcattgaagtatttaagcattgtagatcagtaatacaaatagatgatacttttttatatggaaaatatatagggaaattttttattgcaactatactgatggtcatatcttccctcttgcatttgcaatagttgaagaggaattgtcagatagttggtcttagtttctttatacattaaggagtcaagtcacgcaaagagaagacatatgtctcatttttgatcgttatacaggaatacaagccactgttagggatcctagtgttggatggaacctgccttatgcataccattgatattgtcttaggcatgtggtaagcaatttcaatgataaatttagaaataagatattaaaagacttagtgtatagagctgggtctcaacatcaaccacgaaagtatgagtcatgtatgactgagttaaaacaattagatgaaaaatgcttagaatggtttaacaggttggatgcgaagaaatggactttgacacatgatggaggacatcggtatgggtggatgactaaaaatattgctaaatacataaatgaagtgcttaaaagggctagaatgttacctatcactgcttttatttgattaactttctatcgttgtatttcatatttcgagacttatcgaatagaaatacaagctcgaattgcaaatggagatttgtatacttcctatgccattaacaaaataacaaatgagatatttgaagtgataatcgcttcctatgagtttcatatggataaagaaaacaatatacaaattgtgaagttgaaagaaagaacatgtatgagaaaacaaaggctatgcttagctaagaaaaacacccaaaagggggggggggggtgaattgggttttttaaaatcttttcaatcacaacaaatttaaacaaaatataagcaaagtaaagatatagagtttagagaattcaaactcgggtttatagtggttcggtacttccttgcctacgtccactctcttcaatctcctaaccgagtgagggtttcactaacttgaagcttcaaccaagcttccaatcttcttacacttggatttcagctccaataggcttttacacaacctcttcaagattcaaccctcttgaaggctttaacactcagattgttacaagatataatcactcaacctagcttaaagatggctcaaatacaagacaaggttaggatggcaaacaagagtgcactaaaggatatgcaagtggtgatttaatgcactatgaaagaaatgagagctttttgatcaagaacaggtaggtaggctttgaatgcaagtgttctcttatcaataaatgaagtgaagctctcaatttataggtttctaagctcaggagtcaaagtcagcaaaaggtaacctcgtccggtcgagctagggatcgatcggttcactagctgttggagcatttaatgcatgacaggttatcgttgcttcaatcggacctcgaccggtcctcgatcggatctcgaccggtaagagaaacacctcgatcgggaagagaaggctattgggagagagagaagatttttgacctcccttgaccggtcctcaactggacaaccacaaccggtcgaccggttcctcaaccggttgatcgattggccatagcctcgatcggttgagccttttttggccctgaaaacctattttttgattcttttcttttctaacacttaggcaaggtctttaggtaaattattaagccaattataaatcattttgcctaaggtacattagttaaaaactcgggttttaatgaaatcgaggttttaatgaaatcgacgttttaaagaataaaccaaattttctaagatgcatgaaacgtatgagaatcctaagtgcactcatgtattcatcttacattagttttctatgatcacaagttttccaagcgtctcgattttgtatccatttggtcatttggtcatttgatgaattttcgagtttatacttgagattcttaaacattaaaccaattagtcacttaaccatggtttgttatcatcaaaacccgattaggaaaacccttgggctaacaatgtatttataataaataacaatcatttggtatcccatgttcacatgtgctagctgcatgtgcacatgcaaggattgattattgacaatttgtcaacaaacattataggatgaatgcatatggttgttgctatacaccataattcaattcaattccacatcaagcctattagctagaacctaatttttcaattgttcatcctaatccaactctagtatgtgataaagaaataccaagatattcaaggattaggaataaaatggattggagagaaccaagtgtcaaagtccgatgtgggctttgtaaacagaaaggtcataataattgaaaatgccttaacagaagagagtcttctaacacaaccgttcaatgatattgtaagtttaagttgaaaattttactatttaaatgaaagttttttgtaacattaaagatagacattgagttatttccatataatgtcattggaatgtcttgtaataaactaatgaaattatttaaatgatgtagataatacattctcatggatcttggacctgtagattgttttgttttgtataaccaagaagtacactgatattcgcttacatgggaaggaaatgatcatggagagctacattgtcgatgttgtgaagccaatttatattgtaatagtgttttagatgcccacattattccatatttgcaacaatctagattctatggtgttgcccgattaggtttcatttcattggattgacaccttattacaacatttatagagaaatggcaccctgaacctcacactttccatgtacctcagggaaagtgtaccatcacacttcaggatgttagtattatttcaggcttactaattgatggtgttgtagttaacggtagcacatgcttggattagagaaaggtgtatgctacattgttaggagtggtgcctgaagatagagatatatttggacaaaggctttatttgacttggttgccagagcattttccttcattggcacctgatgctgatgtggagtccgtgcgatgctatactagggcattcattttatagttgattggaggttttctttttacagataaatcgaataatatgatacatttaatgttgttaccactacttgaggattttggagttattgatacttatagttggggtagtgtttgcttagcttgactatatcgagatatgtgtcgagcatcccgtattgatgtacatgatgtatcgagttctctcattttgttacagttatggatatgggatatatttgcctttatagcacctatgcacttacattcaaccctacatgatggaatattgccacaaccacctttaggcatgcggtatgtattcaaccttagttatagcatatgtaaacacatatatacataaataaacaattatacaaacttctaatatatatattctttttgtagttggaaagatgagttttgtactacttcgacacctatgcatttgttaccccaatataggtatctatttgattgacttatgctaaagtagatgagaaattcattattttgaataatttttttaaacaatttgtaatcaaaatattattaaataatgtgagtcatatttaaaatttaattgcagattatatgggagccctatactgatgatgtcatctttggactcctagattattatactattgcctctgacttgtggttgactatttcacctcttatttgtttctacatagtggagtggtatagacctgatcgtgttttgaggcagtttaggctattacagcatattctcgagcagtgcgatatagagttaagattacataaatatgatttgaggggttgacatatttagattggatgagtattcatcactactatattcaaaggtgggaggctatgtaagatcatcttgctagagctgaggcaacgtctacttcttatgggtataaccacccatatatggtgtggtatcgttctatcactcgtctttttcttactccacttggatcttcatgggagatagtggtaattacaatgtattttattattatttattattctattttcttctaattagaaaaacatctaactttttattcttaattcttatagaatcatagtttgcaatagatacatttgtggattggtccaaatacttcgaatataggtcatcatgatgaaattcatcaattatgtgcaaccactttagaggttatacatgaggctgataggttgcttattccccccaatgtcgttgatacatagagacaatcatcggatgaggaggtaatgatgagagatggtgggatatgaactagaggtggtggggtttggactacaggtggaggtgtaggaactaaatgtggaagtgtacgaacacctggatgccatatttctaatgatccacacttccctatcgatgatgcatcactagattttccattaacatggcctctacaacatattgccttcactttttctacaccatttgactagtcattaccttattaatcagtttcatccattgatgagagggtgatacaggaagatgttgggacatcattcatccaagagctattgcattcttatattgatgagccttcttttcatatacctatgtcgtctagtattgaggtgtcatttactccacctacaacaccactcattgctttgtcaccacaatcattaggacattcgtttagagatgatgtggcgacacaaatgcaattctttcctacaccatttgttgaacaacagggagatgaccaagttcaagatcaaagatatggacgaggaagaggccgaggccgaggacgaggaaatggaacaacattagatggtcccttagatcaatcggagttggaaagatgtcaccaacacccacaacgaagaaggaagtctccttcatgtggcacacattgatgactcatatattttattgaacataaattgatgatacatgttgctcttttgttacttgttggtttatttgtattggtgatgcatgctaacttttattagttgtttgtttattagtgacgtatgttaatttatcgtctgctaatattgaaattgtcatataataatgttgaattttaatattttagctttgttggtattcatcgttattattttgttagttataggatatttgttggtttattagtttatatatatggacaaggtattattttttttttattcataatagtagttgatctttgatcatttagtatttgaatacgtttgattgtttagagattgaacatattaatacaaattattagttgatatatatatatatatatatatatatttctctttgttgctggtttatatgaacaaggttattgattttttgcattcatgataataattgattttgtattttgtttatcatggttgatattttattaattgttggactatttgttggttttttagcatttacatgaacaatgttattggttttttttttttgtttttttttttatttttaaaatttttaattttataatcatgatattttttttattttatattttattcattttacggtgaaatttgaaattaaagattgatatttttaattttaaaatttatataataaaattaattttaaaattaagacaaaataaaattatttattttgtaaataattatttaataaattaataacaaatttgttttttataaaatcattgtttacataaaaaatagataaatattatttatcttataaataaaaaacaatatcaaactaaattaattttattagttgtaattaattgaattaatttaaagaaaaaattgaagattaagaataattaaaattatttaatttatttattttaatattttattcattttacagtgaaattttaacttaaagattaatatttttaatcttaaaatttatataataaaattaatttaaaaattaaaacaaaacaacattatttattttgtaaataattatttaataaattaataacaaatttgtttttttaaactcatttttcacataaaattgatagtagttctttttatttattttattttttattttttaaattccaaagtgaaagaaaaaaataatagatagatattatttatcttatattaaatttagtatattatttataaataaaatttagtaaataaaattaattaattttataatatatatatttataataattgtactatagtataagtataatagggaatggaaaaatggatttttgaagtttatttttatttttctgaaagttgtctcttgaagataatttctcacgtttttgttttttgttttttttttttttttacaaaataaattaataacaattttttaaactcaattttcacataaaattgataatagtttttttatttttaaattccaaagtgaaagaaaaaaataatatataaatattatttatcttatattaaatttagtatattatttatatattaaatttattaaataaaattaattaattttataatatatatatttataataattgtattattgtatgagaataatagggaatggaaaactggatttttgaagtttttgtttttgttttagtgggaatttctctcttgttatttttttttttgttgtgtggaaattatctcttaaagattaatcttaaaatttatataataaaattaatttaaaaattaaaacaaaaaaattaagtattttataaataattatttaataaattaataacattttttttaaactcatttttcacataacttgataatagttttttttttaaattccaaactaagagaaaaaaaaaatagataaatattatttatcttatattaaatttagtatgttatttatatattaaatctagtaaataaaattaattaattttataatatatatttataataattgtattattgtataagtggaataaagaatggaaaaaatggatttttgaatttttctttttttaagtgagaatttctcacttgttatacatacatacacacacacacacacacacatatatatatatatatatatatcttcaagagacaatttctctttgtttaattttttttgtgaaaattatcccttgaagagacgatttatttctcaattttttttttgtttttctttttaaatcgtctctttgagagacaatttctcatataaaaaatgtaattttataaattgtgtattggaaaaatgattttttttaataattttttttaaaaattcataaatcatcatttgaaaagagattttttacttataatttattttctttttcctatttggacaaaactacaatagatttaaaattatttttcctaccacgataatttagtaattattttttaaaactgccatactcttataaaaaattgagaggagcatgcaaaaatacaaatgcttgcatcctagagtttaagtccaaaataatccattggtagaaaaaaaatggtaagaatagtacccatctcaaaatatttgtcaaactaatctttttgcatccatgtaagtatccacatagatttttttttctaaatgtataaaaccaccattaatgattgtggttttaaaagtttcataaatatccttaaaaccacagtctgtgactgtggttttacaattctccttaaaaccacagttagtaactgcggtttcaaaattatttttagttcatcc

SEQ ID NO: 11628 - DNA, 7228 bp, Vitis vinifera
  Intron number 2 from transcript GSVIVT01027401001 (locus G SVIVG01027401001) derived from phytozome v7.0 (chr-ID chr1 5; pos 17034897 to 17042124 reverse strand)
gactgtggagatgggaaaaataactagagatcaaacagactgcatgcataaaattaattaagctttttcattttcaaaatgattagattatacgagggatgtatatgtaagagaataaataaaagtgactggtgatgagaaaaaggcccgggttctgattctccatgtttgtgttccagatattcagatggcatgtaacctatgatggtgacccatgtcctgattcgaatatttatgtgtttgtaagagtgagttgatggtgaatgggggaagaaataaaaggtgtagtttgcatttgatttgtattagtattgagtgtatggtttgaatttgatccttttgtaagggatgagaggtagcctaagagtgcatgcagtcatttttcacacagtaataccaaatttgaaactgttttcccccccttattttttgaatttctttgtttctttactgcaaaagatatgcgctatatataattattgggagcttgcctttgttttgaggcagatttaaactctacatgaaccttcgattagccatgtaaacggcttgagccttcttgtaatattgaattcgggccaggcttgggcttcccatactttcgttcaagctttgaactagaaattaatttcttgtccatatttggctcaatcccaacaaagggttacaattaacaagaagacatccattatatgaacaagaaattaaataattgatttcattataaaaaaaatccaaatttccaccatcaaagtgtgaatatctataaattaaatattatgtaatatttcaaaagaagagagtgatggacgataataaagctttaattctttctaaattttatttctaaattcttttctttgtttttaaaattctagaaatagaatattataatctatgttcattatcaagaaaatgaatattttcaagatgattttcttcctcttcttttaacacacaattctcattttttagagattcattagtagtagttatcttaatgcattcattcaataacaattgatattcttcacaccattcctcgatgatagagacattttcatcaagatcactatcacttctatcataattattagaaacaagagatgcaatgaaaactagataatcattttgattatttttaatctcacccaaattcgatgatttacttatacttaacttaaaatcactctaagtagctttcttgattttcttatttttctggggattaacttttttctatgagataattctttcttgaaattttttactttaatttttcatttttatgaaactcataattttctttttccataaagacaactttattcgaaagtgataatttttgtttatttaatttaacaattacttcatgttgttcttttttttttattcaagggacaaagattcatacggaaattcttgtttcttaaatttttttattcaattttttttaggcaatatttctcaatcatgaaatctttttcacaagggaaaagtaaacttttttttttcttttctttaaattctatgaaaacaagatcaaagataagaatagaagaaaattttaatttataaatttttccttgttctaacaccaaacggaatgtttgtagatcttcttaatagaatacctagagagagaaaaaggggggttgaataggaacttctttctttttagctcaaatttttatttttaaaattcctctttaataattagagatgaagtggaaaaattcaattgcactaacaaaccacgatttatatggaaaaccatctacaaagcctcccaaagattttataagtgtagaaattaaatcacaaagtcaaataatgttgagttatgatccattaaatatgaagaagaggtatataattaaatttacttaacatttgttagtccctaggagttacacctaatctcatattcaacagtactatcatattccttagtggacttcttaacgtcttgagcggattcaaatctctcttgtaaaccaagaaaatgaattacaaactttttgaaagttttaggttaagcagaaagaataatgacttaacaagtttaggttcatgaactcttgagagaactctcctaatatgtatatattacagaaaacctagtgaatttgaaattcattttttatgaaaaactaatttagaaaatttaagaattttagtaagatttgaagagatttcatattttactaaaaaatcatttagaaaacttaaaactctaagaattttttttttctttttaagttaaaaaagatttagaaacacttccttccaaattgtttttattatttggatttttttttttaaattctcaatttaaaattcttttcaaattaattttattccaaattttcataagtccactttatattttttatgtcattactctcaattaactcaatcatacttgtttaatcctaagttgattatacagtagcattgaatcttaaaaagaatgtaaattataggaaaacacgtataatcctaaacaagatgaatgaaataaaattactaacttaattaaaattgcttaatacactaacacacatccctaatgcaaacattatcctctgctcattagcaaatccttcaaacctttatcaaaagtttaagagataaagagtctatgatctttgttgtggatgaaaggctttgtaaagaaagatcctaaaagatttggaaaccatgttttaaaagtgttttacaaaaaattaagagcatttttttttttaaacttaaataagttttcaaaattgcttcctaagaacataggttttgtgtaagaaaaataaagataattttgatcttttttaaaattttattatactaaaatctatctaactttctgtttttaataaaaataagagctttgctcttttttcaatataggcttaaggagcactttattccaaaaaaaaaaaacaaaaagttacttttgagattcaaacattgtacatttaattagaaagctttctcataattttatatccatcaaaatttgacttagttaagcatatgcttataacatcacgttcattgaaacttagatcaatgtgggaattacgtaaggagctcacattctagaattctatttaaatattttttttaaaattatatttgatctcaatgattattttttaacatataaaaactagggccttaggtatcatcacaagctggatcccactaaattcctagactacaaaggagccaatagaatatctccttcttctaccggccttgaaaattaagctaacagtatcaagctttaaagtggatccaaactgctgtatgaagtcttgcatttcccttggatggatattgatgatatgcattgtacttgcatggttcaaagagagtaaccagggcaatgaatgaatgtaggacatgatgggctaagtcaactcctgctaaggaattcactccatctagaccatataggaagaagaggtgagatgtttgatcacattcacatgcatgtgatccatattctcaagaggacattccgtatgaaacccaaaaaggaggccaactctccttaaacaatccagaagatcgaaacccatacgagggtgcaatctcctgaatcggatgctttttttttttgttcttatttcctctctccggctgcatatagtttcccatgtgttttgagcactagtactattggagttctagatatgttttgcattttttttgaggggtgcagaacttataaataccgagttcctgaaacttattttctgtgccaattccttgatctcttgttcaggttaagtatttgggctacttgcttcagattgattctattggattatggcaaaccagcctcccccttctcgcccatggctcatcctgggttccatgaggccagtcgccacacctccagcacctgcggcagcatcacaagctcagcctcaggctcaacctcaacctcctgtccctcgtcctatttttcgacccacatttggtcaggcatttaggcctacaacccagcctcagcagcctccgccacaaccacccactgctgctactgcagctccacctttccgggttgggaatgtttcatcggttccatctaatccgagtcagaaaaccacacctccttctgagaaaatcaaaccaacttctcctcccccatgagctctaactctgcctcctgcttacgtaaaatccactcctgagccaattgagcagaagaccatgaccatcgaaaagcccaatccaccattcaagccatccaatggtggactgcaaaaggatgtgggcgacactgtgaatccaagcagagtccttgactacgagaagattgagaagaccaaggacatggagagcaaagaccacgaaggtaatcacaagaaagcgcactctaaggataacagcatgaagatcacaacaattgcaggagacaacaagggagctataatggagctcaaccccgccagcaagaaacacgatccccaaggcaactccaacacaatggcgaccccatcaccactcttgaatatatttatgaatagcaatgttcaagccgttaacaactccattctcgtgaacgcctcttgcaccaaccacgagcctggtgtccatgtttttttctctcgtggtggtggccgtggactgcatctcaaagactatggagatgggcaaaaataaaacagcttgcatgcataaaattaattaaggatgtatatgtaagagaataaataaaagtgactggtgatgagaaaaaggcccgggttctgattctccacgtttgtgttccagatattcagatggcatgtaacctatgttggtgatccatgtcctgatttgaatatttatgtgtttgtatgagtgagttgatggtgaatgggggaagaaataaaagttgtagtttgcacttgttttgtattagtattgagtgtacggtttgaatttgatccccttgtaccgtatgctgtcagttttcacacattaatactaaatttgaagttgttttttacccctcatttttttaatttctttgtatctttacagcaagtgatatgcgctatatataattattgggtgcttgcatgcctttgttttgggccgttttgaactctacatgaaccttcaattagacatgtaaatgggaagaccaaacgtttgaacacccataagggacgtctgaatatgggcatttgaactccttgaagacgtttgaacttcctcatatcatttgattgttgtcccgaccattattaacttttttattttgcagttgaaatttctatctcattttcatgtgttagccattctataatctttattaaacataaatgcctacttatgtcaacattggtgattttgaatatgtacaagtcaagtttgataaaatcttaagttaaattgataacgataagacccacaaaagtatatagtatataattagtaagaaatgaaataaaattatcacctaaccctgatatatcaacaatatcccctttagcaatattatgacaaaataaatagttacaacaaggcctttcataactctaaaaaaaaaaaacttgactcaaaccaaaataaagctttccttatgtaatgaatttcaacttttgtaatatctgcacactcaaagaacaaactcatgagaaagtaatatgatatctcatattgaatataagagaaaattttttgtggtatataaatatgagttccttttaacttatatgaagacatattttaaaactatgaaaactcttttggattcaaagtagacaatatttatacaattaagtgtagattattataaatgctatcaaaaccaatccttgattctgagtagggatttgtttagccccataaagggtgtctattttctcctcttaacgatatgaatgcattttaaagttgtaaaggtttttttggattaaaagtagataatatctacgtaggatgtaaatagttacaagtaaaatatgacaaataataaaataattcaagaacatgatgtaattaaagaattatttttacttaataattcctcccgatcttaaaatcaaaaaattataattttaatagtaaatatattttaaaattatccatattatcataatattattataaaataatatataatgtaacttaataataaatataaatttataaaatttatattttttatcaacataaacgctattatcattaaatatgacaaattacatatatcaatttttgccaaaaaaatgtttatttttacttcttatataatcttttagagttgtttttaatatttttataattttcattaatttttatattatcgatattttaagttaaaatatctactaatattttttaatatatcctgatatattaataaagttgaattactgatgtatctattaatatctcatccaacattctactatgactctgatcacgaatttggacaacccgatcagatcctataacatccattctattattctgcatcccgacatgttttctgcaaaacacaaggaggaaagaacaaaatgacttctagaaaagaaaaaaaaaaaaaaaaaactcccaatctaatattttcccttactctacagaggatagaaatgaaataccctgaatgcctcttcgcgacatttgaaacatcatcacttttgggcacgcaaattccaaagaagcttctcattcccgcgtcatgtgttgatggctcaaaaagagtaacgagggcaatgtgtcatgatcgctgagtcaactcctacagggaattccctgcttctagactggcttaggaagcagatgtactttcatggtatggtcaatctcaagagaacattccgtacgatacccttctatctgcatatagttgtttatgcgttttgagcactagtattagaattttatgtgttctgctttttctctttttctgggtgttggacttataaataccgagttcttgaaacttattttctgtgcccattccttggtctcttgttcaggttgagcatttgggttccttaggcgacttgcttcagattaattctgttggatcatggcaaaccagcccctcccatctcgccaatggctcattctgggttccctgaggccagtagccccacccccagcgcccgaggctcagcctcaggctcaacctcaacctcaacctcctgtccctcgtcctatttttcgacctacatttggtcaagcacttaagtcttcaacccagcctcaacagctgcca

SEQ ID NO: 11629 - DNA, 7294 bp, Vitis vinifera
  Intron number 14 from transcript GSVIVT01036611001 (locus GSVIVG01036611001) derived from phytozome v7.0 (chr-ID chr 13; pos 19178821 to 19186114 reverse strand)
acaaagacttgccatctgatagtgttagtgcaaatttattatgaactcctaagatatgctttgtgtctttctttaattatggagtcgtgtttgtatatttcatatcctgtttcatcaagaaacaaagacccttggaatcacttgttgctagttctgaaaactgttgaaattggtggctgctcttcttattgaactcttagtggcaagttttcaaatgtcagcctcagaaaatctggggtgttgtgactgaaaaaatatgtaatgttgatggatctattgacatttaggataatgtataagcatttgtggaagtacaaaaaacaaggaaatttttagtaagaaaacattgctagacaactaaaaattgatgatgtggccagaaaaaaaaaaaaaagaagatatggcacagttatgaggtggaattgtttgtgaacaagcatagctgatatgctaacatgtttaataacatctttatcttatgatcaatgaatgaattttggataaagtatgtaaaagtttttgcagcacattgagagctttaataacttctttatcttatgatcaaacatggaatagcttttgtgccatgttgtagggtggggaatctacccactacatacttaggcttgcttatgggagctccttacaaaacaacaagggcttgggatgtgatggaatagagattttagataaggctcactctatggaagaggcaataccactcaatactttgattagaattacactatctagcctactaatttatttcatgtctctgtttgtcatttcgaataaggtaagcttaagattggagtagatctaaaataaattcttttggggtaaggatgcacttgcgaacaaactccatttggtaaattggtctattgcttgcctggataaaaagaatggaggcctcgacattagaaatctatccactctaaacaagactctatttggcaagtggaattagggatatgtaattgggagagtccctttggaaatgggttatgaggtacagttgtggaagacaatcagaatgggtggaaggtctttaaaagtatatctcacttcataattttcaaggagttaaattcagaaagatagatggtatagagacttgtctttggaagagtttttccctacattattctttataaccaccactaaagatacatgggaagaagaggggtgggagcaagttggggagaaaggtcggtggagtcctcgcttctcaagacagtttcgtgattaagaacttgaaggagtaacaacctttttacaaagattgcaaacaagctcattcaagcaagatgaagaagatagagggggttggaaggaatccaagtgtgacaagttctctttgaatactcctccctagcctaaggaagaagagaaccctatctcgcaaacatggtttggaatatctaggtacatgtggaggtgggattctttgcatgggaagcctcttggggagggattttgacaattgatcagctcaaagggagggagggataatgatgaatagatgctatatatgcaaagatgaagaataatcaattgatgatatgctccttctctgctccaacacaagtgttctgtgggagctaggtatttctatgtctggtatggtttgggtgatgcgctctataataagaggaactctattgagttggcatggattattcatgggaaagaaacaaaattaagctcccttttgtctattttggatgttatgaaaagaaagaaataggaggtcatttgaagatctcaaacaatcagatcaagcaattcaatcttccttgatgagtattttttagaatgatttagaatgtacacagatgatcattcattgatcatgatagactttgttgattggcttagttccaagtaagatgagggagtttttcccccctccctttttcttacttgttggtgcctattgtatacatatatgctttggcgtgccatttgcttaggcaccgtaagcttttatcaggtttttgcctatcaaaagaaaaatatttttcaaaaaataaataaaacaaaatgaacaaaatatggactattcataattatcaataaataaataaaatatggactattcataactatcaataaataaataaataaacaaacaaataaataaatatgtggacccttggtgtcaaacaaaattaaactttaataaaaggaattttaactgttctagtttgattctagaaggcactgttgggtaatttcttcttctcttctggttattctctaattatttgaacttctgtattctttatttaatttcataaaatggtcattgcttctcatttcttcaatctactttagtattcctaagcttctttttacctttggattgacccaagcaccatagacccttaattaattgctgcccataaattctagcaagaaatttgagcaactaattatatctaaactgtgtttagttcccacacatatttaaccaataaaccttaaaaactttgttgaaccatgcaaacattaaaacctgaaggttcctaaaccatgaaaggcgtaggctctagagaaaagaaaatattagggttttccttcataagaagctatggatatggttttgtttcaagaaactaaggcggaataaaaaaaaaatacattagaagtgttcagaaggttaggcgtagagagggggctaaattcccctcttggagcacttcaagggttgttttgatttttggaattgcaattcaattaaggtcaatgagttcatgatatgatccttcttagtgtctgctagattttctcgagaattcttagggagttagaggatttacttgtcttgacttatttggtttgtttgtttgtactcactttctctctctctctctctacccatctctctctctttgttcatttgagtggggaaggggggatgatgttgggcatttgactttaatgttttcaagagatcattgaaaatgtttggtggctctaaagttactacaagcatgagagaattttataaacttgtcgaaagttgtgagctagtttgatttcgaggaatgcatcttcacttggtctaataatcagcatgaccttgtaagacttttgccatctattgtttgggaatcaagattccatcactcttcaaaaggctttttccaagtcatattttgaactgttatccctttctttattcccccttattttgattgtaaacaaacaattcattaaaaatgcattcacttcattcctctggaatgaaataaaagggagttattcccttaccttagtttcctatgtttacttcacttctggaattagtaaaggtttgagttccacctcattttgcagaacccattcccccaaaatggagaatgggtttccttgagggccccaaggattggacaaaaaaatctggtttgccttcagttttccctaccaagttagtctggaattctcaagtccctttcaaaatcaagtcctttgtttggttggtggcgcacaagaaggtaaatactaacgacatgttacagttgagaagaccctacaaagcacttagtcccgacatttgtatgttgtgcatggagcagggagaaacagtagaccatctttttcttcattgctctctgacaatggggttgtggcacagattatttcagctaacaaagatagattgggtccctcctaggagcatctgtgacatgctttctaccaattttaacggttttggatcttctaagagagggattatattatggcaagctgcgtgcattgctttattatgggtggtatggcgggaaagaaatgcaaggatttttgaggataaatcaaggaattcagagaacctttgggacatgattcatttccttgcttctctttgggtttcttgttctaaggtttttaaggggattccccttaatgtgatacaccttgattggttagcggcgtgcaactccattgggttggcctaacttatagaagttgtttgtatctactttgtattttctcgtatttgtttcattgtagttttgttttcttgggtgggaggattcctcatccttctcttgtattttcccttgcattaatatatgcctttgtcgtttcctatcaaaaaaaaaaaggattggacaaaaaatgtccttgtcatgttttcataattattttaaattaatataatggtatatttaattatgttgaatttaaacaatgattgatataattagatattgaaaatatggcaggctgaagtattaaaaataataatattttagaattaaagagttattttaatattttaattgacataataacttatttgatcattaatatttttaattagaagtttttatttattaaatagtgtaattcatgagctaagtacatgctttaatttttttggttcaatgaacttttgtaaattaagaacacttatataaaaatttaattataaatatcagctttttgacatattaaataatatccaactaatgaaccttagcacatggaagctaaattaataaataatttctttatgctcattttattttatttatttaaatattaattatcatttatcaaatttagaggttgtaaagaatattaagaatattatcttctcaataattattcctaatcaataaaatataaatatgcttaatctaaattcgtatgcctaactctaatttctctcactattttcaagatgaaggtctaacattttcaagatataacattcaaataaggattattttaatatgcttaatctaaatcatattaaaatttttggtatccctttgtataaggcattatgaaaaacatatacatttcattctgtttccttacaaccaatgaataaatcaaaggaatcagtttcattttgatttttttgtttgatagtcttgttttggttttcttttattccatttccttcccattttaatttgttttctcttccattatttttcttgaaattttttaaaaaccatctaaacaaattagtaatttagtactagtcttcttatggttagtgccaacccattcttttctcgagtacctttcattttgaaaacatgtggacccacatcccaggttttggggttttgttcaatgtttggtggaaggaggcctagttgttggatcaaggttataagtttatgcaaaaactatctgatcaaaaaagtttttgcaaaaactatggtttgtcaaagctacattgaaagtgtggaaaaaagatatttttagggatataggagagaaaataactcaatagttggctccacaaaattctaaatgttgcttataagatggcatgctctttctctcagattccttgctcaactaatcaaactataaaccagttaactaagtaaggagcaaaacacttggtttcttttgttggagacttttttccttccatgaatatgtggagcttttgtggcgtgtatacattgctttttctgcttataatttgggtacatagttttaagttttgaggagcaatatacatttctactttttttatcaacaattgtacattttggtaggattgctcatccttctttgtatttaccattcaatgaaatgaatatattgtgtttctaattgaaacaaaaaattgtattgtgcaagaaggataagaatattttaaatttttgcactgcacataaatgcatggtatcttcatagaaaataagttgagaaaattatttttcatatttgagtttccaaacagagtttttattgctaaaaataaatgacatctgcttttaagaactgttttcgaaaatgttgtcaaatgggcactaagcttcatttggaacattagtggagtttagaaatatgagtcctcatgcactctctctctctctctctccctcttgcgaccaccctctctctaaattggaccatcaagaagagaaaagggtgcactcttgattaactttttcccagcactcaaatgtattacacaaggccttaaaggaaggtgaaaaagaagaaaaaaggggccagtactcttgattaaaaattgggaagaggacaggtagattatcttctataattgaaggtaaagaagtaccccataattagttcttcagtgatatctgctgaaaagtcagaaatctgaaacactttcatatggaagcatcctccacaatatctgccttttccaaaccaagctgtgacatggtaatacaaggaaacttccttaggcggctggaagaaccctagtgcccagttgaggaaattacttcaagtgttagtagtcaaattaactagacatggttgatccattccgaatttgccttatacaacatgacaattgggaagagtgcatctcaataggatgatcaaaacctgtcatccagacaaataaacaccatgatgaggaccaatctgtatgtcacggtcaatactgagaagacacctttccccactccaactagctagcggagataggtagtttattgtgtaatttctgagatacaaggaacataggttttcctatttggaatgatcaaaccattgcaagcaactggtcaagcaactctcttctcccatcctgctgacccatttggtaaattggatatgataggacaccatgagaagaaacttggaacagttacctactaaggtgatatagtccacaatgataagaaggatgtgcataaaactgcaggcaggcaactgagcagatcgttgtcacccaatattcacctgctgacctttaatcacatcatattccacacttctggcaaacaatacacttattatatggtttcttcctatggaagttactggaaaagtagtcagtccctagtcatcagtcatccagttgatctgcaacaatttcatttgggttgagttgaaattatgagttcattcttgtgtgtctttcctatgtgataagattataattgcatgctatgttacatgtgtcattgttctctcattattttgtatacttctccagcaggcctttaatgttgctggaatgcacttagagcatctatgctttgtgttccttttgatttcatttctactcacagcttgacagaacattattaatttttggtttaagaaagaaagttacaaaagcatctttactgcccctattttctacaataatgtatcactattggtactatttacatgtctgcttaagtagaatgatatgcatgcttgcagacatggctagacatatatacatctgtttttttttttttcatgtgcaattttcttcaaccatatttccttgctgatttcagaaagaagagataaaatcttgtgaagagcgtgtgaa

SEQ ID NO: 11630 - DNA, 1837 bp, Vitis vinifera
  Intron number 2 from transcript GSVIVT01013943001 (locus G SVIVG01013943001) derived from phytozome v7.0 (chr-ID chr1 6; pos 7293162 to 7294998 reverse strand)
gacggaaatcccaggtgcgattcgccaccctagcttcactcttgtctaatttatcatgaaatttctgtagggcttttagttttcaagcatgcttcttcttggttactctgtttggtttttgagaaaatctggattttttttcttggggtttataagatttagggatttttttttctccataagagcagtgattcgcaagttcttggtagttctgggtctaaaaacaaagtaccagaaaaggagaaaaaaccagaaagaggaaaaaagtttctgatgttcattctagaaaatactgaaaggttgtgatgggttcttgtggttctcattacctctgttatgatattggatcacagatcagttttcgaccctaccctttaatttctgtatactcacattatatacaagaactggtaaatgcaattaatgattgaacttaaacttgcagtactggtaataatcacttctggatgcatttcaaaattaacaagtatgcagaatggagtttctacatttttagatccaatattatagctcaccttcctcctaacctaagctctcaaatccattctcttccagagatgtgagaccccaataattattaaaaaaacaaaagtcagcccatgttgcaggtgttttggacctttggttgctcagagtgcttaggaattgattgctaagtcaattgtttggaaggcctcattcttgggcaaacacaagatacttaatattaaatttatattttggcttcctgtattatattagagaagatacatttttcaaaataaaaaatctaccaacaccattcttatatattttacagacattttggcaatagactatggattatttttgtttcttctcacataagcatacctactaatattattgcaattattatatgaactagctagtaattgaagttttcaaattcttaattgttttcttcaaaatccatttggatttaatctttgcctattgcaagttgtgtgactctctaagtgaaaacagccaacagacataaaataaaaagatgtgaaagtccatttagatgggctggaattttcatagctttcatcttgtatttaatttatattgttttgccttggtgtttttcttcctctttattgttgattttgatatgggtttcttgtattttttctgaattcgatatgggttccaaatttggtcttgaagtgatttttcttgttcctttatcttgatgttcacttgcatttatcattattgttttcactattcaatatgagacttgttaattttctccattttttcccagtgattctcaactgtatatttttttttttctccattttggttgataaaaaactaagaccatgaaaaagggtaaacactttgaagcccttatcttgctttgtagtttcgaaaagacaaagaaattgttttgtctttttcatttgttgaatgttggattcaatatttcaatttctcatagcagcaatcaaatggagaatcatatgttcttgcaattataaatcttttatattaacattagcctaagatagatcacttttatgatttctttgaatatttcctggttcattaacgcatcttctagagtgccgtaggttttgaatgacctctgctctatttaaaatgattgtgatttgtgtttcattaatttgatttctcatttcttgcaaatgggccattggttttggaccttcggttttgtattactgtgattttacaagtcctgctcttggtctagttcttgtagtgtaacaaaaaatggtttttgtctgttccctttctttgatttgcaggtgcttatagcattggagtgcttcactacaaattc

SEQ ID NO: 11631 - DNA, 12971 bp, Vitis vinifera
  Intron number 2 from transcript GSVIVT01011539001 (locus G SVIVG01011539001) derived from phytozome v7.0 (chr-ID chr2 ; pos 12804423 to 12817393)
caagtgaaaaacttgacaaatatattctacctttagtgttagagttaggtttgagtgcccaagtgagctgacccggcctaacccaaataaatgagaaaatgggggagtagtttatgagagttttaaaactacccaaaaactatcactattaaaaaaaaaatagaagttttttttttaatttatctctcacgcactctctctgagtgaaaactctctcggtgataattctctccctgaaaaaactagagagagatattttggcttctctctccctgaaaaccacaaagagaagaaatatgttttcttctctctctgggaaacagagggtcttctcttgaagttattcctagttttctccatgaaacgaaggttaaggctcttgtgctgtgagaaatgaatgattctcttattcatagtttcattcatgacttgagacaagaaatttggctagtgaaacaaccaatctggatcttgggcatttcaaaaggtaatcagaaatctttcatcattggattcagatccctaataggttgttttctagtttttttgttttttctttgtttcaaaagaagaagagcgtttttgttttctttgaaaaagaaataagcggagaaaggaatgttttctggttatggttctagaaaaacacaattcttgaatataaaaacattttttttgtttgactctattttacaataataataataataataataataataataataataataataataataataataataataataaataaataaataaataaacaaaaaatttgggataatataattttggatattgttccagataaaataaaaaaaaaaggaaaaagataagaggcacttggaaaaaaaaaaaaggtgtaaagtgaacccattaggagtcttggacaaaattcaaatggacaatcaaaaaaaaaaaaaaaaaaaggaaaaaacaagagccacaatttctggttatggttccagaaaagcccttatccaaaacaaataaagtggaatatttcttttgggattttttttgaaaaagtaatgataatacaagaagttaaatatgttttaatctacttattaacatcaaagttgaattagtgttgttggttagaacctttcttatgctcacttgagacccaagttcgagctttgatgtcttcattcttatttcaaaattagactataaaaaaaaaggtcttaaatgtgagtattcgttactcagtgaaaaaaataacaagggaaaatggatttcccatgaagaggcttgatcccttgaccataggtataagaatcttgtactctaccaactaggttagatattttattttttttgttttcataaaagactatggttattgaaaacaacatctagagttatggaagacattgtgaataatcctaatattattgttccttttagcttcaagtgaggagattagttatttttctacatgttacttttttatgctttatacatgtaatgtaaatatcttatatgcaagatatgacatgaatatttatcgtttgataagtgagaatgtcttttatgtacatggatgtcttcatttattttttatatgttattgatacatgctagttgtataatatttttttatagagtgggaggttttaggctaaaaagaaatttaagtaatttcttgcctaaaattagaaatacttgcatatattatttctaatttataataattaaaattgtacatagaagctgattaggaacatagtgaactttcgtttctattacaatttaaggttattacacattagaagatgagtaggttacctaaatggacactcgatttttttttctggaaaagctatttgcgaaaaacctaagtctgggtccagggatcaggttacttattgggaaggtacggtaaagactgtagcacccctctaagcccttaaaaaaaaggtctctactaaataaggtgaagcagacatgacaattaactaagagatcaatagataccaaaataattatagttcaaaaataagtcatgataacgaaataataaacaaagtgagagtgagagtgtaccttagtagtaggtaataaagcgctgtcatgaaaacaaggttagtgtacaatgacaagtgtaaaaaaaaaatctcatacaaaaccaaatcaaaatcaaacaaaattgagagcacaacttacttgaattattttaaaaaaaaatgttatgaatgtcgggcccccaccaaagcccaatttatttttgctataaattaattctcataaattccatcattttagaattatgaaaacttatttatttttatataaaaaaaataggaattttgaaaattaaatttgaaatttcagaagtggaattttttttttaaaaaaaataagtttggaaattttggaaatctctttgacaatggtatttcaaaaaataaaaaaataaaataaaataaatgaataaataaataaaattttgaattttggaaattgggaatttcgagaatggaattttaaaaaaattaaattaaaaaaattggaaaattgggaggattattttgaaaaatggaatttcggaaaattaaatttaaaaattggaaatttggaaaattgggattttgataatggaatttcggaaaattaaacttaaaaatgaaattttggaaaattattttgaaaatagaaatttttggaaaattggaattttggaaaattatttttgaaaatcgaaacgtgaagatcggagttttgaaaattatattttgacgcgcgagaataaaaataaaaaaattaaaaataaataaataaaaaagaaggatggtacgtagttggtgggactcatatgccaaaggtggccatgcatgaccataataaaatgtttaatgctaagaattatcaacaatgacctagtgaaatagtgaactaaaaaaaaaacattttttgccatacagctaaaaaaaacttaatgaacttaaaaaaaacctaaaatactttaatcaactaaatgaaataaattaaattaaaactaatttagaaaagtcattttaccatatgactaattaatcaagtaaaataactttaactttaatcacccaattaaactaaagattttaaagactccaacttttcattctcataagaaatttaactaaaactaaaattttaatcgctctaacttttatcaatattaaaataatatctaaaactaaaaataagcaaaattcaattctttcattactattgaaaactaaaatttttaaatctccagcgtttatttacattaaaataatatttagaaaaaaaatactaactttcctattagcattaaaaaaatagctaaagcctaagtgttaaaaatctaattttaattaaccttctacacgaattttaccttaaaaaaatcaaccattatatttatctatgtgcattttgaagaaaccatcacatattgattgcactaacttatttgatatctaaaatctaaaatactaacacacatagtcgcatattatattacttaatatctaaagcctaaaacctaaaaattaactcaaaactattatttttaacactctaacttttattaatattgaattatctaaaacaaataataaataaataaataaaaccaacttttaaattatcacctccaatcgtccaaagcaaatctatacaaaaaattaacttgaaattagtaataataattaacaataatacctaaaaaaaattattcaaaagttaacaactaaaaaaaattagcttgatttatatttatatttttatcaatcattaatatatcttatagaaattcattggatttttatgtgattttataacaaacatgccactcatacatattcctacatacattcactggaattttttatttattcaataaactcataccactaacatattttatagctagccacaatcacatatgcaatcaaatttcagccactcatacaaatagtcattaactttgtcatggtcggcttgcacaaagctccgttagtggctgcatattcagccattaaaaaaatcagcctcatttttcattaaggccatacctaaatcatgaataatttcaatagaatttcagctatcaactttcttctatgcaaacttcaaatttattaaaattcaggtatatttccattttgaattaaagcaaactttcagccataactttcagctcgtttataaatggtccttcaccaaattttcagcacatttcactatgaatttttagccatgagaaagtttctatccacaaccacaagttcaaccctgagattcagcacacctatgcagtcttatgtccttatttatccaccaaaaccttactccattgattttagaccacaaaattcacacatgctgccacttcctccattaaaactcaccaatgcggcatgaatttcatccttaaaatctccatatccaatccttgaaatttgatcagattacattatgtaaaaccttagcatacctccacctgaatttcagccgtgagctcacgcatatgcagccacaaacatagtgttgcctgaccataagaatttcctattatttataacaaaaccagactccaaattcatgtacctgcagtcaccaggattcgtctttccttcattacattttcaccataaatttttagccatttaattcttcatcaacaacaccaaatttcagccacgcaacctctttaattcggtcaagaatattacttcaacaaccatgggatcttcacatgcacacctttgaatttttcagtcacttacatttacctatgcaactatactaaatttccatccactttaaacattaaaataaaaaaaaaacacagattgttatcatgatcacaaccagtcacattaattcaatacatttatatatcaatgtgttccaatttcattgaatttcaacgtgctttcattacaatttcaacaattatccacttgaatttctagaatattcagcaaacatggccattatttcatggtgaaagatatttcaattgcaactacacagaatggtgaagattgaataaaaccattgatagacccaagtgaagatggcagctaagagggtggcctcagtcacctaaatcagttttcaagtatcagagtgaagggagttccagcctcacgggcccaaaaatgggtttagaagtagagaagttgcataaggggatagcaacaataacaaagtaaaaataaacgggccaaaagattccattaaatgtagccccattccataggttcagataagaatcaaagacatggttctcagatatttcacagtaggatgaaacaaagtcaggttgctttctgtcataattaaaaagaatagtagataggacaatagcaagaaaaccatgtcatctcaaagatcaacagaaatcaaacatgcaagatatccacattcagaccatagcaatgatacccatagatggcaagagaaaaggaagaattccatgatattgaagaataacgatgaatctgtcacgatcatacctgaatatgctcccctcctacagttgataaaatgaccagccctctttaccagaatttcttcacctccattttttagaagatcttttcattcattttttttttctctcctccaaacctctactcaagacctcttcgttttttttgttttctctcctccaaacctctactcaagacctcttcttttcctgcagactttaaaaaaaaaaacctcttcttctctccagactccccacatcgttcttaaaaacctctcctctttgccgatctcttcccttccttctcaaaatcctcaacttcttttaaaaaactttgttccccattctgtaaacactctttccaaaaaaaaaactatcctcttccccataaaactccttttacatcaccgaccctcttattcttctctcaacgtgggatgtgaagatattccaaaaaatgtcgttcattctccccatgcatctagtccacatatcaatcaagatgcaaccttccaaaaatatcctctaatctcatttccacatgctagtaagtgtcccccttttgttccttttttttttggaaaggtggcaaccctcgtcttgcatttttggtaactcccatgcaaaataaataaataaataactacaaaaaaaccttataataataattaaaaaaatgctaatcagaaacaaaaatagaaaatatcaatacatgcatatatgagaaaaacctaaggattaattcatgcaataataataataataagataactaatcacatgcaattctttgaaaataaattaaatagatgaattaataaataaaataagaaaaataaataaataccaaatgcatatgattaataatctaaatattaaactaaaacacaaaaagaaattaaattaaaaataaataaataaataaaaagaaacaaacaaccaaaatatcaaattgacacaattaaatatcgaaaattcatctcaagcaatcaaaatcaagccaaatactcacttaatctaaaaaaatcaagcaataaaaaaattaatcttagggaattaaacccaaaaaagcatctaagtgacctaggccaaaaagtgtctaagtgacctaagtgatgtagggtgattagaaatgtgtcaagtgacctaggagtgtacctaatgggccaagtgcatctaaatgggcctagggtgcaaaagtgggcctaaggtggtgcctaatgggtcattagagaattattgtaaagtatcaaacgaacacgtaatagaacatgtgctagtaggacaaaatagagggtctacacacattacattattaaattgtatgcaagatgatctcttaattaagtatgaagtttaccaaattgctcatgaaatgtggtaagctctaaaggaaaaagtatggtggacttttaactacaaagctgagagaacttctagtgaaatttagaaattacaagatgcgaccaaaccatacaatgaaacaacatcttagggagatgaaaagaatgataatagagcttaagacatccgggcatgtcttcattgatgagcaacaggttgagatggtcatcagatctctactaaagaactaggaacacatggtggtgaacatgacacataatcaaagtgccaagacctttgatgatatagttcaccatcttgaattggaagccgatcgagtgacttatggttgctaggcctaatgaacaagcttatatagttgaatccatttcatgcaaaactttcgactttaagcgtaatagaaaattctttaagaagaataagaaatctgatgatgcttaaaaaaaaggaaagattggggcactcaaaaagttcaagcatgttaagaaggataagagcaaattgaaatgctacaattatggcaacaagggtcatttcgctcgtgagtggattgaactgaaataggtatggtcttattcaaataactcatgtgcttatgtttctagctatgtaatgttaactaaatctattcctttgtggactgtaaactcagctgccacttaccatatagctagagactaaagagcatatgtaaagtttcgacgaattagttctgatcaaggatgaaaatatcggtaattacggatatatcggtatttagattttacggatatatcggagatatatcggtggatattttgacataaaatatcggtagacctaaaattgatcaaaacttataaaaatataaaataaaacttttagaaatgaaattaaagtataacagatattttaaagtttattttattaaataaattaatgtgtatatatatatatatatatatatatatataatattgtacgtgtcaataaaaaatataaatttgataagtgtatattgattattaaattatattaaatattatttgatcattatattgtgatatttgattataatatatttcgatggatattttaacacaaaatatctgtaaatctaaaattgatcaaaacttataaaaatataaaaaaaaaacttttagaaataaaattaaaaacataataggcattttaaagttattttttttgaataaattgatatatatatatatatatataatattgtacatgttaataaaaaatataaatttgataagtgtatattgattattgaattatataaaatattatttgatgataatattgtgattataatatgtttaattttaaaatctatttaatattaaaattatgatatattataaaataaatgatgataaatatataaaattttaatatattaataatattaaaaacactatgaataaaattatgatattttttactaatcaattaaatgaaaatttttcatttaattataaaatagttataattaatttgttatttaaagtgtttttttaatattttatttatatcctaagttttaatatatatttctttagtgcataatatttatcaaagggcacgtttgccctagtggaactgggcttgaattggaaaccttttgttgggagttcgaatccccccaacagtaggaaaaaaaggctcaattttgagctttgaccgttgaccgcctgtgttgaccaagcgttgaccggcgatatatccctactgtatgtcgtgtcggcacccaccgacacaccaatatttcgtcgaaatatcgcctaatttcgacgatattttcttccttggttccgatacaaaatggatctatgtaggaaaaagctctgaagttgaagtcaagggcattagaatgtgtaaattagagttacgtagagaacgtaccccacttccacatgatgttctttatgctccaaatattcgacgaaatttggtctttgtgttagtccttcttggtttaggtttcaatttgaattttcatgattcggtaatggagttgtatttgggaacaacaactatggttctagatttgttttgaatggctttatggttcttgacattgataattgtgtattgtcgaatactaatgatagatattattcgttgatgactacttctagaaatacatgtgataacatgatcatatggcatgctagacttgggcatattggacaagcaagaatgaatggactaattagagaaaatccactaggtcaattcactaaaattgatatgccaacttgtgaatattacctagttggtaaaacaacaagaaaaccattcgaaaaaaggaattagagctgaaataccattgcaatcgatccattctaacatctatagtcctatgagtgttagagcaaggcatgccgccctatatttcatcacatttatagatgattttactcattaagacatgtttatctaatttctcataagttagaagtattagattgcttcagacgctatattaacttagttgagaatcagttggataaaaagattaaaacattaagaacagatcgaggtagaaaatatcaattagaaaaatttaaagatttatgtgatgaaaagggtattagtagacaactaactattccagggactccacaaaaaaacggtgttgctaagaggaagaataaaaacgttgatagacatggttagttcaatgatggcccaagcaaatctttccatttcatattggggagatgcattgttgattgctacttatgtacttaatcgagtaccctcaaagactgttgcatctactccatataagttatggaataatcaaaagtttgatctaagcaatttgcaaccataggggttagcagcttatgttcacaatccttctcataaatatggaaaattaggtcatagaggaaggaaatatatctttataagatacaatgaacactccaaagggtatgtaggtgagcatgaagatagaacagtcactgaattagaatcatgagatgtcactttcttagaggatgatttcccatgtacgggtgagattgatagggatttacatctttatgaaatgatggatcccgacataagatccatatctgaatggaaattgatgcttgaattaagtgggagtgaactagtacttgtagcaaatacagtaaaatagtcgatgttgagaaaaagttcttgacaaattattcttcaacaatgatttgagattgaaggggaagttcatattgtcactccatatgatgatgttgagcctaaatcggttcaaaagactcttacttgtccagctaaggatgaatggagaaaaacaatggaagaggaattggagtggatgcaaaagaatcaagtctgggacttagttgatatgccttcaaattgaaaagctattgggaacaaatgggttcttaaaataaaacaaaagacaaatggatccattgaaaattataaagcttaaatagtggctaaagggtatacttaacaagagggtataaacaatgaggaaaccatctatctagtagttaggtttgcctaaactcgcctcattctagctatagtagctcgtatagatttaaagctacactaaatggatgttaacaaaactttccttaatggagagttgaatgaagaaatctatatggaacaaccagtggatttcattatccaaggctaatagcgcaaagtatgcaagttaaaatgattgatttatggccttaaacaatcatccaaacaattgaacttaagatttcattgtgcaataactttgtatgttttcacaatgattgataaggaccattgtgtttatattaagcaaaataaagataaatatatgttattatctttatacatggatgatatacttatagctagaaatgatttggagtttgtataaaccatttaaagatggttgtcatctactttttgagatgaaagatacgagagaagcattttacattcttggagtaaagatccatagtgatcgttctcacaaactagtgactcttttataagaacactatattaagaatatccttgaatgatttaatatgcaagattgtaatcccattgacactccatttgcaagaggtgaaaacctcaataaagaaatgggtccaaagactccaaaagaaaagaaaaaaaataactaatattccctatttcagtgtaattgttaggtgtctaatgtatgctgcgatatgtacaagactatatatatatatatatatatatatatatatatatatatatatatatatatatatatatatatatatatatatatatatatatatatatatctactatgttgttgggatggtgagtcattactaagaaaatcctagaatgatgcattggaaaatagtaaagagaattcttcggtatctaataggcattgtggactattccttttgttatcaaggcaaaggattgtgcttgtgggtcacatgccgtttaggttctagatgagcacaaatcaacatctagatacacaatcttgcttaataatggtgtccgattatggaaaagcaagaaacaaacttgtatagctttgtcaataatcgaagctaaattttttgttcgttcagttgtaatataagaagttgtatggttgcaaagcttggaataatcaaggatgtttttaatccaatgaaagtctaaagtgatagtcaatttgagaccatttatgtaaatgatctgaaatatcatggaataattaaacatctagataccaagaataattttaaaagagatattattgcatgaagagaaaatgatcctgaatatttacctatatgtgaaatggttgttgatccgttcacaaaatccattctaagaaacatgttttctgtacacgtaaagtcattgggattatgtaggttatgatctatgtggatcatatgtcatggatcattattgattggatataagatacttttatacatgataaaatgatatgaatatttgttattcatataattgaatatgtaattggtacttacacatataagtttgtcaataagcagaggttggctctctcacacaagcaaccaccccaatcaatatgtttatgagttgggatgagacacattatactaatgttgataaatgagtgaaaaatatacaagagatgatgagggtcgccttgattaagtgtcaagatgaggtctatagtaaatgacttcttgactgaatgtaatcgcccactattacatttgcctgtttgcactggacttgggttttagcataaaaggtttaaggagaaccatagatgcaaaacttaaacaagctattagtgtgaagctcttagttgaggttcgtatggtggtagtttgacatactctctctaagtgaagagaaaccaccacagcatgtatttcatactacatgtgtttgaatgtgactgataaggaaagtgagtgattaatccttgcatcctcactgtgtgagatccttagggcttattacaattataataacccatgttttactctttgtacttttgactatgttttgaggtgacaaattaatgttgctactttggtatgtttccaatgaaaacaaaataatttatccttataggacatattaggcaaatagttaatttgaatctaaaaggcataagctcagaaggaagacttttttgagttacattgataaagatgtgttcatggtcgaccgattatattgtttttgtagctgatataattatgaatgcatctataatgttggatggtatacaactttgagggattaagtgtatacattaaaatgtaactaaataagtctgggtacagtgagacatgattattattgttcactcataatttttttgaggttgagctactatgtatccctaataggtgcataagtttatagctcccaaattgtaggtatgctcacatagtcacatggcccatttgcctgtatgaatgaccttcaaaagtggaatagaatggacttggatgaatgatcgggctagttcagcccatcttgtgcaagtgggagatgttggagttgggtttgggtgcccaagtgggctgacctaacccgacccaaataaatgatgaatgatcttgggcttcttagaaggtaatcgaaaatcttattattcaccatttagtttacca

SEQ ID NO: 11632 - DNA, 18519 bp, Vitis vinifera
  Intron number 2 from transcript GSVIVT01007856001 (locus G SVIVG01007856001) derived from phytozome v7.0 (chr-ID chr1 7; pos 8314513 to 8333031)
gaagcaacggatcctctccagaaattaagcagaaggttctgcaactggggcaaaatctaattaaatggattgatgatgaatctttaggcaaggatgtgttgctggagaattccacctttgttaaatggtggaaaccccttcctcctgagtataaatcagaacccaaatcatctcgcattatgaaactcatccatgagaaagattgagagggtttcatgctgttatctcgaggcatttgttcaaagccaataaaccctgtaaataagctctagctttgactgctctcttgataaccgaaatgttcttgataagtccattatttactagtaagatggttttcttcctgagtgtatgcaaaatcctgtttcctatattaatacataacgatccattctcaatcgtgtagataatatcactgtgataccccgggtcttaggtcccactatgtgaaaatcaagaatgaaaatgactagataccaagaggtaatgcgcatgattttttcatacaaacaaacaagtaggttgtacttcaacacagatgaagtttgcgatttgaagttacaactatctaataataaagatgatgagaaggcatatttcttaagaaaatggccatgatagcatttagcagaggatactaatacagaagattgaaaatgggctggtaaattaacggacagatgaacgcttgatgtgcatccttggccgatcgatatgtatatgaaattaaatgctgtgacaaagacctagttagctccacaatgaaaaaagaagcccttgccatatgactacagaggccctgtcacagactcacagttcaactacaaccagttccttcctagctttcagaactttccatatttaaaaaatattaattttatattttatagttggtagttaaattcataaaaataataattatatttttctatatttaaaataataatcaataattatttaatattaataatatttaaatttataaagtgtggaatcaagaagtttctaggataatactaataaatgttggatccgcatttttcacatgcattcccactcaacgacgaaactcatatttatttaaggtgaaaaactgtattttataagaaactggaatcgctacttattattattttttaaaagggaaaataaggaaagataggtttgtaaaaactgagttagattcggaggtcaagttacctattgggaagatacagtggctaatcgtagcacctttctaagcattacaagtcaggtctctattaataaaactaagacaactatgacaattggttgatcaatttatggatacctagcaagagtcaaaatatactacgaccaaagcatgtatcaaaagataatcgaatgagtaaagaaggaaaggagtgtacctgagtaataagtcaaagtgtgcttctatggaaaacaaggttaataaataatataagtataaaatatctcatgtcaatcacaaacaaaatcaatcaatattaatcaagcaaagcaattagaggaaggagtgtcatggatgttgggcccatcaaggcccaatttatttttacatgaattaattctataaattccattatttttggaatcataaaatttatttatgcattaaaaatagagaaaatcaagaaaaactacataaaaaaaaatgtgaaatgtgcttgccggggggaaatatgacagcaatgtttataaaaatcgggattttagtgcctaaaatagtctaaagatgaacatttaaaattgggtttatttcagtcgaaaatagttttgaaaattcaatttaaaaacctgtaaattctcaccaagataggaaaaacacaccaagaggaaggaaggatgacttaagaatggtgcaccaaaggtggcaatggtggagtggggctcgtgggtaggcaggcatgtgcatttccatatcagaatccctgtgctgctgctcattctccaggagtctgtaagtcgcttcacccctattcccatgcagcagaagagtgcttcaattgtctggttttgcagctctcacccttgtgtttactccaattcaagattatccccctgcatcccaatctctctctatgctgactcaagccgagcttgcagaatcccagtcgcagaatcattccttttgagctcacaaaattaacctggtaatctcttcttcccagaactctagttttttattgtactcagtggtcttcctaagcaattcctcatagctagcatcagttcccacctttgggatgcaatctgcgctccattagagccccatcttctcccatagaactcgcccaggttaccaaattcattcctgccatagctgagtcctccattaggcagcaacaaatacaacactttaaatggattagtttccagatcaaattggaggacatacagaatgctgtcatctatgggcagcttttcgagttcaagagaattttaatggccacgtgataagggatcttagtgacagtcaacattcagctaagcagaaatctggagaggctatagtagtgatcagcattgtcgcccatccgtacattcaccttgacaaaattgtatttggaggaaacattctgaatggagaatcaaatggttgggagagaggaatcagagatgtcttcttctggggtgtcagggtttggacaagttgtgtgaagactgccaggtactgaggataccaaggctgggaacaagaactggtcacatgtacacggagatggccatgcatgtggattgcatgcacatgggaaagatggtgcaatagacttcgctaaattcaagcttcttggatagcttgcaacttcatccagataaaagatgctttctgcttcacatagatgtaacaaaattgatggggagaagagagttgaccacttcatctccattaacgtcactctcaatatcaggaggaatttcttctcttgttaacgaggaatctgatctcttcaaagactgtggtggctctgttgaagccattcttaaattgtacaatgctcagactccttcaagttggtcacggcctccaatactagattccccagccttacgatgtaccctctttgaaccagtaatctgctcagggttgccagggaaggcaagggccttagcatcgacagtttgatcatcactttgaactattgcgctgagaggcggagaattctcctggtttagggcttgttggcacccttctgtgggccaatctagactcctctcttgagccccatccattttccatcacattcatgttccttcattgcccatcaacaataaatctgtactgataaatacccgaggggagcattttcataatggtggactatttcctcatctctgcaagggttttcttatcttccaattatcccataattcctccgcagctacttccttgctatcatagctccatgtaatcatagttggaattccttgctcactgcacaccacctgaccttggccactcatttccaagtctcaaaactctgcctttctcaccctcttttactacctttgaggctttgctgcaaaagatcaaaactgtaggctacctcatgcaatggcacacaccaccctttctcagattcccttattagcttgtggagaaatttattaaatttcacatcaaaggcaagaaaattggaaggggacaatgaaccgcagatggatgagagaataatggccttgtcgttgcatgttcatgagcagcatgaactgtatccttcatttcaggaactgaggccctatgacctccagacctgaaggctcaatgaatagtcaaagatttgacttcctgtaggcttgccacatcctgaacagacctgaattttctcttcttccgggccttttctcagaaggtggttccttagctgtcttgtatgtcagaggcaaattgatgccttggattaaaagagtctgatgacagagtactaagatgctcctgattgaaacggaacactttcatagcagcatattcaaactaccacagaattgagcatcaggatgaattaagccactttacttcatcaactttttgcactttccaacagtgcaggaccattttccttgccattgctgaaagactgttgatgagcgcaatgatcattgaattactggtggattttcattgtgggaaacctaagctgattaagcaacaaacccaaactttgactagcttgaattgatagatctccaacattggatacaggatgacctcttaggagctaaagatatattaaattccacaagctttccttcagagggctgatcaagaggtgtatctaaaccttatttggcatgaccaacaagctgtcactttcacacgcatattctaagcatcttcccagaggcttaacagaaaagggatcttcaggtttacagaggagggaaaggaaaccctgctttgcattcggaaaagttttgttgctgttgacatcttcaccattctgagtacttgggactgttggtgcaggtgtggagcaaccagaaaagttgttactcagacccaatattctcaatagcactgcttaaatttgccaggctcgagaacaaaaatgagaggtagctagttcttttgatgcttccctgctaaatttgccaggctcgagaataaaaatgagaggtagctagttcttttgatgcttccctgcttgaatttggagtatttgaaccggcaacaactctatcaatcccaagggtagagatcagcttctcaattatagtgacttgtgactcccagatcagtggagatccatcttcatgaccagagattgaccatgactccacctcatgaatgatgaattcctagagcctcatctgtttgatgaaggtgaagtttgattagtaggagttttgagtactatttgatagtctctcttcatgctgtggggggttcactacaggttgatgatcatcatgagatgagctcgacatgctcactccttattggatttatactccgatactgatgtagccttcaaactccacaaataagctatacttgaaccgaagactaaggatgactaaaccatcacctccatcctaactatgctggcgttcaaatactacaaaatgatatttcaatggtcctgctttcaaaccgcaattccacacctgaagacgtttctcaccgaaccaaaggcaacggtggtattggcattattggacatacaaatgctctgcatggaccccaaaccaccatggtacttcaatgtcaaggcccatggccatttctgttgtccatgaaaataatcttgaagggctatacaacttttagcaactctttaaaggatgcaatgtgtctggaagattgaattgaagatgaatgacatttgtagaatcaacagatgaggttgcatttctagagcctctttctggaggcctttctccaagaatttttccatggctctctgttgtcatcttctgcacaataggagatgatttcacatcctacagccacttgctcctgttattatgcttctgtcacccctctcacagttttcttgcaagatacaaataactctctccactggggtcacgaatctgtggcaatgagccaaaacacagccctctcttctcaagcgtagatcagaacacaaaaccaattgtccatagcaaatcgaaatatgtgagccagaaacaggatatggattgagatactggaaatagagaagtgaacaaaacaagatacaacatacccagaacaaaataaacaagtaagcaaaacattaaatgggatcccttttcatgttgaaatcaatgggttcatagagcagtggtgcagtaggaaagttcaacacaaatatcaaaatgaggtcatcaacaaactcctactgtaagagtgagccatattcagattaaaaaatacgaaagaagagcggtacaacatcacatccataccaaaaataatagattttctctaattatctaattagacagctcacgccaacactccccctcaagttggagcctagatatctcttatgcccaacttgtcaagtgagttgtagtagttccttgcagacactgcttttgtgagtatatcagccaactggtcttttgatttaacaaatggaagctgaataatcttttcttcaaggttctgtttgatgaagtttcgatccacctcaacgtgcttagtgcgatcatgttggattggattgtgggagatagcaatggctgccttgttatcacagaacaggttcatttcatagctgagagcaacaccgatctcaactagcagctttttaagccaaagaagctcacatattcctttgaccattccccgaaattcaacttcagcactagacaatgtaattaccttttgtttcttgctcctccatgtaaccaggttgcctcccacaaaagtaaagtaccctgaagtaaatttcctatctgtgatgttccctacctagtgagcatctgtgtagccaacaacattcaaatgaccattctttgagaacataagtcctttcccaagagaggacttcaaataacgaaggatccgcattacggaatccatatggtcttcactcgggcaatgcatgaactgactcactacactcacagcataaccaatatctagtcgagtatgagataaatagatgagtttacccactaaccattgatacctctatttgtccgctggcacctggtctacatattctccaagtttatgattctggacaattagaatatcaacaggcttgcaccctagtaatcctacatctgccagcaagtctagtatatatttcctttaggaaagaaatatgtcttgtcttgaccttgctacttcaatgcctaaaaaatacttaagccctcataagtttttcatttcaaactcagttgacaattgctcttgaagcttagagatttcttctacgtcatcccctgtgatgatcatgtcgtctacatagactatgagggctgttatttttcccacttgatgttttaggaagagtgtatgatcagaattgctttgttgaaaaccatatttcctcattgtcgaactaaacctgccaaaccatgctcgaggtgattgctttagtccatacaatgcccgttgtaaactacatgcgatctttgcctctgaggtagcagtataacctggtggaagatccatgtaaatttccttttcaagatcaccatggaggaaggcatttttcacgtccagttggtgcaatggccaatctaagtttgctgcaagagataatagaactctaacagtttttagtttggctacaggtgagaaagtttcctgataatctataccatatttctgtgtacaaccctttgctaccaaccttgccttgtattgatcaatagacccatctgctttgtatttaatagagaaaatccacttgcaccccaccgtcttccttctttcaggcaatacactcaaaacccatgtgttatttttctgcaacacctccaattcctcttttatagcttgagcccatttcgaatctgataaaacttcttcaacactactcggaatttgacatgaggagagtgtatgtgcaaatgccctaagaggttcagataatctttgagtggacacataattggctattggatacttggatcgtcgttcttctatgtctggggagtatcaatttggtggcttgcctcgattgtgtctgaaaggtagaacgtaacccgtagatgtatctatagcattagtttgtaaaggtgtgatagaaaagcttacctcagggatattctcagaaggatggtcgttgggtactaaagagtgaagggattcatcagattctgcatcttccgatgattcaggtacaagttcaacttcaattcttggaggttcaaccatgtcgttgccatcattcggatgtgctagattgtcaccaacgtccagcatttcaacatccaaccaatttctttcttcaccatggatctctccctgaagaggagaattggataccagtgatgggaattttttttcagattctaggaaggtgacatccatggtgatgtaggttcttttagcaatgggatcgtagcattttttgtactccataccccaaaaatagacaccagacagcacatggatccaacttagttcattgattcttatggatgtgaacaaaaacaacacaaccaaaaattcgaggaggaatcatcaaaacattaggtaatgagacatgatcggaaagcaccttaaccagagtctgaaattgtaagactttggttggcatacggttcagtagatgcacggctgtggcaacagcatcactccagtatctattcggcacatgtgcattgatcaatagagcacgggtagtttctaagatatgtctattcttcctttcagcagtaccattctgtttggggtttgagaacatgaggttcatggagaataccatgactgttgaagtgtgtctagaattgttggttaacatactcccctccattgttagaacgaaggatcttaatttttgcagaaaattgtgtttgaaccatggtatgaaatgattggaaaacaacaaatacttcatctttgtgttttaggaggtaaattcatatcattcttgtacagtcatcaacaaaaattgcaaaccaacggtgaccagaagacgtagtaactggggaaggtccccatacatcagaatggattaaatcaaaaggaatcatacttttattcatactcaagggataagaagctctatgacttttggctaagatacaagtatcgcatttaaaatttaagtgtgatactttggaaaataaaccaggtagtaagtgcttcaaatacccaaaagatggatgcccaagtcgatggtgccataaccaaatatgtcttttcttgttactaactgtgtggtgcatgtgatttgctcttcccgaactgaagtcatcaacgtagtataatccccccctcttagtaccacgcccaattatctccttggtaagaatatcctgaagaaggtaaaaagtataatacattactaccacacaattaagatccgtagtaacttgactcacagacatcagtctatttgaaagagaaggtacaagtaatgtattagataatgaaagggaaggagataacgtcactgttcccacccctgtaatcggataagcgaccccattggcatttttaacacaactccgtctcgattgagttgcattagaaaaatcatttgaataaaatgtcatgtggtatgtagcaccagagttgagaatccagtcatcatcattattgtgagtagagatatgaagtgtcttaccagaagtaccagaagtacttggatcatgtgaagattctacttgagggatgagggataatgaaggatcacaagtaaccacgacagctctcccagtgtggtcatcattagcaaaggtttcacgtttttttcgtgcttgaaagtcgttccaccaatctggatacccatgtagtttgaagcaggtgtcacgggtatgtttggagttgccacaatgtgtacacttcatgccatcagatggtggtttggttttggattttcccctgcttagagaaagagcccctggtttcggtgttgtctggtagtgacttcccttgatccctttggatatcataactcctccaggagtggtatctgtacctgagatcatcacaatctgcctgacatcttccttacgaacaaaagcgtaggcctgttccactgtagggaatggttttaattggagcacatcactccgagttttatctagtctgtcatctagtccatcaaggaaagtataaacccgatcttcttgtagaatcgagttgtatttctgtatgtcaatagcacactccatcgggttaggacgacgaaaatcgatttcttgccacaacccttgaagatcgttgtagtatttttcaatggatccacccccctgcttcatacgagtaacacgacgccggagatcatagacttgagatgatactgtcccatcaaaataggttgtagcagcagaatcccaaacctgttttgtagttgggaagcggataaagttggcaatcaaggaagggtccattgaattgatcaaccatcccttgacaatggcattttcggttcgccatatcctgagtgaaggatcggtttttggaggttgaggggaatctccattaatatatcctaacttgtccttgccagagatatacatctcgacaacctgggaccataaggcatagttggatccttccaacttgataccgatcggagcagttgaggaatcggcaagcagaggttgaggggaagtttgggctcgagtcaagacttccgtcatttttgtcgtcagatcgttaaggatggagttggtatggggaatgagagattgtgttaggtctccggattccaccatggattctattgggtctgggttctttcctggtcaagcgacgccgtaaaatgaccacgtcggcaatggcgcaagcctgtcagttggaaaatccgtcggggtcgtctccgacgaactctggagaggatctggggtcgacttcgacttcgtctcccaagtctgtggagactacgacgaaggtgcagtttgctggaaggtttttttcttctttttttatttgagttgaataccatcatatatagatacagagcaaaggaattttaggaacctattctagcctatacacaggttgtggtagaaattgtagatcacgtttgaagtatggaatttacattaatagattttctctaattatctaattagacagctcactccaacaaaaacaatttaacaatgcctagaaaattagaaataaccagagagaatgaaaaaaaaaacagagtgataagtgaaaatgagcaaagaagctacaaaaaacgtacctgaaaatgctccctccaacgagaatagttgggcttcaagctgctttgtttcttctttcaaacctccagaaaaccacaacaaaatcaacttccctttctctcccttgctcctaatcaccctgcctagaatcctctctgctccctgttttctctctaacccccaattccgaagaatcccaccatcactccaaccaacctcttagcaattccccctgtttccactctttccatttctgtttttcccctgtctccactctcccccgacccacactctcagatactttcctgctcaagactcctacttctctctaaaaaaacgacccgcccaaaactttgccacatgtcgctctcactggctcccttttctctcttagtaagtaactcaccaaaaagacaaaaattcacgctccaccattttgcagatcctccttgcccacctagtttgccacgactccaaaatagagcttaagtccaaaataatctgttggtagaaaaaaatggtaagaatagtagtcatctcaaaatatttgtcaaagtagtattttctatccacgtaatcattcatgcgagtttttttagtgtaaaaaaccaccgttactaactgtgattttaaaagtttcagaaatatctttaaaaccacagtcacagaatgtggttttacaattttcctcgttagtaactgtggtttcataatatttttaaaccgcccctgtttcaatggtattatgattttaatattattttttaaaatattttttatcataataaccataaaaccacagttagtaactgcaattttaaaaatattctgaaaaccatgatcagaccatggttttacaattttctttagaaccacagttactaattgtggtttcacaaatatctttaatgagaactcgtgtaaccatacatcaactaaaaaaatatatgggattttagaactttgcttttttctttttagttttagtgtaaaatgggaaaaaaatattgtttattcatgcatttcgatagtactttcaaatcatttcacaattaccctcataagtgatataagattataaaactttgtttttttatttttaattttagtgtaaataggaaaaaatattgcttattcatgcattccaatactgcttttaaattgattgtgaatctatttttttttttggttaaaatctttaatttttaattaaaataaaatatatttttcattaaaaaaaatgtaattaaccttttatattaatttcataaaaaataggtacacccttaaaaaaaataggtatattcatgcttaggggaaccggaaccactatcatacttatcatggtgtatattcctttgggaccctcgataagtaatcagaggtccttgcccaccccaaaacaaactttggaatcctaggtatatcatttcttagaggaaccaagacccctatttccattatcatggttcatatattcctttggggacctttgagaatgaattggaggttgttccccaccttagaatggacattggaacccaaggaacatcctaaagataatttggtacatcatttacaaaaattggtacatctttcacaaaatttgacacatccttaaaacaatgtggtacatccaatccacgagccaccaagacctctatattattacccatggttcgtttatttctttagggatctttaggaagtaatcaaaggtcattccctactctgaaactaactttggaaccctaggtacatccttaaggaaatttggtacatcattaagaaaatttgatatatctaatccttgaactaacgagacacatatctttcttcccattgtctatttattcttttagacaaccttaggaagtgattagaggtcgttccccaatttggaacaaactttggcccccttggtacatcctttacaaaatttggtaaatattttataaaatttggtacattcttcacaaaatttggtacatccttaaaaaaaattggtacatctaatccttgaactactaggacccctatcttattacctatggtctgtttatttctttaaatatctttggaaagtaattgaaggtcgttcactactccgaaatggactttggaaccataggtacatccttgagaaaatttgatacatccattacttgaactaacaagacacctatctctctttccatggttcatttcttcctttagagactctcggaaagtgattagaggtcgttccccacctcggaactgactttggcaaccttggtacatcctttataaaatttgatacatcttttacaaaatttgatacgtccttcacaaaatttggtacatccttcaaataatttggtacatccaatccttaagttactaggacccctatcttattacccattgtccatttattcctttagggatctttggaaaatgattgaaggtcgttccctactccgaaatgaactttggaaccctaggtacatccttgaaaaaatttgatacatccaatccttgagctattggaatccctatcttattacccatagtccatttaatcctgtaggaatctttgggaagcaattggatgcaccaaaatttcttaacgatgtaccaaatttccttaaggatgtacttagggttccaaagttcgtttctgagtaaggaaaatttcttacaattttccattgtcagttttaaattattatttttttacaaatcatccttaacaaattttttttttacgactgttttaaaattatatttttttttcatattttccttgaaattttgagaaaataattttaccgacatgcattcccataaaatttttatatatttatggtaaataaaatatttatttgttttatgaattttatcacatatgaattaaagaaaattgttttttcatattatttttaaattttaaagaatattttttataaagaatatttcaaaaataatattatgataaagaatatttttaaaataatattaaaattacaataccattgaaacagggggtggtttaaaaatatttttgaaaccacagttgctaattgtggttttaaagaaaattgtaaaaccatagtaatagactgtagttttaaggatatttttgaaaattttgaaactacagtcatcaacgatggttttttacactaaaaaaaaaactcacgtggatgattacgtggatagaaaatactactttgacaaatattttgagatgggtactattcttaccattttttttctacaaacagattattttggacttaaactctccaaaacatgctcccgcaaaaagaaaatctgattttttttttctcctaaaagaaagatacccaaaaacatgctatttcccgccagctacccatgaaaggatacatctcaaaagagccctcccaaaatgggggtctataatatgttatatcatttaaaattaaggattaattgattaaaaagatgaaaacattccaaaatacccttcaacattttcattatttacatgtgtattttaaaagaaatggttacttttacaaaataaataaataaataaaaaatgatgagggcatttttatcaaaaatgagtattttttagattgaaaaaatgtgaagggttaattttccaaaatgtccctatccttaaaattaatgctcattggcttataagggacctgacctcatccattgatctaagcttatttttgccccgtatttaacacctggtttttaaaaaggttattgtggacccgatgttttcgcttgatgcattcccactcgatggtgaaactcgttttttttattttttttatttgtgaaaatttgatttttagaaaaaaaacttggagtcgccacttatttttgaaaggaaaaagcaataataaaaaagaaaaaccctaaatgtgactctgaaggaaaaaacaagtctacgaaaaaccgagtctgggttcaggggtcaggttacttattgggaaggtatagtggtgagtcgtaacacccctctaaggccgtatacgtacgacctctactaaatgaattaagggaattatggcaattaactaattaattatggataccaagaaaaataatcatacaaatgaatctgtacaagtcatggtgaaaatcaatatacacaaaaataataatgaaatctaattacaagaatacacaaaataaatgataagagaattatgtaaaataatttattgaactaaatgaaaaaaaatggtattaaaaaaaatggctttcaagaaatttcaaaaggattttattaaaaacaattttgaatgagtgatttcaatttatttatttgcaaaatattttcttcaagtgatttggttcaatttcatttgtatttaattttcaaaaaaaggttatttatacttattatatcaaatataatttattacaaaatttcaatttggcaacaaaaattactttacaaaaaaaaaaaaaaaattttacaagtttgtttgcaaaagtatttcaagttttttcatttaagaagagtgatttatacaaattatttaaaaatgcataacttcatgtgcaaaaagaattttaattaaaaagaaaaaaaatatttaaataatctatttctaaaaaaaatacttttaattccattttaattaaggaaaaagaattcatttaaaaaaacattttttggacaattttattaaaaataaatttttggggcaactttatttacaaaaaaaaatttggacaatttttattaaataaagaaatttttggacaattttattaaaaacaaattttcaaattctataaaaaaaaattcttttggatttttataaaagcatttttctgaatttttataaataaaaaaaactttcttttgttaaaaaaaaatattttaaaattattattttattaaaatatatttattgaattcttcctctcatttaaacaaaatttctagtttgttcgatattcaattctgtacacactcaataaatatatacaagcaaatatctacaagaactaataaaaataaaatcaaataaaagtggaaaataaaatatgtacccaaataaacttataacaaattcaatgtcttcctacgacttttttattatcactttctttcatgaaattttgtgttccacgtgtcataaattcatactcaactaacaagattgtagaataagtcaatgcaaaaacaaaaataactcatatgtaaatatccaaaaatatgtagggttcaaataataattcaagcccaaattcaaactttaaattagcccaataaattttaacaattaaaaatgtgtccaaattaacaaatataacccaataaaaatatctcacatatcataaaccctaacataaagttttcaaattaatagccaaaacataagctcaattaatcaaacccaataaattaggataaatctcattaggcctaaatttaatatttcataatccaaacctaatttaatatacaccacaattgtctcatgcccaaattaaatagttcaaattagtcaaactcatataaaatattaaagtcatccaacaaatctcacccacattatgggtccaaaattcatataagttaacaagcccacatcaataatatacatggccaaatgaaataatatttcaagcccaaacaaataaccaattaacaataggatcaagtccaaataaacaatatataattgatataatccaaatatctcaaattaatcaccaaatacaatataaccacaaacccaaattaaaaaattttaaattaattcaccaataataaattagctcaaatttcatattaatttaccaacaacaagttaaccaaaatttcatattaattcaacaatcctaatttcacaaacaacaattactattaaaatcaaatcaagaaaaataataataataataataataataataatggaaaatgagtgggatgggacaacaagggaatgagagaaaatgggagggggtcgccggctggtagtgactcgccggtggcgactacaaggggctcaccggcggtagtgagagattgggtatggtgagaggggagtagaaaataataataataatataataaaataaaataaaataaaaaagaaatgaaagaaaagaaaataagaagaaatcaaaagaagagtgttcggatggagagaaagggagggaaaatgtgggaaagaaaaaaaaaatgggggctagtcaccgcatttaggagttagaagaaaaaaatgaaaaaaatgaagaggggaaatggggaggatgattgagaaaaatataatataatataataataataataataacaaataaaaataaaataataaaaactaagaattaaatggtgagtggaccaaaaaacacatgtaatcgggatttaaaatttattgacaaaattgagctcaaaattaatgtaaaaataaaattagaacaaattttggggtcatagttatatttgattaaaatgattattgaaaactcaattttagaaatttaacatttcatcattttttattatctcattttaacaaaaatgttcttattcttttcatgtaaaaataactttttattttaaaacctacatgtaaacacttgaaatgataaaaaaactatttacatcaaaagcgggatactcttcaaacaaaaatacaagaaggtttaaattcacaaatatgaggattatttcaccatttttaactaattaattttttttcaaattggcaaaatgtgaagctagcacgattaacattagtaaagtatctaattgctaaagagaatggtaggatttattgacctaactcaatttaatatatgttaaaatggtgacattttctaattataggcataaaaaaattaggagaatgacaaaacttagttatttttctcaaaaatgacattaaaaaaaaaaaaaaaacaaggtcctaatatagtcttataaactacaaaagaaagaaatttgaactgttgtacaccaaggcctagccttgcatgacaaataaattggcaacaaaggattatggttttggaaaaaatgaaaagaaggaaaggataaaacatggattatttatttactaaaaaccggagtcaagaggtggaaggaaatcatgtttatgagagttatcgccatgattggacttgagcttctagcacatgaagtaaagagctgctagtggtacctattaaatacgaatatgattggtacattgtcgttatgtgggttggtgttagataatttattatttatttatatttatatttatatatattttgggtttactaagctttggacagccgttgggtgttaatctcacacttttaatattagtatggaaaatttgagctttcacacgacaaggaaaggtggcattacagccaagcaatttaattattaattagttactggagtcggagcttcctataactaatttttaaaaagaaaaagtgggaaatggcgcctccaacagtcaaaaaatgccgtttcaaccggggcttaaaaatgggcctccctccgctgtcatttccacgcaactccattgcaacgacggagtattattccatccccatagaccaccatccaagtcaactaaaagtctagatcaattacttgttttagtcaccagaaattaccaataaaccactcacggtcttgttataaaccaagctgcagcgtcaccagaaacttcaaatcacaagagagaaaatttgcatagagagaat

SEQ ID NO: 11633 - DNA, 1254 bp, Vitis vinifera
  Intron number 4 from transcript GSVIVT01020208001 (locus G SVIVG01020208001) derived from phytozome v7.0 (chr-ID chr1 ; pos 9031954 to 9033207)
gaaggtggaggattgccgtaggagccctcaatctggtaagctcttggatgttattgtaaggtgcttttttctagagaagatgcattagttattttgcttgcaaaacctagatgactgtatgtgcagagatgcataagtcattttgcctggaaaatcaggtatctagtaggcttttggtttgacaataattctattcaaagtgcattttgcagcgattatagaaagtgtttctagcatttttaattattgaatgatgaaaatttccaagtgttacaaagattagaaacacttcttagaatcactaccaaacgcactttaagagctcatttgatagtgattctacgaagcacttttaacgtttttaatacttgaaaatttttatcatttaagtgttaggaatgctagaaatgatttttttagaatcactcctaaacgcactctcagagtgcaattggtagtgattttagaaaacatttagagtgtgtttgagagtgattgtagaaaacgtttatagtatttctaacactaagaatgatacaaattttaaagtgatagaaagtttggaaacattttctaaaataactaccaaacaggttctaagagctcgtttggtagtgattctaaaaagctttctaacatttctaacatttgaaaaattttattattcaagtgttaaaaaagctaaaaacgtttcctggaatctctaccaaacacactctaaaagcccgtttggtagtgattctaagaaacgattataatatttctagcacttaaattttttttatttttgaagtgttagaaggggtagaaacatttcctaaaatcactaccaaacaaacttaatagttcaaggtttctttgaacatgattcttatttctttgtatgatctcgttttttatatctgaatatcctttctttctaccttcattcaatggtctaaatttaaccatacacttcaaaggtatagttcatattcagtaacttagcattttcaacacgagtcctttacccagccctgtgggaatataatagtttgtcattccatgatgcttggttatgagtcatggtttccaatttttggcaataatggatgaatttaccgaatgagaaagccaaaaaaaataagggtacagatggcacttgttatcttgaggtttattctatgaagtctattatctcaactggagggaactaattgttatttttcattttttgcagtattaggaggggccttcctttgggttcttctggga

SEQ ID NO: 11634 - DNA, 3789 bp, Vitis vinifera
  Intron number 5 from transcript GSVIVT01016617001 (locus G SVIVG01016617001) derived from phytozome v7.0 (chr-ID chr1 3; pos 2411466 to 2415254)
ctgaagcagcaagtattgctgaacaggtcttttccccctcctctcctctccctccctctcttcctctccccttgacttcttccttgtgcagttcctctggttgcaagcttttgaactttaaattttatgggcttttgcttgcattaacattgctggcattttagttaagttttatcacatgcttacaaaatctgcagaatcattcttcctgcaaagcaagaaattctaagtgccaaatattttattttttgcttatatatatatatatgtattcatgtgtgtgtgtttgtatttgtatgcatgcatatgtgtacttgtatgaatgtatgtatatgtatgaatatgtgtatcttaatatatatatatatatatatatatatgcatgcatgtaagtatgtgtgtatgcatttgattttttttttttgtgtgtgtgagagagagagagagaaagagagagagaggggtcttattatgagtgtttttgtggctgttccttttgctttagttagatccaaaattcagggacttgggtctttatcattcagtgcaatatgtgtataaatatgttgtgacatttggcttaatctttgtgggtgtttttattttttgggtaccattgcagccttacttgaggcgttggttgtattccttctcaactatttagcatgaagatgcaggacgtggacccaacatgataaagacatgctgatagagatctcaccatcatttttgctcataggcgggcaaaacgactttgagaccatgactcagagctgaatagatacaccaacttctatataactcctaactttttttttcttaaatatatttcaagagatactacttcagtgaacttctgaaattgctaggataccagtatgagaagctgccgaccaacccttgaaattatataagactgaatccatagggtcagtctctcaagttttgagatttcttaactaaaataataaaatcacctgctcaacttgcatcttaatctagtccatcataaattgttcgtatcacactttttccaccaggtggtggtaacgtttctaattttcatttgtaggtcttaatctagatccatgcttcatttttgaaccagaccactggtgaccatctccgtattcttttgcttacaagcactcactcccaaatcaccattgtggactggatgatgttgttgatcctttgccatttgccagactcctctctctatcctgaaatagttcctcacttttccctgtctcttggttctcttctttcttaaaaccctgtcaatgacattaacgaccctggtcaagatgtacattctatttactgttgatggacatacttcttggtaaacacaatataacctattttcttttctgatcgagggtattgtacatagtagcttcaaatctttcttgtttcctttagttccttttttccttgtgtacattcaaaatttccacatggatggttgctaagaaccctggatttctttgttcccaaaccctagattgtataggtacatgtgaatctaccctaagcttttctaaaaactattctagtggaaacaatgacaataaaaaccatttagaataataaactagagaaaataataatcatacctagatctggaggttctagatcaattccttgtagtgaagaacgtgcctgaatagtctgaaagtcttgcacacctaagatcttccgtctgttgcctcaaaccacgatcttggcactccaaagtgtgggctttggaagggtgaatagcttggctctctctctcaatttctctgaaggtggaagatggctgtcaaaaaaagcccttgaaaccctaacccttaagggagtatttatagggtttccctactgggcttaagcgatttgaacccaccaaggctttttgaatctccttctgaggtggtatttctatcacttgactttaagcaggttcagaagcagccctatgcgtttgacaaaattgaaacatcccaaggaaagagatgggttgttttgaacgtgactatttccatgacgcaactctaacatgcttccatcataatcaagaaagatttctcaaagatgtcttgggacccttaaaaaaataaagaaaagctccttgatgtttttctgacttgaagtctacctcaaataaaattttttaataccttcatcaatctacagtgcatgctattgtttgtcctcatttcctgccccttcgccacaattcctgttggcaccactccagtaaatgatgtgcacttggccttaacatggatctaaaagcttaatgtcacaagatgcttcaaatgaccctccccatgggcttatataggaggagggaagtttctggagactcttggagccatctacactaagccattggtgggaagagtgtgaaaggttctagaaatgcctagtgatgtccacacatctctacactatggtggaaggcatgagaggagtccaaggctttctagagacttctaggaatctcttgtatattcttgtacatagggttgtacatagaatagggtgggatgttctagaatattcttgatttgtaaggaaccctccaaggttccagagagttccattggtgcctataaataggtgagggcctcatttggccaaggcaccacccaaatcacttcctaaccaagcgagtcctcaaagcacttgtaaaagcttccttgagtaataagaacttttattctttaagagttgcctactacgccttctacaacttctgagtcgcgagtgtcttagcctagcaagctaagcattgggagtaaggctgacttagcaagatcaaacgtcttgacttgtctaagtgccgcacgagcttaggagacgactaagtccctgacattaagctgttataatttatgcctacaatgtatatcatgcttcatgcttcaacatccctcatgtgcaagcccacacctgccatgggaggcacaaattgcattagcagcaaacaaatcacataccttgttgagtaatcaattttcctaaaagcttaagttgttaggatttgggcccacaatgtatgtcatgctccaacagttcttttatgtgagaaagcttaagttctttccatctaccacattgttgtgtgtctttgtattgtagtcctgcctttaaatcttgattctgtcataaatttccccatatttcaaacaccagctttctagctagtcattttgaatggaacgtctgtaatagctctatgttccacatgcatctagttttggttgaatggttatttttgaattcagtacaataaattgtggttgtgtttcgaatgagtcaagctgggtcaagtatgttgtttaacatcatcttggttaatgagtattatcaactgaccattctcaagtgcaggggtgtattttatgtgtgcgcttaacatccatctactttgtttactaacttaagtttctaattactaaatttctttgggaaagaaatcatatactgatggtgatgctgctgcaaagtggtcaagctgagatggaagtgaacgtttttcacaagatttttttagtgacctttgaaagcaaaccttctcttccttgtttgaactgtgtgttatgaacattgagcatctcttggttgaaaatgttaacatattgcttctctgtgcttgcttttatgaaatgataggtggaacttttaaaaatttgaccgttcgagaaaaaaaaaaacttttaaagaataggaatctgatccaatgccggtaaacttatgtatgtagcaatttcattaattttgcaggcagtctcttatatt

SEQ ID NO: 11635 - DNA, 7268 bp, Vitis vinifera
  Intron number 1 from transcript GSVIVT01011689001 (locus G SVIVG01011689001) derived from phytozome v7.0 (chr-ID chr1 ; pos 5110779 to 5118046 reverse strand)
tacgaactcagcactattacaaatttcctttcacagtgttttaaaaaaaaatacttttaacttaaaaattgtatttgaaaaaggataaaatgtttaacaaaatttagtaaatattttaaaaactttttaaaaattatttatagtattttttgaaagatgattcattttaagacattttaaaaaaaaaaaaaaaaacaaaacttgtaattaggggtggatcctgatgtttccaggtcaaccaacaacttaaaggacttggtggctcacattttagttgccatggcttttattttcattgatgttgatcaaattatcttcctgtcaattggtgagtcccaagtggcacatagagtaacccacggggcacgcaaactctgatgattgattaggatgatcccttttctcagcaagtatgcatgttcttggcaaagttctcaggtatgggagaagttggaaatgtattttgatgttaacatgcagacatattgtttaatatgactaatcatataagaattatgtacttattatagattttcattatgatatgggggagtcatgaatattagtgttctattttataatttgtctgaaagagttagaaataaatttttttgatatgtttattctcttttaacttttcctatccaatttaaaaataaaaaataaaaaaagggtaatgggtaaataaagttgaatatgatattattcttcttttttctatataatccaatattaatataaaaaatcttcaatatattctttttttaaattacatgtgttttttttatatattttttaaacttctctaaattttttcataaaccatataaattttaaatcaaattatacttgatatataaaatttattagttttaaaaaataatttgtaattaaaaataaatttaattagtattagaaagttgtggaatttaataacattagaaaatcataaatcaaaatttattctaaatcatttgactaattttttctttacatatatcatatttttacaaattttttaccggacaaataaattctaaataacacttaatgctattgtttcttttctacataaaactatatttggacatgtattttttaggtgcgttccattcgatgacatgactcactttttatccaggaaaaattgatttttataaaaaaaatttgtagttaccacttatttttattaattttttttaaaaggaaaataaaataagaaagaaagttctaagtatgacttttaaaaagaaaaaataggtttataaaaaccgagtttggatcagggtcagagatcgaaagtatgatgatgagttatagcatccttctaaatcaaatctttactaatcaagttaagataaatattacaattgatttgctaatttttggatactgagtaataagaatgatgataataacctccctcacactccttcaaattgtttggtttccaagaaaatccctcttactttgattttcaaattaatttttctattgatttttttgaaaaatatgttgattcgtttcttccaattatctcttgtgttcttgttgatttgactttgagtgaaaactttcttctaacgtatattcaagaaaaggtcaagattgaacttggtgagaactctaagtatgtctcaaaagaaggtgtgaaattgaaattaaaaggtgttaatcaagtagttcatgaaggatatgtatacttgagttggaaaaaactctgcactcacttgggttttttattagtggatgcttttaattgctggtaggattatgatttatcatcttttcatggattttctacgttaaattttgttgtcattactttattttctttatatattttttagttaacttcgttgcgtttaatttggattaagaaagttataggagaattttaaacttaaatttgcctaatcatttattgaaatagtctaaaataatttttagcttgatttagaaagtaaagaatatttaggtttatgaattgtgtaattgtaagttaatataatttttaattgtggagtgttactatatttatatgtgaattgcattgatatacttgttataagagtgtttgtgtctctattcttgcaggtgatttatattggttgagaattaatagagaaaaattgaaaacaaaacaaaatctaaagagggaaaatcattgttaaggaactttttcaaatggttaaaaacacttatcatcctacattcaatccagagctaagattgacgaggattacattgtcgaagtagattaaattgaggcgatacattcatcatggcaaccctcggagagggaaaatggtgattgggaggaaggaggttggtattgtagaagaagcaaatgaggttgtccaaatatatttaggagacatgggtaattaatataaaaatatatttgagatttataaaaaggaaattttttttattacttaaagttatttttaatttttaaattcataatactaagttattttattaaatgcaattaattcatttagattatttataatctttcatcaattaattaattaatagataatttcccccccttttttttttagcactttttcaatttgaaataggccatcaagattacaagtatatacatagaaaataaaatggtaagtacttattactgtggaagttattaattatgatatatagtgatctttcatagttattgagagcatacatttttccatatttatgtgagccgaatggaaatttaagtacatattttttgtgtaagaaaattagactttttaaaggtaccaagaaattcaagggtctccaacgggcgggtcgagccgtaaataggaggcttgcggcccagctcgggtcgggccatgctaaaatgctaggcccgcggcccggcctatgagcccgcgggccgggccgggccgggctttttgaattaagccaaaatggctttcaaaaaagccaagggaagggagagggggggggcccctcatgtttaaactttaagcttctaaccagttaaactacattctttttatgtttattaattgagttagttatatatatataaaaataaagtatattatttaaaaaaaaaaaattaaaggctccagcccatgtgaccattggagctaagcctccaacggtcacatgaccaattattttaaattttgaattttttttaacctttctataaatacattttcttcattttcattttttcatcaaattctctctatttctctcacattctacaatatttcaaattcttttatttttccttcaaattatacaatattgttggtggtgcaaaacaaacattggtggctccaagagttcaaatttgctaggaatttctgcatcgattctctaattgagtaacatacttcacccctactactttatttttttgttacattttttttttatatttattactttattatttttggcataatattttatcaataattataatatgacaagtgcttcttcatctagttcatgtgatgaaatatcatcaaacaaaaaatttacttcaaatatatggaattttttttgatagaatagaaataattttagaaaataataaaaaagaaataaaagcaaaatgtaaaatttgtaataaatttcttactagtggctcaaatgtagacacaagtcatttaaaaagatatcatgaaaattgtaaaactaaaaataatgtatatattagaaattatatgcaattaggtaaaaatgaaagtgaaaatttaaaaacattttcttatgatgaatctaactgttgtgaataaatgattgattatataataagagcagaacaacctttcaacatgatgaaaactcaagattttgcaggaacaattcaacgaggtattaatcctcaatttaaaggttggtctggaaatacagttaaaagagatattatgaaaaaattttatacacaaaaagaaatttttaaatttttttttgcaaattttgaaggaaatatttgtttaacatctgatatttggacatctttaactcacactggttttttatgtataactgctcactacattgataatgaatggaaataaaaataataatttcatttagattaataaatgctccacatagtggaaaaaatatagcatctttaataaatgatgaaattatagatttaggcattcgtgataaaatattgacaataacattagataatgttgctaaaaatgatgcaacaatacatagactaaaacgatattggcaagtaaaagaagatcatgctaaaatatttcatgtgcgttgttgtgcacatattttaaatttaattgtaaatgatggattaaaaaatgttgatagtacattggaaaaaattagaggcattgcatatagtattaatagttctcaagcaaaacatgaattattttttgattgttgcaaaatgttaaatatgaaaagaaaaaatataaatttggatatggccattagatggaattccacgtataaacttttacaaaatattacaaaatatagaaaagtagtcgaatgatatgaaatacaattaattaacaatgattgtgaagcagatatttatgcattaaatgattatgattggcatattgcggattttttaagagatctttttgaaatttttgatacttcaacaaacattttttgtggtgtatattatccaacttcaaatcgagttattatgcaaataactaatatttttattgtacttcaaaaatatttaagttttgaaatatttaatgatacaatatttgcaatgatagaaaaatttagaaaatattggggagaaatacctttaattttttatattgctttaattgtggaccctagattgaaatttgaagctttggatgaatgattaacaattatttattttaatgaccaaataaaaattgaagaaattaaaaatgaaataaattcattattatataatttatataactattataaaaaaaaatatggtaatgatattaatactattaaattaccacctacatttacaaactcctcatctttttataaaggagctctagaaatgttgaaaagtcgaaaaaagacaacaaatagttctccaaataatacatctgatttagataaatatcttaatactgatataatttcatttgaagatcaagaagattttgatattttaatatgatgaaaatcacatcaacacaaatatcttgtactttctataattgctcatgatgtactaacagttactgtgagtacagttgcatcagaagctacttttagtgcaggtgaaagagtagttagtaaaaaacgatgcaacttagcgccagatgttattgaagcagggatatgtatgaaagattgggaaatagcaaataaaaggatgtacgattccattcaagaaacagagatgcttgtcaatatggaatctttaaaattatcaagattttcatggatgcatgatagtttgccatcatcgccagaaaataatgactaaatgtatattatatttttatttttattttttgtggttgaaaaatacagatgattgaaaaataaataggtgccaacctagtggggatgtatttattttgtagtgatataaacttttcccatattttcaaatgtaattatacattcaatgaataaaattttgaaatgaatattttttttaatactttttatttttgtagtttttttttaagggacgggcctatgggtcgggcctaaaattaggcccgcggcccgacgggcttgggccgggcctaaagtgggccgcgggctttttggagacccttgccaagaatacaaaaaaatgtatgtatatcagtatatatgacgaagtttattttaagcatcaacatttccaaacttatagccttcaatgatgcatttaggaagagccatagtatacgtctttaaatcctctataaaatttcaatgttaaccaaattctttatcgagtgccaacatttgtacatattaaactaaataataatgtttttttttttttgaaggattaaggaaaaaagcctcatggtatgttttctgttttttttagtgtccctttatgaaattgatactaccagggaaggaccctggaccctggaccctggaccccctaaaaactaagcacaaaagggggaagactctaaatagttcttgtagaagggccatacggctcaatacaggaggttattagaacttcccccctaacaaccccctggtggtaacgttgaactagaaactctacctttgtaatatgaaggggggattagataggtgtttagggagctcttcagaaaatgttttggactccttaattaaatacggcttatttgtagaaaggtcttgttcgattcctttcgtaaggaaggaattgtagtctccctgtattagaattaatgcttttgttcttttgttttagcactactgataattacatggaacataaatttatataatttatcatatttaggaagggttgtagttgatgtatacactaatattctattctacaacaagatctatatatgatataggcattgctaacaggaatatatgaagttttaagaaacatgattctttttaatacgttgtgttaatttcagaatcaataaaaaagagattaaagtcatgttaattccaaaaaaaccaaagaaaaatgtgaattaaggaaagaagataaagagaaaaaaaaagaaaggaaaataaaaatatattcaaagtcataaaattattttcatatgtttttttaattttttttattatataaagtttaaataattttaagatgtataaaattttaactaactttaattatatttaattttatttatatatatatttttataataaaactaaataagagaaaattatttttctttaacacttattttcttagattttttggaacccaacatagcttaaggatacctaaagaagagaaaacagaaaatgccaaattaaataggtaaaatgggatgtttaccagctactttcagcaaaatacaccgctgaagaaagtgcatgagactagtaagccgaaaacttcataaagttgagaaccgtatctaatttatccacgcaataagactaacaagaagggacacatgcccaattatcagtgatctacgtatgactaccatgcaaaaattattgtacatcccctcatatgcaagagtacatagaggggaaggggacaagaaaccgtagaagggatctaaagaagaagaaattaaaacaaaagctgacgagggcccaactctttggtggtgccactgccatcacca

SEQ ID NO: 11636 - DNA, 6808 bp, Vitis vinifera
  Intron number 1 from transcript GSVIVT01038716001 (locus G SVIVG01038716001) derived from phytozome v7.0 (chr-ID chr1 6; pos 20654188 to 20660995 reverse strand)
gttacccaccagcgagaatataccctcaaagcgaggttaggcttgtcggtaattcatttttctatcaaaaaaaaaaaaaaaaagaagtttctgaaaaataaaattaattagatgagaagtataattactgtttagtattttcttaaatattgttgtacccaaaacgatgcgttttaggccgggccgtgttttggttatgggcctgaatcttcaggctttcagctcaatatccctcaatttctcttttaacatttatttatttttcaattagaggtgaaagtgaatataaatttgttgtcttcttcgctaaatctgactttactttcccaccatccgattttagtttccctttcctttcttaaatcagaattaaatttaatcttaagatactattgtcatattaagttggaaacgaaatttattgttgaagaagttgtaaatcgttggttatataatgcagaattaaagggaagaatatcagaaaatcagtaagaatataatgcagaattaaagggaggaataacaaaaaaatcaataagaaataagtggaattttgttttttgaataaatatttaaaaaaaataataaatctatcatgtagagacgtgggagagacagaaagagtaagggacaagaaaacatgaaaatgcaataaaagaacattttcttagaaaacactatcaaaagccagacacaaaacattcaacaatatggaggaagaaaggagagccatatagtgaaagggaaagtaatgaaaatgtcacaactttctagtaagagtgagttttgaaggaagatggggggcaaaattcattttttatttatttatttgaaatgaaaagaaatgaagtgagtgagtactgaaggaagaggaagaagagggggtcaaattcatttatttatttgagaagaaaagaaatgaagtggggatagaaagagattagggggggcatttagcatttctctttattatggatgcattgtttgatgctgcaatcaatgcaaagcatatggatccataaaagaagcaaatgtcatccaaaacaagcatgcattgatcaaatcaagattggcatgaaatcacgagttgtatttcaacttggttgaccctaaatatgtagccccttgcttcccatgacatgatgacatgatgacattatgagtaatattttataaaattaagggtatttatgtattgtgttttgtcggaaaatatgtttggatagtttgattttgaaactgacattatattccgactgtattattggataatactatttttcgacaagacacaatgcataaatgctcttaattttataaaatttatgagtatgccattgtgtcgattagataattatgagttaatgcaaagagagtttgttaggaatgctagaatcacatgtttctagcatggaaggctttttaaaggataaggaatgtataattatgagttaatgtaaagagagtttgttaggaatgctagaatcacatgtttctagcatggaaggctttttaaagggtaaggaatgtggttcggttttgattttctataactaataagccaaatcaaacttatatttctaaacctaattacttgacataccaattatggtttcaaattacgaaggacttagctttgtgatggttgtggcattgtggggatagaaccctataggatacttttgctatgtggaacaatttaaaagtaaagttaattgtattagattttgggtattggcatttcaaatgtgttgttaagagtagatggttggattctaaaatagaaatcaatttggtatttggctgataatgcacatgttcaaattatttgacaagcttgagtttgggacaaccaaaaggagttgaacctgaggccaattgaacttgggttatgccttagatatatttgaatcgagcatatgttgggccttgatctaagtataatcatgcaaaatactaagtaattaatttggcttgacatgtttgtgtgcttagctggaactgtgtagactagaatatggttctcatactattgatgttttggtgtcactagtttcaaggataaacctgactctatctattcattccactagaaaatgatacaagttaatgttgttatgttaatggatgctaaatgcaatttccattggtttgatgatttgatctagaagttttgtactaaaatcttaaaggttggaatgcaaaaatacttgtttttatcaattttgaactacttgtttaacattgatatgtagttgttgatgagtttggcttctatctagtgaatgccattactgtccatgcatcttcttctcatgaccagaaaagggattaggacttgtaattcaatggattcaaattgattgaagactgcaaatttggttggtacaagtttgatttattagatacatgcatgtattcactacaattagtttcgttgctttcattgatatagtggcatgtatgtaataatttataaaattaagggtatttatgcattgtgctttgttagagagcttggtccgatgatataacattatacatgttgtattggatcatggaattctcaagacaaaatgcaatacataaatgctcttaattttataaataattataaaatttgccattgtgtctattaaataagtatgacatacttgtaaaaattgcaagtatgtcatgttatgaaatgtacttgcaacaataatttgaaaatagaataataaataaagcaatgtggtaaaagtacttgtatggtaaaaatccttcatattatgagggaaacctttatggggtaagactgaaaacaatttttagtaagaacacaaaataattacaacctctttcttaattaggaggaggaaatattttgtgaaaagaggaaaaagataaaagcttataaaagaatggaagctttgagatgcttagagtaggaggtgaaaatatattatatatagtctaaggaaactcccttctgttgttccctaaccaatgtgggatgacgtcaaacttaacattctcccatttgaagttatttttctatatcttgctttatcacttgttgcttatgttactatcaatccataagagtatctgcatcaactggatttgtcaatattaattggttttgtcaaagcatttgctagatgtcttttgtatgaatctttggcatgttcatagttcctttttctacacttgaacaaaatgatactgacctcctatgtgtcctagaatgaaagactagattcctagcaaggtgcaaggtactttgattgtcacataataatgaaattctcttgtttgtgcccaagcttctctaataaccttttgatccagatagctgtcttgcaagcctgtgtaattgctatatactctacttctattgtagataaaaccacaacagttgggagttttgaaacctagctcatagctcctcttgtaagtgtgaacacaacttgtagtagacttcttcttattgggattatttgcaaagtctgaatcaatatatcctttgacgctgaattttgatcctccaaaatataatgcagcatttgaggtccctttgatgtatctaagtatcctcttaactatattctaatgttctctccttggatttgccatgaattgacttatcgctcccattgcttggtcttgtacaaatcattgttaatatttaagtttcccattgctgatgcatacaatgttcgagatagttccatcctttttgcttcattacaaggactctctcttaaggataatttgtaattcacaagaagtggaatagaaattgacttacaacgatgcatgttgaagtgacataaaattttcttcaaatagtttttcctatgaaagccagatcttcctgctttgtctaacttagtgaatgtgcattcctagaatcttgtttgctggtcctaaatccttcatctccaacatcctaaccaattgtgccttcaattatgagattcaatctcttgtaccaaccaagtgtgcaatgagggaacataggatgagggaaggtaatcactggaaaatatgtgctaagatggtaaaatggagggtctacaccatgttgttattgagtcaattaaccaaacttcaacaaatcttcttttgccttttgaaacggttgttgcttcgctatacaatattgtgcttttgaagtccttgctacacaagttggagtaattgatgacatagattctttccctttcatgtttctctttcactttcattgtagtgccaacactccttttccacatgcccttgcttttcatagtgattgtatttaactttcgtcttatcttgggactttggcttattctgcttgtgactttcactagaaccatgttctcttgatcttcctctggcaataattagagcgttagtttgctgagaaggtgatattttgttttccttgtttttgcgcctaatttcttcctcaaatgtagtagctacaacatcattaaagattagcattgtctcccaagcaccattgacaacgtttatgatgagatgatcatatgaatcaagtagactttggagtagaagttcaacacattccttctcttctatgttatgttccatagctgaaaatttagagaatagagtctttagggtgttgatgtgttcaatcatcagggtagaatttgatccaaagagtgtagagtcttctcttcaagaagattttgttgtgtaacgacttaaacttcatataattttgtcaaagaatcttaaattttgtttgccttttataatattaagatacttgatggtatatcatttactactaaatgcaagcttgaaacatctccattcatttgcttcccaccttttgtcttcaaccttttttggtctttcatgcttctaagcaattttccttaaggtgattttcattttcattttccacaacccaaaattgctgccattgaacttttctatttcaaattttgttgctatttgtttcacttttacaatgaacagtaacccaaaatagtagtatgtgctgatgtgttaagtacacaaggaaagttcctaggaaagtggtgaggtcacaatagtcttacttaaaacccgctttccttaggctcttatcgcccttttgatagaattttcctagatagtacttaccaaacatgtagccattcacagtttagccttagctctgataccatttttatgaaatgtgcctgtaacaataatttgaaaatagaataataaaaggtaatagaacaataaatttgcaaagttctttctcaaaaaatgtggggtcagtttcataaaatgttttctcaaaactttaggccaaagtcatatgattataatgattatattgacgcttggtactatatcttttcctttcgcccttttgattactctgttcacatacttggaaatgtaagcttcaaataataatattgactatcctttcccagaagtcaatatgtttcaaaaaggacaagcttggaaaacgtcaaacaaaacaaatggctgaccaaacggtaactaagggctgatcaacgctaatagtttggatttaaaatagataaacataaaataaaatgacaaattcaatttgaaaactaactaacatggttctaataccaataatgaaaggatcattggatggtaagaaaataaaagaaagaagaacacttcaatttgaatatcgataagaactttgaagaaatctcccagtttattctggaggagtcacaatggtctcgcttaaagctcagataactttgatagagcttctagaaagtttagacattcaaagaggttcttttgatgcagtgtgtaaaacttaaagattagttgaatttgaatttgaaaatgtcattcaaataataaaataattacaaaaagactttgaaagataaacttataatatttgaagagaacttttagagctttgagctttctcaattacaagactttctcttagaaggatatcttactttttctctcttaaatcactcctgaaaatttttcgatgtcttataatgagaattgagggccttatataggctttgaggatgcatttgaaatcctttgaagtccgtggtttgaagagctttggaatccactaaaagtaatttgttcttttgtgtaggtttctttcaaatttgaaaactggtttgaagcccaccgatttgaaccatagttttgaagagtggtattgatgactcaccatcagctttcaccatcagctttcaccatcaacccacctgaatttgaaaatgttggagtccgcaacaggaaatcaagaacaatcccttgttatgcttcaaataataatattgactacccttgttgagggctcgcgttaccgagaccactgcaactgcttgatggatgcgcctcctcaactgaagataatatttcctttctttgacctgcaaaagatgtccggacagggggtctagacacaccctttgatggttttgttagttttgctttctaacattttgatgttctctcttgggcccttctccttaggaatgcttaccttttttgactgtgtgagagccttttatagtgccaggagctttgtcccctttaatggtgggaaaactttttggcttgtcatgatggtgcttagatggtggcaaagccatcattatcctacaggtgactgtcagagattgtgggagggatgatttgccgccatccttgtctttttgctctgtaggttgcagggcaggtggtggcaggtcgcctgaagtgacccaggaaggtcccgtcgagcatgcttttggtaaaatgaataatgattgactgcgagacgcggtcaagactcttgtttgag
